United States Patent Application Publication US 2014/0057251 A1 - sequence listing, part 143

SEQ ID NO: 271995 - DNA, 644 bp, Cannabis indica
catttcacaaactgcgctggcaaagaggttaaagttttaccagcgtacatttgcaatagctaaaatctaacttttacgagcacatttatgtgctgggaaaagttatctttgccagcgcttttcattttatgctgacaaaagttctaatcccaacattgatttgccaacctccttttgtcaacacagcacaagtaaattctattttaccagcgcaatactaacttttgccagcacgaaaatgtactggcaaaagtgacatttcttgtagtggaagtgtccaagcttccctcatggccttatctaaccagtcgggtttaaggactttctgggtaaagatcttaacaactaggtagtaagattcagaagagagattaggccccggagaaaccccatcaaagtcatgaaccaaaacttcctcgtcaatgagagctaaatgatgagaaagactttggctagaactcgccataaaaacaagagaaaaactttgaaaaacacacaaagaagagcaaataacaaagaaaataggggaagagagagctaccaaactaggaaaataatacacatatatatagaaaaaaaaacagggtaccttcgtgaggagatcttttacgtactataagaagatacaaagtccatcacactat

SEQ ID NO: 271996 - DNA, 792 bp, Cannabis indica
tagtgcttaatagcaatgctctttttggattccatgatctgaaaacataaaaaacataaaaatggtgttttcattttttagcctaaaactcaaaatagtattcaaattttgtttttgaaaacactcaaccaaccaagaattcttaagtgaacccccaccattttaatattacaaaaacataaaacaattttcaaatcctaaactaatgtagacaaaatggaggaatctattttttttttttttttggattaactaaaaatggaggaatcattactaaaaattttattctttttaacatagtttatctcttagctaattattattattattgtaattttacaacacagatttcaaaccacataacattgaaatagatcaaaaccaaatcgcaacaacataagcaaataaataagtaatcaaaccagaaaaattaattagataaaataatgaaagaaaaaatatagtaaaagaacacagaatttttatagaagttcggccaaattaaaggacctacttcctattactcccttgagatttttctctattaatgtgatgaattacaaacttgagttgttaagtgcaccctaaaaaaccaattacagatgaaatttctaaaactcagctcgagtttcgactccaaaaacactgctcttggtttagttttcccaacttctcttcactctggctttctctctttctttatctctctcccacttacaagcttgagttgttaagtgcaccctaaaaaataattacaggtgaaattcctaaaactcagctcgagtttgactt

SEQ ID NO: 271997 - DNA, 2340 bp, Cannabis indica
ctcaagaatcagatgtctggattaaagtaatgtcaaaccaacgatcagtttcgatgaaggcacttcagtaaacttaaagccaaaaacctctctgtttgctctgaactcacttagcaaagaaggatagtgaaaataagtttgtgtacaaatgcttgttggtatttataggcatgaaacgaaaaagaggtaatcatttcaaaagaaactcagacgcctcggttcccccttaaaagcgaatatgggaaatcaaaaataatcgagtgcagccgtcaaccgtggtgagagaatatcagattttgaaatattaattgtcagagcattaattagccaaaaactgaagggatgcatagtcagcctcacatcgagtcttgaacagacgcgctcgacacgtgtccccatccaaatgtagaagcagctcggatgaagtctacacacaactttggaagtcccgtacagacttgggcgggcaaatgttatcccaatttttgcactctgacattgcatcacatgatggtgacacgtggaatcaagtttgagtatctgctcagagagtacagtccgaacaggatgccctataggcatgcttgaagcaaagcgatcagcaatccgcgcagagcgaccaacacttagtgaattcggttttcgcatcgtgagtcatcaaagaaatccctataacttggggatcaaattgcagagatatggcaagatgtccaaatcccacgatcaatgtattctgtatttatcatgcaatctttctacttatatccattgtaacgagaagggaaatacttcctctccaagttcataaccctataaatagtgatacatcctcactaggcaagggggtgaaaaattttacctaagagatattatctaagattcatattcagagatattgttgtaagagctataagaaaaggaacctttctccttgttcttgagtcaatacaaataacaatgattaagctattaccgaactgctcggggctgaacctctataaaattcttgtatctttacattgctttactatatatcaattgctataaattacttatcgcttactaaataagactcactgttgttggctaaaatcgaggtcaacattcctcatgtgtgactgacatgtgaacataccatcatcacagacagaagctaacttccacggtcaagtggcatttgaaatgtcacaaatttcattccttaataaccacatgtccaaattaagagagtgatgtgggcttccaccatacgcaatattctggaagcttgggggttaaatgttatccatttcgacattgaacacgtggactccaagtcaacatccaagacccattagtgggacccacaacaatgataaagtggaccaagcccacctggatatgtccttccaataatgtatcttagttttgtactcataaagccttcttccttcaataagtcgtatccgaaagacatctccaatatcaggatactagagaagcaagaaaatgtgttcctggaagacccttccagtattagttgtcagatcacaacagagtattgtatcaagattaaaggggaaactttccataacaattattatgtaattaatttagattaatttcccacaattaaagaacatgatgttgaccaaatcaattcaaatccaatctacctagtcaacagattgtcttctttattggctggacttcatgagaaagcccacgagtaatgtttagtgtaaactctccaatagagggaaatgggaaacctaatgttattctcaaaccactataaatatctaacgaatcatatggattaggggttgaactctcttgcaaactttgctcaggcaaacttgagaacatacattgtaacgccctatggaacagggatgccacatctgtgctttaataaattagtttataataataaactaatagtttaagaaaagaatggtttaattaaaactttttgtaaaatttatttaaattaaaaacataaattttcatttaaaatactactagattggggatccccatgtttctaaacttttacaacatgttacaaaacaactattacatcatagagttaaattttacaaacacgatcaaaatgtggatcctgtccactaaaagccaagacacagcggttgatatgtacatcgtatgacaaatttgtctgaaggtcaatgtcgtcgtaactctgaatatgggccatatcaaacacatatttctgaagcattgaaacatggaacacattgtgagctccaaataaagtaggggtaaggccagccgataaactacctaacctacccttttaggaaactcaaatcgaccaataaatctaggacttagttt

SEQ ID NO: 271998 - DNA, 1016 bp, Cannabis indica
cccttgtgctgcaactgagctcttcttcaacatgtcttcaacctgaaatctcttcagatctgatgatgaagatgacactgaactcccttcagtttgaactcagcaattcaagatacagatcattccgccattgatgaacatcctcaagctccaagatctgacctgccatggaacatacagaagaaacaagacgaaagaaacgtaatcccaaatctccgatcaaaaaagttcgtcaacaaaatacccagaaatcgtatttatacccagctaaaccaagaaacccgaaatagacagctgttaccatctgaacaattaaaacctaaaatatctttgctgacgtggactaacactaacagtaagaaccccagacaaaacactacgagtcccagacgcaactggaatgctactgcacataatttgtcactacagaaaataatagttctaacatatgttatttaacatcctaaatatgaatttctaaaacaatagaatttaaacacatataaagtttaagaaatcttacattagttgcagcagaattaaatgactcattctgctcagatatctaacccttgtatcatttctgtagcagagtatcaccaagatctgatcccgattctccttcacttgaatggatttttcacagtcttacacactatgattgagtaccaacttgttatgtgtgggcatgtactctattactacagggttcgaaaattgaagagagaaagagagaggaaggattcaaaatagagagagaagagaaggctcaaaattttactaaaggcaagtgcgtgcttaagcttctaattttgagtccatcactatctatttataggaatccttctaggtttagatttgaattaatttggcttaaaaaaattgataaaataaatggcaaaatagagaattagcggtcggccttagatgtgggcccatcactttgcaattttgccatttttcaactatttatcttatttttctcaaaaatgacatattttccaattcaaccactt

SEQ ID NO: 271999 - DNA, 1281 bp, Cannabis indica
atacaaataacaaaaactaacaataatataataagagtacaacataaaaatatatcgaaatattatattttatgtaaataaaattttaaaaaaccgtaaaattatttaaaatttcgtacaactttatttttgtaattcttttgttgtttttgtgtttttttcaatctaatccctttaaaaaattcaagattttcgcatatttttttctaaattttggaggacgaagaccgtaaatgtgagccctaacctgtctataatgcaggtcgatccttacaaaaatattgagaataagaagagttaatatcgaattaccattccatcctccgggtttagcataggatgcccatttgtcattttgatcggcacaagatgtcatactatattatgtaaaaaaaaataataataatcacatcaataatttatatatctatcttattattcgtattgtatattatcttgtatcttcaaaaattgttgaaaataatatacaatacgagcaataaagaagacgtagttttatgttcgaactagtttcgatacatattgtaataatgtatagtattattattcacaagtaattcaaaaaattaccttatagtataaaatgaaagtatatatatttagtaaaatatttacctttcccatttatcagaaatatcaccagttgttctccaactatttccaatttttggagcccaagttgctgggtcctcttgtccccttcaaacaattttaataagtgagatttttttttaagaaaaaaaatattgcctaaataaataaataaataaataattgtgggaaagatttatatttttcatataaattaattaatttagttatacttaccattcacacaaggaaaaatagattggtcttcctgaattcaataaagcttgactcataattgggtacctatgatgaaatatatgattaataataataataataataataataataataataataataataataattttcaaaataatcaatctctattttatttcttcaaaaatttatgtattgaacccatagtataataatatattaaacttacaatttagctttataaagaatagcacttttatattaaatgcatagtataatatgttttttataaattaatttgtataataatatattttgtaatgacttgtattcatatataaatatataatattttaatataaatttagaagtattaaatttattgctatatatatctttaaacataaattatgtaatataaaaagactgttaaaaaaaaattatagt

SEQ ID NO: 272000 - DNA, 773 bp, Cannabis indica
gattaaagattattatccctgttgttgtttccagaagttcttcttgctggattcttgatatgccttctggccattcgattggttcttcaagtactcttagcaatttctgttgtgccaaaagtgatctgatttttctcctccatatcctgtaatcaccagaaccatcaaatctgtaaataatattactcattttaatgaaatctgaattaacaaagtgttgagttagagagttttcaattggatcattcaaaggaatatccataaaatcctaaagtgcataatcttcttgctgtggatcaagttcttccagctttgaacagctttcttgatcttcttgtgttgactttctttagcaataaaccttgctctgataccactgttgggaattgacaaatatatccctacacaaagtcaacacttacacacaaacagaaggtcaatcttgacctttaccaatctcaacaagtggacacaaagctgtccacgtatcccaaacaatatcaatacaattacattaagtaaaacatttaactttaccgaaaatagataccaagaaaattgatcaagttttcttagcttagtttctagggttagtttcaattgatatgcatgcaatgttcaaaaatatgaatgggtttgattattcagaggagattaagggagaagagaagcaaacacagcagtttatagaggttccccttgagttgatggggtagtcctcttgagctccccttagaaaatgagcagagccttgcactatacaaaatcaagat

SEQ ID NO: 272001 - DNA, 620 bp, Cannabis indica
aggtggttgtgcattggcctattcgggattggtctctggtcttaatctcatattcacaggggtctgtactgcaggatctgtcaccattggatcactttaagtcttaagacaaagataaactagggtttttgctctcaatgaaagtaccgaaatgttgaccttgcttttagtcaacgacaatgagtcaattgtgaagcgataaagaatataataaaaatagagcaaaaaccactaaatgataaagaacaccagattttgaagaggttcggccccatcagtgtggtaatagcctactcctcttagattatattaagttgagaacaaagaatacaatgttttctctctctaagctcttacaatcaaatctctgagtaattctcttagatctctctctaaagcattctttcgatcccttttacagtgaagaaaaatcattatttataaggccataatgcatgagggaaggtttcccttttgcttacaatgtttataataggatggaacattcaatacataaatagaattcatgaaatatgggattgagacagcctgtcgtatccctctaattcaatcccatgattgtagggattgtcttcatgcttggactccacgatatcatt

SEQ ID NO: 272002 - DNA, 1839 bp, Cannabis indica
atataaacttattgggtcaattccttacatacacaattgagcacttatctatgtgtgaacaattttgagcttaatgagagaaaagggaagagttaccattttccttatagaaatgatgtttttaacaatcaacatatattaaattacgtggttagattaggagactggtttttacagatctctagtgacgagtcagtcacatacaaatagcaaaagggagtaagacttgggatgtagggtcgtaagcataagcatcccaatttctaatattgaaaacaaactttacttttgtccactcaaagagctcagaatccatctaaatcaacccaattgtcgtatagagatcacataactttgtccttttctttttggctttttctcctatggaaaacgatattcaaacaaggattgaagaacaagacaaaaagatttgcccaagtgatttcgtgtcgccaacacaaatattaaataggatttacatacgctcaaaacccaaatgggttcatgagtctgcaagcatgcatggagtgagaggaaagacaagtacaacacaactcgattacactgaaagtcaatttgttcctatcacttaatagcaagtttttccaatatataaactctacttttagctaataattcttggttggatgtacagtctatccacaattagcttaggtctcccactaaagtggataagggagattagtggggtttaaaaagattctcacaagcatctgtaccgagggaagaagtggacggtgcatattggttgtggcctacaaagcaaaaaaaaaaaaaaaaaaacccaaaatactttcttcccatattctctcctaagacaacttcattagactgctttttacttgacttttttcctcattcatttgcttaataaataaattctactctttggagaaggagccctccacatgttaactcatcatcttcctacctcattcattttattctctgatttccatgcttttccacacatggaatgactaagcatacactttctctatctcttaattgagtatactaatgtcctaatatatgacaaagtataggaatattatattcatagtggtagagaagcatttacccaataaggagaataatgctggtatggggggaccattattgtaatttttttttaagaaaaaaataaaatatgatcctcttgggctgatctgttctatttgtcctttattcattcttttttcttcattacaatttttaaatcaaatagagtgccactagtcacccctctagggagtccataaatactgggaacaatagaaaaactctcatcactactctttccaatcttaggtttaatattcaaaactcaaaacctttattttgtgataacctatcatcaaccatctcacagacatgatgtgcaggaaaaagaagaagaagataatctccacatgtgcttcttcaagcacagagaacaacaccttcttcatcttcctctagaggaagtgatagacaaaggcaagtcataaaaggcaaaaaagcctttcttccagtttgttgtctttttttctttttcaccttttctttttcttcttcaaatcaaactcttactcctgttccagtatgtagtactagctttaaggctctaagcaatgccactgcctaaccattttacactgcttaggctttttgtaagggtcagtggagtttccctccctacctcttttcaaactccaacagcagcagaggaatctcactctgattggattctaaataacacccactccccaagttaaagcaattataagtatgtccttcctaactaactatgcagacaacttgtgctagtcagtgcga

SEQ ID NO: 272003 - DNA, 1326 bp, Cannabis indica
ttcaggtagggattcttgtactgcctccggatcgttacttgtgttattttcttcttttcctgtacacttaactacaaagtctgccctttaatcactgtacgaggttggaaaattatctcatactgctcaactttattgcccacttgaataatcgtctagaggcgtatggtttttgcaatactttgcgcagaggttggtcagtgtaacccaaacaggatgagcttggaaatagggcctcaacttccttgtggctaagataaggcagtaggtgagcttctctatcagaggatatcatccctcaacttcaatgagtcatttgctaatatagtagactagatgatggatgttgttttcttcctttatctgcacgacacttacaccgtattcggtgatagccaagtatattcccaattcttctctatcgaagggttttgacagtacgagaggttttgcgagttgctttttttaattcttggaaataatcctcacattcatctatccattcaaactttttattacctcggaggatgttgaagaaaggaacacacttgtccgtggatttggaaacgaatttgctgagttcagctatccgactagttaagctttagacttcctttgtttttgttgacaatttcatatccggagggcttgtattttctctggattagcttctattccccaatcattgacaataaagccaagaaacgtactcgagctgaccccaaaggaatgctttaagggattgattttcatgttgtatttcttaagaattttgaagcattcatctagatcctctatatgccccctaagggtgagcatcggtcaatttggtcggtttttttctatataaaaatttagaattcagtttttggtcgggattggtgcaatccaaaaaccaaccgaccaatccagaacctatcttaaaactgatctttttgaacctcagtttggttggtttaaactgcccaaactgaacttcttttttttctttaaaatatgatccaatttattctattattctacattttacaactacaaacatataaaataattattcaaaaactaattatcttattcttttaactttaatattataaataataaaatatattattttatgttattaataactacaatataaagcaaaaaaaagttaataaattaatatatatgtataacggtcagtttcgattttttcggtcggtttattaccaaaaaaaccgaaccgtttaataggtggttttaaccattagtggtttttttggttttcggttttcggtttctaatggtgttcggtaggtcgaatttgaatgtttttcaattttc

SEQ ID NO: 272004 - DNA, 1704 bp, Cannabis indica
aaaaatcaggaagatgctataaatcaggaagcatctctgtttactaattaatcaaacacgttttatttaaaaaagaaaactgttttaattaattaaataaataataatttaagaaataaattttctccaaaaataaggtgacaccacacccgctccgtcagacggacggacggcggcggcgcgcgcatgtgtggtggtccggagtgtgagtcctcacccatgcgcgcaaaattggataccccttggggcccaaactcatatctcaaacttgcattagttatacacttcaaatgaaatttttctatcccatgtgagactcctactcacacacatcattttttaacatttcacaaagttccaacaatatatatatattataaatatggtgcaatttataccaatataatatttttctaataaattaagcaaaacaaaataatttaccttcatttcacaaagttccaacaatatatatatatattataaatatggtgcaatttataccaatataatattttttctaataaattaagcaaaacaaaataatttaccttcaattttgttttttcatgttgaaaatgaatacctccacacaaaaatagagtagataaataaaattaaaaaatatataaatttatcaaccttaggtgagaagttgatacagaagttgatggaacatttttaaaaacaaaatgcagagtaatattgtatataaatcttcccgcttgcatttgaaattgaaaatagtaaaagtaaaatatgtgcaaatagttttttaaaagatttaaaaaggaaaggaaaatttgacaattcaaattgtccatgatcttttagtataacatattgaaatgcatagaaatttaataccctaaaattaattaaatctcaaaatatcgttcttataccttccctctttctctcgaccctctcttcctctctctctaactcccaccaaacccaactgatattcacgaccacagaatcaaaccgaactaaacccagaccaaactcacaaccaccgcaacacctccggcgaaacccacttcgaagatgaaacgtagaataaaactgaggaggatatcgcgaaaccacaaagagaaatcgtgaaatccaaaacccccaaaatccctacttggaggtctcaactcgcttgttttctgtatttttttctggtttttaacgatgtcgtaaaatatcgcaaaatcatgaaacatcgctaaatgtctccaattcacaatatcgctaagcacatcgttaaatgtcgctaattcatactcaaattttcacgatgattagcgatgtgttgtgtattttttagtctcatatcacaaatacatcgctaaatatgcaaaatatcgtcaaatatcgcaaatcattgctaaacttcatctctataacctcagatttgttttatcattgtaaatacatcgctaaacatcacaaaatattgcaaaaaactggtaaaccagaagaaaaaaaatacaaaaaatgagagaagtcgtgagagaagacgattgcgagaccttacaaccggggttttgggtctatgtgttcgatggtatgggttctgggtcggggttaacgacggagagtgagagagttagaaagaaagttttttaagatgtaaaggtatttaaaaaaaaaatatatatattaaaatatatatatactaattgtatgatatattaaaacaacatgttttac

SEQ ID NO: 272005 - DNA, 1963 bp, Cannabis indica
acacttatcctctgttttgtaactgtcttcgtttgtgtaagaagtttgtcatggtaaatgtgtcttatattcctagggagctgaatgttgttgctgataaattggcaaagtgggctagaattaactctgtgaatcgttcaggtcgtattggggatgtggccccttttgtaatcccttgtttgttgtagtttcgttttttttgtgtttcaataaaattcctttacttatcaaaaaaaaaaaaaacactcaggtggcgtttggttggaggtaatgaaatagaatggaatggaaaagaaacaatttttattcaattcttttgtttggttacattttaaagtatcgaaatggcattctctttctaccattttagtagaatgactattctattttaaaaaagaaggaaagaccatttcaatgtaacaagaaaaaaatttagtgattttttttcaattttttatgcatttttaaatgttatttcattcattttcctttcctattcacattctcattcctatttttatatttttattcctcccaaccaaacgccaccttaattttttttttttaaaaaaaaaaactaaatgcaatagaaacaaaaatatatacaacagaaaaacctttctcatgaacaccaataatttttttcttagaacaatcattttactgctacctttactcttcttcataatttcttcatcatctttatcaatataaaaatatatagaaaccagttatcaaacaaaaaataagaacccaaaacttacatcccattaagaaaaaaaaaacaacaatcaagctaaaataatcagaaactaggtgtcaaaccaataaaatggcataaaattgttaaactttttatgtgtagtaacatatattaaatgttgctcattcaatgtcgatattaatatttaatgataactatataattgataatgcatagtgttaccattaggccataatgagatagacataactcactgacatgttcgggacctatggacacactctaaaacgtccttcgtcaacccattaagctaagacaattaattctcgcacattggacatctacattcaataggcccatttcactccttaaataagagctttgccttattagatggtagagtgaagaagtgtatggccaagtgtgtgtggagaaaatattagagtagtgttcatcatactcaagttctattttctcctcttttgtgtatagatcgttggtatcgaaggtgtacaaagcggagtgtaaaaattcatagccattattctaagataacatgctttattcatttattttgatgccttaaataagatggtagctttgataaattgataacataattattatttgttagtctttaattaatatttgttgatgctcaattattatttaataattggtattaagagcttgccctgattttaaggctcaaaatgatataatttaatcttctcttttttttccaattttttttaatgccctacattttttcttgagattcacattcaataatttattttttgaatatttcgtacacttttttggtttcaaatgtttagattaatcgaataaaacataataagagtatttgtggtaaattattacaataggagaaattggttttggagtttaaaatggttgaaaatggtgtttaataacttttaatccttgttggaggtttttggataaatggtggtcggggagctatcgacaatggcgagctgagcaaaagccctcgaacgtcagccattttcatagcttggttatatttcacaatttccaagctatgatcaagagtgaaagtttaggcttaatcacatgacaattgagagatttttcttaatgatggttcatgttatgaataaactgtttggtgctcaaattaagataaattaaatgtaggatttttacccttttaccctacaccaacaagaatatttaatatcagtatcaaggtca

SEQ ID NO: 272006 - DNA, 845 bp, Cannabis indica
cacaaataactcatattatatccacatatttcaaataaatttccctaattaacaaattacgcttatttaaccacttattggatcttcagggtcatcaaacctgaaaatatttgtattccacatatagctcatattacattcacacatgctatataaatctctataatttataaattatgcttatttactcacttatagcaaaaatttaaattttatgctgaaatagattagtaggatcataatcttacttattacttcattaacccagactataaatataaaccctaattatttatcattaggcttatcaggatattacacaaacaacccaaccttccatgaaaggacaaagcatatcgagctagattgtcatttcattcgagacaaaatcaacaaatctcaaatcaaactcagcccaattaacaacacccatccaactcccagatgttttcaccaaacctcttgcctccaccattttaacatctgacatcaacaaaatatctgtatatgacatatataatctatcttgaagggggggggagagtaataagttttattaggtttactagtttatacttctgtattgtcaaggtagttattaccgttatttactttcctttattgtaagtcaattggttggttagatcgttagttagttagttagttattggtctattcagttcttgcttctcgtgtatgtatactttataccttagtctctattattcaataagatgattaaacacattcatttctcttattctctcttctgcaattatactggatttaaaatattgtatggatccgatccgatccaataaatactaggtctaaaatattggata

SEQ ID NO: 272007 - DNA, 871 bp, Cannabis indica
tagaaaagattacattgaaatatgagacctcgcttctagccaatgacaatgagtccaattttataagtgacaagtagtttaatatgaatgaaatataataaagcgaataaagacacaagaattttatagaggttcagccccgagcaattcggtaatagcctaatcctcgttatttgtattgactcaagaacaaggaaaatggttccttttcttagagcacttacaacaatatctctgaatatgaattcttagatataatctttcgaccctttgcccagtgagtatgagtcactatttatagggctataaccttggagaggaagtatttcccttctaattacaattgatataagcagaaatatttcataataaatacagaatacactaatcgtgggatttggacagcttgccatatctctgtaatctgatcccaaagttatagggatttctttgatgactcacgatgcaaaagccgaattcggtaagtgctggcgttctgcgcgaaatgctcacggcttggtctagaggactttgttcgagcaaatgtgttagatgccatattgagcccattttttttgtgagcaggtatccagagtcgattccacgtgtcaccataatgtgatgccacgtcagagtgcaaaaattaggataacaaaatagaaatttatttaggacacaaaacccaacaaactcccacttgcagtaacataaaacaatcagtactaatggagggttcaagattaatcagtttctattgacctcgcttttatccaacgacagtgagtctaatttagtaagcgacaagtagtttgtaacgatcgaaatataataaagcaatataaaggcacatgaattttataaaggttcagcc

SEQ ID NO: 272008 - DNA, 546 bp, Cannabis indica
taagttctatgcatggattcaacaaagaattaataagtcagtgaatttacttggtaagttctcggtctggttattggaagctttgatatatagtcgtatggtcctcacactagttgagacaatactacttgtaagactcagttaattgattttgattaatcaaatataattctaaaattagactatgtctagtttgtgaatttttcactaagcaagggcaaaattgtaaagaaagaatttctagggtatatttgttaattaagagactttgattagtctaattaataaatgtattaaatgacaatattatttagtaattaattttagttattaaatagttgaaattgacatataaatggttgaatttgaaaactggcgtttttgagaaaaggggatgtagaaatgataaaacagcaaaaaagtggggcccaatatctatagccttggccggccacttatgtaggttttatcatttaatatttttattattttaatgccaaatattctaacctaaccctaggtggcatactataaataggtagtgat

SEQ ID NO: 272009 - DNA, 3560 bp, Cannabis indica
caagccaactatccttctgcctataggcaaatgatcatccgaacatgtaactcctgtccaagtgcagcaatccgaggaagtggatttgtcccatccttcaatggctgaccctaaacaactttgaaaaccactcaaagcttccaagtcattcatattgcatgaaagattttgacttgttagaattcttaccttgaaagaaagaacaagaatcaagaaggccaaacaaaaattaggaaaccccatttagggtgcaagaaaatgaatggtgtggctcttcaattggcaaagagataaagaacttttagtagcaattatatcacagaaagattgaaactttttatttgggtcagtcaaccttacaagtcttcccatgctgattccgttttccaaacgactcatttatgacttgaattgccaggaaaatgatgttgtgagattgacttattaatatcaatttacagacaacataggagagcttaagtccaagctcaataactagttggtgctgggtgctgacccacttaagaacttaccataaaaaaaagtgagcatcacttccaaggttttgaatccaataatagcctcctttagagatttacccaaactaggaagaaaaaatgtcacaatatttatttccaattttttatttatggcggtgttttttatagtcacaatattatatctgaaaatagatctgaattttttaaacacgagtggtacagataaactacagataatattgtcactacgaataaaaaagttataattagcacttgtttttctagattacaaagttaaaaataaataagcatctcttcaacaaaatatagaataacaccttcatatttctggtattataatattccaattaaagctaaaaaatgctttgaagaatcgttgtttggaaatgaacatcaataactactccttcaccccaagaattcaaatcaaataactactccttcaaaccttttactttatcattttccttttgctactaaatccaggattatattcgtgtaaaattagtatttcagtttatagcgaatgctaacccaaacaaccaaattaatatattggttgggtctaatattaattcaacccgcccaatttaaaccgagtcaaccaatttatatattcttttttagttataaaatatattacataatatgtttgattattaaactatttcttatttaaaatttaaattttgtagttattgattttaattatattgaatattgaaggatgcgtgtttgtttaatactttatgttgatgtaaactctaataatatttctcattttttaatttttaataatagttaagaatctaatatttaaatgatgtatttttatgaagtcaaatctaattattttggacactaaaaactaaccataataatttttttaaaagaaaattataacagtttgagcaggttaaaattataacggctctaagggtacaaaatattagattcatgtaagagaaccaaagaaaaaatatgtaaaaattcatctattattactttttggcttttcattgaaaaattcataattgaataatgtcattgcaaccaatgcaactatgaaaaaggcaataaatgaaggctaaaactcaaaaaaaaactttctgtgagacaaattgatgatctcagcactgacctgaaaaatgacattattatacaactttggaatcaatcaatagagtcccaagaatttccaccagaaagatgcaacaaccacccagatgacggcattaatcacagccatcacgaaccctattttgaatacgtcgggaagatctacataaccagctgttgaaacaaaaggaatgacattagtcactacccatcagaataaagacattttcgagattagcctaaagctggaaaataacttgatttacttatgcttaaaatggggaatgaggggcatacctccatagtagacagccgcttgcccactactataatgtgttagagcaccaaaaagatttgtactgtaagataaagtcaatgctgccatcacgctaggcaccccggctgcaatttgcatcgcaaggaaagcagcatataaagcacctacatgaccggtttgacttgcaaagatgtaatggactaagaaatatgttgcttgaagaacaccaaatgcggctggccagctcaatgaataggaggtaagtaacttggcgacggagttagacatccaagatacaataccaaggtctgtcaactggctagccatacccactacagcagcaaaccaaagcaaggtatcccatgccgatttttcatttaagcagtcaccccaatcaaggactcctgtcaaaagaagtatagataaaccaatcattgcagccacaacacttggtacgccaatagcttctctgcaagaataacagataagcttcatgaatcagaaactaaaagggaaagaatataaagcattttgtcatctaagagcatatattgagagatttaagtagtcaattcatgcctataataataaaatatgccaaccaccattaaggtgggaaatgaaaaggggaaatgaaattcactggtaagaggtaaataactataatgcacgcacagaatacacaaaacagattgatggtatatttacataatcatctaatgaacagagataagttggttaaaaatgatagaacatacccaaagacccacaaggataccgcaagaagcattgtaccaaccataatccattgatttctggtaacagcacccatgctttccagtctcttggcagccatagcaggggcatcaggagtgtccttggtttctggaggataaattaagtataaaactagtggcgtaactagaagtgaacaaatggcaggtacactggcaaccttgaaccaagtcatccaaatgttgggaattaccaccccaactttctcagccaatttaatgcctaacaaattttgagctgcagcggtgaagtaaagcgcactagagctaccggcagcctatcaaaaatcataagaacatcaatacatgtaacacaatcattagataatgccggcatattatagttccatacctatatgctaataagacagaaaacattcaacttttaacagattcgtggttccttacattgtcaaattcattcacatcataagcaaccatgcagtgaaatgtgatacatttagtgcaaatatattatcaatacggcagatcctcaactaaacactgtactatttgacagagaaaagaacagtagaacactagcagaagttcccataagtaaactaaccccaaactcatgaaaacaaaccacttggctaaaacccagttgaatctatttaatggtatttcaattcttcatttttcaactttcaattgggttttttatgatagtgatgtcttgacacaaagtgttcctaacacccatttcagcaaagcatgaacttcatgaactaaaccaatgaagaaacaaaaaatacaatgacaatagttcaaaagagagagagagagagagagagagagagagagagagagagaacactaacctagaacgtaggacgtagaatacag

SEQ ID NO: 272010 - DNA, 1131 bp, Cannabis indica
atttccgtacctagtcgcgactagcaattaagttggtcgcgactataagcaaaactcaaaaaaccgagtttttgccaatttctcgaagtcgcgaccatgaaaaagggtcgcgacctggctctctggaggtcgcgactactgacgcgtctggagccgaattttccaattttttaccagtttgtcccatcttttcaccatttgactgaatttgaactttaacaccccgggaacctgaaacaatgaaaatcaagcgtaaaactgctccaaaagacaccaatagatgagaaaatgctaactttaaagacccgaaacataggctaaatataacctaacagtcctctatgtattggttcgtaattagttttggtcaaattacagttttacccttctaattacttcttcatcctttagttttattaattcactagtagaagtataattcaagatcccatatgaatttgtgcacaacattttagttccagaattaacacataaagggaagcattcgatccgttgggaaagtcagtattctatattgtacatcatgttcccagccatccatattattagattctcaaaatagaagttgtaaaaatcatcttctttgagaaactttaacgagtgaatcaaagaaactaataacatgaacacaagttcatgataactcaggatttaggtcgatctacttttaatcaccattatgatatgaattaggtctttatagtaaacgacatgttgataaagacagctttattcatattagtccttgttgtatataatctctattgtatatagcacctttactttgatgtctcactacatccgtaatctgaactaaaattacttgcaccgaagaataggcatcagtgaatcatactagcaactattgattaaagattctataactttaatatgttgctgactattttatttatagttaagtggtcttaaatctctgtatagctacaagccacaacctcatatatgaataagaaattttccgatatttaatataaattattcagtatccactcttctaagagccctagattagatggctttggttctggattttacaaggatccgtggagtaaaattggtgatgatgttttgaatgcggtgttggatttc

SEQ ID NO: 272011 - DNA, 500 bp, Cannabis indica
tgtaacgtaaaccgaccaaattgatcgacgtacaccccttactttaaacgtttttttttttttcaaaacttatcattttcatcatattttattgttttgtaaataaaggagagtgattaagtgtaatatcccggaaaaatatattgagattttaattcaacatattttatttaaatatgtgattatgtgggtattagagtaggattataatcctacttaaactaattatgggttgattagggagataagaataaataaagcctaatttattaattacggagattatatcaaaatatgtgggtatcatggatatcctttttgaaataaatattttcgggcctgacaactgtggaactagacggagaggtcagagatgtcacgacaataaaagatgaactaaattggattttataccagactagattagaattttaagctgtcagtttggcgggataaattactaaaatatccttaggttttgatcttaagcttaagggtta

SEQ ID NO: 272012 - DNA, 767 bp, Cannabis indica
atactagggtatagccattatacgacatacactacctacctcactgtacgagtgttggtagggcaactaacactcagtacctctctgagtaccactgagtgatataccacacacactcagtacctctttgtacttgtgctggtatcactgtaatgtactgtcagataacattcactataccaatgcactctataccttaattgtacaagtgttggtagtgcaactaacactttaagcatgcatatacacataacatatacatacactcagatattgatatcacacattatatacagttcttaccttctttcctgattcaagtgtgctggccgacctgaacggaagtctcgtgctagatggatgccctattcacattatgaaaccgagtaagttacatgatcaaaactctactcccgggaaacccgaacccacacccctaggttctgttataccctcaaaaggttactcaagctctggaaatatgtaaacacccaaccacgacactgaaatggatgaaaatcgagaaaatgaagtgtttggggaccctgccaaaaccagttagccagttctagaggtatggtaaaaccggctagccggcttgcataagttcaccagaagcctttcatttgttcctcaattttccaccaaatgccaccaaactttctagagtacctaaccaacgcatagacaatatttttcgaccggtatttcacagaaaaactcaacgaatcaaaatatgccattagagatcaaagctttgaactcaa

SEQ ID NO: 272013 - DNA, 2154 bp, Cannabis indica
gattagtgttcaaaacacaaaaataatttgaaattgtgtatctttcaaaacaaaaaaacatgaaaggtaaagctcgattaaaaattgtttattataataagtcatcattcatcttaatgacatgaattatatattattataatgggttttcttaatcacaaaaggtaggaatggtatagataagtagttagaacaaagtgtggtctttggctttggttagaagaaaggcacatggcatcaaataaacaaaagaggcatgtgaaaagaagacaaatattaaagcccctataagcctagcctataagatatgacagagcaaatccatattttgctttgtatgatactaaaggtgaaaaagaaatgtgagtgttggagttaagctcaaacgtcattcttttgagctaaattccgaaaccagttatagttgggagtcaaaacaagctcaaatgttgcttgggaatgcataccaaaactaaaccccttttctgcatttagtcattttctttctttatgcactttgtcacctttttctatagtctcatacaaccaccacacctttatatatatatgtactatataattcacattccacaacacaacccattggattttacttcaagaagaaacaaattttatattgattaatatatatattttttttttaaaatgtgaaaactaagccacaattctgagtggttacatagcattttctttgcttgctaagataccaacacaagtgttcgatgaaatgacgcgaagaaaattcaagttttacacttattatttagcttcaaaatgcagatacaccaaacgataaaattatacaaagaattatatataattttaacagttatggggtgaattaattattgaacactctaaacgacactagaagttcatatatttacattcaccaacgaaaaacaaaaatctaaaaactgaaattgaaacaaattctactgaaaaaaggaggctaactactattaactaagcacaggcttgacctctagaaggaattacgaaaagagaatcgagatccggtggatgaaaatacccgttcttaggcggttgtcgtttggttccactcatcgatttcttcttcggcggcggtggacatacgaaagtctccggaatacggcactccctccgcttcggcgtcgtacaatcttctccctccatcgtatcagatctctcgtactcctccattttcaacggtccgatccgttcaaggaatatatatatgaaaaccttgagctaccgaagttggaagaacaacgctcaccgagtgtaaatatataaatatatatatatatatatataataaagaatttaaatgtaagaataccgttcaaagactcgaactcgaaggggcgggagcgtagccgttacagccggatcgggtcgggtcagtaagtatgatgggttacagctaagtatgagcggtcgtggctgacgtgtaacgtttaggacggttaaaatagacccacgtggtttccacgtggtaaactttagccccgtcctttttcaattatggcggtggctaggtctagtggagagtgttcgcgcgggaaacagttggttgaaattttgagaccaaattttgaatttttatatttgaaaaagaaattggggatgggtgaggatttaatgacagataattggtcggtgacagaatataaaaccgccatgtagttttaatgtgtgatctgaattagttttattaagctttaacaaaatatctggtgaatgattgtttgcgccgcagactagtaccttttctgtgtatgattaacttcactagcactgaagacgatgagcctgtatgagcgtcccctccctaccaaaatcatcactcattattacttaaagaattgtataataaagacataataaattgaaagccaaaaataagttaattggagcatcattctaaatgttttcactttatttgtacttaattctaaaacttaaattttgacaataaaacatcaacaaatcgttagcaatttatagtttacatacattttatatattattattaactgtttacgtataaatttacgtggacacatagtacctatgatataattttattgggtaaaaattattaaaattaaaaaaaatcaattaaaaggattacatgttataaaaaaa

SEQ ID NO: 272014 - DNA, 813 bp, Cannabis indica
tctctctctctctcttcgaaccccctagaccagctagggttccatctttgctcttcaatttgttgaggtttctagcaaattttagaggatctaagtcaaggtaacctctctacaactctttctttgatttcttgaattgtaagaaatgtttttgagatttttgttgttgttgttgctgctggtgtttagtattttttcagagatttaattatgttagattatgttgaattaattatgatttagtggttgttagtacagttaaacaagttttgagttttagaactcagacttggagctttaatggtgattttagattctgagcttgggtaattgttttgttgcttgaaaaatgtttattggggtataatatgcaggtctggaaagtttggttaagtttggaatcaatttggttaggctttgcaattttttgggtttttggggtaaaaccggctaaccggttttacaggtacctgtaaaactgggtaataaatttttgcagctagaattcctgacaaattcaagttgtcgattcgtgttagttttagatttctagttggttaattccctgctagtttagggtattgccatattaagatgcaatagatagggttttggttttaaacctaagttccagttgtgatttagcgagtcacttatccatgttgttatcgatgtgatttaggagcttgtaattcaccgagcagttgttccactcaggttgactggcacacctgaattcggaattgaggtaaaattagtataatgtcatgcatatgttattacatgtttagcgtacatgttgtttatgcctgt

SEQ ID NO: 272015 - DNA, 772 bp, Cannabis indica
caaaatcttgaatttggaatatgttaaaaacattgtacctatgggtttaacacatttaatgaaacacatttaatgaacttttatttttggttttgaaaaaactcaattttttttttctttcaaaagaaaatgaaaattaataggtaaattggacaaaattcattaaatgaagatataactcatagagcaaaattaacaataataggcatatcaagtcgtttacaaaaaattaatatttatttgtgtggtgaatccacaattcacctcattcaagaacacacaacaaagaacaaattaacataaaccagaaactgaaaatgcagtccaaaaccagcaataaaattcgaaccagtatgaacataaaacaatcagcaattaaagaactatgaacatataaatggcacctttcttttacgaggttcgaacatagatcaatgcaatctatgcctacatcctcgggaaacaatcagcatacttcttcattgattaatcagagatgaatacaagtgttgatcacaacagaaagatcaattacaaaggagtctagctcctaatcctcccagccactcaatctcaattctctctctctctgatctagtgtttctctcgaattggtcttaccaaattgtctcaggtttagtgtttatataggtgcagtacataagagaattttccctcctaaaccaactaacaaaactaacaattgaacttgtccaatccgagagtgccacatgtctcgagtattagacttatgtctaaaaacactacaatt

SEQ ID NO: 272016 - DNA, 2108 bp, Cannabis indica
tatctctattccatttttgatagtgttatcccatttttgcactctgacgtggcatcacgagaatggtgacatgtggagtccacttggaacatctgctcgggaagacaggccgagcaggatgcctcactggcatatccggagcaagatattgagcgatctatgcagagcaaccaacacttagcgaattcagctttcgtatcatgagtcatcagcacaatccccataagttagggatcaatttacgtggatatggcatacacaccatcccactatcagtgtattcaacctcaatcccatgatccttgcattcagcattgatcccacgatctttctatttatacgcattataacgagagaggaaactcttccacctcaagcttcctagccctataaatagtgatgcgtattcactgggcaagggatcagtcaaaaagaagttgagctaagactatattattatctaacaattatatattcagagatactgttgtaagagctataagaaaaggaatctttctccttgatcttagtcaatacaagtaacgaggattaagctattaccgaacttctcggggttgaacttctataaaatccctgtgtcttattattgctttatcatatatctgttattatatatcgtttatcgcttataaaagtcaacattttggcgctttcattgagagcaagatcacgaatcactctttattcaacatccaaccgccaatacgatggtgcaaactcgtagaggtctgactgatccggcaaattcacagacgctggatcctacatcgttgaatctagggagttcaagggcgcctgctgttaatcctggacagtcgccaagcgtggggaatggtgcaatagttcctattaatggaattgcgcctggtgtgcaagagactgggaataacagttccgcacccaactagggcacccattacacaactgttccgcctggaaccaacacccagacgaccatcggagacgccaccgaattaaaaaatctccgtgacgcgctcggactcatgcagggtcataacaacactccacatcatcatcaggatgaactgcgtgctgcggtgaatctcgcgttcgacgaacaaaggcatatgttcgtcgaatggagagataaagagatggaggcattaagggctcaccatgcagagattgaagatcgtagtcggcaagccaccgtgctgatacgaagagcctaccaaacagtaggttagcaatcgccgaacgtcattcccctgggataaacggaagaggacccaacgatgaatatttcccagactactaatggtcagccgcgcaatccctcgtgggcccagcagaggcgagcagaccttgtccggtaattcatcaggaggagtcatacttgacggctccaaccagattaatggtgtcattccacccgtcaaccaagcgaatcaatcgctacggcaaccaggatcttttgtgttcaaaaggttggaagcaacccatgacctacgaaacgatctaaacagaaggagggaatggacgaacagaatattacgacgatcgtgcaacctggagcccgtactcaaatctccactcaaaaagatgctgacgtaatccaagtagaccagaacgccaagcaggtcagctcaacaatacaggccttgcttgacgaactgaaaaatatgtttcacggcatggctacacaacgtaatatcatcttgagttagaccgagcacgcggaactcctttctcaccagagatcaatctcctgccgctgccccacaagttcaaaatgctgacgtggaagatgtatacggggagagaagatcctctttcccatctcaagtactttgaaatgcaaatggatttgcaaggagtacaaggggatgtatgctgcagaatcttccccgccactctgtcggaagccgctcagcaatggtatttcaagttggctcctcgaaagtttagctcattgaaaaccttctcttcgaaattccatgtggaattctcctcctcatgccaacttccattgcatttgggagacttggtcgaagttaagcaacgactaggtgagccactccgggcatacatcagcagattcaagatggaggcgaccaaagtttcac

SEQ ID NO: 272017 - DNA, 903 bp, Cannabis indica
tgatctctttcttgatgttctcatccataggcacacaaactcgattcccaaatctcaacattcccgtttcatctactgagaaatcactagccttcccagccgaaaccctagctcgggtttttatcaattctgaatcttgcttttgtgcttctttaattctctcaagaagagtggattgcagggtaatattagccaattgccccacaaccaactcaatctgagctcgagtcatttcatttgccagctgttgggagatttgcttcatagaactcaactgactctgaccttttctactcagggcatcagcaaccacattggctttaccagggtgataaaggatctcacaatcataatccttcaccaattctagccaacgcctctgtctcatattcaagtctttctgggtgaagaagtatttcagacttttatgatcagtgtatatctcacatttctcgccataaaggtaatgccgccaaatctttagcgcaaataccactgctgcgagttctaaatcgtgagtagggtacctctgctcgtactcctttaactgccgagaagcataagctattaccctcccagcctgcataagcacacagccgagaccctgtctcgaggcatcacaatataccacaaacttttccttatctgaaggaagagttagtacaggagcggtaatcaagcgttgctttaactccaggaaacttttctcacaccgatcagtccaaacaaacttctggttctttcgggtcagctccgttaagggtacagcaatctttgaaaaaccctcaacgaaccgacgataataaccagccaaacccagaaaacttctaacctctgtagctgacttcggtgctggccaatcccgaacagcttcaattttggccggatccaccatgatcccat

SEQ ID NO: 272018 - DNA, 856 bp, Cannabis indica
accacttacacacaccttcaacccaggatccatgctttctgggcaactatcgcgcaatcatggagcaacccaatgcaaccgaaacaaaaattcaaccagaatgataactaccattaatttcggcaacttcacctgagaagacgaccagaatcaatcaaaacaggagctgtttcgaattcataaaaaaaaagtgtagaaatactactacgaaactaaaattcaaccgaaaaatctagtttaatttgcataaaactaatgtcctgacttcaattttcaaatccacgaaaaaaatatctcaaaaagttgatctggaattcccaaacaatccaactcaagtataataaaaaaaaatcacataaatactatagtaaaatatttatccttgtgtatttttcgttgttttctaaatttctaatggtaaattagttcatattaaattataaagagacatgtagatagagttacatatgtagaaacactgttttgatttttaatgtttcacaacagttgcattacagttgcataaatattttactaacaattatttcgtctgattgaaacctccgtctgatgcaaccttcggcgaaccacccagaaactttcgtctgattgaaaccttcatctgatgcaaccttcgaccaaccacccaacaaccaccctgcaaccactgtctaaattgaaaccatcgtttgatgcaaccaccacgcaaccacgcagcaaccaccctgcaaccttgtgtaagtgatagtataaatgagaatgtacgtggtattttagtaattaaaaattatataaaaggtaaggctgagcatctgtcggtttggtcagttttttttctatataaaaatccaaaatt

SEQ ID NO: 272019 - DNA, 1057 bp, Cannabis indica
gggacgcacgaactcaaggcacaataatgatgacatccgcattagaaacctcacttacatgtccaactatcagttcgtaaattgagatcatacgcacatctctatgacgcatgacacatatagattaaaaaattatgacacagaatatgaaaggtctatgggtctccgtgatttttcactttaaaatttcaaagggcctaagttgctcatggctccccaatctttcactcaaaacaaatattaagagtaatttttaaaatttattttaaacttaatttttttaaacattggaatgtataatgcaaataaaattttctttacttaaattagaaatatttattcttttataatattattttattcatattaatttaattaggtgtgaaataacccaccttggagccgaacttcctattggccacgcgcgcccaaatgcatccgcgccaatacgacatgaaatttgtgccacattgtagacatattttatagcataagaacatttttaatggtgctctctattttttttttatctaaattttagctaaaatagctaagttagaatatggagtcatttttattattcctatcctacttcaactatattccatactttagttagtattaaattattttaataatattgtataatttaaatttattaaatataaattaatttgttgaaataacctcatagcattcgattataatttaatagtgcttttattaaaataataaaaaaaaattagcaaaaaataacaaactacctacatttctttatccattttttatcatagagatctattattatttttttatagttaaagttcagttttttaaaattcactttctattttagtcaaaaaaaaaaagtgtttaaaaagcattgttaaagatgctgtaagtatgcttatacaataatttcactcttcattcgttgcatttgccttggagtaaaaatgaataaaaccaatccataaagcttcttgaaagcgtgccacttaagttttcaatagcatcaggcaattgtaaatgacgtggaaatgaaaaaaatagtttc

SEQ ID NO: 272020 - DNA, 821 bp, Cannabis indica
aaaagtgcggattggatcggatgaacacccctagctaagagaccaaaaaaggaaatgggcttgcatagaatatatttgtaccaacaatatctgagcatagaaccattcaaaaatatttgaaggatagagcaatacttaccccaaagtgcaacacttccaagcagaggaggaacaggtatatcctcttcagatttctttatgctcctgatagtacaagagaaaaatccattagtagtccaaatgtttcttagttctaatcataaaataagaaatccaagtatttatgtaatagcacaattttgttcttcatttttaaatgatttatgagttctaagttccaataattacatttacagaagaaaatgcatgtaagtaattatgtatatctatttggttcatattaggagtacatgacaagaacataccttttagcattcatgatcatgtttgcaatgtcttggccaataagaccacatccaaatccaactgatccatacaacaatagtactaaaaatcttggtcttgaccaaagttttctacatcctggtctttcggcttcaaagacactatataagagaagatcgttttttcgaaaataaattagttaaggataaaaagacttccatgaagaatactgaagtcttgaccaaaggttactacaagaaacaatagtactaaaaatttgaggtcccaacaaggtaacaccagatccatcatatatagaaaaggtacttaagagaacaattgaaaaaactttttctcaaactgatgcttctcatttatattaggggtgttcacaaagtatccgatccaatccaatc

SEQ ID NO: 272021 - DNA, 791 bp, Cannabis indica
attttttgtgacaaaaatagtcgcgagcctccgattcctcatgttgctcttgttcatataaaaaaacatgtatagaaactcttctaaaaataaaaaggataactatgtattaactttgtaaaatatgagagtaaaaatcgaagaaaaatataaatagattttacacttctattcttgttcaatctctcatctcaatccttactaagagcacttgtaatagtttttcaacttaatcttccaaattatattattaaaattttatattatttcttgtacattaaattttaactttatattatacattagcttcttaattttgtttgatttatttaaatattatgtctataaatatttttattaatacaaataataaaaattaacgataaaaaaaagaaatatatttttattgttacaagtactaaacaatttctatgctaattattaaatttaaatatgtaatatctattattaaattgtactaataaatgggagtggtgccaagcactataagagatcacatcttattgttgcaaatcaatatcagatctcacataattttatttgataaataatataaaaattgttgactaattgcaacgcgccacatcgatatggtgtagtaatgttttattgaacactatcctttagtatttttgcattttaattgcattaatagtgacatttaactatattactaattattacgggtgccttttaatatttttttttttaaataagtatacaacatatgatatttaaattgcacaatatcatattaggcatacttatgc

SEQ ID NO: 272022 - DNA, 1497 bp, Cannabis indica
atattataaatgacaattttatttgagaattatttaaattattaaataaatagttttggcatttatagggttgaagttgcaaaaagtggtatttgtgaaaaatagataaaatagttgagaaaaatgacaaaaaccaaactagtgtagggcccactatgtggtcggccactaggtgccaattttactctatttttatcaattttttattccaaataatttaaccctaaccctagtgaaaattagtataaaagaaaggttatggtttcattatccaactaatgcctctaaagctaaaaacctagttttctctgtaggtttatgagacctcttccttcttcttcctctaattcgaaaataacatagcctttcttgacaaaactaaatttagccattagtgatttagtgcatgcccacacataacaagtgagtcctcaatcaacgtatgtaagactgtgaagaatccaaacaacaagaaggagaatcgggctcagatcttagtcatactctgctacagaaaggatacaagagttagagatctgagtggaaggagtcatttaattccgctgcaaccactgtaaggtttctcatacctttcatgtgtttattttcatcgttttagaaattcatattaggatgttaaaaacatacttgttcgtaaatctagatcctggtaaaataaattttaacacaaaatgcccttgaacgtagatattatttagctattttattgggcttttagggtcaaattcccagcctaatcatccagtccacatgtagaattgcatagagaatcctgccaggcctcctcttgggcagccagacacctgcagggagcaggctagcggccatggtgttgtccagaggctggccagcgatagggccgaccaacttctgtgaggaagctggtctgtcacttgatgtctcgtttgaataccagggcccccgtttgatgagatactgacttgggcttcttgttggtgagttgtacttccatgtggcactgattttgtccacgtaagcactaccacgtcagttgggcaaaaattgggataacaaatatgtcattatctactactgcacactgcgtcaattaaataaataaaaaatcttatcattgtattttaaaatattctaaatatatgtatctaaactcaaagcaacacacatacaactaaaaaaattaggaaaaaactaaaaatatacactataaaaaaaatacacatgaataaaaatgtaactaaaaaataattgttgaacaaaaaatattttgaaaacatacttaaaaacacctaaaaaataatataaaaataataaaataaatgtacatatacacaacaaaaaaaaatatgtggaataaactaaaaatatataccataaaaaatacacataaattaaacaacaactgtacaaaaagaaaaaggtcattagacaacaatactacctaaattttagattttgtaacacttaatcccacaaactgattttttggtagtaaaa

SEQ ID NO: 272023 - DNA, 839 bp, Cannabis indica
gttctttccagaacattggcaaagtatactagtttcgaatgtattgaatatacattagaccagaccgatattgatcttagttaagatattataatacttatcgttgtatctttccaagtcaatatcactagttgatcttagatcaaaagatctaaatcctgatatgcttaggctcaatctcacgagtgctattcatgttctttgatttgttagttaagtctacttttgggttagggttatacgtacattttgggaacatgatcatatgattgagtgggagcgctaaacataaatatggaatctatagcttctctaattgtttagaagttaagtcatgatttccttcgagcttcgctaaatagaagtaaatggaagagctcttgtttcagtgactgtattttagttcactaaaacatcatttacaggtaactaagtgaattaaggagcaaaatacattgaggggtgaaacggtaaatttatccctactctgtgtaaataatctatatagaggatcttcgatcaattgagattagaacgattgctaaatgtgatagtgtatctatatggtggaacatatagagcattctatataactgagagtgcaattccaagttctaagagtggattccacaaggaattaataagttagggaatttacttggtaaattcggttcagcttattggaaactcaataatataagtccatggtccccattcaagttgagaccatactgcttgtaagactcagataattgattttaattaatcagttataattctagaattacactgtgtctagtttatgaattttcactaccaagggcaaaattgtgaagaaa

SEQ ID NO: 272024 - DNA, 1433 bp, Cannabis indica
agtccgctatgagggctcaatatcatagcggactcaatatccagagctattcatgttagattttgaggacgaaattattttaacggggggataattgtaatgaccacatgaatagattatggattagtaaaaaaaattagcattaattattgatattttataattatatatgattttatatttattatgacccccattcttaaaaataggcgttagagttacaatttctcaattttggagattttattaaactctaagagtataatttatgctaaatatgaattatgcaatttttatgatttttgctcggcgatgatggaaaatacggtggatggtcattagagttacatgagtgaatttagaacttatttcttagggagacaaatatttgtgatatttggaatatcaagtttaggcgggattatggtatttgaccattttactcctaagccattttgttaattaagtattaagttaagggtaacttagaccttttagcttggtggttaggtagcagactcccttagatgccagttagccactagttaatttagggttattatcctttttctcaaataattagaaaaatcaagtaaaatcaaaatttagaagtagcttcatctctttctctctctctttttcatctgaagctaaaccaagggaaatcaagggttttgatcacttaatttcagttatttaacaagattttgagggaattggaagctagaaatttgagttaacctcttactctttgtttgtttgaagttttagaggttttagttaggtttaatatttcatatttgaaaagtaagttatgttgatctaggttcttaatgatttttgaatagaatttggctagttaaggctagttttgctagtgtggggtgcgcttgagcaagtttgagtttaaaaactcaaatttggctcaacaatggtgttttgaatttttgtggttaattactgttgtttctggttggaatctattcttaggtgttattataggtgttctggaaagtttggtagagttttgatttgatttgagagactcttggaattttcagggttttctgctatgaaccggttaaccggttttgctcgaactatagaaccggttaaccgtttcactgggcaggaccccaaatttggttatccatatggagaaatctgatttacaattttgagtcatttttagagccttagttttggtgttttctcaataattagagtattgtaatgctagttatcgataaagaaacttttgatttagagtttaggtccccagaaagggttttagcaagttgtttacccatttatgtgcatgtgacataggacatccattcagcgcgtgattttccattcaggtcgactgacacacttaaattcggaacgaggtaagactagcatagaatatatttatatatgaatattgttgg

SEQ ID NO: 272025 - DNA, 635 bp, Cannabis indica
caactcttggtgagttggctattatcctccatgtctgaaagcctcctcactcgcatggtgggatgcaacaccgcacaacagatctggaatgcactcgaaaagcacttcacactgcaagtctcctccaagatcttggagtttcgaaccaaattacagaagcttcgaaaaggttctatgtccctcaatgactatctcttgaaagttaagcaacatgttgacctccttgcctatgttggagaagttctaagctgaagggatcatattgcggccatcttcaagggactgcccagtgagtatgacacttttattatctctactaataccaaaattgaggaatactctgtttcagaaatcgaagctttactgttggcctctgaatctcggattgaaaagactgatcttgatcaagatggtgatctcagtgcaaatcttgcaactattgatcttgatcaatcatctaaggccaatatcgcataccagaacttcaatcgtggcaccagattctccaatttcaatcgtactccctctccttatccaacaacccgtggtggaggccgtggatacccctctcgagcaactcctacaggtaacaattatggatcacctagttttactaacagtcgtggtgtttccac

SEQ ID NO: 272026 - DNA, 827 bp, Cannabis indica
tattttttaacattttttttttcaaatttacgatttgagttactccggtaatttatatatggtttgctatacggatttcagttgcgatttaggttgctttgttagttgctatagggatttctatgtggaatttcgtaaaaatacaaaaaaaaaaaattattttgaagtgtaaaaataaaaaaagctccgaaaaattatcaccatattgttcgcttacccttgtagtgtgactcgtccactacaaccttagtctccaaggttagaaccatctccatttttacttacaatgaaatcaatcacataactacgcaacacatgcaagtaggaattaatttacgtgcaaacggaattaatttattttattaaggtcgggtctggctttagacataggtgggttatgcatgtgcttagggactaaaaaaattttgcttttaaaaataacaaatttgttttactgattttaaaaaatattatattttttttaataaggacccaaaagtaattttttcttatggtctattaaattttaggaccagtcctaattaaggtaattagttaaaggaggtaagccaacattatattgattcactttaaatctaatcatcttctaaaccttgatcaatgtgggatcacaataaatttatgttttatatctaatatcaaatatacaacaaatggtcgggaaatgtgttttgtttacagagtaatttgcggtataaaaacctaagtttaactctcaattgcaaataaatacctaagtttaattttttacggttaataatacttaagttatatttttggaactctgtaggtacctgacagttaaa

SEQ ID NO: 272027 - DNA, 1570 bp, Cannabis indica
aacaggatattctttattaatttataatattattatatatatttaaaataaaattatatagatattttataattaaaaaaattaaatttaaaatacttaaaatcttataaatattttaatcatattttaaatttattgatttaattttaaattaaaacaaaaagaaaaagtatgtagatattttatataaagtaagttaaatataaaataatataatatgtttaccatattttaaattgaaatggttgtaataaggaattaattgctttccgttttagttatacgattcacacaccatattttttgtaaagtttgggaataaaaaacgtttacatcaaatatacgaatttaacctatatatagtcacacttaaatttggttatgtgagttttagctaaaaaatatatatctttatacattgaaagtgtctatttaacgacaattcttagtttaacaatgttgttttgtttcctccgttaactttaacagaatattcccaattaatttatattatttttttttattaaaaaaaatacacattccgttaacataacattattttattaaaataaaaaacacacattccgttaacatcccaaaaataacaaattatgctaaaaattaggagaagagaatgaaacaaattgttagggagacctaacaaattgtaagcttgatagcgataatgaaactaattctcctaaaattgtgattccattcgtaccctttataccccattccaacgttgagatcagatattaaaaagacttccaaagaatatttccgtcctccttttctccgacgaaatcctactcactattctcgccaagcttcccctgtctcatcgcaacaccaactcactcgtctgcaaaagatggctcagtcttcaaggtctggtacggtctctcaagcttctcgattggggctttcttcagtcgggtaggctgacccttaggttcccaaatctgacccatgttgatttgctttctgggtctttgatttcaaccctgaattctgatattttgttgaaccacaaaatgttttatgttcaaattggttctcattttttggcagatgctcaagctttccaagcccatttgcttcctcccaaggttattgatagagggcttcaagaactagccaacggttgcccaaatcttcgcaaagttgcattggttggtgctactgaactgggtctgttaagtttagctgaagaatgctcgactttgcaagatttagaattgcacaagtgcaacgacaatgtcttgcgtggtatagcagcatgtgagaatttgcaggtactgaagttggtaggcaatgtgaaagggttttatagctcaacggtctctgtttgttggtctattatacaaattagaataaagattaacaagagcataaatacttattatgtatagtacggtgaattaattaagtattttttttttactatttcacaattttattgttaagtctatagaaaattaaaaactccttcaataatgaatttttttaattttttttccttttcatttaataattcttctcttttaattatcaaaattatatgttt

SEQ ID NO: 272028 - DNA, 543 bp, Cannabis indica
ttaccaaggctgatcacatgatctactgcaaaaccagcccaacacccatctgccaaggttataaacttagctcaaatgacagcaagccctttggtcaacctacattcttttgcaacatcatgggagcgttccaatatttgactctaagtcgtcctaacattgccttcacggttaataaattaagccaattaattcatgcataagccaacacaacatcattggaatgttcttaagaggctactctgatacttgaaagggactattggacagggtatcatgttccaaccaacaaaataatggaataaatgccgactagacaggttctatcgatgacaggaaatcaaccacgggctactgtgttcacctataggagggaatttgataatgtggtgttcaaagaaagaaaaggttgtcgctaaatcctcaacagaggctaaatacagagcactctcacaaacaactactgaagctgcgtggttgttctccttttttaaagaacttatggcatgtttacttaaaaggaatgggaatgaatggtatggt

SEQ ID NO: 272029 - DNA, 1331 bp, Cannabis indica
atacttctagtggaattttatatccataaacatatatgtatatatgtataatatatacataccaagaacaaaagccgcagccctcataccaccatgcttaggcttggaaggtctgcctctccaatcaacagtgtcgtcttcaactgccacatcactcgtcatagtattatctcctttgtaatactccatggattgttgccttcttacaccttccattacataaatatatatagagttatggtctctcttaagtactgaatttcctttttattaaaaactcaccttcttctcccaactaaaagttctaagcaagagaaggagaagagagatgagatgctgcttagtatttgatatctctggtttgaataagaggcaagtgggcttgtccccaatttatagggccaaaaagccacaacctctctccggctcttactctctctcagattcttaaagcaaaatgttaatttgcaaaccccacccgcactacagccacgtggaatacactttctccgaagaagactctcaccccagcgtttagggttatacaaccaactttaacaaaattaaaataaagcataaataaattataataaagacatgttttcatgatatttatatatatatgctaacaaataaagcataaataaattataaagacatgttttcatgatatagatatatgctaacaaataaagcataaataaattataaagacatgttttcatgatatttatatatatgctaagaattttgtatataccaaatgtcccttcaagaccgttaaaatttttattttaataaagaaaaatcttacatggatgaaaagttagaggtataatttaacatatgtcaaaatttaagagacataatttaatacatattaatatagtctgcgaacatgatttagtacataaatattgatcgaattagtaaattgaattaattagacagatattcttaatttcaaccatcttaataatttaagataaatttttaacccacaaaaaatatgagatggcattataaaaattaattttttttcggcaatatgtttgtttcatcaccccatcttttaagtcttctcttttctcactcgagtgtaggcgtttttgtggtccatattctctatacttcttatgtaaaattaaaactttgaaggaaatttcttatataatagttgaatttgtagcccattagcaactcgcgcgtttggacaatataattgaattggatttattattgggtgtgagtgggattaaattagattgaataggactacaatgatttattattataatgttgaactgtataatagctacatacataaatta

SEQ ID NO: 272030 - DNA, 613 bp, Cannabis indica
taagtaaaaagtaaaaaaaaaaaaaaaaaaaaatccgtaaaaaaaaagcctaattttaagtaattttggtgtaaattttctttatatatatatttttttattatttttgtttaaattgctctaaaactagtaataatctagttggaggttatgttaaaagtttaaaaatacatatttctatatgtaagaataaaaaattaaattaaattcatctaatatttttataaattaatatgatatatttttatttgaaaatattttttgtgttagttatttttatatataaaaaaaaattaataacatttatgacatatttaaaaaacaaaagaaaaagaaaagaaaaaaaaagatatgacatatttctttagaattaaaataaagacttacggtacaaaaaaaagtaaaaattttttttaagaaaataaaatagtaaaatctgtaaagaattttttttctttctccaattattttttaaaatatttttaaaacaaaattctgattgctcactaagtgacatcccaacgcgtcaaatggcgcgtcctctcccatcagcagcaggtagggcccacacacatcagctattctctctcctaaagtacctgacaccgtataa

SEQ ID NO: 272031 - DNA, 2190 bp, Cannabis indica
ccaaactggggttcaaaacagtcgattttaagataagttatggattggtcaatcggtttttagattgcaccaatccataccgaaaatcgaattttagatttttatttagaaaaaaatcgaccaaaccgaccgatgctcagccctagtattttctggccaattcatgcttatccatagattattaatactttattgatggttttcatctatgcagtatcttttttaacatttggtattttatcgataggttattgacaaaatgtgtatggtttatcgatggtatttggtttatctctattatttcgttaattttagtatttattgaaaggttatctacacaatatctattatagatggtatctagttatttacttaaattattttgtcagttaagaatttattgattggttatcgacataatatctgtagtttatcgaaagtttctgatttgtcttaattatttttgtcaattatgtatttgtatttagtgatagggtattgataagttattgatatttttttagtttgcttaaattattttatcaattaggtatttattgataggtcatcgatttaatatttgtagtttatcgatagtctttggtttgtctaatttattttatcattttgtatttattgatagggtattaatattttattgatggttttccattcgacttaatattttgtcaattttgtatttactgataatgaatcgatactttatcgacgctttctactttgttgtatttttttggtctaattggtatttattgataaattattgataatttctcaatgttttgtcgatattttttttatttatagtaatctttttaattatcgatcatttgtcgatagtttttcgatagttcatgctaactgtatttttttgtcatttgcatatgcctccaaaccttatatagttccatccccagagtattttacaggtcgtgtgatgtgacatatagaggcaacaatgtatttatagtcaaattgtagcttgatagattcagtttgactgatagtgcaaaggaaaaccctttcagtcaattttggagggctggtactttattcttttcttcggggtgtcatttcactaattgatgcttcataaataaagcttgatgttgagaaggtagaagaaacacaattttacattgggaggaacaagatcaaatttggggtggtcgagtttgcacaaatcacaggcctcaacttcacacaggggccaacaaatgaggagaagagtgcccactcgggggcaaataggttgataaacctctatttcaaccgatttgatagtgtgaaaacggaactacttcagaataagttcttaaactttgacattctgaaagacgtgtacaagttagggttgtgtttgtttgaggaggcagtgttattggatcgtgagggaaacactcatattttgtctgatatacttagatatgttaaagatcttgattttcttttcaagattccttggagaagtactcattttccagacttatgtccaccctacaaaaaatgattaaatagaaggcaaactttgagaagaagttagtgctagatgttcaacacaagtgcaagtatacaacatatggcttcgtacctacattacagtattggacctatgagaccattctaaagattgggaagaggtatgattcgtctcagggaattcatttttccaggatgcttagctcgactaacaaggctgagattgggaagaatgacctcagaccattattttcaaatcaggtatgaacctttcttttatgttgtaaatagttagttatatcatttcaatagtatcccaattttttttgataggttttttaccatttttttgttgttattaacacttcttttgttgtgcgtcttaaacagcaattggtattcacgaaggggttatgtcctcgcccagatgaagaggcatatgccaggaccatcacttactaatgatgttgagattcagattgagatgggtattgatgaggcacagcccaaagatgacacctaggatcctgcttttttcacaagacaagtaaaaaaaaagtggaacattgaatctgctactattcttgagccagagccttaatttgttgcatcatctttagacgttgatcatgctgactgctgagattcagtggagaggttagataggatggaattgttggaaattatttt

SEQ ID NO: 272032 - DNA, 933 bp, Cannabis indica
tacacatggaagcagaactgtcagtcgacagactcagaaagaaaatcatataacatatcatataatttttgacttgtatttaggcgcccatacacctatttacaaggctcaacagatgagtaagaacgttctatactagagtatagcctctatacctcatacactacgtacttcactgtacgagtgttggtagggtttgtttcataccctgagtaccactgagtgatataccacacacactcagtaccttcccgtacatgtgttggtatcactgtaatatattctcaattaacattcactataccaatgcactctataccttaactgtacaagtgttggtagtgtcactaacaatttaagcatgtatatacacataacatatacatacacttagatattgatgtcacacattatattcagttcttaccttctttccgaattctactgtgctggccgacatgaacggaaagtctcgtgctagatggatgtcctaatcacaatatgaaaccgggtaagttacatgatcaaaaccctaatctcaggaaatgcaaaaccataaccctaggttctgttatactttttaggggttaatctaactctggaaatagggaaacactcgaccacggcgcggagtggacgaaaattgagaaaatgaacggcctagggaaccctgccaaaaccggttacctggtttgcaccagttcacccaagaaatttcatttcttgctcaatcctccaccaaatgcaaccaaaccttccagagtacctaattagggtatacacaatatattccagccagtatttcacagattaatccaatgaaactcaacttgccattaatgatcaaagctttgagttcaaagctcaaacttgcataaattcaacacaacaccactaaatcagctattagaagttaaaatcaatccaaatgaa

SEQ ID NO: 272033 - DNA, 2270 bp, Cannabis indica
gttctatgaggccaaagtacttgaggtagttcatcgacccatctacctttagcagcgtctaacttctttttgatagtatccttcaaggttttattaacaacttctacttgcccatttgcttgaggcctggatactgacgagaagctcttaataatcttgttcctcttgcagatctcagtgaataattcaccatcgaactgagttccattagatactatcttaatgggtattccaaacctacaaattatgttcttgacgacaaagtcgagaacttttttgcagattatggataccagaggttcagcccttgtccactttgtaaagaagtcgacaaccatcactgaatactttgctcctcatcaccctgtggagagtgccctagtcaaatcaatgtcccatattgcaaatgggtatggcgaggtcatcatcctcagttccgttggtggtatgtgagttatatgtgaaaatctttgacacttatcgcatttctttgacaaatttgtgtgtgtcattatttatcgttggccaataatatccttgtcgaataatcttcttagtcaagctttggcaacttgcattgtccccacaaaagccttcatgaatttcactgatgatctcatttgcttatgtgagaagaacacaccataggagaggcattgaatagccccttctatatgatttgccttctacttatgtatagcgaggcactatatataatagttttcgtgccgtttttgttagctggaagttgcccattgagaagatagttgactataggtgtcatccaggtaggcaagctatctatcatctcgactttttcctttcacatatacgtggctcgctttacaactcaactggtaccaagttcaattcatccagttcataatgtgaggccaattatcggcattagggttttttctcttgggatttgttcgattttgaaataatctaacttttccaagtttttccaaacattctctaggtactttgccatttttaagcccttagcattgtattcccctaggacttggtttacaatcaattgtgaatcactatggcatataagatttttaaccttcaacacttcagctatcttcaaaccagcaatcaaggcttcattctcaccctcattgtttgaagtgtcgaattgaaatcttaaggcattgtgaaacttgaagccttttggaaaaattagtatcacccctgcacccgagccatgctccttggatgctccatccacgtaaaacatccaagtatccgtgtctcactgaacaagaagattttcttctagagttattccttctaataagaaatctgccaaggcttggcccttgatggaggttcctgggtgataagttatgtggaactgccccagttcacttgaccattttatcaatcttccagaggcatttggttttgataaaacttgtcttagggttttatcagttaacaccttaatcgaatgtgcctggaagtaaggccgtaatttgcgagttgcgtgaattagaaataaggcaagtttttcaagagggggatacctcgattccgcccctattaacctcttactaacatagtaaataggttgttggtgctttccctcttctcgcactatttcagcactaatcgcatttttcgagacaaccaagtagagaagtagagtttctccagttaattattttgccaaaactagaggtgttgacaaatgccttttatgctcttaaaggcctcctcagactcttctgtccattcaaactttttgttgcctcgcaatacattgaaaaattgtaggcacttatcaaagtctggacttagaaatgaatctgttaaatgctgccattcttcttgttaacgcctggacttccttcggtttagtcggtgatggcatatctatcaaagccttgatcttctcaagattttcttcaatgccccttgcgttgacaatgaatcctagaaatttaactgatgaaactccaaaggaaaacttttttgggttaagtttcatattgtactttgttaatatctcaaagcattcgtgaggtctgttgtgtgaccttcactttttatcaattttaccaacatatcatcgacgtagacttccatatttcttcctatatgtctcgcaaatatttcattcactagtcgctaatatgttgcccaagtgtttgttaaaccaaacggcatgactttataatgataaagtctcatgttgttatgaagcttgtatgttcttaatcagggacatgcatttttatctagttatatctagaata

SEQ ID NO: 272034 - DNA, 517 bp, Cannabis indica
agaacttactctgctagggtttcgagtttgggaggctgagtgttgtgtttgagtggctagggtttctagactcttcgatcagtctttaaaccaaaagttcaatacgacattgagtttggtgtcgtggggattgaacggtgccgttttagtctaagggattaattagactaggaaaggtcatttttgaccttgatactgatattaaaatcatttgttggtgtagggtaaaagagtaaaaatcctacatctatcatttactttgaaattggtatctcacaaattattaattcacatcctattatcacaagaactagaccaattggtagaaaaaaaaagtaaaaatttgtgtatgagttaatttaagggtgcattaagtattatttttagaaatttttacatgaaaaatctattttatacaatttattacaaaattactcatacacgcttatacctacttttttacttacaaagtttgttttattacacatataccacttagtcatcattccatccatca

SEQ ID NO: 272035 - DNA, 622 bp, Cannabis indica
aggtaccagattactttaaaaagcaaaataaaagcttaaaattaaaataccttgtcattttttccaaataacatgttaattaagtcaaggatataatcaaaatatatgtatgagtgtcaatagtggaaataacaatagaatttaaaattacaattggttgaaaaaatcaatcaataaattacctttctctatttttcaatcaaatcaaataaatatttattaatttgcttagaacatgaagatgaggaagaagaatgtacaacaacaccaaagaaaattagaggagaatgataatcgtaccaaagaaatttgacgagaatgccaatcgcaccaaaagaaattagaggagaagtgagaaaacaagaagaagagagaaaattgtggactgttagggttaacttagattgttgaatctaaatatggaaaaagtatattattatttccattttttaagttttttattcttttttccagcttttaagttatttccttaaatatccatatttttctaattgactttataaaaatccagatttataaaaaaaaccctaaatttttttttttttttttagttacaaagtgattaaaatcactcaagaatttacgacgctcacgtccgcca

SEQ ID NO: 272036 - DNA, 519 bp, Cannabis indica
actgttaaatgtgatagcgtcaacgtacgatagagaaagcgagagaagaaaataggtgttcatcaaaccgctcaaatcgcctgtaccgcaaaaaaaatgcagtttgaaatttttgtggtgcactcgggtctgaatttttcttaaacagcgcagtgcggtgcagtttgcagttttgaattgttaatatgcggttcaaaccccaccgcaccgcacattataaaaatatcaatttttatatttatttaagtccaatatgtgaatatccaacccaaagcccactaattattgtattattgaaacttaattttttttcatatttattttcaagccttatggtatttttaattagtgttgctcaagctttgttgtatttgtgatagtttaattattggtgatagtctaaaccgcaaaaactataccgcaccgcactattttttgcagtgcggtttgggaaattagaaaaactgcatgtgcgaattggtttgaaaaaattatgaaaaaccacaccacccacaccgc

SEQ ID NO: 272037 - DNA, 846 bp, Cannabis indica
agaagagcttgaattttttctggattggcttcgattcctctgaaactgacaataaaactcataaatttccttgaagaaactctaaaagtacacttctttgaatttaatttcattccatacattaggatgatggaaaaagattcttctaaatcttcgatgtaaactgtgctggaaactgtgttgggcttttggagacacgttgaaggctttgtttggttacatggtattatgtcttccagatactaaccatgctggatcggatcttgcctaaacaagtttttactcgttcatccgaaaagactgatggtttatggatctagtccactatctgggcccattttttggccttggatatatgggttctatttattattaggatttaacatgtcgtttattggaaatacgaataacaccatcgatctgggcttacaaaccaagtacatataaagtgaaaagtttggttttgtttggagcatttttgggtaccaaaacaaggcattttttgagtttttttaatccagacgccgcaacccttacaagtttgataaaagactcattctctcccttagggcgttgcaatgctaattccctcaattttttttgaatttttcgtgaaacttgttttggccataattttttatttcgaactccgtttaggacatattttatactgttcaaaagctcatgaaagagctctataatttggtctagtctatgaatcttgattatatataaatgtattatgtgattgagaattaatcctattatttttaaacctgagactatggttaggattaccgacacttactcgagatcaccaattgattggaattctccacatacttt

SEQ ID NO: 272038 - DNA, 1234 bp, Cannabis indica
acaaaatagcatgaaagtctcccgtaggcaaagatgctcagcctacctcaaagatttttttctttattttttcttgactaaaagaaattaaggttcaattcaaaacatattccatgccctcaaaactcttccaatctcaaaagaatgaggcatcatgcacacttgacctgagcaggacactaaggatgtgattggttatgagtaaataaacaaaccaataggaattgaattaaaattaatgagtaaaaattttaatagaattttattaaatctgttctatttgtgcattggaatggcttttcttccaacatcaaagaaatgaggcatcaacacatgcacacttgacctaagcaggatactaagaatgtgttggttccgagtaattaaaacaaaccaatagaaatggaattacatttaacgagtataacagttaataaaattttattaaatctgctttatttgtgcattgtaatggtttttcctccaactttagattttttaaatttaaatttttaggacatattagaatatgtgctaccttcatgggttagatctatgaaaggaactacaatgttccttttcaaagcttttgagttattgggactagaggctacttattaaagttgatgtgctgcattgtcctcatatcttgcacccatctctctcatgaggaaaactaaacctgattcccttgatgaaattggagagaatttaaaagaaaacctgaaaccccaaataagaaaatccaaaaacaaaagttggcgatcccatggatgctggttgagatgaagaaaatgcaacttccccctatttggcacatcaacccaattaaattttaaaacaagaaaaagaataaaatcaaataatgccaacaaaattattaagtctttagaaactattagaaacccctctccttgaaactaacatttaagaaaaataataaatacctcttcattctgggtttctatcaatgggaagtcaatggatgaattccaatcattagtaactgtagctgaatcatccctcttgcatgacacagcctatataaccccagaagaaacctttcaggaactaaatatcataagagaagatctcccagattcactatgtttactctaaattgaaagcatggaccaaaattgttcaagattatgcttcaagtacattacttgttactaaaaatcttctcgttttttcactttcctttggacttttacttttttctttctttttt

SEQ ID NO: 272039 - DNA, 1105 bp, Cannabis indica
tcaatggtaagcttggttcgaaattgatgaaaccgtgatgtagagattgctttggtgagtccatcagcaagctgatcgtgagctggaacgtgcttgacttagaacgtgctttgtggtttagactatacataaggaatgtacatggggaagacctaaattgaagcttgtgtttattataaggtctaatgttaggaaaacatttacaaccaaatgttttaagagtggtgtaatcgggtgtgatgccaaaaagtttttgaataggtgatatattttgtaaaacaggtgtgggtagtctattggataagtaaatagatgttcgaaaagcttcatcccaatactttaatggcattgaagcttgatcaagaagagtaaggccattttcaactacatgtctatgttttcgttcaactaatctattttgctcatgtgttgtggggtaagggtgtctatgagtgatgccaaattgtttgagatgctcactaaatggtctaaactcccctccccaatcaatttgaagacatttaatctttttacctagttgtaattcagattatgttttgaattgcaaaaaggtctttaaggcttcaaacttgtttttcaacatgtaaatccaggtgaacctagagtgagcatctacaaattgaatgtagtacttatagccattgacagaagttgttttagctggcccccataaatcagcaacaattaattgtaaaggctcactataaactgtttgagaagactttgggaatggaagcttgtgtattttacccaagcaacaggcagaacaaaaattcaaaggatttttattgctgattgttatattacaagtttgcaatacagctttgacaactttttcagagggatggccaagcctattgtgccacaactcatagtcagagacttgagacttattacaatgagtacaagaagaggtttctggtacattatttggtgacacagaggctgtgagaacacttgaaacagtagagttgggagctacagatgcagtcaaactcttgggacagtggctgtgttggaaggttgcacatggaattgagagggattaaaagtatagaggccattctggtgtgtcccagtgaga

SEQ ID NO: 272040 - DNA, 620 bp, Cannabis indica
aagttcaatatcggtccattctaatgtatactccatacatctgatactggtaaactttgccaaagtcttgggaaggacataacacttatccaaggtgtaagtataccttatcgtggactatcatgtcagtctaactccagtgaactgacaaatcatgggaattaaacttttgaacatataatcatgattatattccactgtgctgatgacattatataatcataaacaatatatatatttatatatgttctagaggtaatagaatttatacattaaacataatcatgaaataaatcatgtgaaccatgcaacatagaatgatttctgatcttttattaattagtatatgagattatattgaaatgggttttatttagggtagacaacccaacagtcttgatttagtctacagagcctcaggttctggatgttagaacacaaggagacaggtgggtctctcccgcatctgtcctttctatagagactttcgacaagatactagctagtggtctagtaggagtgttcagtgtgagatacgcgctagagatcagagagcacactggcttacccttggttggatggcatggttggagagtcatatatgttggaattattttacc

SEQ ID NO: 272041 - DNA, 970 bp, Cannabis indica
tgcattcaatatataggggacacacatgagtatcttaccacttggaaaggaatttcactagcaaattgtccaagacaacctaaaagccaagaatttggtttttatgttttgaaatacatgactgacatcgtcgcacgtgcaaacctcaactgttacatacaagaacaaaaagctgtaagttttaattattgattatagtatttattataataacaaatatatatatacatatatataaaactaatataaattttaatttttttaacagtttgggggtaagcgggagtacgatccaaaaactaaattgttaccattacagcgacagtcgatagaacagttgatggcggtgatttaggatgatgattgaggctgaaaggcccaagaatttttcttccctatgttatttttttatatttacttatagttagatttattaacttattaatacttggactaatttaacaatgtttgtgtaatatttaattactttttgaaatgaaattatgtattttagccaattttaaaatatttgaaataatatttaatttaccttttaaaaaataaatatgtaatttaaatttaaattaaataaaataatatataaattaataaatatataatttatttaaattaaaaaaactgaaaaacgctcatatatggtgtcggttactacgccacctatggcgtcggttgtctataaccatttagcgtcgccctgatcagcgttggtagcgaattttgccaaaaccgacgctcaaagggcttaaaaactgcctttaaaggggtttttttgcagtagtgaattatttaaaactgtcgggaaaaatatagtattcccgacgatttaaaatcgttgtaaacaaaataggcgatattttttaataaaatgtaattttttaatggacccttataaccgttacctataaggatccattaaaaactcgtcacctacttctcgccacatttccca

SEQ ID NO: 272042 - DNA, 1557 bp, Cannabis indica
attgaagctttctactcggcctgggttgctaatcccatactagtacccaagccaaacaaaaaatagcgagtatgtattgactttgccgacctcaacaaggcgtacccaaaggactgctttccacttccaagaatagatcaacttgttgacgcaatagtaggacacgaaatattaagtttcatggacgcctattcgaggtacaatcaaatcaagatgcatccaccagaccaagaacatacaagtttttgaacagatatgggtctgtactgttataaggtcatgccatttggtctcaagaatgctggagctacataccaaagactggtaaataaaattttcaaagaccagatcagacgaaatatggaagtgtacatggatgacatgctcgtcaaatccaagaaggttgggggcatatagatgacctagacgagtgcttcaaagtgctaaggaaatacaatatgaaactgaatcccttaaagtgtatttggagtcagttcgtttaagtttctgggctttatcatcaatgcctgaggaattaaagccaatccagagaaaattcaagccccctagatatgaaatcgccaacaaaaactaaagaagttcaaagtttaactggttggattgccacactcaacagatttgtttcaaagtaaacagacaagtgtgtcccatttttcaacatcctgcgagaaaacaagcaatttgaatggacggaagaatgcgaaaaagcctttcaagagctaaaaatgtaactcgcaaaacctcccgtggtcttaaaacctctggatggagaagagttagggatatacctggctatcacggaacctgttgtaagtgccgtattgatcagagaagaaaacaatatccaacaccctgtctactacatcagcaaaaggctcattgaagctgaaggccgatatccattgatagaaaagctcacttattgcctaatcttaacaacgagaaacctaaggccctactttcaagctcatcttgttcgggtatacactgaccaaccattacgccaagtattgcaaaaatcgaacgcctctgaatggttgctcaagtgggtagttgagttaggccagtacgaaattatcgttcagccccgaacagcgattaaaggacaggccttagcagattttgtagttgaatgtacgggtaaagaaaagagcatttcagaaaacaacccagagccagtacaagtacctcacccgagcaatagtgaagacaagccaacttggaagctacatgtggacgggtcaggtacagatcaaatgtccggtgtaggaattggccttgtcacacctaggggcaacacctgcacgctgcgatcaaatttggatttaaggcatccaataatgaagctgaatatgaagctctaatcgtcaacctaaaactagcccgggaaatgaaagccgaacacattgagatctatagtgactctcagttagtggtaaatcatgtatccggagagtatgaggctcgaggggagaagatgatagcataactgagcaaaatacacgatctgctcgcacaattcaaaagctatgctct

SEQ ID NO: 272043 - DNA, 796 bp, Cannabis indica
cgataattagggtatgaagctaagggatgacaatttttcgttggtatatggatactttttcaattcatgacaaaatatagcaaaaaatagcaaaattaatcacacaaggcagaatcatcgataaaccatcaatatattatcgataatcaattaaaataccaagaaaaaaaatattactttgccatcgatatacgatatattattgatggtttatagatagtctatattattgatggtttatcgatagtatatcgatgacagactaacatttttaagcttggtattttaattgattatcaatagtttatcgatagtatatcgttggtttattgatgattttaccttgtgattaattttgctatattttatcctggatcgaaatagtattgatataccattgaaaaagtgttaaaaattgtcaccccttacctccttaccctaattatcgagaagatatcgatatataatcgaaaaagcatcgataatttgttaaaaaaacctcagttttgcgagataactagatcttgccatttcaaagaaaaaaaactagtaaaacaataccaatacaaacaacaaccacacagatctatcgaaaataaactacatatactaatctaaaatgtttaagaaattctttagacaacacctatccattattgaggtgaatgtgtgatttttttcgatggtgaggtccggcagttccaccgagagagagagagagagctgtacatcagtcggtttagtcggtttatactacatattttctaacccaacgtaaagatcggtttgtaaaatt

SEQ ID NO: 272044 - DNA, 1691 bp, Cannabis indica
agtgaaaaataacccatggggttccttgtgtgtactagagaagtgttctattgcttgctattgacctaatttttttatttttattttaatgatgggtatataaatgcacttttagggaccgttttttcttgggagaagattgttataaattactgtgcatgaaattattttggaaattttcattttcattcttttctgcatcataacctattaccttacttttattgtattaggttatgttgtaatggatgttatttgcttatagtgtttttggcttttcaggttaaaggttttgtaatttttaccatgattagtgagaacctattttggagaggttgatttaacatttgttggaaggtgaaattttgttagacttgaagatgagcttgatattaagattgaagcatcatttgccaaatggcttcagcagaaaaccgatagtttcctctgtcgtggcattaaatcctgggaaactaaatggattgtggcaaaactatagtcaaccagcaagaaatgatgaggaagaggaagaagaagagattgaccagaggagactccccactgattatgacccagcaacatttgatcctactcagcatcgcagtcctcctaccgaccgtgttttcaggcttgtagatgaaatatcaggacttacattggctgaaattgctgagctgggttccattttgatgcgtaaaaggggaatgacggagtcaccaagtgtgggagtcattaaagcaggagctgctggcttagcgggaattgggacgaaagcaccagcagctgccaaggaggagaagaaacaagaaaagactgtctttgaaattaaattagaatcatttgaggcagcatcaaagatcaaacttatcaaggaggtcaggagcttcactgatttgggtcttaaggaagcgaaagagttagtagagaaagcaccatcggttctaaagaaaggagtgtcgaaggaggaaggagagcagataattgagaagcttaaagctcttggtgcaaaagttgttttggagtgaacatagagcactgctatgtaagctgttgcaatttggaatttgatggagctctgattctagactactacccgtaaaattgattaccgaaacaaatctctcgaatgtcttgaattaagttttcgctcatcattttttgttttcttttttctcaatgagattatagttaacttaaaaggtggaaatttttgatgaagaatgctgcagaggatacttgctgtccttgtgttttctctttgtttcttaataaacatcttccattgcagctgtgtaagagatacatgtaaaattagctaatattagaaggtttaacacttaactgctggatatttgatcatagaatagaagccttctattgggtaagaagtcaacccttttagtagttttgtactcttgtacagtgctacatcccttgatttatttattcgtatggttttattatagaagtgcttagattagtaaggggtatttgcgggttgtgggcttgtggcatataaatacctatgttaaactgagtattttatattgcacatatcttaattactaaaaaaattaagttttattgatttctataacctcttaactcttaagtttcattttttttattaagctttattagggctgttcatctgatttaatctgcactttttggtcaaacaacatctaatc

SEQ ID NO: 272045 - DNA, 1367 bp, Cannabis indica
agtttatgtgttaattgatgatttaatgtgaattatgaaattctcattgaaaataatttatttttattctaaaagtattttatttggaatctttgtgaaaaattaagcaagtttagtttttacggaactcgattctgattaaaaacgagagagatatgaggttttaaaaattttgacgcgttgactgtctagcattgagccccatgtgcacagccactcagacaaggtgtttttgcccttgtatgaagcccgtcgcgtgcgtgtttgaaggcccgagcacccgagctgctgttcgatgatccaggttgtaagtagcctcctgcgtgcacgagcgaggctgtcagtagcctcctgcatgcgcggacaaggctgccagcagccttctgcacgcgcagatgaggctgctcccatcctgtgtggacatgtaatgaccacattgttaaaccatgggaattagcatataattaaggatttaatttttattttgtgattatatgtctcttactagaaattaaggcttattgccagaaatatgccttagaaaaatattttttcaactacaaagatatatttgaactctagatgcattatacatgctatatatgaaaatttataatttttatgttttctgcccggtaacagtggaatgcgataatttagccaatagagtcacatagatatggttgaatatgttagaattagcggggctagatatttagatatttggaatgttgtgattaaccatagtttggttttgaaccattttacccctagaaggtgaggttgcttcctagtaaagttaagagtagatctcttttggctttatttagtaatggagaataaatcatctttctactaattttccttaagtttaattagattaaaattatgatggataaaacaaattaagtctcatttatccaaactcatcacatactcttctctctttttctctcttagggttccgctacaagacaacacaaagagacccaacccttttctctataatttagtccaagcaaggggaattcagcttagatttttgtggtttaagggttgagaagattaaggtaagctaatccctattctgttggaaattattttaccaggatcttagatctactcacaagtatgttgattaacaccctaaatatgaacttctaaaacgattatgaaataaacatatataaagttttggaaaccttacattgggtacagcagaatataatgactccttccgttcatatatctagcccttgattcctttctatagcagagcattataaatatctgaacctggatcctaaatgtttcgaaatttcaaggaagaagagagagagggagtggcggccagatagagagagaga

SEQ ID NO: 272046 - DNA, 680 bp, Cannabis indica
tagaacctaaaagatctgaaaagaattaggttaatttataatctgtcattcacatcaagaaaaggatagcaattaggcattaacaattgggtagcaggattctcctccttattttctcatcttgattaatattcacttgtttctttaagtttcgtgggttacttttattctttttaaatcttaaaaaatattgatttgccaaatagaatcataagtataatttagtagtaattaatctactttcctgtggttcgacctcacttgcgtgaatttactacttgattgcgtgcacttacgtattgcttaacaatttttcgtaacaatagtaccattacattaattactatttttttttttttttttttcgtaatttcaaataacgaaaaagattaatcgttttaatatatatatatatatataaataaataattggaaattctaccattcactcaaatgaaattaccatctccactttcccatcttattattccaattgatacgatagaattaatgcatcccagaaaataaatgtaatattggactaacaagaactttcacatgaatgggaataggataagaatcatatataaatgacgacagtatatattaatatattgcatataaatatataaaatataggataagaatcatatatattgcatacgacaaagttaagttat

SEQ ID NO: 272047 - DNA, 1204 bp, Cannabis indica
tttttttacacaatatgaaatcgctactagttcgaaaggcacgagtacgattgcatacaaaaaatataaatttcggtacaatacgatacaatactataaatttacacgaataatataggctcaaacacgacaagacacggaatatataaatttaagcacaatatgacacgacaggcacgaaatacatgatacataagcacgaataatatattctgaaagctcaacatgttaaaaactttatattttttcataactaaaaaccttatagttaataattgtaattgttgagtgagattttgagcaaccaataattaaatctgtgtgaagtaattaatgaatgttaaaagagaatattcttaaatagttgcgtcattaatgagtcttagtacacgagttgttatattaatgagagtgtttattacagagaattttcgaactgcccctttttctgtacattcattggtgtatttataggctcattatagtggtaaaaatatcactattgccgtgtttgtatgaatcatgctttgcataatttcttaaatctaatcttagagtatgattgcctacttttattatgtatttggattgtctattggtgtttagtgggattttgacttatcccttatttatgacttgacaggtcatttatgcagttgtcaattgatgtatggggtctcgcgaaatttaaaaattatgggtttaaacacttaagcacgtctattcagtataaagtgttggatgctcttctccatgtcgtattaaatgcatatacaatatttttagcctcgagcagtgtgttatgctccggcagttctcctgtacccttctctcggtcgactatactcgcggagaagaatagacaagaggcatccattgcccagctagactctcccaaagatgactagtttgttattactcccttcaaacaacaaactccagagtaattaaggtggagtgtctcgtaacgtgggtcatattaccacttggttcgctcttgaactgccacatattttgggataaattttaggcagcattacccctcaagtctttttttgcaatttttcaagatgaaaatgattcaatttcttattcggttttgatgccattaattacagggtgtcagaaggattcttgagtggtgtaacttccttttaggggacccccttttccttttcttatttagggtttgatataggggcta

SEQ ID NO: 272048 - DNA, 869 bp, Cannabis indica
acaaaatcgtgggcagtaagtacaactttccttttatagaaaatgaaagtttagttttggttttctcttcaagaaatctgatctaagaaaatgggaagctcacacaaaatcagaatatacagctggttagataagaattaattgtgtaatcaaacttaccatttttacctcaatttccataaataggaaagctagacaactttccttccaagtttggatacacaaaataaggataccaaattaaacataccagcccaaaatatacaataaataacaaaatatttttatcaattaaatatgccaaaaataaaattaataggaataaataaatttctttgtgtgaatatagaatacaaaaataaataaaaagatagaagatcaaaattttagctaccaacaaatctacaaccaaatttaaataaaataagaaaacacaaaactaagatctattaatataaaaaaatttcctaatatcgacaaacatctagaaaggagtccctcaaatgattcaaatttacgcaaatgattctaatataatagaacacttcaagaccaaataatacttatgggataaataatagcatgggtaaataacggtataagtatctaaaattttaaatttgtaagcggcataaactcaatgtttatttttagcggcataactacctaatgtttgtaaaactgtaattttcttccaattttgtcagtacagactccgttttgaatttattaagaaaaacatttagaagtaattgatactacatgtttctgtctagatccaatgatcaagaatctggaccttatatgtggcctatttaagaaaataatagagcttgtactgacgaaattagagaaaaattacagtttta

SEQ ID NO: 272049 - DNA, 567 bp, Cannabis indica
ccgcggcgaggccctattttcccgtttttgagtttttatttttaccataatttttgattcgagaatccatttgggacgttcttgatattgttggaaagctcatttcgagctctatatgcttatctataattgaaatgcaaattatgtgattatgtgaaagtgaattttaggatttaccctatttgtgaaattccgggaacgtgtgactaagattaccggtgcttgctcaatacctagggatttggaatctccatatacttggaatatcaggtaagacagtagttagcacacagagataagcgttgtggcgctcgtgtttgatattatgcttgtgattaagtgaaaaaccaggattagggttattaccctaaagtgagcggttatacgatctagggttattactctagtgtttaaatgattttgaatccaatattatgatgtatatgttaagatagagaattatgcaagtaaagcataattaagttagactcgataatcagaaccgataaacaaatctaaggccttattgtaaatacacatgtgtgcgcaacacgtaggtctatgtta

SEQ ID NO: 272050 - DNA, 878 bp, Cannabis indica
ttttctctggtttctgatctacctctgacaaacaaaccttcaccatagccatttgacttgtcttcatttcttttctgaatttccttggaattcagtgcagatttcacctctatcatggacagagattcttttccatagagaattgtgtccacaaaatgttcataactctttggtagtgtgctaagcaacagtattccttgatcttcatcttcaatcttgacaccaatattacttaggtccaagattattcgattgaactcatcaagatgctttcttaaatcctttgattcatccattctcatagtatacagtttcttcttcaggtagagcttgttggccagtgatttcttcaaataaatcgatgccaacctttcccataaccctactgcagtgtcctcatttgacacttctctgagaacttcatctcccagactcaacagaatggcactgtgtgccttgttctgaatttccttcagtttcttcttgtcatccccaagagcagcaagctcatctctgtcaattgcctctgatattccttgatgtaccagaaatgccttcattttaattctccatagaccaaagtcatttgtcccattgaacttgtcaacttcaaacctggtagaagccatagcagatcagttcttggctctgttcttgatgttcttgatgttctttgtttcagttctttgttgatccctttcgactgagctctgataccatttgatgtgatcaatgcatgatcaaacacctcgcaaataacacaatgcaaagaacaagattaagaacagaacaagcaactgaaaattaaacaatgcaacagtgaaataaaaccagtaaaccagtaaactagttgcaagaaaaaccaataacaagaactt

SEQ ID NO: 272051 - DNA, 1092 bp, Cannabis indica
tggatgcacaataaatcacaaacttttcatcactcttcggtaaggttaacacaggagcggtaatcaacctttgtttcaaatcctggaaactaccttcacacttgtcagtccaaacaaacttacaattctttcgggtcaattcagttaagggcgtagaaatctttgcaaagccctcaacaaatcttcggtaataccctgctaaccccaggaaacttctaacttcagttgctgacttaggtcgaggccagtcacgcactgcttcaatctttactggatccactaaaataccatctttactcaccacatgccccaagaaactcacctgaggtaaccaaaattcacatttcttaaacttggcatacaacttatgctccctgagacgttgtaataccattcgaagatgtctttcgtgagtctcttccgagtctgaataaattagaatatcatcatccagaaaatctctgaacactcggttcatcaagtccataaatgctgccggggcatttgttaatccgaaggacattaccaggaattcataatgaccataccgggtccgaaaagctgtcttgggaatatcctcctctcgaatcctcagttggtgataaccagatcgaagatcaatcttagaaaagacagttttaccctgcaactgatcaaataaatcatctattcttggcagagggtacttgttcttcactgttaatttgtttaactcccgataatctatacacattcgtaatgttccatctttctttttcacaaacaaaactggtgcaccccaaggtgaagtactaggtctagtaaattttaaatccatcatcccctgtaattgaacttttaactctttcagctctgcaggtgccatcctgtagggagctttcgatacaggctcagctcctggtattaaatcaatctcaaaatcaatttcacgttttggtggcaaccctggtaactcttctgggaacacatccagaaattctcgaaccactgggacatgctccggtcccgctagtggttccctggaaatatccacaacacttgccaagaaaccaatgcacccttcacacaacaaatcccttgccttaagggctg

SEQ ID NO: 272052 - DNA, 1534 bp, Cannabis indica
tattgggtttctgttctactgttatccctggatgttatttaatgtttgccttcgactgatttcaaaatattactgatgtggtacatacaaaaatgtatgcagagtgcaactcaaataattttccttaacagaaagatttaccaaaacgaaaagttgaccaatgttctgttgaaatttgtaacccagaagaaacgagatctcataggtcttgatttttatttcatttttgttacttttcttacatgttttagtgatataggtatcttttccttttcaaatacttacggtagtaattagtaaaaaagaacaaaagaaagccttgaagcgatccgataactattgattggctaacgagtgttgaatctttgacaacgtgtaggtatggggtgtgtgagacccttttaaattactcgaaagctggattgtttttctacgcaacgttcgcagcaggtttttaaatacattccaatccaatcaaccagtaaccacaaccacaggacgtctcaaagttttggggcttgttttttttttttattataaccttctctcttaggacaacgtaacaatggcgtttttttttgttcatttgttttaatcatctttggttttgtgtatattgttctgtttcctctcgaaacgacatctttctttcccattaattaattttttattttttgtttttacacaaaatttgctctatatgcacctctgctcaataacacaatctcctaccataaatagtaaatacttgttgggttggggcaacttttgcactaaattattgcagattgtacccatttcgatactgcatctccaactataacttagtactacatacgggttggtgcaatctaaataattttattcatttttatttaaatgggaataattttattcatatctacaaatttattacaataaaataatattttaattaattaaatactaactataatataaaatggcacaagatataattattataaccttgatcaactaagtaaagctcctttgattaagtaattgactagatttacatcttttctaaattagagtgtgcaaatagagttttaaaagagtgcaaatggggtgtttttagaatcctctcagccaattcttagcagaacacagtggtgactttaaccttatcccatgttcctcaatctgaattgagaatatcagtgtcaccttagagtagttggtgtttcgtggtttgtttgatttgttccatattatatcatgtatgttattgttgataatagtttttattaacgggtaattaaactggattattataatttaaaaatactaatataaacacataaagatatttcaacataattctttaagttcaaaaggtatatttttttagaagataactgttcaaaatgataagaaaatttgattttctatacttacatatacctaatatgtttttcctaaactaatacttttctacattaaaaatatatgaccacttttccaaaatcccaaaaatacccctctctaaaaacttttcttttttttttttttt

SEQ ID NO: 272053 - DNA, 206 bp, Cannabis indica
tatttttataatttaaaattttacaaatgtatttttataattacaaatattttgctctaaaattataaataaaacataaaataataaaaattttaaaaatttctataagagaagcacttattccatttttttttcataaatttaatcacattaaacactatacttacctaattatcaaaaattaccaaatatgttaagacttagta

SEQ ID NO: 272054 - DNA, 1355 bp, Cannabis indica
ttaagttgcagtagataggttttggttttaagcctaagtcccgggtgtgatttagcgagtcacttattcgtgttattatcgatgtgatttaggatcctataattcgctgagcaattgttccactctggttgaccgacacacctaaattcagaattgaggtaagattagtataatgtcatgcatatgttattacatgtttagcgtacttgttgtcattgcctgttagattacattgatagcagtagtagtatacatagagttgtactgattattgataaatatatgttagctgaaatactgatcgatgctatcacgtcaatatggctagtgtatgactagcatattgagtataggctgacattatgatcgatagtattgtcttttgaacgttctagactcaataccgtgtgggacacggggattagggttatgatctggtgtatgggcgctaggttataacccgggttatttgtatgttatatgttatgcttttcttgccgagtctgttgactcacagtgctatcttcatgtgtaggtaagggcaaggctaaagctgaggagctgtgagaccgagcaggtaaagattgtacatgtcgaggcagttaggcttggagcgtacgatctttcggacatcgagacttttgttgtatagtcgctgggcgacaaacttttgcttatgtgtatagcaaaccttgaaaaagtgttttgtaaacgggatcccaaaattttatatatgtaatattttaagtttctaattaaataagcaaattttaattattcacgattttcaataaccctgttgattagcaacgagctgcatagtacgtttaaatcaagctaacacgcctatgctagttagggtgttacaatttgtgtaggtgcaggcacagaagaaatcaaggtggttcgggaatttctagatgtttttcccgatgaacttccgggtttaccacctcagagagagagattgattttgtaattgacttggcacctagagcagaactggtttctaaacccccttacagaatggctccaacagaacttaaagaattgaaaattcaagtgtaggggttgcttgacatagggtttttctcggcccagtgtgtcaccctggggagccccagttttgtttgttaagaagaaagatggatctttgcgaatgtgtattgactaccgggaactcaataagctaacaatcaagaataaatgtcctttatctaggatcgacgatctttttgatcaacttcaggggaagactgtcttttcaaagattgatctccgattgggctatcatcagctaagaatctgagaggaggattcctcaaagacagctttctgcactaggtatggacatt

SEQ ID NO: 272055 - DNA, 1038 bp, Cannabis indica
catcttaatttatctatttatctatatatctatggatcttcaacctataaatatatatatataaaggagagatacgaatgtgtgacaagacactttacaatcactccatatagttctatatattctctctttaattttctttattttttttttatttctattcaatttataactattgattcattaattaaatgaaaaaaaaatcatatctatatttatatatttaaatagaagaacaaaaaaaaaaaaaattaattcgtactgaatatatttttcaatatgtcaaattcatatttttttaattctacaaaattttaaaaaaaaaaaaaagaattttttttcgttaacctacataaatcattaaatatcctaattaaaacttatatataaactagtaaataattcgcactttgtggtagatgtttaaaaaaatttaaattatatatatgaaataaattatttattttatttaatgataaataagtaataaaattgtatcaaattttaatattattactttttcatataaatttttttaagaaatatgagaagatagatataaaataaggccaacccgacccaacaatttagaattttagtcttatatgtgtcatgtttaagacaataatgaaatttgtactgacaaaattagagaaaaattacagttttataaacaatacttatgccactaaatatatcattagatttatgctacttacaaattcaaaacattaagtatttatgtcgctatttactcaaaaactttattgtgattctctcttacttataaaataagtcatcatttattgtgttatctctatatctaaaattaatgttatcatcgtacttcacttgatataataaataattaaaataattattcaaccaaactaaattaaaattgaccattattattaatttgtgataattactaatttttattgtaactattatttgaataatatattttttaagataacattattaattttttaatgtaatttttattatgtgatattttttatttattattttttt

SEQ ID NO: 272056 - DNA, 530 bp, Cannabis indica
tccataggttcccactatgatacgacaaatccttacaccgacgctcacctagtcactcgtgacaaaggtagcatgtgtggcaagatgccagtactacaaaagtggcttttcccaacggtttataagggagtcaattttcaaaaccgttggaaaaggtaagcagagatttttcccaacggtttaaaactgaagcaaaaaaactgttgggaaaaacaaatgccaccagtgaagaaccgtgggcaatactaaatgaaaatttaaaaaaaaaatagtaaatgccaatagtttataactgctgggaatactaagtacaaccgttggctatacttagcattcccaacagttataaactgtaggaaaatattctttttagtttaccaaaaaaaaaaaaaagtttcaaatttaaaaagaaaatgaatgtttttttacttaataaaaaaatttgtatttaataaaagaaaatactttaaaaaagttttaaattaaaaaaaaaataaagaaatttgtacttttttcttttcctaaaaaaa

SEQ ID NO: 272057 - DNA, 572 bp, Cannabis indica
tgttgtcttgagttgttgaaacacggtattttcgaagagatttccgtgtgacagtatttttataaaagttaactcaaatttgagtatttttgtaagtttcccaaatacaaaaggagaattttcataaatataggaattgagggtatagtttacttttttatgacataaataaataacactaaaggttatgggtttttttattttttattttttttacatttatatagattttttttacatttatatggattttttaatgccatatttttgtaaaaaaaaatagaaatctcatatttgtaagacaataataagttttgctggaaaagtcggcggcaccggaaaagtcgtcgaaaaagttatcggaaatatcattgtcgccggaaaagtcgtcagaaaattcactggaaaagtcaactaaaaagtcaacgtcaacggaaaagtcaacgtcgccggaaaagtcaccaaaagtaaatatctcatatataactaaaaatataaccggttgtatgaataaaaactaataactcaaaccggttatatttaaattatatataaccggttctgtaatataa

SEQ ID NO: 272058 - DNA, 517 bp, Cannabis indica
aaatggattataataaatataccttcagtaatcatttaaaaagcattttcaatgaaaatgactttttaaggggcaattgttatactcgaaattcggttgtacttcagaatgtgacacgtgccaatctcatgggatatgaaccaacagatttaatgataattatgtcattaaatgaaaaatggaataactcattaaatatagaataaatagagtatgttcataactcgctggctgtatagtcttaagcgagatatggatatataaactatcaattcatgtattgacgagaaaccatcttgcctcagaatacataatatcgagggagctataaacaacgcataatgaggcatctacctcgctgtatgtagagaagtatcgacgacacgaattggttattggaacacttagcatataacctacattataataactatgcgtaataacttgaagaacataattgtctagtttgcaaggccttatggtcaaagagcagttcttaagtttgctcagtatattg

SEQ ID NO: 272059 - DNA, 1067 bp, Cannabis indica
ttcaaaaatacaaaaaatatatatataataatataattattttaaatatttgtacgattttatttattatattattatgtttgttttgaattttctttaaattaatcaaaaaaaaaaaaatagtccaaacttcaaatttaatttatagacacgctcgcacaagtcgaatgtcttttaagtattatattattatttaatatatcttaaataattatttctttttctttatatgatatgacctttctaataagaattaatgatagttaagttgccaagaaaagcttcactcatgtctcattttttaaaaataaacgtttttagattagtaaaagaaaataaaagtctcgtgtgattacataaaatgttatttagtatagaagaaagttcaactatgtcagtaatatttttgacaaaaattcatttagctacattatgggcaaacaaaattataagatttggaaataaacgaaaaattacaacttaacaaaaagttagagagatgtttattgatgtagatagttaccaatactctaactgaaacaagttactttcagcgtcttgataatcgtttcagagtcactctcaatcatcacaaaatgatgtttcaacgaaatagctgtctccatagctaacaggcaagccgcaacttctccaatgagagggttagagaatttgaacatgtttgtcgctacccacaaaaccgatcatgtgtgatccctagccaaagccaccacacatattgaaccgtcaccaactttaacatcacagttgattctgatccaatcatccagaggaggggacggaacaagagactcaacagccttcgacaaggcaaacaaacaagactcataatccgcataacaaatagagatagagtcaacataatgtttaatattactcaggtgtcttgagtgtatgattttgttttcatcaaataaataagtacaacactaactaataacaaagcttacataaatgaattagtaattacaacacaaaaaattaaagtacaactatattttttattattatattattttattaaaattataaataaacacaaataa

SEQ ID NO: 272060 - DNA, 1307 bp, Cannabis indica
ttattccttccatgtcttcgtgtgaccaggcgaagacatcttggttttcccttaagaactggatcaaagcggatcttatgtccttaggaagctcctttccgatattgactaatttggaaggttgttcggggtcttatggtacctcctccaattcttcaattggaccaacccctgtatcaatatccccaaaatggggatcaatgtcttcgaccccattttgggaagtcctcattgctgagaactactcgttgtagctttgatggatttggctgctttctccctggttgtgatggataggttgtaacactctcgtgctacccatttgattgcccttcaaacaaccaattccacccttggtaggaaatttgacatggaggtgaaagatggaaatttgacagggttgggcagccgattaaggcgttgtagggtgatactatatccaataccatgaataatgccatgatagtgacactcttggagactgttcccaccatcaatggtagcttaatgagcccagccggtgccataccatttcttgtgaatccatagatgagatgttcacagggttccaaatccttggcctccaagcccattctctccaatgaagacttgaagaggatattggcagacgacccattattgatcattgttcttgctacaatcatattggcgatttgtacttctaccaccaaaaggtcgttgtgtgggtatcgaacgtgtttagtgtcatccttagagaatgtgattgactcatgctcatatcgaggttgtttgggagctcgctcctggactgccaacacatcgtcacccggctcatttctcggagttcccggcaagatgaggtcctttagatataacatccaaacgaccagcaacggaaggaggtaacaattgttggtcctccccggtcgcctgttgttgttgtcgtgggggtcggtcgttgtcacgacatacatatcttttcaagtgggggttgttttgtctgatgaggaactctattttctccttcagattgttacactcgttagtgtcatgaccgtagtcattgtcgaatcgacaaaacttgctcatgtctcgtttgctaatatccttcctcatgggataaggcttaccgtatggcaccaccgagtgagtcgcattgtagatgttttctcttgtgtctaggagaatgttgtaggtagtaaaccttggggttggatctcgtctggctgcctcggaggtgttctttggtagcttgttgtcattgttgttaccgccattactgttattcccctcttgccattgttaccattacccccttgagagct

SEQ ID NO: 272061 - DNA, 1407 bp, Cannabis indica
gaaacccaattcaagtttttacataatccatagttgagaacagaaaatacataacaattaaataaacatatcaaatttaacacaatggtgttaataaactgtatgatcgtcttccataaacgcatgatctaaccttaacaacgacaaagatcacttcccttcaagaaaaattccaatctacacattgaaaggattgtcagaacaaatcaaaatctaaatgtttatgagtaattgaaagaaattgaaggagaaactgaccagggacatcgcggtaagaggaagcagggcaaagaatggagcgacccaattcggacaaattgaaaagaacctcaacggcgtagaatagcaagaccaaacccataaccagaggcatcaaaaagaagccaatcacaaatgtcacagatccgaatagcatcagagccaacgaaatccctagaaacagagaagcgaaagctgttgggctagagacttgcgaaaacgtcgatgcttgtctcgatgaggatgtcgaagccacccgcgatgatgatgatgatgacgatgaaggagaagacgacgtcgttccgattcttccgttggtgaagggattggataaagggggggatttgaggatgtgaaagatcatagaactgagctcgtagaaaaccctagattggtgatgatggtgctgttggtgctgatcttggctcctcatactgaatgggaatggaaaatcgacaacttagaaagaaagaaagaaaaaaataataatacaaaaatggatataaagatgaattaagcgtagatattaagataaggtcaaaaaaaaaatgactgttgaattatggagactgagatcgaagaagaagaagattggtacagaaatcttgggattcgcgccagaatgtgtgttgtggaccgcctaccaagcccaggcccatactagcccaatttcgtctttaattgggcgttgggctcgtttgtacatcctccacggccataatacggccataataagggtttttttttactaaaaatactggattttggtcaaaagtttataattttactgctacacagattcttttacaaaaatactctttttataaaagtattaaaacttacccaagtgaaaacttaaacacaatacacagtataaaacgtacacagtatttttgaaaaaaaattctaccccataataaaaaagaaaaaattaaaaaactttcaaattgtaaaaacccctaataaataataggaactggtattatcttatatttatttgttgttatgttgtcaaaaattatggtatcattttttaaatttcgaattagtactaaccctacctggtaaaagaacataaaaataatataaaaataacatctaaataacatacagataacaaaaactcaacaacaattaacaagaatacaa

SEQ ID NO: 272062 - DNA, 713 bp, Cannabis indica
gaagcctggactagggatgagcgaagtaaacttgtggttgattttgcttggaagtctgtctcctttccttgggcaccggccaggatctttaagaagattggggctactcgggttgctcttatgcattggaatagatcccagtttggtaatttagatgtccaaatccgtgatctcgaaagaagactggatagtgttcagaagctgcctgtgggatctagagattgggaaatggaaaaggaacttcgctactctctaaatgaggcccgggctaggaaagaagtgtattggaaacaaagggctagaatttcctggatgaaggaaggggacaaatgcaccaaattctttttcctgtcggcttctatcaaaggtagaagaaaagccattgaaagcatcctcaataaagacaatgtgtggataaccaaaagggagctcattgggaaagaattcatggagttcttccaaggcatctttaggggtactgaaaacgctattactcctaattgtaatggccttgtccggaaccgcctgtctttggatgaacagactgacctcatcagaaagccttcacacgaggaaattcgaacaaccctgtttgccatgagcagtggcaaaactcctggccctgatggtatgtcggttttgttctttaaacactattgggactcggtggggtttgacttctgtgaggccatttccaacttcttcataactgg

SEQ ID NO: 272063 - DNA, 3768 bp, Cannabis indica
aaaaaaaagaataattatggaatacaattaaaattaagatatattaataaatattgtatgtattttattatattttataggttttttttataattaccttgtaaatttccttttcgaaagccaagccccacagtatttaccatgtggcctaaaagtgtgttaatatctgtctcttagttgagactttaacaaatcagcaacctatttcacaacaaaatactctcaattgaagcaaggcgcctaaagtcccaatcttaggagccatctcaatttcccttcgcaagttcgcatatagtaaaccccgttagaactccatctgcaacgactccgccacggcacaaccatcaccatccgccgagagcccaggttggacccaatcaacggagccattcttcttttctccctcaacttcgagtccacgtcgcactcagccactgccttccactttctctctcatcactctgatcagattaggtggctccttttgctcatatattcatttttaaattatgtttgttttagcctatcttttgtctttttgatgagatttgcttttgtattttctctttctttcctttttttttttttggaaagtagaaatttcaacattatagaaatattagagaaatgaaaaaatgaagctgtagatttgtatgtagatagataatgcttaggcgtgtcttaacgtagtcgtatcaataatattaaatttatatgtgttaggagtagacctccctcactcaagtttcacctatactttgcagaaataaagatcaagaaaataataaagatccccaaaaaaattataaaggttcagctcaaaaaacttgaccctaaatctctttgaactgcccttaggatattctcttctccactatgaacatgaaacgagattacagcattccacccttgggacaaaatggtagatgagactaggataaaaacgaaattagttattttacttcagctattttcttttagctaatttttcagcagttataagttggtcttatttattggggtcagtctggtgataaaagtcttccaatgcctacaaaagcaatgttgtttacagtttttaattgatgatgcagaccctgagtggttcttggaaacgtgtctctgtttcaatgaatactcattttgttatgttggaattttaaagttttaaagacttgcatgacctataaaatctggatttttttagttttatttataattttttaaaaaaataatattagagggagcaaaattgcaaaatatgatgagttaatttcttgatgtacacaagatgatacgggatcaacttaacgcatgtttggtaaattaaattttcattaataaggtttgtgtttctaagtggccccactttttaaatttaaatggtggtaatattaatcccctccaatacttgggtttcatattctctcaaaatttactccctccaactcaaactcaaactcacgtaacaaacatgtcaagaaaaacattgaagttattagtgtgttggactcagattcgacttgaattgctacatatgttaaatagctgatgtttgacgtattatatgaatacaatgaattaagtatttatgtgcctatattatgcttataaaattactgcatgaaaaattgcctcaattagcttagttagtgtccaattattgaaatctagaaacataaaattaaaattttagtgtgaaaactattggaaataagcaagaatttatcaattaatgtataattaatgttggatcagactgaagcacagagatgaaggaccttgatcctaatcttaagtctgtcaaaaataagcaagaatttatcaattaatgtatacttgcacaaaacaaccaattattatgtgtttacttcgcctcaaattcaaccattattagtgtaatttttgtcacaatacataaacttaaaacggtgtgtaaatttcaagggcaaagaagggagtgtcaagagtggtactgggtagtgagagtttgatcagtggtagatatggcaatctcaacaaacagattgggaaggagatgggtgacccagactcgtaggactgttgggcttggtgatggatttcggttttcttccaagagactcttccgctctattatcattacccttgccttcattgctatcttccctcccatcttcttccatttcaggcttcgcagccttcatcagctccaattagaaaatgcagttggcttaataatcctccgttagtgtgtgcccatggtggtgactcaacaaaggcctttcccaacactgtacgttattattgcatcaatatcacataccaaatgtcatttgtatgttggaatatttcactaatcccatgacttactccattcttagatagctgcatatcactctgctctggcttctcaagtagactgcatcgagattgatgtttcacgttctttagatggagttttgttcgctctccatgacaggtttgattttgtttatttattttgttttaagttcactaggcacaaacagtcaagaggtcaaaactcacacatcatttatgcacgaacacaatgcacaattttgcttgtttaaggggattcaaataggtttcttactttaatatacaaactaattacaagaaataaacaggtagagttaacaagtttgctgccattagctgagttattgactaacttagcagaatgattgtaacgttattaactaattcacaacaaaattaggtttttatcctcaacaagatttattctgttgttcacatatgccctcacattggactctcatcataaccgatatgggatatttgtaatatacttactcttatacgtggttgtagttttaaatttgatctttgaattggataggcagagattcgcagaagatatccggaaacaatactcttaaggttggaaacttaagaatgaaagaggtaaaacgtatataaggcttcttttttactgcatcattgtgactgccatcctttttaataatgtaaatctgcttgtttttgttatagataaaagaactaggctctgttcatcatcctggccagatgtctacttcaggaattgttcctaccattgaggatgctttgagggtactctctctctccacagacatttgcattcatcattcttatacttcactttgacgatggttgtattttttttttagttggtatcaagttcagtccggcaggtgatcctagatgcaaaagttgggcctccttcatatgaaaaagggctggcaaaagatattctttctgttgtaagattctttggttttttctttattccatttttcataaatttgtagaatgtgtagctgatagtgattttttataccacaagcgtacactgtttaatttagcgtagtgtacaacccacagagatttaattttagttcactaagtattatttttataagtccctaattttaaatagaaaactaggattaaaattgcttaataaatgaattgtaaaagagtaaaatttcaacgaagtacacaaattaaatttcaaagattaaaaccaagagcatttactttcctattttcgattgtgaatctagatttctcaattatcccagtctttctcatgatttgtgatttccaacaaccctaatataattcaactacctctctcaagtgtaagtgaaatttcccatgatctaatgacacaatatctctattcaatatcaattaaataagaattcattaactgttatggttatttttatgaaattcataaaaatagtctctctctctctc

SEQ ID NO: 272064 - DNA, 3022 bp, Cannabis indica
taatcacaatgtcatttcttattcaatactaggctatttacactgaggaatggacaaattgcagaaaactgaacaattatacaatatctcccttatgtaacgcgttgggattatttagctattatgttcgccgaagcaacaactgtaaatggaccgaagttgttgggaaatatccaagtacctaatagagttatctatatcagaccaattatgttggagttgagtcgtacaacttctcacctgttatggctcggtcttaattatacatatatttgcctcacccctaaggggataatcctgatagtgtggatcgttttatgcctattgctctttgtaattttatctacaaaattattctaggataatatctcagagattgaggatggtgcttgattgtttaattaatctttactaatcaacgttcattccaggtagatagattattgaatcctctatccttactcaagagatttttgatgttattaagaaaaagaagggaaagggtggccttatggcgattaagatgggcatgaataaggtttatgataggttgtagtggccttttcttaaaaaaaattatggagctattcaattttaactcacttcatcaaccttgtcatgacgtgtgtaaccactgtttcgtattctatcttgctcaatggtaagcctttaaacaagtttcatcctagccgatgaataaggcatggagacccaatgtctccctacctcttttttgttatgcattgaggttttatccaggttgatttcacatgagaagtgtcaaggtagaattcatgtcatcgcattgctcggaatgcctcagaggtgtctcacttaatgttcgctgatgacactattttctttctaagagataaagaggtagaagctcctgctttggctgattgtattgaatttttttagaaatggtcttgtcaagtctgcagtaaaaaagtcaaggattctcttttcgactaactgttcctgcggctttaagaatgtgattgaaaggaggttgggtatgagaaattttcaagaaggttagaagtattttgggaacccttttctctttacccgtaacaaaggaaagattttaaattactaaaatccaaactttaccaacatcttgaaggatgacgtttaaaatctctctccatagttggaataatcgtcttcatcacttttgttgcacttgttgtaccctctaacccaatgtttacttttaaactccctttagcctcctatagagagttggatggcataatctgaaggtactgatggaatggtaatattgatagaaatagactttttgctacaaaatctaaggatgctttatgccaacccaaacaaagaggggagtgttggggtttcgttggatggaagatattaaccaagctcttctctctaaattttcttggatgttggatactggaatagaaagaccgtgggctattgctttaaaatccaaatacttccctcgagaatctttttggagtgtccataagaaaaacactgattgctttgtctggaaaggaatcttgaaagctcgccatacaatttctcagggttcttggactattattgccacaggtgaatgtattaatgtctagtggcagctctgtatcacttggttggactatgatagcttcaaagaagttatggaaggtattaggcttaaagcccctagtttgagatgtatggcaagtctgatgtacagacggactagaacctagaatcagggtacttgaacttcctctttggtttaggttttagccaggaaattagaaagattcaaattgctcaagatcttgagcaagatactcttatttggaaagcttctaagaacgattcttactcggttaaaaatgcttattgggaaagtcaattgcataggtttggaaatgagaactgtatttggaaagggatttggcatcatatgattcatccctgtatgagtatgatgccgtggagagtttgtgttggtgctcttctcacgggtgataagttcaatcctaacgcgagtgataactatcatttgtgccattcacggacaaaaagtcctctacatttgtttacactttttccttttgcagcgactctttggttcacctcccctattcttgttcaatcataccttgttcccgaagagaatatgagggaacgtatcacaaacatatgctctggtctccatacaacctccaggaatgctcttcttgtcaggcttgcttcagttttgaaattatttggcgcattgaaaatgaaatcatccatggcgatggcgatgctcccaatattgatcaagccatgttggatgtcactaaacgtttttaggaacttattcgactcccagacatttaggaacttggagatacaaaggtaatctaattaaaccaccatttttccctccccaaatcttgagttgtgatggttgatggatctttaaggatggaatctttagtgggctgttcttgccattgaaaaagattccttggactggtttgtagttactacacgtggtgttgctgtgaatgctcttgttgcagaaaaggaggcaattccttagtcttatgttaggcttacgataatcactgagataatttcattgtcctattttatgccaaggcgttggtccatgctattcacaagaggaaatcttcggattggcaattattggttttgtttttctctttgttgtaattcttggagttattttttgattgttatgttaattttgtctatcagggcaatttagcctttgttgataagcttgttaaagatgttcaattttctaataacggcttaataaaattgtaagtttctcctgtgaatctcacacttttttggatttaatttgtgtgaattgagattccttttttttttaaaaaagaataaataaatggattttagaataaaatgcacgaatacaattttattttgattgtttaatttgcttttttaacatcaatattaatagcctgcttacaaattagagagtgtgcagcgttatatactctctctctctctc

SEQ ID NO: 272065 - DNA, 2086 bp, Cannabis indica
gtttaagtggtttagccgccaatatactacaaaaaaaaattagactaaatttttttttctgaatgccgaaacaagtagagtgtacattattacatactttttaaggaatacatcgtagaatcacatactaataataagattattaccaaaaaatgcattttaattttttctacgagtcaaaattaattttttctacaagatattcaaaattaatattctataccgtagccatgaaattacaaaattttacccgattttattttggactttttattaaatataaaatactacttacacaaagaaagttcaacaatatagaaaaccaattacttaattatattctatcctaacgaaaaaccattaacccttttattaatcacctccctttcggatcataaatctcggagaacacagtcccagacaaccctttcatggactccttcgtactagaatcttccccactacaactgctgagtagtttagacatgccactactttttgactcagtcccatactccctctcccagtcgctattattattactattcattaaatcgacgtggtccttgtccttatcctcattctcactctcattctttattatagataatccaccaccaatgctgtcgttatcctcagcgttcttctgtagctgcattgcaaattcaaggccccacacgacgtcgttcatcgaaggtctttcggtaccattatcaagaagacaattcactgcaatatcgccatatttttttaagcactctggggcaatcctaccccttaaatgtgggtcgatgatctgatcaagtgtccccttatgatgacaattacgggcccactccgctaagcttacttgtttcttctctgcgtttcttactattggtggcctaccacaaagaacttcaaacaaaacgacaccgtatgagtacacgtcggatttttcagtcagctgttgacgcttataatattccggatccaaatacccaatactacccttcaccactgtgctaacgtgcgccttagacattccagtgggacccgtttttgataacccgaaatcggaaacctttgccacccatttctcatccagcaaaatatttgtcgttttcacgtcacggtggatgatcgtgtatttagaacccgtatggaggtagtgtaaaccacgcgccgctccgatgcatatctcgagccgttgtttccactcgatgggtccgttttcggtgttgtagagatggcttcggagggtcccttgagccatgtagtcataaacgaggatcatttcacggtcgtcgttgcagtagccaatcagagaaacaaggtggcgatggcggagatgagtgagcatctcaatctcagttttgaactcgttgaatccttgtgacgattccggtttcagtcgtttgatggcgacttggacggtcccattgtctatgtagcctttgtacacgttaccaaaccctccaactccaataatgaaaatttcttcaaagttgtttgtggcggctttaatctcagccaatgaaaagtagcgacacaaatcggacggtaatgaagatgaaccacgtgttttgcttgacttggtcgtgctaaatgagactgggccccaccaagaagttttgtccgaactgctggctgcgtatttgacttttctcctacgccggataatgaagaatcccacgacggagataataactatcgtggccgcaacgcctaaaacaacgccaataatagtaattagactacttttctttttctccggatctgtggatggcctggcaataacaggagtaggatcaggatttagaccggcaagaatacggttgttatcgctcaatttgaagatctcaactccatttaaaattgcatctacaaaagttgtccggtaatcatctgggtttggttgtatagcaacagaaagattaactttcttttgatcagtattattaccaaaccataagtagtctttgaagtaaggtacatattgacccggagcgaaattgatgatatcaaactttttctcaactagatcatctgctatgtaaatatgaaagacccgatcacccacctcagtaaactctttggttatctc

SEQ ID NO: 272066 - DNA, 3009 bp, Cannabis indica
cagtaacactgccccatgcttaacgtggcacctgaactatgccaaccaacccagagggagcccgtacgcccaataattcttgcagggaatctcgcagtgggcatcccctacaaagccactagcaagaatctcaccaaaggcctcataagaaatagtagaagcaggagagacacaattgtctccctgtgatcttgcatctagcatagaagactccattaggacatgatcgagtctgagctctaaaggctcacggagcctgttcagtggcttacaattggcatcatagtgacccaatggaaaatctaggagggcagaacaagtcctatacctcctccacctccctggtgcagccttctctagatcagattttaaattaaaactctcagcctcttggtcaatctatggctcaacatcaataggggttgagtgtctccttcaccatcctaactaaaccccttgtggtcaccctagacacgtgagggtcatatggaggcacccaacggagggtctatttcgttatggccataaatatgaggtacatgagggacctacgtagctatcaccacccttattcaacacccgagactacctgcatggaagaaataaggagaggtgagcaacttgacaaacctataaagatactcaagtcaacggtacccaagggtaccttctaggtaaaacataagtacaaggtcgatcaacgaccaagtaccgtcttaagtacacttactaagagacatagtgagtcttaagttgtataattgactataatggactcacaacctagcctgatatagattttcaaagaaaaccacgaataaggccacaattgtatatgcctccaaggccatcaccagaccttagccgaggtcaaaagagggaaaaaaactgactggccacttggagtcttgaccttactttgctagggttctaggccttagtggtcggccaaaccccaagacccagtctagtggtcagctaggaaccctaattcctatcttaggccaaccatcctaggggtacaacccccttggccggccagaccccatgaacacctcccttggtcggcaggcctcaaataaggcctccttagccagccaagatctgcatggatcaaaatatgtatttttttcaagaactcaaacatgttcttcatgttttttgtgactcaaagagccaagaatcacaacgaaagtcagattcagatctttttttgtctaaaaatcacacatcatgtatcctaaggctatcatgcagatcaaaatactaaaagaataacaatctaacataagaatcaaagcatgttcaaaataaggaatagtttttatgcatccatggaaaaatcaaccgaatcaagcaaaatagtgggaatacaaagcttacccactagaacatgtcgttgaagaagaaggtgggaagcttggatagtttacaggacacaagaatcccaagaagatgatgcttgtgggtttggtcctttagagagaaggaagagattttcccaaagcaagtttctagtgagagaaagtgaaaagtaaaaactgagaagtgaaaaaaggttttcccccaaatagtcacttacgtaatgcatgttggcctcttttcttcacttacctcacctacacatgataaaggcaactaaagcagctatttctctacaacaatgagattagacagtcaagacaaagtgctacaaaaggctaaaaaatgaatcaacttttattcagcaaagggtacaacaggctcgaccgcaccaacacaggtggtaaagtctctatccgtacaaacatctgcatagggacttgggggacaaatgttatcccgatttttgtcctcctgacgtggcatacttacgtggacaaaattagtaccacgtggcaataacactcattaagaagaaggcaaactcaacacctaagcaaacagagaccccagcactaaaacaggcattaagtgtcaaactaactccctcacaagagctagccaaccacccctgcctggccctatggtcggccagcattgggactgcaccatggccggctagcctgccctctacaagggcctcgccggtcaagaggtcctcagcagggtttcccatacacttctacatgtggagagcaactcatgggctataagttggatcctaatagcccaacatagtagttgaataatatctagactgaacggtattttggtcttttgtaattaactaacaaactatgcaaatatctagggttttaaactgtaatcaagggtttaggcttcctatataaaggccttaactctagcctaaaaactaagttgaatataagcatgaaacctccctccaagctctaagcctaagtctgacactttctctcttcctcacttcctctctcacacgcctacactagcatcatctcaacatttgagttttaccattattgattcatacattgtattcctaagggtgctattgtagatcacatctatagtaatctagatggtattactctccgtattaatataactaataggggagtaggtcattacccgttatctcaaggggggcgaagctctataaaaaattgtgtatttttactttttattcttatttgtgtaaacacgtgataagcatcgaatctatacgatcctgctatcgattgatcactttttgaggtcaacattttctattttcaaaaacctattaaaacacgtaaaatatattccaaagtagtctagtacaattctcataaaaatttatcaatttcacaacgagtacaaaataaaaaaaatacttacaataaatcaatacaaaagaatctcgaaaatatagtcgctaaatacaaataattatatataaaaaaaatagtagattgcacaaaaaattaataacccaaaaaagcctaatcctccattacagtggctacccaaacccatcagatctttactgtgcatgaaaaacactagagacagaactttgattatccctgtacggtggttgtacagtggcgtcacgactgaagagta

SEQ ID NO: 272067 - DNA, 608 bp, Cannabis indica
ctaattccccgccccgtgtgcattcctacgccttaggaaaaatcgcaaagtaattaattaaatctttatgttcaagttcatttaataatttttttttcaataaataatatagctaacctatttaatctttcttgtgatcatataattgatcttaaataagatttcattaaatttaattttgaaaaactttttgcaccagaaataataattattagaattattaataatatcaataagcaatgtaatttagaaaataatctaatctttttatatactaatatatgataattataattacagtaacgttggtagctattcaatcaccaaaaatctacttaagaagatatgtatttttagttaatatatgattttaaaattttaaattgatagaaaattaaataggcattttagttgtaaattattagttatgtatctttggtatatatcaaaatatgagtgatatatagttttggggaaaaagaaaaagtatacatatacggttatgtactttttaatctcaacattaaaaaataaaataagaaaacgtattctactaaatgaggccttaggcaattattgatatttagctatatttctgtgtacttaaa

SEQ ID NO: 272068 - DNA, 1077 bp, Cannabis indica
ggtccaatgaacctcgggctaagcttccctttcttaccaaagcgtttaatgcctttcatcggcgatattcagagaaataccatgtcccgatctaaaaatcaatatcccgatgctttggatcagcataactcttctgtttgctctgagccgcgagcattcgcgctctgattttatcaattgcctcacttgtttctgaacagcctcgggacccaataaatttctttcacccacttcatcctagtgaataggtgatctacattttcttccatataaaagctcataaggggccatcccgattgttgcctgatagctgttgttgtacgagaactcgatcatgggaaggtacttcacccatgatccttcaaagtcaagcctacatgcccgtagcatgtcttctaagatttgaatagtcctctcagattgtccatccgtctgaggatggaatgatgtgctaaactttaactgagtacccatagctcgatgtagactctcccagaatgttgatgtaaattttggatccctatccgaaacaattgactttggcacaccatgaagatgaaaactttctctaacatataactcagcatactaatcaatggagaagttcattcgaacaggtaagaagtgcgctaactttgtaaacctgtccactatgacctacacaaagtcgctctgtcccgtggttctaggcaatcctaccacgaagtccatagcaatatcttcgcatttccactttggaatgttcaatggctgcaacaaccctacaggcctctgatgttcatccttcacttgctgacaggtaagacacctagcaacatactcagcaatgtcattcttcatgcctggccacgagaacatggccttgaggtcttgatacatctttgttgaccctggattaactgagtaaggagtcgtatgaggctcattgacacactctcttttgataccgtcatccataggcacacaaacacgattcataaatcgtaacattcctgtttcatccactgaaaattcaccagtcttcccagctgaaatcctatctcgggatttcactaactctggatcttgcatctatgc

SEQ ID NO: 272069 - DNA, 1013 bp, Cannabis indica
ttagttaaatctaataactgtggtatttttgttaattaatatgaaataatttttttttattttattaaaaaattaatataataataagaaatatttttttagtgtaatctttagtgttgtggttggagtaaaaatactttttaacattaaatatagtcatagtgtaacaccaaatttaatgtgttcttagaaatgctctaagctcgccaaactaactctttatccgatcgtaatgcatttctagtcaaattactagcaatgcaattgatatttataggtatatggtagagtgatacattaggaaaagttgataaagtgctgttggtctttatgatgagtcctgaaagagccaatctatctttccagttatgtttcactcttgacactaaatgaaggtagttcattgttgtgcatgagagaggtatgcagatggtagaacactattgtaaggcatgagagagagcttgagctttagcaaacagtgaaagatgagttctcaacgaaaggagtagacaggcatgctataatttggtcctcactattccttataaccgacccaataccttttttgtggttatgaacatctaaggcagcatcaatattcaatatgaactcccccaggtggagtttaggatagtctctaaagtttgtagttggagttgactttgtagtaggagctactgcttgtgcatctattggtgtggattggcagtttggttgaagaagttgggcttctttgtagtcctatattaaagctttttaaacaggaaagacatcttctagtttgctagagggcaccctctgtatgctagaataaacggtctggaccaaacttttgcattatttttcatttagatgtttattgcttccaagtttttaacatttctatttttcattttatagagaatccacataccttccagagaggtctcgtagataacttcttgggcaccattgccaagagatcagatgacatcatggaaactgttaattccatttttggcatatttaat

SEQ ID NO: 272070 - DNA, 1266 bp, Cannabis indica
attgtgaagaaaagagattcttatttattaattgaaagactttattatgtctagttaataaatataattaaatacaatattatttagtaattaagttttagttattaaataattggaattggcatttaagtggttaaattggaaaattggcgtttttgagaaaatgagatgggaaaatgacaaaatggcaaaattgcaaagtgggcccattatccaaccaatggccggccactatgcatgggttttacccatggccggccctaattttgtcgatattccacctttttgtaagggtaaaatatcaaagtgtgaagttgaattgtcacaagttgtagctctcgtttactacaaaaaaaatagttagatgctcgagatgagttagaatctaatgaacctggtgcaccaggccacacgtcaacttgggcgttacttctcgagtagttttttgggggctcattttgatagttatagggcattcgagattgcgaacgaggcctcccaccctagttttcaccaaaatatgaagaatccatggggaaaaatttttatttgaagcgaaaacatgcgaaccaggtttcacttcaaccggagtgcttggcccacccttagatgatctcgttagctccttgagatcacttatatgtttgttatttctaaaaattgaaaagatgcatggaatacttttcaagaaactgatttgaaatcgcccaggttaacaaaatgtcaacatgggggctaggccctgcaccattatcaacctaggcattggatccatctttttgccacaaaataattccgtttgattcccaaaaatactcgtatctcagttatttgtgaaaacatagaatatgcctggaagacttctcagaaaaactactttgaaaaggcccaagttgacagcctgggtgctgggcacatcgctagtgtcaatattaacgttgggtcccagttctggctcctaaatgtctttgtttatttcttgaaagtactcaaatcttaattgttgatgaaaacaaagaaaattttgtgaagacttcatctgaactgctattggaagtggcctaagttgacaatatgtcaacttgggcgttgagaccaagcactaagtcaacctgggcgttgggtcccagttttaacctctaggtcgatctatttctttcttgaaagcacttgattccttgtttgagatggagacgaaaaaaatgcttgggatacttttgttgggattttatgccccaaataaacccatttcaatttaatctgatt

SEQ ID NO: 272071 - DNA, 910 bp, Cannabis indica
acccgatcccaaacacagacttggacctacatagttatccggataagaacctagacttggacaaagacccagactgggatcgaaattgtggacctatatctggaccgagatcttgacccagacccaaacttggacccgcactcgggaccaaacttggacctggacccgaacctcgacccagatcggggtccagagcaggacacaaacccggacacagactcggacccaaactgaaacacccacacctaaaatcagacccaaagctaggcccagactctgacccaaactcaaacctagaccaagatcagaatcaaggacttagaccgaaaactgaatccaaactcaaatcgagattggaacttgggattcggccccaacctataccgagacataggacgcgaacccgcacccggagccttatctacacctagactgaaatctggacccgaaccaaaactaagacacggactcgaactccgacccgaactaaaacctaaactcgaactcagaatcccaaatggaactagaaacgaactagtactaggaccaggaccaggacctaaacccaaacccgaacccagatcaaaacccagaccgagacccaaacccagacaataaccaggaccaagacccagaatcaagatagggaccttggaaacagaactaggaccgggacctagtacccgacccagacccgaacttgaacctacgactcagctcgttacccggcacaagatatgaaaccacactgggacccgaaattgggatctggatctggacacatggcttcgacaaaacccgcagttagtgtttggatttgggacccagccctagacccgaaccctgacaagaacccgaacccacacacagacctgaacccagtcctaaacccaaaagtggacccgaaccc

SEQ ID NO: 272072 - DNA, 835 bp, Cannabis indica
aaaaacttcaaatatattttcggtactaaaatctattcaaaaaatttaaaaaatttcaaaaatttataaagacagtgttgtaactattacaaatattgtcataaaaaaaaattgaaaacaaatttattcttgaatatatttttgagcacaaaaatcgactcaaaaaattataatagaaagttaacataacgtcaccgcttcatgtctcttgagaaaacttagagttctttcatgagatgggctatgaaaataaaatgcaccttgttaatatatttagtgctaattaataaatcaatttaagtcctgtgtaattctagtttgataaattatttactatatatatatatattgatttgattgggaattagtaaaagttggtgggaatgatgtgccgcaaagacgttgaattgaaaaggaatataccagttttgattctgaaagcatgcatggtcatggtcatcttcatccggggaccatatcatgggtttgaatcatatgctcctcttcctcgggtcgggccgggccccactaattgactccaatattttacatctttttcactacttaaataaaaagtgtaataatacatgcacacaaaatatatattaaaatattacactaattaatgtatctttttaattctgggttccgatttatctatggttaattggagggaaataaaattgacacattattataaggttttagtgtatattatattactcttaactgtatactagtgaataataatttattaaaaacaactatgaataattattacattaacatattaatttcatacaaggtgtatttgaatgttaaatttatgtttata

SEQ ID NO: 272073 - DNA, 969 bp, Cannabis indica
tcttgtaatttgatgattaaaggatatgcaatgattggtaaagtggaggaatcaaagagattgtttgagaaaatgaagcagaaaaccataatttcatcaaacactatgatctctgtgtattcaaggaatggagaaattgataaggctttgaatctttttgaacaaaccaaaggtaaaaaggatactgtgacttggaactcaatgatgtcaggttttgttcacaattatcaacatgaagaagctttgaaactatatctgtcgatgcgaaaatcatcagttgattgtacaagatcaacattctctgttctatttcatgcttgttcatgtcttggatcacttctacttggacaatcacttcatggccagttgaacaagaccccatttgaatccaatgtttatgtcgggacatcccttatcgatatgtactcgaaatgtggaaaccttatagacgctcagaaatcgttcatctgcatctcatcacccaatgtagcagcttggacggctcttattaacgcgtatgcccatcacggccttggctccgaggcattgttgcagtttgagaatatgttaaagaccgaaatcatcccaaatgctgctacttttgtagctgttatgtgtgcttgccgttatgctggtttaaccaaagaagggatgagaatttaccattccatgaggaaagactatggactagtcccaactttagaacactatgcttgtgtagttgacctgctcgggcggtctggccatctacaagaagcctcagagttcattgaagagatgcctattgaaccagatggtgttatctggggagctttgcttaatgcttgttggttttggatggacatgaaactcggcgagagggtcgcagagaagatgtttagcttagaaccgaaaccgttatacgcttacattatcttgtctaacatttatgctgttctaggaaaaatgggaggagaagatgaaagtaag

SEQ ID NO: 272074 - DNA, 584 bp, Cannabis indica
attgttgatccctattagtgtatttgatttcttctgcatagtcccaaagagctgcatattgttcctcatagctcccttcaatggtttttgttgcaagaagtcgagctctatatgccttattcctagatatttcaagcacataatccttgttaaccttttgttgaaatgatgagacaccctacttttcattgaccttgaactcttccctgtatttttcactcaaccattgagcaattgcaaatctattactcttagttctttttcataacttttgataacaaaagtggggctatcatcaattttggaagcataacacatccatgggcagttaacacctttacattgtgctctaactctatgagggtcattcttcttaaagaatatatcctttccttcacatagggtgtactccctaatttcttgcttaaacaactttcctgatacaaatgataacaccaaatcgaagatttctttgcccatgtcagttttagctctaaactctaggagctcaagaaatttttcctttttgaaccttttatttcttttgttcaactgtatgccattattctcatcaccttcatctt

SEQ ID NO: 272075 - DNA, 1178 bp, Cannabis indica
tactggttggaaaattgtttatgcattgtttaggtactctggaaggtttgcttgcatttggtggaggattgatcgaaaaatggaaattttggggtgaacaggtgcaaaccggcttaccgattttacaggtactggcaaaagaggctagccggttttggcaggatccccaaatgcttcattttctcgatcctcgtctattttagtgctgtagttgggtgtttcactatttccagagttagagtaacccctagagagtataaaaaaacctatggttgtgggtttgggtttcccggattagggttttgatcatgtgatttacctggttttcttatgtgattagggcatccatctagcgcgagactttccattcaggtcggtcagcacaccagaatcaggaaagaaggtaagaactgtatataatgtgtgatatcaatatctgagtgtatgtatatgttatgtgtatatgcatgcttaaatgtcagttgcacttgtacagagtgcatcggtatagtgaatattgtttatgagtactgaacagtgataccaacacaagtacgggaaagtactaagtgtgtgtggtatatcactcagtggtactcagggtacgaaacaaaccctaccaacactcgtacagtgaggtacgtagtgtatgtggtatagtgacggtaccctagtatggaacgttcttactcacctgttaagccttgtagataggtgtatgggcgcctagatacaagtcgatattatgtgatatgttatatgcttttcttactgagtctatcgactcacagttctacttccatgtgtaggtaaaggaaaggcgaaagctgaacatgagtgagcttgagctgggttgaggttgtacatgtcgaggcagctcgacctggagtgtccggtctcgggacatctggggttatattttgtagtcgctgtgcgacctggatattatgtattttggaatattatgtttaaaattttgaaaacgggatcccgaaacttgtaaatagtttgtaaattataaagtttaatatttattataaaatttttaatttgacatggtttttgagaaaaatctttgattagcaaggatagcactgtaattgaaaaagcactataacgtgtcttagcatttgggtgttacgtggtataatcgatgatccttagatccagatcgggct

SEQ ID NO: 272076 - DNA, 2481 bp, Cannabis indica
tgtaacttatgcacacattataactcctataacatcaaaacttctaattaagatctgcaaaacgtttttacacactaaatataaatgtggaggttacacatagtaacaagtaactatgtcatatgttacaaaatgatgacaattaatataaattgttatatacacacttattagtgttacacatatctatatattatattatttataaaacatataacacacatctcattttacctcccaaaactctctgaagctctctcctccgacaattccaccattaccattctctccttcttgtctttcatctcttactcttgcctctcctgtcatactgctattaatataattaagtatttgactgtacatataatttaatttaatagctattatgaaatattgttaactatttgtaaagtggccgtgtactatatagacatcactattgctaaataataatattctttcttaacataaaatattgttattagatactaagtggatgcagggccggtcctatgtataggcaaactaggcccgcgcttagggcctacttattttaggagtctaaataaaaatatatattttaaaaaatacacatattttttttaataatttttaaaaatactatttatttttattgtaagggttcaattttttttttttggcccatcgtccattttaactcaggccggtcctaagttgatgatatacatcttgatcttgccaatagttattaatattttttaataattattaaactatataaaaaatatgggactcgatatactaaattagagcagcaacaatatattataagaaaatgttactaaataccatcaatgcactttaggatatttctcttattactaataatatctatatatgcaaattgctttgtatgaggatgatgatgatgaaatgtttccttttccagcatggcatgcatgcctaatttatgaagacaaaattaattaatatttggcttgcaaccacacgtgtgcatgcatctgctatattattatatatatgaacagtactaaggttcaaagggaaagacctagatgtttttaataagtacatagttattattatcatgatttttgctacctacaataaacttaaaaaagatacaataataatgcagacaaatatatacttgagggtcatctcccattatttctgagctaaatccaatatacattattaattaaacagggtatatatatatatatccaaattatatataatgacaagataatattcaaaatagctcgaaaccaaattaatggaagtacaagtgggatataaattaattattaatacaactaataggaaatttgaggaggtgcatcttccattaatgggaagattgctagttaggaacacataccaactatgatcaaattattagacaacttgatgaacattttgattaatttgtaattaatgcgtacatacatacattcattcaccatataattttctaaaccgaagtatatatcctcagattattcaatgtatctaacatatcccctcaattccctgttcctaaaaaaaaaaaaagaaaaacataatcctttcagttaagtacttcgactatagatagaaggatctctaaataagagatcataatcttgatcgattttcctgatccaaccaagagtggaaaaatccacgaaaccgcaaaattcgacaatcgcacatggcacttctagttctattattattattattattattattattattattattattattattattattattattattattattattattattattattattatggcgtgtgtgttgtgtgcaaaataaacctagctaaagccagccattagtttctttgttttatcatttgcacatctagtacacttcggaatatataaccaagaaggaggtaataaactcccaagaaacggcctattaggggtgggcatccgatccaatccaaccttttttacctcatccgatccaatctaattagtaattatccgatccaatccaattagatctcaaaatccaatccaatccaatccaattactaattggatttgatcggttttttaattggatatccaattacacacctaaatttcaatattagtttaaaaatataaagaaaaatacgtaaaaaactaaatataattttttatttaagtttaatacttcataaatatactattcttacaagtgtattgtagctaaaatttttaaataattaaaacaataacatttctaagtaataaaatagaacaaaacatcatgaaaataaatacactaaacaatcaagtgttacaaattcaacatacaaaaaaaatctaaataaaaatataataaatatttattatatttttcaatatttttattatataaataatttttaatatatataaatgtaattggattggatcggttttaatttggatattttgagattggcatccaataaccgatccaatccaatta

SEQ ID NO: 272077 - DNA, 524 bp, Cannabis indica
actaggccgaataaaccctatgtcaagcaacccctggagctgaatttttaattccttaagttcagctggagccattctataaggagccttggaaaccgattccactccaggtgctaaatcaataacaaaatcaatttcccgctgaggtggtaaacccggaagttcttcaggaaaaacatctaaaaattcttgtaccacctgaatgtctgctggctgaatagggttaagccgagtggtgtctaataccacggccaaaaaccttagacatccatcacacaacaattccttatctgataaggccaaaatcaccgggattcgagacccctgaaccgaaccgacaaaacaaacggttcttcacctttggtggaaaactccatctctttacagtcaatactggttgaatatttggacaggatatcaattcttagtatgatatcaaaatctgctaagctcatttctattaggtcagcacttaactccctatcgtcaattctgatcggcatagacctaatccaccttttgga

SEQ ID NO: 272078 - DNA, 1021 bp, Cannabis indica
gaactagttatgagactagtactagtggttcaattagtatgggcgcttggagacttgagcatattgtgcaggggccatcctccctcttcgggactacttcaaggattacataaatcaaatcggggttgccccattccagctgaatcccatctcttacaggattcttgctagtttgaaagtcttgtacaaaattatgaattggggttgtcccacgcccgtagagattgagtatctttactcaattaaagcctttccatcgaggaaaaacgctagaggggatttttctatcttagcactcatgctagcaagccaaaaattatcgtagacttgccaaataaagtgtccttcaaggacgacgtcttctggacgtctcgtctctcccctgttggcacaaccacatttcgcaaactgcgtaagtgattgttctcttccttattatttacagcagtcttcctttttttaagtacttgactaatgtgttgtttgttttgacagctcttctaacgagacctacccctacccccgagatggttagtaggcacaggcgcttgatgactctcccttacggtcttcgatcatgcaaattccttttgaacgaagtaaacttgcgatcgacgagccttctcagtaacaaagaatacacttgcgattacaagattcccaagtatacttcttggcagtaaataattgttccacctgaagaccaggcctgggatcgcttggcccaagcataataccttcaaagcatcgcccctcgggaatctggtgaaggagcatcccgaggtaatcaatgtggcttgtcacctactgtacttagggctgagcgtaatcattagtaccttcccagattcttgtcttaattttatacttggatattattatcgtgaccgcatttctcataagtttgacattttggtaccctagattccatgtccaaaatcaactatcacgagtcattttatggtatagccgagcaatatggtaccatggaagataggggcaggtcacatagatgcgagct

SEQ ID NO: 272079 - DNA, 1979 bp, Cannabis indica
aacgcccaggttgacatgtgacgttaacctagatgctgggtgagtaggaaaacgtgccagcatatattttttgatgcctaagtgatatttggacatcacttagcttgtttctgtgttctggtgaagttggtcaccaattttcagagatgttgctgttctgcaaaaatgggagacttgaaactatccgatcttcaagtaagtcactttaatggaaataaaaatacgaagttgtgaatttaaatcttttgacttcatagatattagctactatgaaaaactagatgctcgagacagaattagaattggataagcaaaacccagcgcactcgaccatatgtcaacctgggcgctggatgctctttccggagcttccaggatgtctttttgacacttccaaggttcttgaaattaaggacaaggtcttctaccccattttgaccatttttggagagaattcttggagaaaaatttgcattgagtgattgaaactagcgcatcaggtcaacgtggcgttgggctcaattttaaagcccttataattgttgttttctcccaaggtttacttttatcttcgttattttttatgacagaaaagatgctcggaacaatttttcagaaaagtgattggaaacagcctaggttgaatatatgtgaacttagacgctgggcccagtgccaggtgtccacctgggcgcaaggtccagtttcaggcctcttggaagttccgtttgctccccaggattggttgaatcttaatctttgatgaaattggaaaatatgcccagaagaattttcagataagcttctcaaaattagcccaggttgataaaatatcaatgatatgattattactaacgatgatctatagggaattgaagtgttaaagttagaattagcttctcaatttgagatgaaggatttaggttctctgggctatttttcgggtattgaagttgctttttgggtattgaagttgctttttctctaaaaggttacttctttctcagtcaaagtaaactactaactttattgagcatgcttgccttgatgatactagagtttttgacactctttctgaattgaatgttcaatattctccttctgatggatctcctttagaagatcctactttttagcgcaccattattaacagtttgatttatctcactattactcgtctaaacgttgcatatgttgctcatattgttaagttagtttatttcttcttgtactactgttcactgggctgctattccttacattctacgatatcttcagagtaccatatttcagagcctaccttctacctcttctctggagttgcgaacttactatgatgcatattatggtcatgatcctacagaccgaaaatatgtcactgatttttgtatctttttgagagattcccttatttcttggaagagcaagaaacagtctgttgtttctcaatcttctacggaagctgagtattgtgccatggcgtctactactaaaaagattgtttggttgagatggttacttgtagacatagatgtcattcactcttgtcctattcttatatattgtgataatcaaagcgtcattcagattgctcacaactcgatttttcatgaacgcgcaaagtatatagagattgattgctatatttttctcgtcaccaactgaagttgggcacaattactttgcctttaatgcgttattcgttacagcttgctggtacttttttacaatcgcgcataaatttctcgtttttgtattcttttaggcaaacttttaatgcttcttgcaacaacatcatgagtattagtataggtattaaataattgtttagggtatttgagtcttttatgttagtgacttatattagactttcttataattgtggtacttcaattttgacttcgcaagtgaataaatcctaattttttttcacacctcttattctttatctagttattcttctctaaataatttttcaa

SEQ ID NO: 272080 - DNA, 600 bp, Cannabis indica
ttgatagggaaactacctatgtgtatgatcatattttggaatctataacaggtttttgacacaaaggaattaataatcttttttacattcatatatgttttattttcaaaatatttgttgatacatatacattaatcaaagaacaatatttgaaaaatgttgagtgtagtaattgcaatctcaactttcaattaggcatttttcttcaagtgtaatgagtagtcccagaggattctcctacttcaatttccttaggatgatcatgtggagatttaacttgtgatccttccattaccttttcagttttttggatttcttcgtctatatggatatcttcttcaatggttagtatcttcatttgttcaccatgtggaccaggtatgatagcttcttggactttcatgtgttcatcaaattttacaatctctgttttctcagccattcttttcttcttcttcttgatgaagcagcacagagcaactgagaggaaagcgaggaagaatagaccgccaagtgaaacaaagacaacaattataacagttgaatggtgtcctggtgctggtggcggaggtggaacaatgtgaggcggtggaggaggat

SEQ ID NO: 272081 - DNA, 1161 bp, Cannabis indica
ccaaccactctagacctatctctctgtgcaatgtcatatacaagatcatttaaaaaattattgccaatagaatcaagcccattttaccctcccttatttgccctacccaagctgcttttgtccttggtaggaatattcaagagaacaatgtgattatccaagaaattatccactctttcaatcagagaaaaggcaaagatggttattttgccattaaaattgtccttatgaaggcttatgacaaactgagttggagatttattgaccatgcgctatcttgttttggggcgcctcaaaagtttcagagttggatttctcagtgtattttaaccacctccttcaatatttgccttaatggagggcaatttgggaagattacgccctcttgtggtcctcgccaaggggaccccctgttgccttacctcttcattttggctatggaaattttatctagattgctggttgatgctcagtgtaagggcattatcaaaggtaggctcagtagggaggccctattatttctcatatcttctttgcagatgacctaatcttggttggaaaagcgaatatggaggaagtcaaaggctactagtaatgccttgagaggttttgcgcctggtctggatagcaagttaataagctcaaaatttttattttctttagtaaaaattcttccaatggtatgaaaagaggaatcaaatctactctgggaattggatcccctgatggtaatatcaaatatttgggttacctcttttcagatccaatcaaaaggatgtcgatttcaattttatttttgataacctcacatctaaacttcagggctggaaagctaagacgctgtccaaagcgggtcgtgccactcttataaagtctgtgggtttatctttgcccatgtatgctatgcagacgattaaactttccaatcgcattgttgctaagattgatggaatggtttgtgacttctggtggggatccaaaaagggaaccatggactgcatctaaaagcttgggataagctctgcctccctgaatctttaaggggccttgactttcgaaaaattatagaaatgaattaagcttttctggcgatatgggggtgtaatcttttaattggcaaccaatccctttgctgctggatcttggaagccaaatacctta

SEQ ID NO: 272082 - DNA, 691 bp, Cannabis indica
tttaatattttaatctatatattaattaatttttttttacaattttgagagcctgaacagttgggggcccaagacgcacgcctaactcgcttactctcaaaaccggtcctgatgcttggggtggggttcacatattgcccataagaaagtacttggacgagtgtgaaatggtgaaataaaaggaacttctttgaaaaaagtatattggttgaccgctaaatgagctttttatatggtttctttgaatattcatgtgtaggaataggagtggatatgagaggatggtgctgttaatgatgccaacaaggactgattttgaagtagtagtgactaatgaaccaaaatgattctaagggtggacatgagtgggcctaagaacacctctaaagaaaagaaagaaactaggatcagatgcttctctaggcttggaccctttgtgaatggaaggttgaatacataaaatatcctagaggcaatgatttccaaacgtgggtttatcttggaatctcattgggatttaccatggatttgcttttcccaagaaaagtaaataacctttgagaaatggaagaaagtggggtaaccatttggcatattaaaaaaactaaagcactggtcaaatttggaaatcattacttgaaaagtattggcatcattatttgcacattaggaaaacactaatcaaaagcta

SEQ ID NO: 272083 - DNA, 875 bp, Cannabis indica
attatattgaaattagttttatttagggcataaaacccaacaggggctacatatcaaaggcctgtaaacatgatgttcaaagatcttattgggcacaacataaaggtgtatgtggacgacatacttgttaagtcaaaaaaggatagagcacatgtggaggacctagacgaatgctttaaaatcctctacaactacaacataaagctcaaccccctcaaatgttctttagcaataggctctggaaaattccttggcttcatagttaatgccaggggaatagaagaaaacctagacaagatccaagcccttttggacatgaagttacccaaaactgtaaaaaaaagtacacagggcgcattgttgcattaagtagatttgtgtctaagtctacagaacccttcttcaacattctcagaggcaacaaaaaaatttagtggatagaggaatgtgaaaatgcattccaggagcttaagaaacaattagctcaaccatttgtgttgtccaaacccttagacaatgaagagctaggcgtgtaccttgcagtgacagagcatgatgtgagtgctatcctcacaagagaagaagatggtgtacaacaccctgtatactacatcagtaagagactaatcacgctgaaagtcagtacccactcatggagaagctgacctacagtttgctcttggcttctagaaagctaaggccctactttcaggcacaccccataaaagtgtacagcgaccaaccattgcggtaggttttacagaaacatgatgcatcaggccgactatcaagtgggccattaagcttggctagttcgaaatcacgtatcaacaaagaacaaccttaaagggtcaagcctgttggaaattatttta

SEQ ID NO: 272084 - DNA, 1843 bp, Cannabis indica
ccttacggggtctgacgtcctcgccgaccacactttcggctgagtcaaggctttgataccaaactgtaacaccctaacaattaggcacgctacgacaactaataatataacccgctaaaccaggattactagaaataagagcggagaaatttaaactttaaattagctacggaatgaggaatgaaaataaataacttgtaattatataacttataaagcctaccaaaagattacatgcatttcatgatcccgttaaaattttcacaaaacattacaagttacttttacatgccgacctaggtggcaaaactcgagtatacaaaatacgtccactggtagacccaacccgcttggtctagtatggcccgaacatgtacaatccaccgccgagccctcgcactcatggctaatcacaaatagatttaccttttcctgcacaatgaagagcccgtgagccaagcccaacaagagagtaaaagataacaataatattatgcaatataaatattcaaaatttatataaatactgatgccaccacatctactgtctatatattatagaattacgtgttgctctcacacgtctatttacaataaggctttagattggtttatctcgattctgattaccgagtctaacctaattatgccttgtccgcgtaattctttatttcaacttatataacatagcattgcattcaaatcatttaatcactagagtaataaccctaggtcatataaccgctcactttagagtaataaccctaatcacggttccttatttaattacaatcataatatcaaatatgagcgccaccacacttaactctacatgttaactattgtcttacctggtattccaagtatgtagagattctaaatccctgagtgctcctgaataagtaccagtaatcctagtcacaaattcctgggatttcaaaattacagttaatcctaaaagtcactttcacataatcatataattgcattccaattacaattaggcatatagagctcgaaacaagctttccaacgatatacggaatgttccaaatggagtttggattcaagagttacaaacagaataagtttaacacaatcttcccagaaaaccccctagcgggccgcgacactcacaagccatgccgcgacttctgggtaacaagcccagaaattccaacctagcaggttgcgacatgcaaaacccataccgcaacacttgggttaaaaactcgaaaaataccaattttcaacctactcgaattgtacccaaaaaccaaagcaagccacaacaaagcatgcatactttcaattcaaaatccaaaacaactcgtaactaatattaacaacaattctaggccaaacaaagcccaataacaagataagaacaagaattacaagtccaaatcatccatactaaaattacacttaactcaagcttaaaaactcaagcatcaaaaccccaattgtgaacccaaattttagaatattaacccagaaattaagcttcaatttcataatttcaaaccacaatttcaaccttaaaatcacacaaaataatatagatgcatatcgttgggttttgtgccctaaataaaacccatttcaatataatcagatttactaattaataaatgacagaaattatttttatgttacatggttcacatgatttatttcatgattatgtttaatgtataaattctattaagtctagaatgtaaatatatatatatatatatggaagaggtttcaatggttacatttttattgtaaccataatggttacatttttttaagccattggattattatttaatggttgtgattaatttggaaatta

SEQ ID NO: 272085 - DNA, 1012 bp, Cannabis indica
tggaagaggcccaaatagtggcctatggaggatactatcccaccgggatagcagaatatgtgtccggagcccagctctcaggcactatgctagcagcagctccaccgatgagcggcatacagttttctgctactcccggacatagccaaggccagaccttagcccccgcatcttcccattttggaaatccctcagggataattggacaagccccctcacactccgctccgactgcaagtttagccggtccttcccagggctcaaggagtaaaaggtcctccaagggcagcacccgaacggaggataagcgacagaaaagggggtatactccccaatatacccagtacacggagttaacagactcccaagaacgtgtatattttgctactaggcaaaatacgcactaccggagaccgcctcccctgtacaaagatagctctcgaagggatcccaataagagatgcgagtaccacaatgacattgggcacaacaccaacgaatgcaaaaatctcaaggatgagattgaaaacttgatccgattgggatacctctacgagtggatcaaaaaccggttgccccatctcaacccaggtcaggcggctggagctttgccgcaaggagcaccagggggtgcagcagcagtattggctccagttgttccccacggagatgcccagcatattcccggcctgccagctagacccaactggagagtggctatgctctcgggaggaccccacatcggaggaactacccgcaaggagctcaagcggtacgcagcggccgtgaaacacgatgaagtttgggaagctactcaactcccagctcaaaggccccggctaatggatcagcccattacattcacggaagaagacgctaaaacagttccgtaaatctactattcaaagaggccttcactgcaataggcctaacggactgagacctatcaccaagtggttcctgttggaaatattttaccaggatctagatttactaccaagtatgttttatt

SEQ ID NO: 272086 - DNA, 902 bp, Cannabis indica
ttttttttttaaaggaaaatagttaaaatagtgtccgacgtcaagaacggaaaaaagattaaaataaaataatataataaaaaaaaaaagtgtattccaaaatagaaaataaaataaataaactagagtttaataatacacataggtcgtatttggaggaaggaatttgtgaatgaagtgacgaatgacgaccgcccacaccaccgtccatttcgctctttttttttctttctttctttcattttttcattacttttttttaagttaagggacagattaagaactgaatattcctcttgttttgaattactagattacccttacatcttcatcaaaattacgataccctatgggaatttagtttaatgagccctttccttttgttttgtagaacttgagtaaatagcaagcaaaagcgaatgaaaagaaaagaaatatatgaaatgacaccataacaaataagtaaccaaacggctactagaggctatcattaaatagtcacgtgggcgttaattttgtcgcctttaagaataattagagatataaaaaagaagaaggccgttacgtttttttttttggtagaataattttagatatataattaaataaataattagtgttttttttaaaaaaaatttcactattattataaatagtgaagataggatagggtatttattagaatttaaaataagatgaataaagttctatctcaaaactaattgacaattagacgagtagcccgttctcttatatattttattatttttcgaccattaacaatgtgagactatctaacatcacctcttaagatggttattatcttggacaactcgatcataagcggctctttttttggctcactctctctcatcacaagtggctctttttgctttactttt

SEQ ID NO: 272087 - DNA, 627 bp, Cannabis indica
ctaaaacatgatcaagaaggtggaaatcctcaaccactccattttgttgtggagttttaagagcagaaaaattatgaaaaataccataaaaatttacaaaaataccatacacagtattttcaaaaaaaattccatgattactcttaccacgaactatcttaccaatgttgcaatcttcttgaacttttcatttcaagcaaagatacttaaaaacatcaaaagtatcaaatttttctctaaaaaattctaccgatgaaaagcaagagaaatcatctatacacacaaaaaaatatcttctaccattcaaactctcaggaacacttttgtgagagtttttcagttgcttactgagatgacatggtccacattttccttcaacttctttacccaatttaggtaatcctcgaacaatccctgcaatggataattctttcagttttttgtaatgaatgtgttcaagtttttcatgccataaatcagtggtgttatcaataacagagtgacaagtagcataagtagtgatggtgtaacagttatcattagatctgaacccttgcaagacagtttcatcaagaatattatacacataacaatgattactatcaaagctcacagtataaccctgat

SEQ ID NO: 272088 - DNA, 510 bp, Cannabis indica
taacaaaaataaaaaatggaataaaagatatattgagactttttatcccacttttagatttggcgcctcaaatatgtagcaaatatttcttttagacaatggccttgtttagtagaatgttaaaaaaatattaaaagtaaaaaaataagtttaaggttcgatttttatgggtttgccaaacaggaattaatttttttagagaaacattttatcccggttattagttaaaaactgagataaaagggataaatgtgaaacctttttatcccagtttttcactaaacaaccgggataaaaagtcatcccctaaaaaatgcatctcgcgaagtcgactcatacacctattaacctcgacaacctcccaaacctagaaaccctctcacccaaacccagaaaccctcgcccaaacccagaatccctcgcccaaaccccatgagactcgatcatccattccacaatcgcccaaatccgccagagcagctgatcaaaatattaaaggtatattttttt

SEQ ID NO: 272089 - DNA, 679 bp, Cannabis indica
ctgtgtgaaatgtatcgaagaataaggaaatgaaagacttgatgaaacaatatacgaagaaaacctacataaattatatttatatgagagagaaagagaagagtgatggaaacgaggaagagagaggcaaagagggagggaaggagggagagggatttgatttttttaggttgtttggattgatataattgatcgacgaggaaagcgatggccttttagagagagagagagagatgaggagtgaggtggtaagtcacgtgcagagcgagggggagagggatctggggacctccccccgacagccagctggcaaggggtggctcaccaacatccacacaccttcatacgcgtgaaacactaccaccaccagccctttttttctctcttttctttaatgtccctccaactaaataaactaatgctcataacactaatctagtaaggtaaattcttttagaataaaaatgtgcattcaaattcaaattcatgttcttgttgttatgtagtgtgtgatatgaattaatgacctcaaatcacaaccacataaatattgtgctaccaagaataattttttctttttttttagtacactaccaagaataattagactcgtaatgctatagaacctaattttgaaggttcacaacaactaaaatcaaagagtatgtttgtgtcccgc

SEQ ID NO: 272090 - DNA, 2115 bp, Cannabis indica
ttggacaagttaacctgaccaaaccaaatttcattgggcaggttactattttcttttttcttaattggccgggttgcacttagatttttgtaactcaatttttacattgggttgaataaaatgtactataaactgaccaaactgaccgacgtacacccttaattttcatgtaatggacattgtctaatttacctattaatggatattcttcttttctatttataaaaagaaagaaaattactatgagcttgagtgtaggaactagagttacataaaataaattgtagaatcaatggtaataaaacaaagatggatagataaaaatatccatcatttattgttctttgtgttttcggtaatggacatgtggaatctaggtctgcaccaaaggcccaccagtaggccccaaagaagacaatttgggtaaagcccaagtccaattttcctttttattcaagtacacaaataatgaaataaatgcctttcaaatctcgacagaagattgtatcgagctaaaaggagaaactacctaaataaagatcaagcaattaattcatgattgattgtccacaattataggacacaattttgactacttcaaccatatctaatctgctaagtcagcagatcatctcctttgtgggttggacttcacaagatagcccaacttatgtaattcaatgtaatctctccattagagggaaaaaggaaaactaagtgtaattctcttaacactataaatttccaatgaatctttcgtgcaatacttgctcgggcaaactaagagaactcatgctcattgtattctcacaggcttttctagttgtaagatacataataaaattgactcatggactaatgctaacgccccaaccacgtaaaaacggtatgtgtttttcttattttctcttctaaattatttatttctttagttctaattatttataatttattttccaaaaatctcgataacatttgatactttcatcgagagctgaaggaagcagtgataccatctagagattacgctcagtaatcatggtactcacccgaaacaaatctggtcttcattttaccaatcctaatgccaaggcaagggataaagaagatcagaatgaagtgactagccatcacaaggatcaaattgatgaagacacagatatagacacccctatattcaaagataaagaatcaaaagagaatagttttgatgatgatgaagatgattcacaagacatctcagaagatgatgttcaggatgaaccaatggaggatcacaaggacaagacctctgacgatgttggaggaaaagacaaacttgacgagacagatcctgtggtcatcttggcccaaaagtttcaattaaattaaaatagattatcttgagaggatcagttcaatgagatattgctcgagaaaatgacaaggatggaagccatgatgacaaccctaatcaaaggaatccataatgtgtaaaaatctccaacaactgacgctttcgaaagagttgatccaaaagatcttagaacctcaaatcctcacaaggataaagggaaagaggtaataggtgaaacttcgaagaaggttccttcaacaaagcagcaaaagaagtctaagactgtcgaccaaccttaatagaaaaagaaaggaatatcctattttttgcactatgacatgacaattagctggatgacacgtgtctcatgttttcctacatgggcggaaggttacactcctagcagcccccaaagattggttgaactaaccatatcaaccgtacatagtaggatgtccgagtagggccataaagagacattcgaccaaagctcgatcatgtgatcaactcgtatgtaccgatcaggatatgtgagttggaaattttagagatggacatcgttgcttccaagaaacaaagataatccttacattcatgggattaagtcagagaataaaggcacaagcctaggttttccattctttgcattgtaattatggaattaattcagtttcttattttatttattatatgtgggaaaccattcttcatgtaattagcccctataaatagtggtttaatctcacaattcaggtggacaaaatttgattcagaaagaa

SEQ ID NO: 272091 - DNA, 1389 bp, Cannabis indica
ttcaccattgaagttttggtttttaacgttttttttgtcatgaaattaacctgacaaaaagagaagcaattgaagttttagattttaaatttttttatgcctctcgtaactaatctgccaaaggaaaaaaatagaaatattttttatttcaatacaagatattcagtttatgttttattctaaataatattcctatttaagatttagtatataattgttgcattaataagttaattaaaattatttataatatataaaatttaaattaaaaaaattaaatattatttttttagaataacatttcagatagtggcccttgttgtgggtccctatatctccaaaaataacaataaagtatataaaaaaaaaatatagtgacactttttgtgtgttgctgttacttttttagtctgacaaaatctgactttaaatgcttatagtgacacgcagagattgactataaaagggttcagtgacacgcgtgaagtgtcactaaaaacagtctttccagtcaccctcgttagtgacgcgcggtgaagtgtcactaaatagatttagagttactcaatgtgagtcactaaatctcaattttctaatagtgattattgccgctatttttcgacgttaagaacttatctgtatcaaattgaactttttgaagacctttgccgtaaattttcctaaaaaaaagttgctacataacatttaagtggcatttagaagtaattgataattattaagtagcaaaattattataataattacactattttaaaacataaaatgcctttaaatttcaagtactaattacgtatgaatttttttattttttatatttaataaataaggttgcaattacatagataataacattatgacttgtttggaagtatgtaattataaagtagtgtaatactacttagattaaaaatacaaggtatattagaattttagatgttacgtagtattcaatatgaattttgatttttatatttgataaatgagtaaataattatataaaaaataacattttatctagtaattactccctattacaatcaattttaattatagagtgattttccaaacacagtcttacttactttaaacttcaaaattataccaaacactgaattcttaataatgttttgtttggatgctatttggcggttaaacgtacaaaatattcaaaataaaggacaagaaaaaaacctcgtcaatcactcactttcggagcaaccaagtgaagatgctcttgtgccaaatcaaactaaagacaatcacagcaccaaaggtagctataacccatggaatattatgtttgatttgtggaaagaagaatcctaaaattcccagaattacacacacagataatatatatatatatat

SEQ ID NO: 272092 - DNA, 1368 bp, Cannabis indica
tgagggaattgcgggaacttagggctcaaatcgtggcgttgtcctcttaaatgcacgctccataactacatctcccttttgctcatactcccacattgcatgcaatcggccacacatttgctgctgcacttgctcaaagtgagcaaagcgatctgcgggaggctccgcggctgaggtcgacgcggaggcgggagttgttttcgaagctcgaggtggaccaaaactgataggccctcggggattcaatgctccttcttaattccacattggtacacccgcctcgcgacaaagaacagtgacagtaactagcagaaataatttccctttccctcggtgcgcacaatcagcaatttcttgggctaggacagcccctacatcaacatcccaacccatcttaatgcactatagcatccatgcgcgatctctgctgacagtagaatcatgtgaggtggggcatagggtggtttgcacgaacgtgtaaagacatttcaaatcgtgctccaagtcagtgcgccgaaagcgaaggtttccataattatcgagatcccattcggactctggcttggcaagctccgacatcgtgtcattcaatgtctcgtcgctcacttgccttttttgggaagagtaatggcactggattgattgtaactcaaacaagttgttgactgtttcagcagagaattccactggtacttcacgcacaaccacttcaataggccattcttgggacaaaaaattggcgtagaattctttaacaacttccataaccgcctgtcctctctgcttgataaaaagtcccaaatttctcttatgaaccacttcactaatccattcaggtaattcgtcaatgtcctctatatcggctactaatcctctctccatataaaattcccgattgtccaccttatcgtaatactttatctcggctgccttgcaatgaaacttcaggaatttcatgaagtgatttttttttcttgttggcaacactcttaactttcggaattttctcttctttttcacttgcaccctaccccaacacaacaaatttcttctctgctttcttattacaactattcagcacctcacccctaattccaacaatacactactctagcaatgatccaatcttgctcaaaaatctcccaatctgaccaaaccacaccaactcaatttcaaggcattcacaccaaattctttcacccttcaccaaatcagatttaaaacattacatacacaatccatgcatcactcggctatgataaatttttttgtgtaaattaatatgtccaatcctatcaacacttccaacaatacaccaatcaaaattaaaatcaactgcactagtagctacctgttgggttttatgcc

SEQ ID NO: 272093 - DNA, 686 bp, Cannabis indica
gattacgaagacaagaagttccaaaacgtgtccaaggagggattgaaactcggtaaagactcaaaagacaaggagttcaaggagtcatttaaggaactcaccaagtggtggaagagcgctcttgcgagtgacaatgttgatgatgtgaaggtttccaaccgtttggatgacactccttgcgttgttgttacctccaagtatggttggagtgcaaatatggaaaagattatgcaatctcagactctatctgatgctagcaaacaagcatatatgcgtggtaagagggtgctcgaaatcaacccccgacacccaatcatcaaggaactccgagagagagttgttcagaacccagaggtgaatcatcgcaccagctcctgtttatttgctttttcatatatatgtttttattttttaaatatatataaatgtaattggattggatcaattgttagttggattttgagattgacatccaataaccgatcgaatccaattagaatttaacttttaacatccaattcaattgtaattggattggattagatcggttcagtttaattggattagattagatgttgtccacatttactgatatcttttccttcttgtttatattttcaggacgagaacgtgaagcaaacagcacaactcatgtaccagacagcactcatcgagagtggcttcaa

SEQ ID NO: 272094 - DNA, 912 bp, Cannabis indica
gcgccttcaaactcttgaccaggacgggtacctgggcaagctggactgctacattcccgcccacaataatcgtgccacaaaccctgataaggggatgtgcgcctggtcaggggcccgtggccagcaaggagcgttggtgcccttgcacaagtacttcaaggatgtggcagacttcttcggtctctgcccggcccaaatcactcctaagggcattaagtatttgtccgccctcttcgtcctctacgcttcccagggatggggtactccttctccccacgcggtacttctatttctcttagccaggcttcaagtggttgaccggcacggatgataaggccatcaacaaaatagggcgttttgctgatgagtactttgtggtgaaggatccgagcattacccgaactcggtttcagcagattccgacatataaccatcctcctctcactcttgctcttaggtatagagctcagaaacttgccgggttaccggggaaagaccagaatattatccagttgacctctgatcataatcttgtgaggtacgggttttatctcgaggaatttactcctaagtccgtggcggggaagaagaggaaatctggtgctagctggcttgaacgagctcataaggaggatgatcttattcaacttaagcgcgaggctaagttgaaaggaggtgccagggccaaacagtatgctgaggagcctttgaatcctgaagatgaggctgaggacgagcaggttactccgatgaggaggaagaagaaactcttggcctcgcccaggcctgttgaacatgcaattcgcataagggagcccatttcacctgttcggccatctcctcctgtgttcagaaaagggaaagccgtcatgtctgaaataagatcgatgtcatgtgatgatggacttctga

SEQ ID NO: 272095 - DNA, 1170 bp, Cannabis indica
aaccaccttgatgtcctctggacgaacagattcaagtcgagtggtatccaataccacggccagaaaccctagacatccatctcgtaacaattccctggctgttagtactgaaattactgagattcgagatccctgaaccgatccaacataaacaaacagttcttcgccttcaagttggaagattaccatcttcttcttacaatcaatactggctgagtactcgaacaagaaatccattcctagtataatatcaaaatctactaaattcatttctattaagtcagcactcaactccctatcctcaattctgatcggcatagacctaatccaccttttagagatgactaattctccgccaggcagtagggttccaaaccctgattcataactatcgtaaggtctacccaatttactaaaaattatggctgccacataagagtgagtggccccagagtcaaacaacacagataaataagagttgttgaccgagagctgacctgttaccaccgaagggctggcttctgcatcagcctgagttgttgcgaacaccctcgctgtagcgggtttcgttcaagtcttctatacttcaggcttgagctggggacaatcctttttctaatgccctggcataccacactggaagcacccctaccctttacactcccccagatgatgctttttacaactagggcattccaaataagtgtatcgggttttagagctaccctgatgattgcctcgaccctggttccctcggaatctcttattctaagctgagccactggatgcggtagctgcctttcttttctgatcagtggtcgagccactacctcccctactaaagcctgatgtaggaggagtaggagccccacaaacaactgaagtcccttgagactctaaggtgcactacactacaccctcagctcgtagtgccttacccaccatatcagcataggtggtgttttcattggtagtgttaattaagtcatgtcttatcttcacattcaacccgtccaggtatttctctttcttgctgaaatcggttggcacgattcttgaggccaatcttgccaagcgatcaaactgagttgtgtatccagtaacactcatgttttctttttgagtcagttgggtgaattcttttctttttgcacttctgactgcctcgtt

SEQ ID NO: 272096 - DNA, 1923 bp, Cannabis indica
ttatttttatttttattttatagttaatttaatatacatatttgaacaataatatattgctaggctatcatacccgccatcttctctgacaattatccattgtaatttgaaacaaaaaagaagagattttaagagatgtgtatgtagacaaatcatgcatcatgttctcacctctcccattggtagcttgagaaaaatggtcttgatcatatatgagataattaaagcatgatatattatgaaatgcacaataattcttaaactcacatatagtcacatgcatgtagcctaattaagtaatagacagctcatgatatagttttatttgttttacttttatagagaaaataaattagaattttgttgacaaacttcaactaataataatctataagctacaaaatgacaaacataaaaagaaaaaatgaaagaaatttagttgaattatagaacattatctgaaccaggaatatgtctaaagtaaccagaaaaaagatgactcatatcatatatatagttaggcgcaaaatattaggatttcaattttatattttgtcgtgtaataaataaaaaaatattggagtggtcaataatgattaattacttttccgaaaggagggtccctactaactgtacaactccaatataattagttgcgttaatatgttttttttctaatctttttgtcgtttgaattagaaaaccagttaaattaagtagatgatagtgagtgatgaatattagtaacttaactttctcttttttttcttaaaaaaaaagacgttgcctaatacttacaaaggttatttggaacatcaattcccgttcatattaataacattctacttattataatttgtgtgtattgtttttttttgtttttcatcaaatcacttattaatgtttttgatgctaatggttcatgtaatatacagtatttattattaagatttggctttttacttttcaatttgttatcttttacttatctatacacttaattttgttaacatttttttgttactagaagttaattttttcacaaaatagtataaagcgaaatgaaattagacacttggggtacttgtgtgaaggaggaagatgatttctagtctccattgtgaataaaataaaatcagtgaaagaaattgtaatttaaaaagtaatatatctctcaaacacattcaaattatagatgatcattagtccataatattttttccatgcaaataattcaattttagtatagagtgatattattgttagactttttattttttatttttaagagctaaattaattcttaaacgagaaaataagagagggacaatggaactcctatgaagtgctagtcttccacttctaaaactttttctatggaaaaagagaaattgataataagagatcaaatttgtcaaaagaacataaaaaaaaaaacccaactactcttgcctaatatataattttcgctaataattaaaactaacacggcttctaaaatgaatagcttgagcgaagcttttcaagtttcgaaaacatgtgtttgcaacatcactgacagtagcattgtaccatctatggtcatgccaaaatgaattattatagaatcaaatgattgttgggatattaatggtgctaataaagaagttgaaacaagatatagaaaatagagtgagaggttatgcttaaaattaaagaagaccttgtttatgatggtgctggacctaaaagatatttgttgagtaatatacaattttcatttaccccccttccccctcccccccaaaaaaaaaggctaattagcatttttccccccgaactttgacatgtactaaatcgtgccccctaaacttttttggccgttagaaattccccccgaactattgagattgttaagttcaaggacttttgtctaatttcatt

SEQ ID NO: 272097 - DNA, 1264 bp, Cannabis indica
gtagctgttccaatttcaccactagattttggcgtaacagtggcaacaaacatcaaattttttgagatgtacttgtacattacatcatcatcatgatctggtataatctttgcctgagtatggaccacctcctcgttcaattttcttgtcacagttgcaatgatcttttctgagtcagatggaaacacaattgaccatacatctctagagtggaagaagtactcatcatcaccatggtttgaatttctcttcaaagcatgacccttaatgatgcctttatcagaatcaactgagtgccagtatatgtttgaaaattcacgttgaaaaatagtaacagcctcaggtgttctggggtatagatatgcccgttggtcctgatctatcagtagatgaagacgttgttcggttgcatcagtgaatggcagtggaagaacttgtgaaacagaatgagcaggactcgatgaacttatttccttcccggtgtaagtatcaacgaaagaaagaacacctggtgcatcgttactttgtccacattggcctactatgagcacagatggattttcatctaatgcatgatgatggggtacctgccattggtaaatactaagcccacacgctgaattacgcaatgaaggcagtaaaagagaccaaacaactcgtccatctccggtgtgcaaggcaaacaactttcctgatcgagttagaactataagcagcttccgaaaaccattgtgatcccgggtcattttgctcttctccgaattctttaccctcatcccttggattactacaacatcctccgggcttgcaagcatcaaagttcccttaagcttcaacatgtgacccttaagccattcaaagaagttatcctccacttttgaaactgatacaccttcctctttttccacaggtagttctgatgttactacacctacaattgaagcaagaccatcctccctactccagacaattgctccttgttgtaacagcaagagtgaatgatcttccatgacaaccaaggccctgaatccattagacctgtctgtgcggatataattgtttataaacaccctatggataaaccctcttccatgatccatcactatactttccttatgcaattccttattccaatcatggacaagcttcactgtaagatgaatcttgccatcatcatcatgctgaactattgcaaaagctttttctccctctgaaagtaagagaggatcactaataactgttgcattattgactttatccacaa

SEQ ID NO: 272098 - DNA, 585 bp, Cannabis indica
aagtatatacaaaattaggaatgacaattcaggtcataacacacgacaacatgacaagaattcaatacgaattattgtgagttcgggtcataaaaaattgataggggccaaaattagatcgaatccgagtgacacaattattatttgagttaggttaggattaacacacgcgacactaaatgaacacgaattagcctatttatatataatatattattaaaattattaatttatagttaaattattgtttattttcataaaaaaaaatatataattagaaagaaaattgtgtataagaatataagataggtaattgaattttattcatgattattaaaataattaataaatattatttatttgttgatatattatttatttagtatattattcaaatgagtttgatataactaaaaatatatatatatataaattaaatatgtgatactacttcttagggctgtacaaaaaaatttgtaaactaccttaagtgaataacccgctcaaaccgaaccgaaaaaaccgataaaaattacaaatcgaaataacccgaaaaaattacaaaccgcccaatctgttaattgg

SEQ ID NO: 272099 - DNA, 750 bp, Cannabis indica
aaatcacaaaacaaataaataataagttatttaccttgagatttgagtaagaagcttgtccacaaactcttgagcaataggggtgtcctttggaacagcataagggccttcctccaagctaaggtcctttctaccatcataaaaatttaagaaatccaagaaatagggaagtaactcataatatgcaagaagatgtggtaagatcttcatttgatttgtcttggtgttcttcattgaactatatacaaatatcttccttctcaagatgataaagtggagaaaaatccaatgttgttgcagagaaacgtgataggagccgaaaatatcatccacaccaaccccttattgaaaataaaaattatattggtccagtatgtaatcactaaccgtgtttcatacttgataacactgtggtcatgttcaacttgaacaaaaacattgtatacaccctttaatgttgcatcaaaatatgtacatgttgtcatcactctctcattgagattgggatcaaacaaaatactctttctaagataatagaattcaacattcaaatgatgcaaaaaaaaaaaattaaaagtgataagccaaagaaacaacaacataaaatagtgaaaacaaggaaaataaccatttacataccaaatcaaataactcttctcagcaattctctaatatgacaaaccaggatttgtcttcaatttgaacaatgttaaaatctaaaagaggctcaatagcaccatgtgatttttt

SEQ ID NO: 272100 - DNA, 874 bp, Cannabis indica
tgtgccgcgacacttgggctcgaatcccaggccacaaaataggggcgggccatgacgcccaaaagcgggtcgcggcccctgagttccaaacccagaaaacctccattgtcctgctcgaaaattcaagccaaaacacaccaattcatgcccaaaacctaatcaaactctcaaaccatcaaataggtttataataattattcagagagtagaaacacacattccatgcatcaaaattcaacaatatagaccatcaaagttcagattaaagaacacaaaggttaggctccaaacattgagttaagtcccacaaattcaagctcaaacacaacataaaattctcagctgaaaaacagaattaaagcaccaacctaacctcaaaaatctctccgaaacacatcacaaagcattcaactccaatcctctaacacaattaagcatagcacatcgaaatcacactaacttctacacacatgcatctcaagaacatttaccacaaattccatgtttaatcaacttcaattcagcaacaacaacttagaattaaagtaatagaacactacctcaagcctctagcaagaaagtcaagctttagcaccttaaaaatccaagcttgaacatcaatcaaaaccaatttgaagaggatgcaaatcaaaagacaaaagagagggaagtagaagggggttaggtctaggggctgaataacaccagaaaacaaatccctaatttgccaaaaattcctttttgttaataataagccaaaaagccaaaatgacaatattgcccctagggccaccaaacctcaaaagcatgaaacaagagtaagaatgtcattataacataacacatcattaaattaattttcagattatacaca

SEQ ID NO: 272101 - DNA, 4683 bp, Cannabis indica
taatgaaagaattcctcaaaaccaaatattatcttattaccaaaaaaaaaaaaaaacacagaaaacgttgtgaaagagattattattgatttctcctaaaatcttatcgggccaagcataaatgccaaactgagtacaaggggatccagagtacaactcccgagcccattatgaaggcccaaatcttaagatcgtgccacgtcggtcattttaagatcggatggtgaagagagtattccccgctaagttagggactattttcctaaaaagtcagccataattctaggttctataaaaatcgaatcaaactaagaacagccccttagggtttttggtatttctcgttacagacatttgatttgattaataaggtgtcctttaaactttcaccattaatatgggttaaggtttagagtttatgaaatctaaaaccctaccgatatcataaaatcctataaatttcatagtattcatattagtatgttactgttccttaattgaatattttggtttgtgtagggtttttgtcataggggaatttcgtcaaaataatgaggccgatatttgttgggaattttgagtatgatactcgccaatcggagttggagcgccttttttccaagtatgggagggtcgagcgtgtcgacatgaaatctggtaagaaatctttttaaatatggtttttttttttggttctctttcgaagattgctaaggttggcgtgtggtagagtgctcaaacgtagggataacttagaaatttcaaatttatgtatgcttgtacaccagcccaatgtcttggtcacgattcgagctcaacaagggacttgttttcttagaattttgcttacttatttcctttttcattgtttattgattgtttcttaacggttttttctgtcttccatggagaatgctgtttgttatatcctttcatctttgatttaattttacattatgtaaaaacaaattctaggcctttgtcggttgatcaaggtgacaagctttagttgccgctgcttctggtacccggctaagggcccatctgtcaattaatgatttttttactagagaagctattttattaagtgcagttcacatggatatattactacttatgcagtatgtatatatatccgcagtacctattccttggggaagaggaattgacacggcaagtatgcttttttctttggagaaaacctccatgtttaagatttttttttgacgcaggatcttcttctgctaagggaaaatgagttgagcttctatctggctcgccaacatctgtgcaaaaaaatataattttggaaagcaaaccttcctgattgcctgctctcctttattcacagatagcaacactgcattttcctcacttgctcatccgtctcctttactcacagatcaacactctgcattttcctcactcgctcatccgtctctaactctctcagtcactcttcgcataaagttgccatatcacatgaattgttaattgggaatcactcaattattttgacatgcctaccactattgttcataggggaccaatgaaatgtggacatgcttacttctgataataggaagaccattgaaacctgtcttgccatgccttccattttctgaaactttggatcattgaaatccgtcatgctatgccttccatttctgaaacatgggcattgaaacatgtcttgccatgacttccatttttgaactcgtgctgtctgaatggtgaagtatgccacttggattataattttaatatgtaccaacatgatttagttcttgcaacgactctacagcctaatgtgcttcagactttgacgcatatgcaggtgttgtatttctttagtttgtgtgagggaagacaagtagcaaggcttgtgtattgcctgctgacttgataatatgtacctgtgttttatttctcttctatccttgattcttttttccattccaggattcgcttttgtctattttgatgacgagcgggatgctgaagatgctattcgttccctcgacaataggccatttggatacgacaagcgcaagctatccgttgaatgggctaaggtacaatttgtttgattgtcttgtaattggtcagcttttgtgtgtactttctattttctaacaatgatatgcgtgatctgtataattctgttacaagggctgaactacataatttgttttatcttttaatttttatgagcttaatttaccagggtgaacgtggtcgacaccgtgatggatcgaggtcaaatcagaggcctacaaaaactttgtttgtgatcaactttgaccctcttcgtacaagagctcgtgatatagaaaaacactttgaaccatatggaaaggttcttcatgttagggttagacggaattttgcatttgtgcagtttgagactcaggaagatgctaccaaggcgcttgagtgtactcacatgaggtgagtaaaaatatatatatatatatacctattctgtttggaaaaggttgtaacttgtatcataattgtatttcatgttatttatgatatgaatctatcatctatgtgtttttcccatttgtcttctgacgtaaacacttcaattttgcagcaagatacaggacagggtggtctctgttgagtatgctctcaaggatgatgatgagagagttgatcgctatgatagtccaagaagaggaagttacagtaggcatggggatagtccttatgggagatcacctagccctgcgtatcgcaggcgtccaagtcctgactatggtcaaccccgaagcccagcttacgacagatacaatggccctgtctatgataggcgaagaagtcccgattatggtcgaaacatcagtcctgaatatggcagatatcgcaggtttgtagttatgcacgcgctgtccagtttaattatattgttggatatgttcattgcttttggttttaaataactgttttctataactcatttgttcatttccaaatatttgagttctcatttcttatacctcactacttgcagccgctcgcctattcgccgatcaaggacctgaacatgatacagtctggtgatagtgatacaaagtggtttattataggtttacataggggtagtaaatttatagagcatggataatatatcttaaatgttttgattagtttattgttgtcttgaagaaatactatattaatgttcaaagtatattggtgaattatgacagtagaacttggtatttaactgcttttatccaaatttgaacattcgactggcgcaggccataggactttattatgcagctttggattttgatttatgtcagttactaaagcacaaacaaactcttattaaatgggatatgtgaatggccatgattttgtatctttatgtgtctggggtgaggccgaggtgggtcagttccgcccccatttacatccttaggtctaacttgcctcttaccgaaaggagttgagcttcttattcccatcattatctctggataaggtggtgtggactctggaggtggtgattctgaaagttggtctcgaatcaagatttagaaaaataaaacaaaatcccaccattgttattatcatatgagtggttttttgccacattgctgtttgttataatttgccatcgagtgttttataatagaggttgatatagtagtgactttagtgttggtgcttggtggggtctatatcataccaatcattgctcactactcattattaaatgaggctacatttttggaaatttcctagccatattcagcagcagcagtcactcaaacatctattattggcaatgccgtcacttttttgatgatcccacgatgaagtatttgctttctcatcattttcccacttaagcattaaatcttacaggtgaaatcaatttttgggggtggaaattgcaaaagattaaagcaattagtcttttctttccttttgaaaaagtagatcaaaatgcaccttttaagccaaattaaagccctatattatgatttgaacaatttgttccgtctgatttacgtcccatgtgtgaaataccagctctgtggtcaacctatttgctcttgtcttctttgtataccactcacttggacatttaattcttttggcatctaattgcgtaccattaaaatgttccgttcccaattaacattaggtatatggaaattccagccttttccaaattttcatttttgatatgcacatagagaaaataatagactgactgaattataaaatatatgccttgtcttgtagcctattccatgttctagtgttgctcactattttgatcaacaatactgataataataacatttcttagcaagtgaagaaacataatatgagttttggattccaacaactagaaaaatctataatacaaaaaaaaaaaggagaattaaattgatgattttgatttgcttagctcttgatcaattgatttctcaagccaaatctcagcatcgtccatcattcctgggctaagtcttaccattaagatgcaaaattcagtctcactaagagcaccatctccatcaagatctccttctctaaccatagcctctgcctcttctttactcattccttccatcccaagaaaagcagaattctttctaagactccctgaagtaatcagacccttttcaggatcagccaaaagctcaaacc

SEQ ID NO: 272102 - DNA, 1171 bp, Cannabis indica
atggacgcttattcggggtacaaccaaatcaaaatgcatccaccagaccaagaacatataagtttctgaacaaatatgggtctatattgctacaaagtcatgccatttggtctaaaaaacgctggagccacataccaaagattggtaaacaagatgtttaaagaccagatcgaacgaaacatgaaatatatgtggatgacatgctcgtcaaatccagaaaggctggggggcacatagattacctggacgaatgcttcaaagtcctcagaaagtacaacatgaaattaaataccttaaagtgctcctttggagtcagctcgggaaagtttatgggcttcattggcaatgctcgaggaatcgaagccaatccagagaagattcaagccctcctggatatgaagtccccaacaagaaccaaggaagtgcaaagtttgactggtcggatcgccgcactcagcatatttgtttcaaaattaatagacaagtgtgttccattcttcaacatcccgcgatgaaataagcaattcaagtggacagaggaatgtgaaaaagcttttcaagagctaaaaacgcaactcgcaaagcctcccgtactctcgaaacctctggacaaagaagagcttgggatatacttggctgtcacaaaacatgctgtaagtgccgtgctgatcagagaagaaaacaccatacaacagccggtctattacattagtaagagactcattaaggccaaaggccggtacccgttgatagagaaactcgcttattgcctgaaactagcaacaagaaagttaaggccctatttccaagctcatcctgttcgagtatacactgaccaaccattacgccaaatattgcaaaagccggatgcttctggacggttactcaagtgggcagtggagctaggtcagtacgaaattaccttccaaccccgaacaataatcaaaggccaggccctagcaaactttgtgctacaatgcacaggaaaagaagaaagcatatcggaaggcaaccccgagccaatactaacacctcagccaagtaacagtgaagacaagccgacttggaaactacatgtggatgggtcggctacagatcaactatctggtgcaggaatcgcccttgtcacgcctggggggcaacacctgcacgttgcagtcaaatttggatt

SEQ ID NO: 272103 - DNA, 605 bp, Cannabis indica
tatatatgcgccggtaaaagtaaaaaagcgccccaaaaatgaaatcaaaggcggcaaattctcgcgcctaatggtgttacgttttaccggcgcatttaacttgactacgccggcattgctatgttttactggcgcacaaatgcgccggcaaaagtaaacccaaaataaatttggaattccacaattttggtactctcgacagtttttaccggcgcatgtcacgaaatgcgccggcaaaaacaccttttcttgtagtgctcctaggaagttttcgcaggaagcatgcgagtgagcacaaagcatgctggaaacactcgtgttggtctgtaaggtcagtcgtcatcccatgaagcaaccaaagtgacgtacttgtgtaagagcccaatgaaggcttgaagcggggacgttacacgtactgtaagtttatgttttaaagcatatagtatagataaactgataaatgttaataataataataataatataatattattaataatattaataaaagctttattattgatagttattatatcttagccactaagaaatttctattcatagggcgctaaataaaattttacatactcttaattaccccaata

SEQ ID NO: 272104 - DNA, 656 bp, Cannabis indica
tgagtcagggcaaacactcgagcaggagcggttgtaacatccttctttttctatagtcgtagcagcctgacactcgccctggtggcgccttttacacctcgaacattcaggaaaagtctgccagttttcgttcccaccagaacggaaaccttaattaccctggaaccttttatttgggcatgtaactgataattcactaggtcttttcctgcggtcaccaagatcagtacccctacccgaaccagcacctgctgtttgcttccatgaatctcttctggcaatatttttctttcgtatctgagcctctgcaccctcagaaactaaagccaactcaactatctgagcataagttcgggcaacccccggttgtttagaagcaacaatcacatcccgggcgatgtgttcatccaacccccgaatgaactttgctttcctagcagcttcaatagccacctcatcagaagtccagtcgatcaaacttagtggcatactctgtcacagtcatgctagcctgagtcaaacgtataaactcttttgcctttgctaccgaatagactcattataatacttctcataaaacaaggtccggaaggcttcccaggtcatgttattctgatcatgaccctgagatacaatctcccaccaaatacgggcat

SEQ ID NO: 272105 - DNA, 982 bp, Cannabis indica
ctctctctctctctctcttatccaactatcatcctcgcgtgcagcggccatcatcgtcatcatctttgctcaggtcagtacctctggcgtaacaacgagtagcgagagaggaggcaacgtagcagcaccaccaatcaaccacccaacctctagtgtagcagctctgttggtattttttaagtttaacatattttttattttttgaacatttattttgcttttagggtatggcttttctaaatctaatctaagattttaaattgtttgttcaccattatttagggtttgaaatttgttgcgtagaattcccattctgaatatcatgactcgctcttcacgttctcaatatatgtttctctgatttttatttgagttccctaaatctgtgtcttgttagtatatgcataatgttttcatgagttgtagttacattacatggactgatatattcagcatttgtttccaaatgtatatattaactactgatcacaaatctggttgacaagctggaaagttagtttttcaggtattgcttaccttataaggatatattcataagtattttgttatggagatatattgtttatgttgtatgtgtatccaattctcaaatgtatatttatttgttatttatatatgaatccacacatgcgtggaaacatttatatggaacgaagcatatagatatatatttggttgatgagttttgattcaagttcatgttaacttttttgcctagttttcttctgtggagattgcttaaattgacattaatacaaatataaactttaacatacttctgtggtgtgtgtgcctattgaacagttgaaactgaaaaaaaaactccttttaattcggtttgggcgggttaacccgaccaaaccatccacaccgtcggtcgggttaagattttttttttaattgagcaggttgcatgcagaattttacaacccgatctttacgttgggttagaaaatatgta

SEQ ID NO: 272106 - DNA, 1184 bp, Cannabis indica
tagacaaatgcttcaaagtcctcgggaagtacaacatgaaactcaatcccctaaagtgctccttcagagtcagctcgggtaagtttctaggcttcttcgtcaatgtccgaggaattgaagccaatctagagaagattcaagccctcatggatatgaaatagccaacaagaaccaaggaatttcaaagtttgactggtcggattgccacactcagcagatttgtttcaaaatcaacagacaagtgtgttccgttctccaacattctgcgaggaaataagcaatttgagtggacgcaggaatgtgaaaaggcttttcaaaagctaaaaacgcaactcgcaaaatctctcgtgctctcaaaacctctggacggagaagaacttgggatataccttgctgtcacggaacatgctttaagtgccgtattgatcagagaggaaaataatatccaacacccggcgtattacattagtaaaagactcattgagcctgatggctggtatccactgatagaagagctcacttattgcctaattatagacacgagaaagctaaggccctactttcaagctcatcctgttcgggtatacactgacaaactgtgacgtcaaatattgcaaaaacgagatgcctgtagacggttactcaaatgggcagtggagttgggcgaatatgagattatctttcaaccccgaacatcgattaatggttaggccttaatagattttgtagtggaatgcataggtaaagaagagagcatttccaaaaacagcccagagccagtacagatacctctgtcgagtaatagtgaagacaagccgacttggaagctacatgtggacgggtcagctacagatcaactatctgatgcatggatcgcccttgtcacacctaggggcaatacctgcacgctggagtcaaatttggatttaaggcatcattaaggcatccaataatgatgccaaatatgaaactctgattaccagcctaaaactagcccgggagatgaaggccgaacagattgagatctacagcgattcacagctggtggtaaatcatgtatctggagaatacgaggcttgaggggaaaagatgataacgatctgctcgcacaattcaaaagctattgtaataccctagaattaggaaatgcattagcaaaaccctaactagataattatgtataa

SEQ ID NO: 272107 - DNA, 484 bp, Cannabis indica
gcataaaacccaacagcttcatcatctccaagaaaggtgttcgaggggagaaaccagctagaagacagataagctgaatgatccaggggaatgggtgcaggaggtccggaccccatccgagaccggcctagaataaaatgacctaagttagaaaaataaaagcccttggcatgatcaccccaccgggtagggggcattctaaatctaagaagacgttcatcaaatcctataggcctacactgggaatactcttgggcagaagggatgtaataaaccgttaagggagacttaccagatccaaatgtgttggcatcaggagccccaatattaggaaccgggaccagcaacttaggccgagaaggcgtccgttctttacccgcttccagtcggagggtcctcccggcggcagcctaagccttgatataagctaactcttgttctctcctgaagaggtacttcttataccggtcctccgccgaggcta

SEQ ID NO: 272108 - DNA, 972 bp, Cannabis indica
gtcaattttatacttgagtaaacaatggagcccaatgctttactatttgggcataaaagagggttaaactctttactacttgagcctggaaacaagtcaagaaaacataggtgacccctagttcttctagtagtggatattgttcgacttttaatcctctactggttggcatgttcagcagttttcttcgcgaacgacgggcctgtgaggcttcggagcattggggttcccttgctcatagaaattgcgaaataaagagattgcttctgatgcccttattcctccattgcatttgaatcccttcccttgcataactccaccaccaccaccaccaccgctaatgtgtggttcagggttactcgagtgcaatgacaaaacggatccacatcctccgaatttctcatttgcacatccatagaaaacttcttttataccaagaattgacaaagcactagcacacatgatacatggctcacatgtaacataaagcatacattttgaaaagtttttagctatttcaagctttgaatgtcccattttcacccactgctcaaggagagaatcaattgcttccatctctgcatgtcttgtagcatttcgtgtctcattagttcgatttcttcccaaggctacgacattcccatcttcaacaaggacacaaccaacaggaacttcaaggctgtctaaggcaagtttagcctgctgtatagcaaggtccataaatgcaagagttgtatcacaatacttttcttcctttgtagaagattccatctgaaaattttgaattttgaattttggggcttctggatcttcacttatttaaactttcatttaagtgcgaacccaaaacattgtcttctgctttcatgtatactataattgatcttcggtctttctcataatgtagaaatctgtaaatgctgaatattcagctacatcattattcaatacaatatgaatttgtgaatataa

SEQ ID NO: 272109 - DNA, 2583 bp, Cannabis indica
ttttttattattttaaaattacatataaataaatatattttaaatatttgaaagaagaaaaaactataagaatttgaataaaataattaaagttattcattattttatttaaaacaatataaaaacaaaatgcttaaaattaaggggatttttttttttttttacacttcataacaatttttttttttttgtaatttttatagaaatctacacagaaacccacatagcaactaacaaagcaatttaaatcgtaactaaaatttatataacaactcacatagaaaccaccagaacaatcctaatcgtaatttttttaaaaaaaaataaaaaatagtatatagggtaatttttttaaaattaatacaataaataaattaataatatagaaaaaaaagattaaatttctaaaaaataaactagcatagtattttccaaaacaaataaaaatataatgggcttttttcatttacacacttaaaaaaaatttttttttttttttttgtctattttttacagaattctatatagaaacctctattgcaactagcactgcaatttaaattgcaacaaaaaatcgtacagaaacccttattgcaactagctctgcaaccactttagaaacccaaacttagaaacccaaaccgtaaacttcaaaaaaaagttaaaaaaatagtatataagataattcaatcaaatataattaccctaaaaaaaaatagcaagtttagaatttttgactatgtactcattattctttgtcaatggaaatttggtcatttttcttaatgaaaagataaataaaaaagaaataacaagtttgggggttggggttgacacctaatcttaaatgatatatataccttcttggagagtgggtgtacttatatatgataatataggcatagcaataggaatagcatttccatactattataccataccattttcttcttcttcttcttcttcttcaaaggcatgcgactctcacttcctcttcctcacctctatcttcttctcgatccttcctctctgcaactccctttataaatatattgtatattatatatattatatatatttgaagtttttattacaaagaccagatttttcagatccagaattttgacctcatggatatggcttctaaccctcgaactgtggaggaaatcttcaaagattacagtgctcgtagggttggtctcgttcgtgctctcactaacggtattttttttttttttgtatatctttaactcatattgtacggacttggatttgtttttcaaaatttccgaccttggtgattttttgtgtgttttggtttcagatgttgatgaattttacgcgctttgtgatccaggtaatgtcgtgtgcttgtagatcagattgttctggtttgaaaactactgatctttctttgcgttgcctgcgggtttttttgagtttcgtttttttttcttgaaatatttgtaattttttatttatagatttttgtgcatgttgacaaggtcgatttgagagtttttaaggttattgtacattttttatttatttatttatttatttttttgttgagttttgagagaatgacaaactttggttttcttttttcttgcatgtatttgaagtttgagttcaaagttttatccatttgttgctaaaaatggttcagctgcatttggtgttctaattcaaaatagatctttttaaggaaaaaaattgatgaattgtaatggtggttagtcaagatatacctgttaaaatgagcatctcaagtttgacgttttcaaggaaaaattgatgtttttgtctttgatttttggaggtcaagtggaggttttaggaagttgaatgtctaaatgtttgtgatgtatttttcatttgatgtgataatgactgaaaaagtatcatttgggggattcagagaaggagaatttgtgtctatatggacatccaaatgaaagctgggatgtggctctgcctgcagaagaagttccaccagagcttcctgagccagctcttggtatcaactttgctagagacggcatgaaccgcaaggactggctttcactagtagctgttcatagtgactcttggctgctttctgtggctttttactttggagctcgtcttaaccgtaatgagaggtaaaattctcttgtctctgtcatttctattttgggcactagatctgttgaggctacttcattttcatgtcagctctgttacctttttttttgttttttttccattttcacatggctgatgtttatatctataataaggttttatgtttttttttcccttatttcatacttggttttgttaatggccttctgtgaagcttctcttcaactgtgctattttattgttgattctggagtatatgattttaccttcacatgcttgcttaaatattcacttaaaacctttgtggttttaagggtactaaatgtgcctttgtgttaccaatcagtattgagtttatttgtggtcaaaactaattttaataagagaataacattcccatctttttatacttgaaattacattttgtaaattttcatatcattgtttcacttttcc

SEQ ID NO: 272110 - DNA, 569 bp, Cannabis indica
aaaataaaattcccattaggaagaagtaatcttgtaggggtgacattgcatacacattgaaacaattttatgttagagcaaatatgtctagttgcccccgagtctaagatccatgaatcattaatttgaaaattaattatgttagacatcacaataccttggttacctgtaccattgttagtttcaggattgggaatattagcttgctgtccagccaacaaattgaggagctgttgatattgcacagctgttaattgaggcagcagggtctggttttccactggtttgctgctgatttcttggttggtctgcaattgattagcagcagcgtcttttggtttgtttttgttgtatccagggggatacccgtggatcttgtaacacctctcaacggtgtggccaaggatgttgcaatgagtgcaaaatggcctatttttcttgggtggatgagatttatttccttgagaatcggatctgtttgagttggatttatctccttgaaaggcaaaagcaactccaggattaggctcagaatgtgtgctaaggtttcccttctggttttcctcttg

SEQ ID NO: 272111 - DNA, 738 bp, Cannabis indica
aattgatttcttcatcaagaaaattgtttcttgatgtaagaaaaaaaaacctaatttcttggtgattttttcggtaatttttccggcgacaatgccaattccgatgaatttcctagagtttactagagtagctgtcaccagagtagctgtcgatgtattagtcgtcagagttgctaccaacaccagaaaagtcgtcataattgccattgtcgtcagagaaatcactagaaaaatcaccaaaatactggtttcttcatcaagaaaccagaaaccagtttcttggtaatttttccggcgactatgccaattctgatgacttttccgaagtttgctgtgggtgccaaaagtcgccggagtagctgctagcgtcagaattggcattgccaacggaaaaatcaccaataaaccggtttcttggtgattttttcagtgatttttccggtgacaatgccaatttcgacgaattttccagcgccggcagcaactccggcgactttcccagcaccgaccgctactccgacgacttttccggcaccggcagaaaactccagtgacttttccggcatcaatgacaagtagaacttcctaaacaaatagaaacattaaatatgggatttgaaaacctaattacatatatatggcatatcaaataccatcaaaagacctaaaaacaaaaaaaaaaaatcatttaaattggtcaaacttaaatgtgtcatatttatcataagaacttttaaa

SEQ ID NO: 272112 - DNA, 1376 bp, Cannabis indica
ttcctttgaacttgttgatagtagtttttgagtgatttaaatctcaagtcactttccaaatcaacacgaaatatatcaggatcagaaaccacattagtaatagcagtttgttcctcaagcataccaaccacttctgacattgtaggccttagcgttggagatgcattggtgcataaaagagccagtttaagaactctttcagcctcttccttgttaaaattactctccaaattcggatctattagcaccagtaagtcttcctttcgttgcaaagcgaatgcctgtaaatgaatgaactatattcaagaacaccccaccaaatattcataaaaatttaatatattaaagaagtaacgtaagatacattctccttacataatcaagaagacaaacacattcattttcaggtttgtagtttgtattgctcttcccactaacaatttctaaagcaactacaccaaagctataaacatctgccttttcagtcaaataaccccataatgcatattctggagccatgtatcctctgacacatcattcaaataaatgtttcaaggttaaattatatacctttttgatcattaatgtacaataagatattgaatttttgtaaaatttacttacatggttccagcaattcgagtgctaatgtggctgtcatcctcttcatgaagcttagccaatccaaaatctgaaatcttagcattaagatctctatcaagtaacacatttgttgccttaatgtctctatgaacaatcttcagaggtgacccttcatgaaggaacaaaaggcctttggctattccaacacatatgttaaacctcgttgaccaatccagtttcaaaccactcttaccttcacattcaaaagataactacttagtttaccaaaaagttttgtaggtacaaatctatcaaagtaaataataacttaatttaccaaagagtgcatgcccaagattattattttccatgtactcgtatactagtaataattgatttccttctatacaacaaccataaagcttgactaaatttggatgttgcaaaccagatatcatgcctatctcagtaatgaattcacgattgccttgtcttgactttgaacagttgcttcactgcaataactgtaccatctgataaatgaccctacatagtaacacacaattaaatttatgtgaattaaatctcaattaattaagctcaacataaactatctaatattggggaatgtataatgtatcacaccttataaacacttccaaaaccaccttttccaagtatgttatcagaatgaaaatcatcagtggcagctcttaattgtctcaaagtaaatgaacctgttattaactccatgccggaaagctctgtaaaca

SEQ ID NO: 272113 - DNA, 980 bp, Cannabis indica
tatattttatgttatacggtatattatttttttacaaataatatttaagttctattttatattgtatttttgttgacatgatatataattttattagcatgctatgtatttttattatatatttctattgtaaggtatatattttttattatatggtatataaattttattgtatagtatatcattttattttagatcatgtttaatttttattgtatataaagatgatatataattttgtaagtatgatataattaccactagcaggaggattcgatgtcgtgacgatatcctttacagtctgctctttcgcaacatgctactcagcctcttcagcaattaaggctagctctaccactttcttgtacaaagtgtcatgtgatgtggtaatcttcaagtcccgactgattgtggcattcaaccctctcacatacttctgtttcctggtgaaatctgtgggcaccagatcaccagcaaatttcaacaaccgatcaaattctagagtatactcggccacagacatctttccctgattaagcttcacaaagtcttccatatgtgaagttctcacagcgatattgtaaaacttttcttcaaacagatttttaaattcctcccaggtcattacattaacagcccgagtttggcccacgatatcccaccaaacgcgggcatgatcttgtaacatgaaggctgcaccgttcactctctctgttcctgtcactcccatattatcaaggatacgggtaatagtgctcatccactgctcgggcttaattagatcaatacctcccagaaaagtcagtggctggagcttcataaaccgctcaaaaacagaatctcgatgcagcataacaatcccttggttacccaccacgggcataggtgctggtggtaacacttgatcaacaggggcagccggttgccttaatgtcacaactcttctcttgacgaagtatgacacttcgcatttcttaaaa

SEQ ID NO: 272114 - DNA, 3174 bp, Cannabis indica
cctacacagtctcagaatcatcccacttgaccttacccaagcaatgtgggattgtacagcttaaccgatatttttccttacggatcacgagactactgactgtcacacaaactgcaccgcactatatattcaaagttactaacttttcaatataattttttttttcatataaaaacaaatatatgtaatatatataaaatatttttttagagacaatttaatatagtgatttaatgattagtatatatgttatgatgttaaaaattttgtaatttttttgttatactattaaaactttaatatattaatttttaaatttttattataatgtttgataatgaatgtagcgtaaactgttcaaactgcactgcaccataccgtattttcgagttatagtttttgcagttttaagatctcaccatgtaacgtcccctccttcaagtctccattgggcccttacacacacggaatgatgactcttatacacgaatacgtcactttagctgcttcatggaataacgactgaccctatagaccaccactagtgtttccagcgtgttttttcttcactcacacacttcttggaaaaacttcccaagatgtcacccatcctgaaattatcccaagtcgagcacgcttaaccctagagttctttcgtgatgggctacagaaaaaccagatgcaccttgtcgatataggtagtaccaatcaatccatttcaattatttttaactgtgtagtcacatatatacacagtcttagaattatcacacatgattttttccaggcgatgtgcgattacacaacttatctagtatttctccttatggatcacaagactactgactgtcacacactatccataccatgaatactcttactttcatatagttttttttgtgtatttataaactatcataaaaatataaaaggaaaaaaaatcaaaaataaaactaattttcccttttaataacttatgtcattccatatagaattatattgcaatacttgcacacatatcctccatatatatatagatagaaataaaatatataaattttattccaaacaacattccataaatataaaaacaaagaacaaaagccaacattaacccttatttattactataattatttatcttatgagatttgtccaaataaaatccatatcaaactttgtgatttttccaaatatgagcaacctcagcaagtgacttagtagaagacccttcattgcttagagccaactttgcagcttccttaagatcactaacatttttcctcataacctttccttcttcaccttccattaaaatcttcacatactcacaaatctcatccctcccaacaattccactctcattaaatttcactctcaacccaattttcaaacccttttcaccaaccaaaacagcattcattttttgctcagcataaagtggccaaaccaccaaaggaaccccatgaacaacactttccaaagttgaattccacccacaatgggtcaaaaacccacctgttgattcatgggccaaaaccctaatttgaggggcccatgagtccacaacaaggcccaaatctttagtcctctccataaacccatctgggagataatcaaatgggcttttttgactcttcaaagtgaaaaaagcacttgaagctttgtcatttgggcttctaataacccaaagaaatctttgcccactcatttcaagtccattagccatttcagtgaactgctcttgtgaaagggtcccaccactaccaaacgacacaaaaataaccgacccttttggttggttgtcaagccatctcaaacattcgggtacttcttctgacccggtacccgaactcgacccggtttgagtcaacggcccaaccgggtaaataggcgggttaccatggactctatccatgatagccctaaaagcccccggttccaaatccacaaagctattaaccaaaatccccgaagccgaatgatacttctccgtcatccgaacaaaagctcgataggtttcagttgtccggtcgtgaagcgggctaaaaaaatcccgcccctcgaccgaaatacacccgggtaattggatcgggtcggataagaaccgatactcggatgaagtgatggcatcaagttttggtaagtaaaaaaataacgacaacacatttgctgtcgttgggaagaaaatataaggaggaatattgaattcttttgccacgtcaaaggcggctggaccaaatacatcaacgacaagagcagagaactgagttgactcggtggtgagtttgagagcttgttgtaaagctgggagtgaccgagtcaaggtgagttcgatacgatcttcaattggggtttctgctgtgaggtcgtccatgttgacaggtggaagaaattgggaggaaattgggtgtggaagggattgaagaagcttcttttgaagttcaatggaagacgacccgtcgtttggaacaatgaaggttatggctatgttgtgttgtacgacaagtcgttttgagaaagctatgagtgggaaaagatgtcccattcctggtgttgggacaatgagtatgtggggttgttgatttggagaaaggtctcccatggtgtaattgggttttttattttagtgaaattgagatttttgtgtgtaaatttgtatagtatatatgtgtatatataggttgtagtgtatacatacaatttatggagccaaaaatgaaaagtgttatcttcgtatatcatataaggaaaatcagattttttttattaaaaaaaattgattttattggaaagcaatttatgtaaaaaaaaaaaaaatcttcaaatttatgtacataccatttatgttgatacatatccaaatagattgggaaaattaagtatgttttttattataagattatccaattttttgtattgtaaattgtaatacttatgagaataccatgcatgtgtgtataaaattggtatgtacattttattattatttattgaaatgactatatgcattgtttggtggatattgaatcttaaatgaaaactttgtcatttattaattggggatttcaatataaattgctatggtttttttattttggtcatgagtattccaattttggacctagtcattgattttttaattcttttttttttttaaaaaaaaagtttaac

SEQ ID NO: 272115 - DNA, 816 bp, Cannabis indica
tgttcctgctaagtgtacttttgtttgcgtgttttagttcttcattctacccagctcgacacttgtcttcctctaatgtgcttatcgaatttcaggtataacaattgccccttaaaaagttctttttaattaaaaagagctttctaatgattacaaagggtatttcagtcatgttcctcttttttgaaaagacgcatatcctctgattttggcagttgtgcaatttcgaggtacatcagaatgaaatgaccatctttttcacttccgctttgaatcatgtccataggatcaaatctttctctgatcgaacgaagccactatcatgggtataaagtaaggaaaaaggaaccacatttgcaccattttctccatttcaaaaagtttgagaaaaacccttaaacttctttgtcaaggatcaccattaaattcgtctgaagacttgcatgctatccttgcccttgacctttttcctgcgagtttcctccgacttcatcctgtcaaagcgatccttgcttcgttcgaagatttgcaaacggaattatcagccattgccccaagctctaacttcaaatggtaagttactttcttctttcacatgtttgttacattgtgaggaccagttacttgatttgtttgtatcgttatcatctcatctggttttggtagttttttagtgtttaaactattcttactagggttcaggcaatatgttttaagatgtccaactcattacttttttgtttgataaaattctctccaaggattgggactgctttttgctggtagaatgtcccacttgttgggaatattttacca

SEQ ID NO: 272116 - DNA, 1224 bp, Cannabis indica
gtcaaattttaagcacaattgtaaagcttgctgcatttaaagtctcaaacaaatgcttcggggtgctgagtcaattatagggttaaacttggacaagcagttcaaaccatcttgtaatctaagttatacttgggaccgacgaaaagtataatgacagcctatcttaattaccgaaaggaggaaaactgaaaacaagaggaaacaggaacagaaaaaacctggtattggttttatcggtgtctatctcagacgaatctccagttttctctccggaaaaattagagcttcttccttggtctaatcccttatttaatccattaactggtccattgtaaaactggaaaaacaacaagaaactggtacttagttttcagctacaagctttcatgacatgttgcaacaatcaactgactaacctttgatctcatagctttactagggtctaagatccgagcaagaatatccaaggtctgcattgcaacaacaatttatattgtaatggaatcatcctctcataaactccaaggggaaaataaaatgataagcttaaaatcattaaaccttttccattaaaggttgagaagtatctggagatctcagagtgtcaagtaaagtatctacaacatcttcggcttcaataacctggcaaacattattgctgcatcaagaaagaatagacattacatcatgataagcgattataagcatttaactaatcaaacacagattttctatatgcttaacgagagcaacttggacgattaaaacaatcaattttgaattttttagtaataaacatagataaaagtgtcaatagccacaagaggaaacatctcagcatgtcataccagccacttgagttaagcggtctcggtacatgtccatgcacatgttaaggaaaaacccctcctcgaaacaaattcaccccgaaaaaaaatgcccttttaataaaaagatgtggcatactatgctcactctgagatatgaagagaatgtataatgacaatgacaacatttatattgtaactcacaatagcatccaattccaaacatagcagaaaatagtgcagtagtaaaataccttacagacaacctctccaaagctcgagttacagataacttgaccgcttgattcttatagtctagaagcctaactaaattcctaactgctccagcttcttcgatgctatcctctattcttcactatagatgcatcagcaattg

SEQ ID NO: 272117 - DNA, 540 bp, Cannabis indica
ctactccatccaacaagcaccacgtgaatagaacgccaatgcagactcactaagtaaactagctagtacaatagattctaacactctcaatgtagttcccatcgaatatctctccaaatagagcattaacaaagactaacagtctatcctgataattgacaacactccatcatggatgaccccgattacacaatacttagaacaaggtattcttctaactaatcggaacgaagctaagagattgatgagaaaagcagctcgctttatcatcgtggacggagtaatgaacaaaagaagcttctcaatgcctcttttgaggtgtgtcacaaaagaagaatccaaactcctcatggtcgaggtacatgagggcttttgtggcaaccatgaggggaagccctcaaagaagatcttgagacaattgtacttttgaccgacaatggaagaagactctatggattatgtcaaaaagtgtgacaaatgtcagaggttctccaaaatacccagagctacccaaaacgaactcaagagtatgcaaatacc

SEQ ID NO: 272118 - DNA, 1362 bp, Cannabis indica
cacactatatatttatatatggacacatttttattaattgtattgatctaatcataatgttttattaattgtctgatcattataataatgttggattagtacaagcacccgaatcagcagcatcgccaattcaaacacttgaattggcgtctgcattagcaagagtgccagcggctgcacgagcactggcacctgcaatagaacaagcaactgcaaccacacgcacagaagcacgtgcacctgaaccagcagtagcaccaaaccaagcactaattcaactgcaccaacattatgaaaacaacagtgaaagagtactagacagatatcttcaaagactagcagcagtcaccaatttcatcatcaaagagcagaagcatcaagattagtagtaccacctcaacagcaacaatatcattatcaaagaacagaacagctactacaacaacaacaaaatcaatatcatcttcaactccaattcaatcatcaaagaccaccagcaccattaccaccagatgatgataatatcacagattgggattgggatctttactttcgttattaagatttttaccattgcaaattttcaatcattagaccaacactaagaccatattaactattttgttagctgtagctggtcttgtatgttttgttacttgcttgaattgtttattagaacaatgaatcagacctcaaatagtataaaagaaaaggtacaataggctaaggctaggatcattgttacctgatatagcaagcttgaagctaagcttcccaatattgagaatctcagcaatgcctactatttgatgttatcaactacgtaagtttgttctagtaaatgagaatagagtggctcataaatttacttacaaaatgcaggttattatcacctcattgacataccaatctttctactataaaaaccccaacatagactaatgagaaagttaacattttgagtaatcttcctttcatgtctaacaaacaaccaatagaataatatatatatatcatagattagtcttccttttctgttttaagatagtatcactgtaatacttcataatcttttagttcaacatataatataatataggcattgccatttctggctaatctgaggcaaagagcttagccaccataagtcccacatgggaaatgaagatgaaagatgagtagtatataataggttagaaaacgttattgctcgccgggtctagtagcgtgggcctgtaacccaagtgggggcatgtgggaaatgggacattaggttggttcagtgggctgaattcagtgatagctgtctactggcctgcccgttccaagctgggagttgggccttgtggtttggacgaaagt

SEQ ID NO: 272119 - DNA, 1027 bp, Cannabis indica
acaacatgaaactaaatcccttaaagtgctcctttggagtcagctagggaaagtttctaggcttcatcgtgaatgcccgaggaattgaagccaatctagaaaaaattcaacccctcctggatatgaactcgccaacaaaaaccaaagaagtgcaaagcctaactagtcgaatcgccgcactcagaagattcgtgtcaaaatcaacggacaaatgtgttccattcttcaacatcctgcgaggaaacaaaaagtttgaatggacagaagaatttgaaagagcttctcaagatctaaaggcacagctcgtaaaacctcccgtactttctaaacctttggacggtgaggagttggggatatacctagctgtcacggagcatgccgtgagtgccgtactgatcagagaagagaacagcgtacaatacccagtctattacattagtaaaagactcatcgaggccgagggccgatatccgttgatagaaaaggtcgcctactgccttattctagcaataaggaagctgaggccttattttcaagctcatcctgtttgggtatacaccgaccaaccactacgacaaatactgcaaaagccagatgcctctagacgattactcgagtgggcgatagaattgggtcagtatgaaatcaacttccaaccacgaacaacaatcaaaggccaagcctttgccgactttgtggtagaatgcacaggaaaagaagaaagcataccagaaaccaatcccgagccagtacctcagccatgtaatattgaagacaaaccaacttggaaactacatgtggatgggtcggcaactgatcgactatctggtgcaggaattgccctcatcacgcctagggtaacacctgcacgctgctgtcaagttcggattcaaggcatctaacaacgaagccaagtacgaggctctaatcgttggacttaagctagcccaggaaatgaaggctgaacacattgaaatctgcagtgattcacagctggttgtaaatcatgtatccggcaaatacgagg

SEQ ID NO: 272120 - DNA, 1418 bp, Cannabis indica
actacgatccacgccactccgtctcctccactttgtccctctccttcgctttatccctcttctccgctctctcgtggcagcacaaaggtaagcacaatattctcttatttattgtttaaatttctattagccatgattttttttttaatcttgatttgtgtgtgtgtgtgtgcaaaagaaatctgaagcttgcaatccaaagaaatttttaaagatcgtcaagtgaaaagcaatctgaagcctgtaaaagaaattttgaagaggatgaagatgagcacaacgacggtggaggaggataaagcttgtaaaggtttttgagcggttgcgacagtgattttgaggagaatgaagattatggtttctttttttttgggacaatccactatagcgacagtttagaactgtggcctttagtatcgactatagtcaacgattttaaactgtcaagaattcttttcccctgatatttttccatagtcacttattctacccagtattagtgatgcttgtataggcaacaattttatagaccattgggaattctttacctgaccatgtaaaactgtcgaaaatttcgagtttcttagtagtgagatcaacttctctaagtaagatttaaacagtctaatcatcaaaatgacataaacacatcatttcaaaggataaagagtgatcgaatcactcaccagctcgatgcagaaaactagccaacaaccctaaaggctaagccatccttgaagcagtagaaacaaatcctcaagacaacacacactaagaaccaacactaaaatagttcatctcactaatgaactaaatattagcattgattccacattattacacaatgtaaaaataaaaacacaaaaacctccaaaaggggacctccttactacctaactgacaccaaactcaagtgaagcccccaaaagcgtagtcattaaggtacctggccgaagtagcaatagagactcggatctgagactttagtcataacttggagtcccaatccaaggagatatcgacggtacaactttggaagaactgttgtcgctgtcagcctgtgagaaatccaatggatctaagcttaaggccctccaccactccgacaacagtcacaagcccccgattgttgatctccaaccatcagacgccgccacttttgacgacccacaaattgtgcaccaagctcactaccaaggaagacgattagatcgtcgaccacaaattcgcgtgaaaagacgaactgacaacactaagggaaggtccctctaactcaccagctaaacacccaagatctcccctcgcctaagagtgccactcgcacgactaaggttggtagttgctctgtagccgagagaaggtctaaaagaaaagaaacaaatcgtagatttttagagagaaggaagagaaaagttttt

SEQ ID NO: 272121 - DNA, 1296 bp, Cannabis indica
ttacctttaatccaggttcatacaattcggccaacccaagtggagaactattcccgatgatctcggccctatgtcacaacaacgataaactaataagtgtttatcccaaaacactgcttatattcacataagacaatctagggttttctaccaaaccccgcggtataaatacactaaaataaaacttatattttgattctaaaacatacaccatattgtagagctcgtcgcaagcttcgaaacggtatatagaatgtccaaaacggacacccgagtcaaaagttatgacaaaaatacgatttctgatctcttaggaatttctaaaaactataaaactcgaaaatcacaattttcgcactcaccgaaacactatcaaaacttatccaaatcactccaaacttcacagggcgcatatataccataaatattaccatccttacgtaacagaaataaaaatcgaccctttaaatgaaaaacgccattaacgttcggactaagctttaaaaagttccaaactcgatttctaactcaaaatcacttcaaattcaacaagtaaacacataaactagtcccatatttaccaaagaacagttctacgaagtcagaatctccataacctttttaaatcataaagcccctatataaaaccaatcgtttttaaacttaaaacgaaattaaaccataccttaagctttcccttttcaaggatttgctatcctgctactaccggagcttagatcgctaagttttggattgaaaatcgaaaaaaaatggatataagaagagaaagttttgtcgaagggagagaacgagggtttcgttcctttcgttcgttctgtactgttataacttaaaacttaatatatatatatatttttaaacaaaacgaaatcactgtttcgtttttatatataataataataataatataatattaataataatattaataaaaactttattattaatagttatcttattatttcttagccactaagaaatctctatttctagggtatttggccaacttcgagtaccctaaaataccccgatatttttaaaatcaacttatcccaataatctcatcaatatttctaactaaaactgttgtgacatttttggcctccaatcgggtctccagggtcgccaaacttgaaaatatttttatttcacaaataactcatattatatccacatatttcaaataaatctccgtaattaacaaattgcgcttatttatccactaatcaggtcttcaaggtgacggaacttgaaaatatttttatttccacatat

SEQ ID NO: 272122 - DNA, 1858 bp, Cannabis indica
  modified_base (1755)..(1755): a, c, t, g, unknown or other
ccaattatagagtgacacttcataatgatgctaacactttagtgtcccataacaatgtataaccatcaattactcttatttatatggtagctattaactactaattaaggccaaaattaatgaataagagaacattattagtcaactttttctttcaatgaatgacaactagtagataaaaattaataaataagcaagatttaatctttgtgattttgatatgactaattaacttattagtgaacacattaataggctgattaaacttattgtttgcttgtttatatccacctctaataaccaattataaaatcaatttagatatgctatattgtgttttgttgagaaagagtattatattggtatggatgcctaatatttcttttcaaataattggtctccttttagagagcattgtataactgttttattattttatgatacaaatgtagggttgtgattggaatttagtttagtatataattaaaggtgtgtttcttattatctttcattagaccaaatcatacttaccagaaagtttaatcctttatttccccctattaggttaacacatatattaataatgtataatcttattataataatagcccatttgctacattgataaaatccagattttagcttttattattttagccaagaaatgattattaattgtttcccatttcatcatgatcatcacaaaattgaaatttgaaattgggtgctgaaaaaaataaagacaaatcaatttatgttggggatgtaataatattacttgtaatataaaatcttaatttaaattagtggatattacttgtaatataaaatcttgatttaaattagtggggacataaatgctcacccaattaatgacactatcatttaaaccaataatgttttatatttttatatataatttaaagtgctatactcaatagtttatattactttttatatataatctaaagtgctataactcaaaaacaaaaaaaaaaaaaaaaatagtagcactaaaatgtaatgagtatttaatggaagaaaaagaaactataatagcttttttacaaaaaataaaataaagaaaatagcattaattaataaagcgcttctgaattatataggatcaaacctggccttcaaataagtacccttaattaatcaattattaaatgtaataagattcctctattttctcatttttttcatataataataataataataataataataataagatccctcttggcaatatagtatacttagcaagaaaaagaatcgtctaattattttcaagaaagatagagttagtttgacaaggataaaaattaaaaaacacaacaaaaaataaaagactagtaaaaggtttcaatatatgatttggctttttttcttcagaaaaagaagtttgtacacaaaaatatatgaatatttataagaaaaatatcatagaaagggaatcattttggcttgtcttaatgtcggaatctagggctccaaaccctatagaatagagttgccttttagtctttttatttcttttgaaggtaaccttttagggctcaaaagtcatggtcttcaattatcagtgacaaaatattaatcctctttttcttctccttttgatcttaaagtcaatatacaagaatcatagcaatttatacacaaattttgtggttcaacattcataaaaacatattctttttttttttttctaaactcaaatttaaatatataaaaactagttatatntaaaatcttcttcatataattgatcgtaagaaacatttatttttaccttaagagtagcaaaatggattcaattctataaatattgtatattagattcatatgt

SEQ ID NO: 272123 - DNA, 537 bp, Cannabis indica
gaatagttgaaactttccttagacaaataaaatgctctaccattttactaaagtaagttacttgcactaaagtaaattaccaggcataccacaagccataggtttaaataatctcaaacctattttaatactaggaacatgaagttttgttaagtccattgaatagacttattttcaaaatttactttcttgtccttgttatagaaaacttttggttactccatatgaatggtttgaaccatagttctcttgggtttacttcttagttccttattctgacaatccattacatgtttaaactatcaatggatttttatcactggtgtcttcaatgtcataacaaggtgagttccttaaaaccctccaactatgataaggtaccgtgactttctgtcaaagaaaataagtggtattctcctctttggttgggttaagacaacagaggcagtggggccatcttatttcaaataagatgatagaacacttttggaatcaagaaaaaatatctcctctactttgctactttattttcacact

SEQ ID NO: 272124 - DNA, 734 bp, Cannabis indica
aaaatatttatttttgaaaaaaaaataacttttctataaccacttttatttttaaattttaaaaatagaaaacaaaagtgtgttctataaagtttagttttttttattgtttataattattatgacagcgggtttgaatatttctatcaacttataattaattgaaacgagttaatttaaatcgcatttaataatataatttaattattatattctttgaactgatttatattccttttgtagtgtcagttagtttctgatgaatagtcgaatctggagtatataacatctaatttatacatgtgttaactaattactttggttttgttattttattggttaatataaatatatatgtatgtatattattgaaatagtgttgatgagctaaatagaaaatctaatcatcccattatgaataatccaatttaaagcagctaaatatgggagtaattatcaaaattggctcctgataatctgcaatttccataaaataagttaggaaagtatccaaagagatttgatcattacttgattttgagtgttaccaagaaaatcttttattaatcacaaattaatgcatgcaatcctcttattcattaatgtgccatatttagatagttattattatgatataataatgttagtgatattccatagaagacattcattcttttggaactattttataaaagaaaattatcacaaaataaatagtataattttatgttaac

SEQ ID NO: 272125 - DNA, 691 bp, Cannabis indica
aaaaaaaatgtaaccaccatagttataataaaaatgtaaccattgagtaatcactcttaatatttattcatttaaaaaaaatgtaatttataattctcaatttaaatgtcttaataaatgaataattgaacactctaatgaactttttgaccatcgtaaataattgaacactctaatgaacttaaaaaatttctatgatatgtttaaaaataaaataactaataataatatgtaattaataatatatttttactattattattattattatatattgagattatttttttaagttactatttaatatattaataaatatctattttttattataatactaaaataaattaaaaaaaataaacgtgcaattgtctagttcgtatataaaaaataacaaaaaaaaaaattatatttattttatttttacttatttgaataaaattatttgagggaattttatttcttttttcggaagtgagagaaatttactagaaagaattaattggagagagaatctcggagaaaacaacgagagagaaacataaatacttatgggtgattctacaaggattttttagtctattttttttttacattcatgtacattatatctatttaagatatcctacaaaattttgaaaaattcggaataatttacaatatagaaaacaatgttcaaacagtctatttt

SEQ ID NO: 272126 - DNA, 978 bp, Cannabis indica
tattgatcaatcctcactgtaaaagagattgaaagaattgctttagataaatctaagagaaatactcagaggttttattgtgagagctttgagagaggaaacactgtgttttttgttctcaagtcaatacaatctaaggggagtaggctatttaccgaactaaaggggtcgaacctctttaaaatcttgtgttctttatttgcttacctatttttttctctgtctaaattacatttcttatcgcttattaattgactcaccatcgtttgctaaaagcgagatcaacatgtaccattagtggaattagaaaatcgacaactctggcaacgcttagccgaatctaaccaacgaaacactgagttggaaagagaggctgcagtggccagggcgactcaaggaaataatacacaaaatcaacctgatcttggagtaagaaggccacgaggcagaactcaaggttcaagaaccaggaggtaggaagcaaatcaaggaaatgcccaaaacaccaaggaggaaaaacctaggggaactggggatgttctagttgacgaacaacagaataaccaagaatatcatcaagaagtacctcaaagaccccaaggatttacgagtaaggggaatgaacatgatgatgtattagaggcttcttataggaatgagaacataaggcaaccccgaactagggaacaggaaatccctcgtaataatgagagaaatcctgggactcaacctagaactagtgggttaccaccgagacacccccaccgtccttctcaatctgagagggaggaggcatacacatacttaaacagagggcatgtatctaacctttgttgaaggagaaggcctgtgcaagacgaggcaagttctagcttgggacactcgaggtctcaaaggcaaagtcgatcaggaaggaaaacacgagaaggaagcagacctcagcgttatgctgattaagaaagtatgagcaatacgagg

SEQ ID NO: 272127 - DNA, 1713 bp, Cannabis indica
aaaaagagccaccaaaaattcaaaaaaactgatctaagagccaaaaatcaaaaaaagccacttgtgattcgagaatagtgagccaaaaaaaaaaccaccgaaaatctaaaaataccgatctaaaaagtagagcaaaagagtcacttgtgatcagggatagtgagccaaaaaaaaaaaaaaaagagtcgcttatgattgagttgtccaagatagcaaataaaatagcgaccattgctaattggttttgagataaaacttcattcacattatcacaaattttaacataaacaatacatatagtaacaaacaaattacttctgagtgattcaaaacaaaaatcaagtaaactttaaaaatgaattaacaattttaatattttaaatttattattgtaattatattagtaaaaaaaaatatgccacattataatttattaataatatatatttaagtatttgacacaagatataatatattaaataaacaatcttatatatcaaatcttattacaacccaataataatacatgaagtataaattttttaaaaataattaaataatgtatgaaattacaaaaataaaaattgtgtatataatagaacctatatttaagaatatacttgggaccaaataaattatattttaattgagagattataactaaatagagttacactaaaaaaaatcttcaatactaaatcataatagaattattttttagtaaatataatatttatacatgtattacaatttggaataaaatgattaattctacatagataaatttataaaatgttaggcttattagaaattttatcccctaaactttgacatgtaccaaatcatgccccttgaacttttaaggctgttgaaaattccccttgaattattgagattgttggacttaaggacttttgactaattttaataaaaaactttaacacgaatcaaagttcagagagcatgatttggcacatgtcaaagtttgagggacatgatttggtagatatcaaagtctaagaagcataatttagtacatggacaatcactgaattagtaaaattgaatgaaattggaaaaagtcctaaatccaacaatttcaatagtttaggagaatttataacgaccagaaaagtttgggggcatgatttggtacatgttaaagttcagcgggtaaaaatcctaattagccttatttttatatagaggtatactttcttaatacaagagaaaatgtataactaattataatttaaaaattattcttatttataactgacccaaattaagacttattttttataataaattagaaattatttctgaataaagtattcttagataaatgttctactatatgtatatacgttaattatagaataagttcactatttttttaggcaatatttttagaagggagagagaaaattctactaaaatagaaagataatactaaaattttacattaacaaatgaaagtagagctatatgagacaatattgatcatatatataaatgaaaagggaaatttcactttttgtccctaataaaacccccaatatcaaaatttagaccttccactaatttgtacaaattaattccattgattacatgaacttctcattttaccctttttttaaaaaaaataaaaaaaaaatgttaaaatctaaaaaacttccccctctctcttccctctcgtgcacctctctctct

SEQ ID NO: 272128 - DNA, 576 bp, Cannabis indica
tttttttctaaataccgaaacaaataagggtgaattagtggagtgtattgtagaattttcttatataattttattaattgtaattttacttttaccacctccctcgttaccaaactaacttaaaaagaaactttattttctcagactttatgggaaggtccttttgatatccaaaaactgctcacaacaattgaacaaatggggaatgttagggtgagccaaaaaaatttggataaagcggaatctaaacgttggctaagcaagaagccatggttctgtcattctctctagaagttcataatactgatgcctttcctcagtttttctccattttcttaagagcattgttattggtcactagcggtgtcaaatactttctatatgtggcaccccacgattgattagcgatatttcttaaaaattattttttaagttatatgtgacccaatacttaggctatgtttgttaggaaggatggagaatatgaatgatggagagttggttgaggatgtagaataagagggagggagaggagagtaacaatccttttaagttgtttggtagaagggatgaagt

SEQ ID NO: 272129 - DNA, 5106 bp, Cannabis indica
aaaaaaaaaaaaaaagaaatatgcacaacaattataagatcaaaataagttatgaaaaggcttgggggtgcatagaaaagacactacatctagtttggggtacacttgaagctttgtactcaaaattacttggttacttgcacatgctacaattgaaaaatctaggtaccattacaaattttgtgctagaggatggtcacttcaagtattgtttttttatgggcccttgtaggcgtggatttaggttttgttgacctgttgtatgcgttgatggctcattcctgaagactaggtatggtgagcacatgttgtgtgcagtgacattggattcaaacgaccatatttttctgattgctttcgcgatagctgacaaggagaatcacgactctttgacccattttatgataaaattgaaaagtttcatagagaatttaagaagataaaagtaatggatgttgctattgcattaaatcttgagggcattaaatttgaaaggtaagctcggtcgtaatttgaaggggattgttacaatgtaataataagcaactgggctgaaagcttcaaaaacacaactaaggactcaagagccttctcgataactgcttttgttgaattctttaggtttaaagttcaagagtggtttgctatgcgaaaggaaatagctaataagtgtacaaagactctatcaccaaaaatggagcaggacatggcattgtagcttgagaaatctaagtatttgaacttcgatacatgtggaccttatacgttcaatgttcactttggaggactggttgagaggggtgttgtagtaaacttgcaggaacgaacaagcacttgcattctgttccaaatcatgaagattcccaattctcatgcatgtgttgcagcccaagaatgagatattagtatgtatgcactatgctctcagtattacacaacagagtattggaggagcacatatgaatgaataattattttacttggtgaagaggataattgggaattatttgaagacatcaaaaatatcacatcggaagtgcatgttgagaagaaacatgtaggccgaccgaagaagtaaaaggttgaaagaaattaagacaaatcaaactccttctaatggaaaaaagattgtgatacaacgaaattgtagcaagtgtagtgataaagggcacagcagaaaatcttgcaagtactgagtttaagaaattgcattatagtttcactatgttattgtaagttagtaatgttattgttatgtgttggatatgtgttgtaatagtacttttttttttgtgatttcctatgttgtgaaattagtattctaatgttaaaattaattgggcctgatggtattccgatagcggtacgatagtaccatttggtaaacttgttgtaatttcaatttgatcgaaacaatagagtacaatgatcctcgatggtggtacaatggtaactattttcaatcttttttattaagtacgatgggctatgatagtccattaaaattattaatttttgagcttccatttttagagtttatgggatgatggggtatgataaatgggacaatggtgtatgataaagcagacgaaggggtctgatatttaattcaattttcttgttttttctagcccgatatagaacgatacgggtacgacatatgcctgatgcttctactaccagagaaaagaaatataacttttctagtaacaatttacaatatattataggtacattgttccaaaataaaaaaataaaaaattcaaagttcatgctaagttttagtagaataattctgcacaccatctctttctaaaccgcttcatgttgtgatcaattacattatcaaaaggttgttaaagaattttatgctcaatatgctttattgtatacattctgcaattgtcgttgtattagtaaataaacactgattaaataaaacataacataatttatgtataatttaatcaagttactcaataaacatgaatttctaattaagttaccttgatggagttatgttcaacacttcgaactcataatcctgagtatcttcaatattagtaatcttcatattcttaagtgtatagaatacatcatctggatcatctggtatgtaatcattcagaagaatggtttcatcttcaggagtctgaggctgtgattgtggctctgaagttggtcgtttaagctcttccatgagtgtcattagggtcttcaactaacccataatctcaacttggccttacaaaagagcactctattccctttcaacattcttcaacctcgagaagatagcaaagtatcttgcttgctcaaccttggaggtgctaggataagatattgtacggggaacctcatgtgcctctagtggtggagatggtggaggtggtgagtttttaaagtcaatatctgtgattagtaaagagaaatatactaggtgagttgtgtaatcccacattgtctggggaaggttaagtgtgatgattctgagactgtgtaagtatgggactacatagttgaaaagggtttaaatggattgattagtactacatatatcaataaggtgcatcttgttttctggtgacccatcacttgagaactccaaagttaagtgtgcttgacctggagtaatcttggcatggtgacctcttaggaagttttctcaagaagtgtgcgagtgaggacaaagcatgctagaaatactcgtgttagtttacagggctaatcgttattctaggaagcagttagagtaacgtactcatgtataagagacattagtatatggaggaaagtccaatggaggcttcaagcagggacgttacatgaatcctctttaaaagaactcaaggtcgttcaccattctcattgcataagctagaacgatagtcttctcctcacggccagtcagcacacccataacaaacaaggccagtcccagcttgaactcatcatcaactacagtgcaactgtcaaacattctgcgtaattgtccaaagatgataggtgtactaccattgaaatactcaacaatcaactagtttgaggttgtcttctctttaatctttttttcaatcggtcttggtaaaaaattcaatccaatcaccaaagcaaactcagcttggctaatttacattttttcttcgtaatgtaaaagtggacttcatctggcttttcagatctaatcttatgaaaaaacaactaatggatcagtgcaccagaaaaatttaattgctctctaatgaagaactgttcgaagggagatatcttcaccctttccaataaatcgcagtccttaaatttatcttttatctttgaatagtaaaaatttccaccctcaagtgatatatctcgagtaatggtctaacactaaaactaaaagctttggaggtcttacgttttgcaaagaaaatttaaaaaaatacaagttaaacattctgaataaaagtaccaagaaaatatcttcctcatatcatactactatcggacacaaatgacaatgaacaaattattaaaattgggcaaaaccatcaaaccaacaatcgaacctatattgtcccataattataaatcaaaaactaaaaaaaatacggctattggacacaatgtcgtgccctatcgtgcctgtaccaaaaatgaaacataaaatattatcggacccacattgtaccatatatcaaactatcgttttaaacttggaacaacaatcatacccttgtctaacttacatcgtaccctatcatccaatcatgcctaacatgtgattgattttctgaatatgagactatcgaacctatattgttcctatattggacaccatcgtaccaatacaaaacccaaaaaaaattcacagaaacacataattcaccactattatcacatattcaatttttcttgtgctaaaacaaacctaatctaacatatgaaagtacacaatactattttcaactaagattatgcgaaaaattacttaaaaacttcatcccttagatatttttgggtagacctctcatttccttcttcaaatcatctctggatcgctaataggtttctaaatcatgaatctctaaaggccaatcccaagtgggtctccgacgtgggttgcgggtctctaggtctctaattaggcaatcgacgctatcatcgagggtctctgggtctccgtcactaatcttcgtgggtcttggacgtgggaagttgaaaaccttcgtgtgagttggtctcgatcgtgggcaagatttcgatttgaattggtggtgccattggtgtaattttggggtggtctttggtggttcgttgggtgagaacgagcgctcgaggtttgtttttgggttttttaaatgagaagggtactttgaggatgtattgtaaaagtggctcacaataccatacacactaactttaatttagataatcaattttatataaaattaaatttcccttaaagatttaataaaatatttcaaaacatggaaacaatttatcagtcttattgaaattattttttgttacgttcattgatctatcaaaaaattctgatattccttccacagttttactcttatcattttttactctttcattgcatttttgttatgttaatgattattgctatgagcctatgatatcaaacaatttttttcatgacaatctcatcaactctacgtgatgtttttcacattcatttagtgcatgaaatttcttttgtatgaaatttccacttatctgcagaaattttatatacaagtagcatcaatatcaaaattcaactacaacacttaaacgaacacaattaaaccagaagttaaaaaacattaatcaaacaattaaggaaccgaaaataaataaagtatttatacatgttcgatgtcagctttgtccctattctcgtttcggaaccacatatctttctctttatttattcaaacaatcttcaaaatacaacagagtcgagcatcaacgaaacaacactcaatctcccaagtgtttcacactctttctaatccctaagtttcactcatttaatcgagctctatacattttttatattgtctcttttatttttaccctctttaggtatcttgaaacaacactcaatctcccaag

SEQ ID NO: 272130 - DNA, 918 bp, Cannabis indica
gaaggaaggaacacgccagtgcattcgtgaatcaaggagatagtattgaggacctagatcctgaagtgtttattcctcagttaaccttagtgacaacctaaatccacaaagagagaaaagtgcaaggataaaggatcaggcctcccagaggtgacttaagaaacaatatcaatgattataaatggggacgggatctcccagatgatcatagtaaaaagttagaagacaaaattgtgaccttaaggatcctgataagtctaatggtaaataattacgatttatatttatattatgggttagtcagataataagtgggattacgatcctactaatctatttcagcatacattttcaattttctataagtgagtaaataagcgtaatttataaattacgaagatttatatagcatgtgtgaatgtaatatgggatatatgtagaataaaaatattttcaaattcgtagatcttaaagacctgataaataagcgtaatttatttattacgaagatttatttaaaatacgtggatatagtatgagttatttgtgaaataaaaatattttcaagttcggcaaccttggagacccaattggaggccaaaaatgttacaacagttttagttagaaatattgatgggattattgggataagttgagtttaaaaatactgaagtattttgagttactcgaagttggccaaataccctaaaagtagagatatcttagtggctaaaaaataataaaataactattaatcataaagtttttattaatattattagtaatattatattattattataaaatgtccgatgcgtttatagatatatatgttttatgtttatatcagaagaatagtacgaaccaaaacccttgctctctccctttgaaaaacctttctccttatatatcattttt

SEQ ID NO: 272131 - DNA, 1286 bp, Cannabis indica
ctgggtcctaggtcccagtctgagtctaggacccggtcagggttcaaattcctagtccgagttcaggttcgggtttccaatctcggttctgctccagatctaggttcgagttttggattccagtccagatcctagtccgggtcttagtctaaggtgtccatcttggtccaggttccgaggcccgggtcaaggtccccgtccaggtacgggtccttggtccgagtcagggtccatgtttgggttacagttcgggtcctagtcccaattctcatttcgatttcgtgtttggcttcgggtatgggtccgagtctaggttggggtctgagtcctggtccgagttttgtgttgggtctgggtccatattcggatcccgatctgggtctaggtttgggtccaggtcctagtccaagtcttaggtacgggtccaggtttgtgtcttggtctcgctccagatccaggtcccacgtttcgatcccggtctgggtatgggtccgcgtcttggttcgagtctaggtttgtatctagatccatgtctaagtccgagtctgggtcttggattaggtccccagggtcaggtccgacatgataccggacctggaaccggaataagactaggaatgggactgtaacaagactcgaagctaaacccaaactcagaccagaacccatactgggacatggaccctaaccaggacttgtgacaagggaactaaaccaagaccgggacctggacccagacttggacctggacccaaaccgggaccaggatctagaccgagacacaaaaaccggggccgaacccaagacccaagaacaagactcggacatggcacccgaaacccaaacccagacttggactagcacccgaactcggacaagaacccaaaccgggacctagactcgggccgaacatggacctaggacccgaacatagatgggggacccagacctaggaatttagcccccgaactaggaccagaacttggatcaggatcagggacctgttgggttttatgccctaaataaactctatttcaatgtaatccagattattcaatatcaataaagtaatagaagtatttttcattcatttgtgtatgttttggttcacttaatcaattgtttgtctatttgatttataaattcatccaaaccccttttcacatacttgatcatgtttattgtgttgtcaacacagtggaaagtaaacatgactatgtgaataaagtattcctagatttatcagaacactgtgttttactgatatgacaatctacaatagagtt

SEQ ID NO: 272132 - DNA, 617 bp, Cannabis indica
cgtctatgtgcccttagccttcctggatttgacgagcatgtcatccacgtacacttccatatttcttccgatctggtctttaaacattttgtttaccaatctttagcatgtcgctccagcgttttttagaccaaacgacattactttgtagcaatatagacccgtatctgttcgaaaacttgtatgttcttggtctggtggatgcattttgatttgattgtagcctgaataagcgtccgtgaagcttaatatttcatgccctgctattgcatctacgagctggtcaatccgtggaagtggaaaacggtctttggcgcatgctttgttgaggtctatgaaatcaatacagactcgccatttcctgttcagcttgggcaccaatacgggatttgtgacccaagctgggtagaaagcttcaattttaaaattgttgttgcgcagcttctctacttcttccttcagggctaatgctcgttctttgtacactagcttttgcttttgttggactggttggaagttgggatcaatattcagaacgtgtgaaatgatagaacgatcaattccaaccatatccgcatgtgcccagacaaaaatgtctaggtttgctctcataaatt

SEQ ID NO: 272133 - DNA, 709 bp, Cannabis indica
gttctcttctctaatttgcacggcacttatggcatgttccgtgacaactaagtatattccaagctcttctccatccaaaggtttcgagagtacgagaggttttgcaagttgtgcttttagctcttggaaagctttttcacactcctccgtccactcgaactgcttttttcctcacaggatattgaagaatgggacacacttatctgttgattttgaaacaaacctgccgagtgcggcgatccgtccagtcaaactttgcacttccttggttttagttggcgacttcatatccaggagggcttgaatcttctctggattggcttcaattcttcgggcattgacgatgaagcccagaaactttcccgagctgactctaaaggaacactttgatggatttagtttcatattgtactttctgcggactttgaagaattcgtccaggtcgtctatgtgctccctagccttcctggatttgacgagcatgtcatccacgtacacttccatatttcgtccgatctggtctttaaacattttgtttaccaatctttagcatgtcgctccagcgttttttagaccaaacgacattactttgtagcaatatagacccgtatctgttcgaaaacttgtatgttcttggtctggtggatgcattttgatttgattgtagcctgaataagcgttcgtgaagcttaatatttcatgccctgct

SEQ ID NO: 272134 - DNA, 448 bp, Cannabis indica
tgtgggaagcatatttgcaggtatttatgtttatatatgctatattataatataactagtgctttaaaaatgttaaactttttaacttggcataatgtttggaacttcttatagaatactttggtatgtatactttagagatatgtgaagtaaaagataggttatgcagtgtgatttattggtttttattttgtatacatgcagagtcataaggaagcagccccattcaagatcaagtcattcccttggtatgacgacttgtgtgcagtttttggcaaagatcgtgcaactggaaaacatgcagagactgtaacagatgttgttgaagaacttgaagctgaaaaggaaaacactacacttggagaagatgattttagcaatgctaataatgtggatgaagtggaatctatgtctgtttcagatgcaacaagaggtgctcaatctcaca

SEQ ID NO: 272135 - DNA, 546 bp, Cannabis indica
ttcatcttcaattgagttcttcattaccatttgagtttttatcttcatcttcataccactagttgagtatactctcaagtttaatgattgagtatttattattttgcagttatatagcaatataaagcataaatttaggttattctaaaaaaattggtgtgaaaataaccccagtttgaggttgaagatgacctgtgatatgcgaccatgtgcgaccaattggccgcctttggtcgcatatggtcgtttagtgaaaacaaaaaaaaaaaatactacgcgaccatgcgtgaccatgtaggtcgcacatggtcgctcagtgtaactataaaactataatatgtgaccatgtaggtcgtacatggtcgctcagtgtaattaaaaaattatattatgcgaccatgtaggttgtacatagtcgcacatggtcgctcagtgtaactagaaaactatactatgcgactatgtaagtcgtacatagtcgcacatagtcgaacatggtcgctttccactaatttttagatttcaacatgtatttctaaatgcatc

SEQ ID NO: 272136 - DNA, 5532 bp, Cannabis indica
tgggaggtggtggtggtgcgacatatgagacggagatgagagggacaccgacgaaaggtgttggtggtcccgtatgcgatgtagaatagagggagaccgacgggaggaggggtgggtggagatcgatggacgagagagatgagaagaaagggagatcaagagagggaggaagacggcgagagaggagggcgatggtgcgaatgcgtgggtggggttttggagagataagatttttgttttagggtgtgagaaatggagaataaataggtgagaacaattaggtgggcatgtgggaaatagaaaaaaagtaggtgggcacgtggaaaatgtggcgagaagtaggtgacgattttttaatggacccttataggcgacggttttaaaccgttgcctataagggtccattaaaaaatcgcattttattgaaaaacgtcgcctattttatttactatgattttaaaccgtcgggaatactaaatttttcccgacggttttaaatagttacttaatttttttagtgacggttcccgaattaaatcgtttttaggactgtcgcgaattcttatatttatagtagtgacttgaagggtcttctggagtgggtcgattagacctgtgaagattggggcgacggagtggtggatcggtgtgaacgttgtctccattgggagcagagttcaaattctcaaggggaatggtctaattttattaatattttaagttttactcagtaatttttatttcattagcttcaattacgtggctaggaaaaccaatttactagcagatttgttggctagttgagcagctagattgaatcggatactttgtgaacacccttatgaagtagcacctcatgtggctactaatttggctttttaattgttggaaataaatgccgtcacttgcagagtacttatgcgcgttctttctctgcggtaatcaccgcgtgaacatacgtgacaaacttttgtgtggttaattcattcataggtttacgttaataaaatgtaacaaagtcgaagtggaagtaacaaatttgaaacgatatgtttcgtgttgggacatgaattagttgactttactaaatcttctattgattttgaggtcaccaaaatttataccagatattgggaactaaattaaaaggaggtaagtagctaatttcattcaacaaaatctggatcgacatacatcgaatgttaaaatgggagaaaaaaagtgcaaagtctcggtccagacgatcagatcaaacccaaagccaaaacctcgtaacttatctgtatttttttctttttttcaaatttttgtatatacaacaaaatttacggaaggaaaaaacttgagaaaaccaagtcgcagctttctgcatcccatggccaccaaagagtaaaggtagtcaaaccagatgattagggtaatgattttctcgtgtgactgattcctatggtaaaaataaaagtgtgtgttgtgtatagaaggagatcaagatcgaccccttaaaaatcaacgcttaaaagaagatgaccgaccaaacatctgatctagcagaataacaagggccatggcgactgaggtatcgaaatgaggctccaccacgaggcggaagacgtcccctcccaaagaaactccgccgatcccagcctccttccgccttatctccgctactctctgtctcttgtggtcgtaaaccacacagcaccgctgggcatacgatccctcaatttcgtacaatgttgacgatgggctactgctcttcggcgatggcgattcacttccacctctgccagagctcatcacgcgcgccaaacacctcgtgtttaggattttcacgtgtttttttacgctgaatcgcggattcaccttcgtgtctccgtcgtaaaccatccaattatcaccaagacttaacctctgtcaataataaatcatatatcgaagttttagttagtgtgttaaatcaaatactagaactgtttggatcttcctgcataaaataacacaaaaggaaaattatgagatagtaatttaattaccttgcgtcgaattgtgagaatagacttgccggcggcgtccatgaggacgatctctcccttgttaccggcgatgtaattatcaacacggtagacaagattgcccttggagtcatataccgtaaagccattacaattgaatagaagggattttgtccacacagttaagacgaccgcctcatttggagattctgagaccaaagatggggttggagcggcggtgatggaagcggaggcagagctaggatgtatctttgtcattaatcccaaaacgattaagatttcaaggtaattaacacaaacaagaactctacgtttttatacttgtggaaggtaagtgaagatcaggtgataattaaaattgtagaataagaagaagaaactagaagcttagaaaaattggaagacaagttgagaacttagttaatacaacttgggtaatacaagttggaaactcggtacttatataggaagaccattagagagagagagttaggggaaagttggtggtggtcccggatattccaaggaaaacaaacaagcagtacgttaaagtctaaagggccgcaccaacgtattccacctttttacagataattgttattaatttctcaccattaccatatataatatttaacttttaactgtttacgatcgtgtccacgtggggttagtgaggaaacactggaacacttatttcttacttgtaactgggcttctcacttatggagagcttcctggtagggaatatctcctaatcctaatgctcgaaatcgtctctgggactgggtgaagtttatatggggacttgacaaaatgggcattaattcagatgaagtctttctctatgcttcaattgtgattgactatctggaggatgaggaacgataaggtacataataaaagagtatccaatatatctcagtgtgttgactatatttccaactcttatgcagattacagagctttccttttaccagctccctccccttctgaggtgatttgttggaagtctcccctcatggctggaataaacttaattgtgacgtaaaagtgagactggatagcatgtgtgctgctgttgtggctcggaaccatctgggggtggttgtaagaattcagtcttctagtttggctttctctgatgtgctttgtggagaagcggctgcttgttgtctagctttagaggtggctaaagaggcaggctggaaatttatcattatagagagcaattctagagtggttatcaattcaatcaacggtttggatgttcgttgggaaattgaaaattactctaatttttgtttaagactctctcggctgtttgatggttgtaatttctcttttgttagtgttgtaattttatggctcataatgtgaccaaatgggctttcacgaactacgggtttagtagattgagtgattcgtctatctcgaacaatattttatgtaacgatcataagatctaatttgctatttataaacgcttttactttacaaaaaaaaactgtttacaattttaaataaccagattaaaaaaccatattatttttcagtgactaaaataaaattgatattacattctttgattcataattattattcgatataaaatacttttttttaattttgctcaaagttaaaattgattatttttgtatagttgtggcttgtgcattgtatgtaaaaattttgcccttaattataattatttaaaattaagataatcaatacgaagcagtttttaaaatataataatttgaggaaatatagtagaattttgaaacacacaagagttataaatttgttaggaaacccttaaaataattgaaaaataaaaaataaaagtcttggcacgagtgcggaaccttatgtgtaggaagttgatttaaataataaaatattaaattaaattgttaataatgggccgacggaaagaatgagagagagaaatttaggatgggtgaatagactgaatagcgaatgggtggtgctcttgtggcgctgatgtagacaaaaaataataaaaatttaaaagaaaaatacaaagataaaagattaaactaatattttttcttattcaaataaacacattacattggcttggcctaatcttcacttcaacgccaatataaaattattgaaattaattactattctagttttttattttattttatttttacaaaatactattctacttattaattaaatgcttatttgttgttgagaactaattatgtggtggaaagcgtgacagctgtccagctttggctaggatatttttctcttggtacatatcgagctatgcttatctatttaattaattaatttagtgtgaagatcggctccttcatactaatcatcattagctgttaaaataatcatgacattggctatgggcggtttgtgtgactccttccgttttttaagatcatctggtcccttcatgtataaatatataaataatattgtatataatttcacaatgtctaattaagctttataatattagtgccaacgctttgaccatatgatttaaataaaatgtaataattctattggatagtgattagagatgtcagatagataatttatttaatctgagatcgtacggaccatataagggctcaaactcatcccacaactaaattttgcttacatatttgcgctgtcaaagtttttttattttatttttttatgctgtgtttgttatgttactagtagtggtattacacttatccgatctaaataagttcatcatctgaattgatgtactggaggttggattagatttatttctattattattagattagttgaaatttatataatgttttatactcgcattctcttgcattgaaatctattgaatatttattaaattagattggattcattcaataaaacaaaaataaaacaattgaaatttgaaacttaattttcatatataataatataaaatctaattatttaatcaaattaaaaaaaaaatactaaataacgcggcccatagtcttactaaatttgtattaggggtgaacgagacttatactcgattggtgactatccctccacctatatacttcgttattgtaaacgaatcactgtttgtttaataataacaagtatttttccttaaaaaacatactaaataattcagttgtttattaaattgcattaaatttttagacacctcatttaacatctgatctgagaattaattagatattaaaaaataatatttgaattgatctaatcataattgtatattttaatattttgcaatagcttgtcattagttagttgattgtaattagattgaattgatttatgtacaattttaattactagctagtagagtatttgaaattttagtagtttcattttttgtccttctaaaaaaagttttataaaaataatccttgaaatgtgaaatttgtaaccttgcaatcacactgctggaatagtcagttgaagtgggttgttttttttttttttt

SEQ ID NO: 272137 - DNA, 4888 bp, Cannabis indica
agaatgatcttgtcaaaaccactatgaacaagatattaatgccatagatatataagaatgtggttgttgtcttttgatgactaaggtctagttacaacaaagagttcttagaatactccaagtggatcctggtcatagaatactaaactcatattccatacataaacatacagtttgaatccattgatagaaaatagatattaaagcatgactccaagagcatcatgaagattctggatctcggtgtcatctccaacggttgttcggacatttgttgctggcgaagcccattactgggaatacctagattagctgctaaattggtatttcagtttcctgcacaccaggtgtgattctagccaaaagggatgtcacaccatgacccacagttggtggttgcgtgattagtttttcaagatttgtggctggtgggacccttgcgtttccaaaattcgacagtgcgggatccactattggtggatctacctgatcgaccatgcctctaccagtttgtaacaccatcgtgtttgtgattaaatttgaagtaaagagcaagtttatgactcttgctctcaatgaaagcaacaaaatgttgacctcgcttttaggcaacgatagtgactcttaataataagcgataaaggatacaattcagatataatatgaaaagacaaatatagaacataagcttttttaaagaagtttagccccgagcagttcggtaatagcctaccccccttgatttgtattgacttaagaacaaagaatatattgattcctcttttaaagctctgacaataaaatctctgagtatgctttcttagatctctctcaattaattctctcgaccccttttacactgaggatggatcactatttatagggctatatgcttgaggataggtttctttttttcttacaatatttataattggtaagaatacatatcacatatttagaatacaatgattatgggatttggatagctagccatatccctgtgatacgatcccaaatttatagggattattcttatgcttcacgatgcaaatgctgaaattgttaagcgttgatatgttgttcagattgaccacggctcggctgggaggaccttgtccgtgcaggtatatgtgatgttctgctcgaaacatctctattggccaggtatggagaatcaaattcacgtgtcaccagcatatcatgccacgtcagagtgcaaaatttgggatgacaatactgaccaggtttgactgacaattttcaataccaaaagttcaaaactttgaattgaaatctaattttcactaaaaccctaatggacgagttgaaatgaacattgtaaggttaaatttgaagcggagtcagacaataagatgttatggttaaacataaatgtgattttcaagtcctaaacctagaatagttcaagaacagacaagattcatatcaaaaaatctagaaactagggatgcatctcattgcaaatatgtaaaagaaagaaatgaagagcttactcacatatttgaagctttcttgctctgcttggatggaatcgtcagaagttttcctgtgaattccttgaacgatttgggaggaaattttgctaaaagtatttttctctagtgtttaagagttgaaatgcctaaaaggattgctagagatccttaatcctatttataagcaatttgaaaagagaattaatcattttaaatttgaatttctcgaatttccctcaaaagtgtacgctacgtactcattacaaggggtgtaatcgtcaatcacgtgcaagcatcgaaccgtgattagaggtcaaactatcaattagcattaaatggacagaaattgaagagcccttgggcggaggaaaatatccctagcagttcatatatgactactcaacatctgtaacattcaaacattcgagcagaatgattgagaagatgtccgaccaaggtctaaacatgtatatgccaagcgaagcatgagagataatgattccaaaaattaatctcattgcgtccaaacgcgatgacaatccctataattacgggtttgtgtcagagaataacggtaacaaaacctagtgtcctatttctcacgttataactatagaattaatgtagtttcctatttaaaacattataagaaaaagggaaaccatccattatgtattaagtccatataaataatggtctaacctccctacgaaggggataaagagaattgcttcagaaatatattatagagaaaaaagagtgatataacagagaaagttactcagagatcaattgtgagagcctttgagaggaagatcactttgtttccttctctcatgtcaatacaaatacaaggggagtaggctatttccatacttacggggtcgaacctctttaaaacttggtgttcacttgaaagtaagatcatctatattttactgtttttgctttcttttattaaacttatctaatcgctttatttttgactcactatcgttggctagaagcaaggtcaacaacttccatgttttgtccaatctggcctttgaacatcttgttgactaacctttgtgaggtagctccaacattcttgagaccaaacactatgactttatatcagtataaattgatgtctgtttggaagcttgcttgttctttgtctggtagatgcattcgtatcctattgtacctggaataagcatccataaagcttaagattttatatctggttattgcatccgcgagttgatcgattcttgggagttgaatatagccttttggacatgccttattaaggtcagtgaagtcaatacatactagacatttcttgtttggcttgggcaccagtactgggttgtccactcaagttgggtagaaagtttcagcaataaatctatttatccggagcctttctacctctttttttagtgcatgtgcacattctttatctaggaatctccttttctactaataggacaaaagtctagatcaatataaagggcatgagatatgacgatgggatcaattccaaccatgtcctcatgtgaccaagaaaaaatgtctaggtctgctcttagaaaattaaggctaattttatttcaagaaacaaaaaattgccaattttgagttttctagtcagcatggctagatcaatctccacttcttctagctcttctactggcccaacgtttgtgtttgtttccccacgtcaggaatccatgtcttcgttcccgccttggaattcctatttggcaatgcgttttcccttctctaaactctagctagaagtatcttctttcttggtgttagataaagaaaggttgtagcattcccatgcagtttgatgcattccttttagatagcctactccactccatgttggaaacttaacgcacatgtgaaagactgatgtgacagctcttaagtcatatagggcttgttggcccaacatgacattaaaaggtgaagggacgtcaatcactaagaacagtgccattgttgttgtaatcgtcagagcatgtcctattgtgagtggttagtgaatctgtccaagtggtgctacgctttggctggagaatccgtagaccagctgagtgcacggaaccaaacctttaagctggagtcccattttcccatatcttttcttgaataaaaaatttgtagaagctctattatctaccattgtccgagccacaattttgtttgcgattttcacttcaacgaccaaaggatcattgtgcaaaaaaatgaagtggctagaattcgcttcgctgaatgttatgattggttctcaaacacgttgtagtttaggctttctttcttctataggaaagattacatcctttagttcatattgtaaggcttagagatactttctctatcttttcctgagtctctagcaaggtgggggcccacaatgataacttgaagatgtccatccactggtggaggcatcaattggttctggttagcatatgttttggcagcccttggttctttgttagctttcacatatttggaaagtgcaggttgtttttttttatgagaaattcaatttcccgctttaagttgttgcatttatttgttttatggtcgtagtctacatgaaaatgacaaaacatggtggtatcccatttgtgcatatcctttttcatgggacagggtttcttatatggctccatagactgggtagtgcatatattgtatctatgtcttctgttaggatagtgaatgcaatgaactttgaggtattctcccgaggatgctgtttggcgttgtcattgaacttgcatttcttctcactaccctgtctgttgccactgtgtgacctttttccaccttaattagaactgctacgattttgtgaattccaatcttgttggacggatgtattggccacagtggtgtgctattgagttttcttttgtctaactatgtctacacacagtactacttcatagagcttgataaatccatctactcggtccaggaattcttccattgatcccatagttaatcttcttatgtccttccatagctctcctagaggttcgattcctcctagtattgtggctagacttccatcttcgatcatcctctttacctttgttgcttcagtcatgaacttactaatgtaatctcttcaaggttctcctagtatttgcttcacttctaccatgtcttcaaaataagaaggaaggtaacaagaagaggaaaattatgttggaatatattttaccagaatctagatttactaacaaatatgtttttaacatcctaatatgaatttctaaaacgattaaaataaacacataaaaggtatgagaaaccttacagtggttgcagcagaattaaatgactcctcccactcaaatctctaacccttgtatcct

SEQ ID NO: 272138 - DNA, 1014 bp, Cannabis indica
cattattttcttttccctaagtgcttgtaggtaggggaaaataagcttttggacaaaggtgtaagaccgtgtacaaatttagtgattctcctatatacacttgtggtgtatgtggtgttgagattgctctcacatctcttatatatatatgctatttatatgttgtgttttatgtgtagcttattgctttgagttgtaattcttctcttcatctctattctctattttatgtgtatattttgtttagtgttgtaacattatttaatctatgattttgtcctttgtattatttatcatagagttgtaatattgttggtttggtatttctattggagcacaataatttccaacaaattaaatcattaaattttatactaatagttttgttattaaaaatacagatggtactcccactaacaccgccgccactacttgctcagcgacgactacttcatcaatgcagtcaacttcagttagatcttagcaagtaatagtaagtaatatttaataaatattaattaagatttaataattaattatattttttaatcaaatgtttacttaagaatttattactttgattatttattaagaaagatgcgaaaatttgaattttaaaatacagatgatgtcctaacggaaaaagagaggagccaaagccaaatcactcgacaactttcaagttttagctttagagagcatgtcaatgccattatataatatttattttataaatgtttatatggacattaaatttataagcatttttttagtttgagacattaatatggactttggattttatggactctaaatttttatggatggattttaaaatattttagctttcacttttatcttgattgatgaacataaagatgaagtttgattcgatgaacaaattgtttgttggttggattgatttggtttaaagatgatttgatgaacaagttgttatattatatatgtttaatttaataaataaaaaaagtaaaagaaataattatttgaata

SEQ ID NO: 272139 - DNA, 1637 bp, Cannabis indica
ttgtaaaactctttataacagggttccttcgaacacgctttttatgccgttataatgtccgtttttagtgatttattttagtcaagtttttattattatcactgtttttaataattaattattctattagtattaaactagtttataaaatcatacacgtgacgtccctatagattagggcgttacacttaactatgcaataaaaaatttaaaaggtatttcaagaaatggtagaaattgatgcaatttatatgaagtatactttgttgaggttgacaaatatgggaaactaaaggttgttccacccattaaaactgattggcagactgcaagtgtggttgtgagatttttggagaccttttacaatgtaacattgaagtttagtgggtctacttatgtagctgcaaataagtacttcattaagatatgcaatattcaccaagagttggttgattctgtaggtggatgaagatggggatgagttgttgaggaatatggcacataacatgaaatcatagtatgacaagtattggggaaagctagatgactgtaatgaggcacttctaattgccttggttcttgaccctagatacaaacttgattatctctatcattattttagctttacacatacggagataaaatgcaaagagatggtaaaaggagtggaacaaactattcggagaatgtttaatcaatataatgattcagcatcaagtattgatctctcaatcactcaatcacaagctcaacctattgatgatggtggttcttcctcattcatcgtttctaatcgacctaaagacaagaagtcttgtaatgtccatgatgagttcatggcacaaaaaatggagaaaatggcggcaagatgaactgtgaactcgataagtatttttaagaggaagctgagcaaccaactaaacaatttgatgttttaggatggtgggctagtagtgagtgcaaatacaaccagttaccactgttgcttctgaggcagcattctctgttgggggtcagattttggatccttttaggagttcacttagcccaaggatggtcgaagcattaatttgtctcaataattggtggagtggatcacatcaacccattgttgtgtgagagtacatatatgaataagaaatgcttcaaacacaagcattgtttgaagatagtaattttagtttgttatattttattttgattcctataatttaagtctaatatcataatatttatttaggtatgcatatttattatctaactagattatacttttgatgttttatagagattctcaatgacaatactataagcactctttttactctttcaacctcaacaactcaacaacaagacacaaccttggattgagaaggtttattattatactttattatatttaatttattgatttcatttactactttgtcttttttaatttaaaatattgaaagatttgcacttggaggactttggagtttgctgaattagacaatgaacatttaaaataaaagaatgatagattacaccaagcaaagcaaaggatacacaaagagagaacacaatatacacaaggaagggaagtaaatacttttgaatagttatatttttaaactttagtttacactttagatatg

SEQ ID NO: 272140 - DNA, 1534 bp, Cannabis indica
tactaatcttacctcgattccgaattcaggtgtgccagtcaacctgagtggaacactctgctcggcgaattacaggctcctaaatcacattaaccacaatactgataagtgacacgctaaatcacttcttggggacttaaacttgaaactaaaagtttcgctatcgataaatagcatgccactaccctaaacaacacaaaaatgggaaggactagggttcccaaattttccccaaccggtagaccggttccttaaccagaattccggttctggaaaaattcctggaagccccaaccggtcgaccggttcctataggcctccttgaactggaattccggttcagtgcaagaatttttcaaaaattcactactcgaccaattcaaccccaaacttcatgcaaccttccagacctgctatttagaccccaaagaacataacccaagtgataaaaccaagcttcactcacagaaacaaatttcaccactaatgagccaagcttgagttcaaaactccaaagcttgctcaaaccactaacagccactaattcaagcataaaacaacataaaaatccatatctaaacctcagagcacaacaacaaatcaccacagcagctacaacaatccaactcacatttcactcataaaaactaaagttttgagtttaaaattccaaacttggttaaaaccaattagcatgcatcaaaacctattccaatccactcaattaaacacatataagctatagaaaacaacaacaataactaacagcaaccacaacaccaaacatgcaaaattctcatttcttaaacttcaaaaaaacaaagaacaagtttaaagaactataccttggtttgagatcacaagaaccttgctaagatcagctagaaaaccacaaaaaatccccacaccctagctgctctaggccgaaagagagaaagagagagtttgagagtgaaaaatggcttttttgcttctttcttttgacttttaacaaaatgaatgaaaaataggttttccacacttaatattcagcatattataattagaaaaaaaatcagatttataaactttaattaaaatccacaaaagacaaggcacatatggcaaaatgacctttttgccctcacaccataaaaattataaaaaaggcattgaggggtaatttgggaaattctaaattcccgaccaatcccgacatttccaatgtgtaaataaaccgtcccactctactaaaatattagattgtgattttactgagccatacaccgcgttccatgttgccgggtaccgaaaatgcaaaattatgagatttcactatatgacataaaaatgcattctgaattcaaataaatcaacataaataattatttaaatatccataaataatttttcataattaaacactaattatcttctaatttccaaatttaaactaagcggtctttacatcacacacgcttacttcctcaatgtcctccataggttctatagttgttttgaatcccacacatggatccaactcgtcttgttctat

SEQ ID NO: 272141 - DNA, 1843 bp, Cannabis indica
taattaattttaggttttttttttctttgtaaaggatctaatattttagttaattatgtgaaattactatgtctaattatactcagttaggactataaacatagaagtccggtaggatgataggctgtagactttgtttctagtttgtggattgaaaatttctatttggcttgtttctactgttgaaacttacccatttaggttagctcagtgggcaaaggtggggatgggatggaccatggtgggtgtattgcaatcacacactaattacctctgtgctaccaagtttaaaaaaatgaactgttggaacgtccattaggcagtttttaaactgatccaaaaatattagtgtgtgaaaacattgtatagcaggttattattgtttaggaataattggctcttttaagttgacagtagtgtagctgtgtttttggcttaatggtagtaaaaagaagcttttcttcccaatataattgcaccttattgtattcgtatcacagagtgaaagaaaagataaatacatgttgctggagttggtctcctttgattgcattcaattcttatacatatattgttattcctaactttgatgacatctgatgacacagcttttgatattgtatcattatcttgcttttcgcagaacgagcatgacaagatcagggaactatcccagcagttagccatagagaaaaagcgagcagcaacatacaaaaggcatctcgaactcatatttgagcatattgaggagcacaacgagagcttgtcaaagaagatccatcacatagtagagagtgtgaaggaagtggaaacaaaagagcagcaaggtcatagatagtttcagatgatttttgaagcttcttttagtctcaattgatgaaacacaaagtcatcaggtgaccgtatagagctcgctgctgtggatgaagggcacattagtatgattctataacactctaatgcttcattacaggtttaggggtattctagtcaatttctctagtgtcgatgtttggaccagtgccattcattatattgtcattgtatgactatgcgccattgtgtaaaagaaatggtgtggtaggggagaaattaggttagtcatgtatagatccattgagcctattcatgggcaaaaatcacttaaaaagggatataaaatgtcccaggggtattgaattcttcaattgtgtttcatgtgggatccatttctttctgcttgtatagaatggaattttgtttttgtttttgattttatttttccatgattagaaccctcctattaatgtgtcttaataatgcaccgctaaaatattttaatacatcatgtttatttttaaagaactcctcaaaacaaatccactgtactcttgatactaccattatcattctacattctctgataagctcctgaattagtagtttacaatagcagcagtagttattttttttttttttttttgaaaaaaaagaagaagatggcagcagaagaaaaaattaagctatttgaagattaattcctggaagctttactgaattaataaaagaagagcaaggtgtcatacaaaatgagagaataatctcaatccttgcataacaaacaaaagcttcctcaaggcactaaaaggtctggcagtacccaaaatatcacccaacaaacccacagccaactcacccctcaaatggctaagcctacccttgtcccatgtgtctcacacctccctagcgtaagtaaatctggtgtaaggcgtaaaaggcctatcattaccctctcccaccaaaaaaaaaaactttctgctcaaggttgagggctagaaatatcaaacttctctcaagtagcttc

SEQ ID NO: 272142 - DNA, 675 bp, Cannabis indica
tgtcgatgtcatctccaatctgacttgaacaaaattaggcacattcattacaacaattttgtatagtgaacaatgtcaacagaatatacaacatttttttttcatgttagattttttattctctttttcttgaggaggtaattatggctcccagaatgaggatgttatatatgaaacatgattacataatattataaaaatgaattttccatttctttcaagattttgtttttaatttctgtccaattcacttctattgatcatctcaatgtgtttaaattattagcactcttaagatgctgcagtaatttagtaataatttctttctttacatgacaatccattcactttgggattgtgaataataattactaatcatatttatactgtgaaaagtaatttattgctataattataaagtttctagatctaccaaacagagggatacttactaaatcttatttgttgctgtgttaatattacaaagcaacatcacatggttggtatgtcagttggtgcttctaatcaacatataatccttaagtaggccatgaaagatgtggctatatgaaactgtaaaaactatatgagtggcttttatctataactgcatgatatttatggacctactgatttttcaaactaatcaacatttatggatataagtcagacatt

SEQ ID NO: 272143 - DNA, 516 bp, Cannabis indica
ggagaggcgggtcctttggtgtccgcccgggagaggggagtttgtgttgtcggtggatgcggcggtcaccccggggagggggtttgtgggccttgggggggttgtgcgcggtggtgatggggaggtgtgggcggcttcggctattggtgccgtgggggattttcaggtggtggtggctgagcttcttgctatccgagcgggcctttgttgggctatctcatgtgggttcaacttggtgcgtgtggaaacagattctttaattgctagttcttggattcagtgttcggataataatcttatgtttaagcctattgttgaggagattatttctcttttagcggctgctggtggtggctcttgttgtgccatttcgcgtaatgcgaatggtgtggcccacgcactggctaagtctgttactagtccttcaggggttcatttgtgggcagatgcttgtcctagatttattggtcctcttgtaacagctgatttgctttgatttaatgacatactttcttt

SEQ ID NO: 272144 - DNA, 704 bp, Cannabis indica
actacttgaaacgatacgtacacttgcgtgtgcaaaatatcgcaacatctatataaaatgtggctatgtgtaacagaattattagtttaacagtgtttcttgattccgtacgttaactttaatagaataccctattacttaatattacttttataatattattatatatatttaaaaataaaaattatatagatattttatataaaaaaaatttaattttaatttaaaatacttaaaatattgtatatacaaaaattttaattataaatattgcttatattatttattttcttttttttctctcttttcgatcaatatatgtagagtgaaacttaattattattatgattttattaatcgatacattttacatatagtttttaaagacacgtgatcttaaaattaatttatataaattattttctaatatcaaaatcaaaaatattttaagtcaaattatatttgtagtaaattaaatttgatatatcattaattattgataagagatatatatacattaatgttaccgcaatagttagaaaaataatctcaatgatatctatataattagtcaattaattaataaatataattaaatttaatgatatctatattttagtcattttacaatgggtatttatatttttagggtgcacttataattatatgtagggtgtaaatattattacaaaaaaaattatttt

SEQ ID NO: 272145 - DNA, 902 bp, Cannabis indica
gtttgggttcgggatcaagactgaggtgcagtgctaggtcccaaccctggttctgtgtccctagtttggttccatttttgggtttgagttcatgttcgggtttaggtctttgtctgagttttgatctgggtcagggtttcggtttaggtcctggtcctggtcctagtcctagtttggttctagttccatttgcgattctaattttgagtttgggtttgagttcgggtcggaattcgagtcctggtctgaattttgggttcgagcctggatatatgtctaggtccacatcaggattcgggtgtgggttcacgtcctgggtctttgtctaggttgggtcccagtcccaagttccaatcccaatctaagtctggcttcagttctgggtctatgtccttggttctaatcctggtctgggttggagtttgggtccgggtctgggtccagctttgggtctgattctaggtgtgggtttgagttcgggtccaagtctatgtcccggttagtgtccaggtatggaccccgatctgggtctaggttcgggtccaggtccaagttcgggtcccgagtgcgggtccaggttcggatcccgagtcaaggtttagtttgtgatccaggtccggctcccaattctagtctaggtctgatttggagtcttggacctagtccggttacggttctggatctgggtccaatttaaattatgattccaagtccaagtcctagttcctgtcccagtcaacttccagatttggttccaattttgagtcacagggtacaggttgcggtccacttttgggtttgggactgggttcaactccgggtggttgttcgggtgcttgtgagggttcgggtccagggttgtgtcccaaatcatgacaccgactacgggttttgtccaagcc

SEQ ID NO: 272146 - DNA, 478 bp, Cannabis indica
ccccccgcccccgccccgtttccaactcgggtatgaatctttaaacccatacccactcccgcccccgagagtctacccccgtatggggcgggtacccgcgggtataattgccatccctaatggggatatcatctataaaagtagatatatcttaaaaatatgaaaataaaagtaataattaaaacaaataaagtaaaatgggtatatagtataatttccccaagggccacgatgcaaaatgaccctaaatctaacaattaacttaacaaatgtcccttttttaaaaaaattaacaaaatgtccttttagttaaaaaaaaactgaaaggtagtatatatattttaaaataactcaaaggtagtatattagtttaagattgtagtatattattttaatgtgctatggtatataatgaacgaaagacggaaattaaaaaatacggaatattagtttaagtttgaggtatagttatatttca

SEQ ID NO: 272147 - DNA, 658 bp, Cannabis indica
gtcatgcgtgcaacacactgcttaaatgcaatttttgacatattaaacttttttaaattttttgaaattttgcaggatgtcttaaataattataatttacatgactataaaaaacatttgactaaaaaattatttcgaatactaaaatagataaagatgtatcggtgtatcccttttaagagagtgcattatagaatttttcaacatttttttatgttaaaaaagtaaaataaaatattaagagtgactttttccttacaattaatttaattggcaacagggaaaattagtaacttaagcgtgtttaaaagtattaattatgtaattacttatgctattttaaaatataaaatgtatttaaatatcagataataattataaatgaattcatattacaaatgatatattttttagtaattaatatttaaaatataaaattttaataattacacttacggctgtttatataaattggaaaatcgcagtttaatccaaaccacgacaattcgaaccactgtagattgtaattggggaaactgtttttgatggtttggtcaaatcggaccatttacggcgtaatggttcggttgcggttcgtaataaatagttaacggttaaatcggaccggaccgtttataaataaataattaatttatat

SEQ ID NO: 272148 - DNA, 1661 bp, Cannabis indica
ttgtttgtggatcgggagataaaacggctcagggcagcaaccttcccggttaagctctgcacatctttgtgtttcttaagggaaggcatgcttaggagagcttggattttttctgggtttggttctatcccccgttgactgacaatgaagcccagaaactttcccgatttgaccccaaaagtgcacttcttttggttaagtttcattccgtatctccggaccacttcgaagcattcttctaggtcatccgcatggcttgcgtatgcctttgacttgactaacatgtcgtccacgtatacctccatattttgtcctagaaggcctttaaacatccggttcaccattcgctgataagttgcaccagcgttctttagcccaaaaggcatgacaaggtagcagtatacccccttatcggtcctgaagctattgcactcttgatccgcgatgtgcatcttgatatggttgtagccggcgtatgcgtccatgaaggacaatagcttgaatccggaggtggcatccaccatttggtcgattcgtggcaaaggaaaaaaagtcttttgggcaagccttgtttagatcggtaaaatctatacaaacccgccatgtcccgtttggtttcggtaccaacaccagattggccagccattctggataatacacatctcggattatgccattggttagtaatttgtccacctctttctctagggcttccgtgtaatgaccgctatagaaatttggattagtaaaggcaattagcactagcttgatcacatgagtaagtttagaactttatttcttagcggggaatattttagaggaaataaattatcgggattgagcagggttatggaatttgaccattttacccctagcttttgtaaaatcatggttttgggttaaagggcaattaagtcattttcttaagtgtatgttgaggtggctatctagctttttgacacttagcaagctgatttattcagcaagggaaattggttttccctaacaaatatctcatttaggaaaattaaggaaaaaattaaaatttgagaaattgccatttctctctctctcttggtgttcggcccctctcaaccagaaggaaaacctagccaaactctttattctctatgttttcagccaaggatttaaggaagaacaatcaaggtaaaccctagctcctttctcttttaagttgttgaagttgtattttagtttcaagaggtgattttgagttttaggggctgttagggtttgatgcttgcatagttcgaattctagggcttgtatggattgattttagttcatagcagctggttttgagattgattgtgagttttatgcaagtttgagctttgagttcaaagctttgatctctaatggaaacttaggttttggtggtttgttctgtgaattactgcctggaatttattgtttatacccatattacgtaccctggaaagttttgtagtgtttagggttgttttgagtgcaaggggagaattttcggttttcccagcgcagaaccggaattccagttctgggggcctgtaccaaccggtcgaccggttggtgtcccagaactggacttccggttgggaccggtctgccggttggggggaatttttagaacccgagtttttccaattttgagatattta

SEQ ID NO: 272149 - DNA, 1140 bp, Cannabis indica
tcgagatcgtttgtatcttcgtaataagcataatagtcatatatcttcttcttaaacattacaaaaaatataattataatatatatgtggatgaataataatagcattaatatttttggtgtaattcttgggttattattgtgcatgaacaactattcatgtgtgaatgcagagtacactgtttacataaccaatttcttagatgtaaacacaacagtgagtgttcattgcaaatcagcagatgatgatcttgggactcatattgtgtcatatggtgataatttcaattggagtttcaacataaatttctttagaactactctattctattgtgatatgagtacaagtaaaggagatctcaaaggtcattttgttgtttttgatgcccaaaaatatgattgccatgatagcaaatgttattgggatgtttcaaacagtggattgtatctatttaattatcgtcttaataagtatgagttacaatattcatggccaaagtcaatagtagctagtactactattgatcccaaattttgatcaacactactcttgatcatatatgcatctctcttgcatatttctcttgtttttttttgttagatcaatgaaataataaaaagttccttattattattattatattactctttctttgttctttatgttttctttcttcttcttattattactaatgtcttgttgcattttacattagtcatcttttgatggatccgattgtcaatatacactttgttactacttatttcaagtagggtctcatatattgtgttaaattaatctaaatttgacatatcaactaattttttattcattaaaaaattaaacttttaactgaattaacaaaagccgttaacatatttaatataagatactaatttttaacagaagattttcattcagaatctaaaaggctttgagcaaattaataaaaattggcatttctaaatttttgttgtgtttttttaaaattaacacacataacatcaaaattttgatttttttggggataattatataagacaccgttttttattataaaaaaaaaattaaaactaatttacgtttacttaacgtaatagttttttttttgtttttttttatttttttatttttacttta

SEQ ID NO: 272150 - DNA, 3609 bp, Cannabis indica
agggaatggatgttatacaggtatagtcgtcaacgatgcacctttctcatcatggaaatgaactttgaaaaactacagtaatgttttccgttttctgacaatctgttgttgacatgacagggtatagagaaagtgaagacagacaaatcggacaaaccctaccaagatgtaaaaatccttaatgtgaccgtccccaagtcttaggttttgtgttctccctcgtattctttgtttggcttccgatccccgacaaacattggtgtcaggtaatatatttccaccgttttcatgttgctattaatcgtcatcaaatgtagaaggatcttttgcataccggttggagaaaaccggaagctaaatgactaatgtctaggcgaggaaaacatgcgagttatcggctcttgaaagtgagacaagagattttacatttagcaattacattttgagtcaactttcatgttttatttctaaacatttcgatttcgtgtaagttggcttttgctgtttctttagctctctgtaaaacatggttatgatgagtaaagtttgttttgtttagaaccattttcaaaggagaggacaataattaaacttttgagtagcagaacaatattttaccaatgaattgagttgctaagagaggttttgagacgatgagtctgtatgattagatttaaatatttgtaatcagctatcaatttttttattactttttatagattgttaacactgaagaaagaaaatgagaccaaaataatgaatgagaatgccattgggaaaaagtataattttaagaaaagtattgcttgctattaggcactatcggtatttataacatatttaaaattaaagtttgatatttaattaggtagtattagtaacatttttagtatttctcacataataatgttaataattaatgaattggataaataaatttttgacacgtgtatttaatggttatagactgatttgatgtgatttaaatgcaactactcctaatgaacagtaacattaactcatccattgtattgtactaatattggttttggtgatcaatggtagcctttattctccgtaagattaattgttattaggatcaatttctctcccaatgagaatgatttcgctaaagaaagaccgcgatatcaaagaagagacctcgcagtattatgaataacgatgtcaataaaagatgtgaacatataaatcaacaaaaataacatatctaacatttttaaagtgagcatcatatttatttgatatccgatgacctattattattgcaaaggtctcattatcaccatattttgtaatgtttacttattaccatataaataggtcaacccacctccaatcagagctaacactaattgaataataacggtagagtaagtaatataagttcaaattcttgttgaactattataatttcatctttattttttattatttacaatactcatttatattttataatatttgagtattggttattttaagcgagtatttacataatttagtattgtctaattttttttcgataatattaacggttaacttttacaatcatatctactttcactaaaagacatatagattttgttttgaagattctttattacttaattaaagaattggattctacatatttatgatatttgacttaaattagactatatcaattaaccaagatcccataaacttaaccaaatctactcaaataggtaatgtgattttttttttaaagaagagagaagatctagacaatgggaattgtttaaattacaaaagaaaatgtaaagtttgaatgtaataataaatatataaatgataataataaaaaattcctaattattattattgtttaaagtgaagtgaagccaattgtaggggcagtttggtcattttaaacataggtaaaacattggcaaaagcgcgggaaaattctcttactcttttctcagttctgagtcccccgcgacaccacacaacacaagctcagattctctctctctttctctcttcaggttcttctgatcgaagaagccatgaacggcggcggtggtggtcggaaatgggaccgcaatgactttcgcaactcaaagaagcagaagttcattcgttccgccgaggaagagctcgaggctaaattagggttcgatatcttctctgaaggtgacaagaggctcggatggttgcttacatttgcctcagtaagttttattcttacatttgtattgaattgtcaaattatgtgttggtgaattgaacttaaattgttttgtaatgtttcggttaggtttgaattattgattttgtgtttgttgcatttgattattctgctaaaagtgtgtggaaaagtttgagtttttaaattagattactaaatgaatgctgacaagtggagtgatcgattctcatttgtaaatttgcagtcatcttcggaagatcaagatacccgcaaagtatatagttgtgttgatttgtattttgtatcacaggtaaactcactgttctattctagaaaacttttttttttggaaatggttaactatttgaaggtctttctgttgatatttttttttttttttgataagaaatcataatgttgaaataagattacacacccaaatgtacccactttacaacagaacttccaactctctcctcaaatcagtaaaaagagagatacttgaaccttttaacacttttgagccagaatgcagccaataatttggtctttatccatacacaattaaagaactctctctatcatgaaacattctgtcattttttttcccattcatactacccgtataactgccaacacttccacagttttagagcaacttatgtctttctgttgattattattgttagcttaatgtttaaatgttctatgcttttattgcaggatggttctactttcaaatctaaatacaagttccgtccttatttctatgccggcactaaggtgtatatctttctatttatctatcctcttgtttagcatttttattttgtttgcagtgttagcatcaactgttgttgccatggtatggtgttaagtgttagcattttatccaataatggatatattatttggccgcataaaattatgtatgttaaaacttttctagcttttcgtaagtcttcattttgtatttcatgatgatgatgctattaagctctatcattgaccgtggtgattttgtgttaagtcctatgtgtgttatgtatgtaggaaaaaatggaaatggacgttgaagcatatttgagacggcgctatgaaagtcaaattgctgatattgaaatcgtggataaggaagatcttgatcttgtaagcaactcctcagtggctttaacttttttcttttttgaggaacatattatatattatcggaaataggtagaatcattacagcagatgataggaaatcatctttggttatataaagaagaactaataaactaggtttacatccaatgattccagttaccgagtaattagtcagcgctttaaaatttgaactggtactcaaccattttgtcaatgatattgcttataatataagtgaattctgtaagtataagttccaaaaaaaa

SEQ ID NO: 272151 - DNA, 2448 bp, Cannabis indica
gagaccttgcggcttggggaaacagaaggagtgaggtggtttgtgatgggagacgcctccctctctctctctctctttcttctccaccattttagcactgaccaagagaagctcattatttcatacaccaacgatggtctaaatagaccacaaattcgagatcctcgcaaacgtaaacatgaagatcgaccgctctctttttctccctgtcgatccatggtgtttccctctctctctctctcattttgtgttgatttattaatttttgtttgtgatatgtttagattttgtttgtggttttaattttgtttgtgatttggtcaaatgaaagtaaaataaatattccttcttcattccttccttccttggctgactaacaccatacaccaccatctaataccaaactttcatttcaacatcgtatcatctttatcaattaaccctcaccctttctcttcttttgtttggtggaagctcatagtcccatcaccatttaattttattttcaaaatttcatcactttgagcttaggaattataagaggatttcaatttggataggcaagggcttgaataaggagataaaggtaagcttatatttgatttctttgttaagtatagaagtcttgaagtatatagttgggttttatgtgggtttggtttggatcgtttcaggaccaccttgtgctttattttttttatttagggtattgtcacacgtgtaatcgataggaaaacttctagttatgaactaaggacctagaacgagtcagttcaagtgtttagtcgatcttttcgttattgtgacacaaggcccaggatcgttgatcgttctccgtacaggttggccaacacacctaaactgaaacttgaggtaagaaaagtacatttgtaccacatggctttttaagatacatatattattgtgatgactgatgactcgattgtgatcgaggtaatggaactatgattactgttaaagtggattactgtcatggcatcaattgaaactgtggttagatttcttacttgtcgattatcttattagacaatggcagagatatatggatgccaagttagggcatcgacttgccttattaggcaatgtgatatatggatgccagttagggcactgacttgccttataaagcaatgtgatatatggatgttaggttaaggcatcgacttgtcttattaggcaatgcgatatatggatgtcagactagggtaccaatattgtcttattaggcaatgaaacataaggatgttgaattagggcattagggttttcgtattaggcaacaacaaaggtggttactttatgaagtaacaaatatggcttgttttattatacaactatttgaatattgttgtttaattatattatgatcctgatctaaatgtttgattactatatgtgctttcattgtttacttttcttgctgagtctttgtgactcacgggtgctctgtgggggcaaggagaaattagggcagccatgagacgacagtcttctctgacgaatgtgcatatcgacttatccggcttgtatggtcgagttgtcagtagtttttttgagttgcatttgatgtgtattttaacttactgttgtatatagtttttttgtaaaacttttgtaacaggggatctccggaacaaattgttagcatcgttatcttgttcattactagggttttactttagtgaagtttttaatatcatcacagattttattaaataattaatctactattactaaactatcttccaaaagtacacacatggcatttcaaaaattaaggcgtgacaatataactgtgggaatattattgttctatacatattaacaagtggtcctatttcataaagatttgaggactggtaacaacaattctgggttttagatgaagctatggcaactaaaaattcaacctaaagtgaaaaatcttctttggtcagcgattttaggttgttttccaagtggtctgatgtttcgcacaaatcatatagacgtttcttcagcctgcccagtatgtaaatctgattcataatcgattatgcatgttcttgttacatactcgtttgcctttgctgaaataaggtaaattcaacagttgccttgttcagttctgcagcttggagcttggctggatagtattttttgcagcttttataaagacgtagtttgtgctactgttgtactttgttgggctcttaaaaagtcaagaaacaaacaccattagaaacttatgttgtggctacaacttcctcaacattagagagctcagtgtttttccatccttgtcatctttaaactttgtttctaaagatgatagagctgagatatagactaaacatgttcttaacacaattaaagttaaagttgatgtctgtctaaaaaaaagttaatgttgatgcttgttaggttataattaacctatatttcggg

SEQ ID NO: 272152 - DNA, 804 bp, Cannabis indica
attcaaattaataagttaggggcgatagttactagttgagaaatgttaaagggcaccagtggtgcctagtaccctcctatatgtcaatatcgttattgctctaattaagtatcgggtcccatataatttaatataatagtttttagggagtatcgctagctaatcgcaacgcgacatgttgagaaggtgctaagcgccactggtacttaataatgctcttattacttatacacgttatctatatataacttaccaaaaatttttttaaaaaaaaataaataaataataataccaaattaataatgtgatgatgaactcccacaaaattatagatatattagaccatatatatacaataaaaatgtaagaattatattatatttcacacagaaaataattttataattagtggtgttgagctagtcacattttttagtgggggtaattttttttctaataagagtattaatgaaaaatataatatgtttaatatgtgaggctaaaaataataataaaattatgttagatagtaataaagaatataaaaattatgagaatacaaatgaaaatatataaggataataaagaaatattaattttatgagggcaaaaatatttttttttaaaaaaatttaaatacgaaatgtatttctattaatttttaatatcgtgctttaattaattattacaaaatttaatgtaaaatttaaaattaaattaatacttttactaaatatatatatataaatcatcatttaaaacataaaaaataatgtaaaaaattataatttaatcctatataga

SEQ ID NO: 272153 - DNA, 2860 bp, Cannabis indica
tacggaattctacatagaaattcatattgcaattagtgctgcaacctaaattgaaactaaaaaattgtatagaaactcataaccaaaacccaaatcgtaaatttagaaaaaaaaaattaaaaaaacaatatgggataattcccttattattattattatttaaatattgttatgaatgtcaactaactgaatttgtttagttaattactatttttattgctaaatacaatccaacattaagttcaaatgatatattttttgaaaaaatgatgggttatcatgtttctctcgttctataaattgttttcacacattttcttatagagcttcatgtctatataaatatccatatataggcacaaaaaattggagaacgagggagtaaattcattgaagaagagttgaaaatggagtatgtgtatgattttatgcttaatattctaactgaatatgctaagctcttaacatataagcccactatacctccacgagctactgaactttgtagcgaggcaatggcttgcgaagcaaatggattagcacaagaatttatgatggaatcaatggagaggagtcctacacatactatcccctgtaccatgccacctccttataatgtttcatctttagcttcttttcttgagaaaaagaatactttaattaaagaggtagagttatgggaaacttactctaggtagaattaataatattcagaattgaacaccatagagattttctttttatgaatcaggtaagttgtattgtctcaatcaaatatttacaacttcataacagcacctctttggttttgaaaaagctatttcatacaatatctcctttcacatgacatttttctctattttttacaattctataatccaatccatatctatattattgatttttttttttggcattctaatatgtattctattttctaacctcagttttatcagtttcaaagattactcacggtacctaaattttttgggactgaaaagttaaaaatgcagaaaaatgattttggtaatgtttagctcaattcaatcgtgagctagagtattgtatttatagtaaaaggaggcattacacatacataagaaaagatagagcgaacggctctattacagccatccaataaacaaatcccgagagaatattcttatcctaacaacctttacaatgattgcacacaatacagtttcataatcgaattgtcagggaatcaaatctttctatgcttcattgttgctgcagtgtattgcagtgcaatgcaccttcagggatgacacctcatcaccattccaagtttgcttatttctcaatatctcctctcaaacggaagggtgatgttctcactccaagtttgtcaacaaggaatgtgaacctggaatgtgacagtgccttggttaaacaatctgcaacccgatcatgcgaggggatataccttactttgagttatttctgcaaaaccttgtctctgacatagtgaatgtcaatttcaatgtgtttggtccttgcattaaaaataggattagaagccaaggcacatgcactcatattgtcataccatgtaacagatgtcacaataagagaaaatctaatttcttttagcaaggattctatccaggaaatatcagcagcaacatgagctaatgctctgtattatgactctgtaattgatcttgagacaacatgttgtttcttagaggtcctagatctttcagtgtgaactctttgttcaatgttgagatgaattcttctattttgtttgagttattgctagtgacaattatgtcatcaacataaatcaacacaaagatgacatatgtgtgcatgttgcaaaagaacagagaggtatcagaccttgagttcttgaaaccccatctctgtagtgaatgtttaagtttctgaaaccaggctcgaggctgttttaacccatacagagatttgtttagctagccaacatagtgctcttttcctttttcttcaaagccttatggttgtaccataaaaacatcttcttctaataccccatttaggaaggcattgttcacattgagttgccttatttcccaacctttggacacagctataatgagtatgattcttactattgcagccttgatgactggactgaatgtctctccatagtcaattataggtctctaatgaaagcctttggccacaagcctggccttgaatctttgatggctgccatctgcatttttcttgtgtctgaaaaacccatttattgcctatcaagttttaatcaattgatggagggactgtgttctaggttttattctttgttagagccaccatttcagtgcccgttgcactgaccaccttggatgtttgagagcagcctcaaccactactacaaaaatcagaaatcgcgactgttctaaaaacattttttttaaggggactgtcgctaaaaaaattaagtaactatttaaaatcgtcagaaaaaattagtatcccgacaatttataacaataattacaggaataggcaacgattttaattggaattcgtcaatttattaggaacttatatctaacggtttaaaatcgtcgcctatagtataggtgactattttaaattgtcgggtataaggccccaataaaaaattatttcctacttctcgccacattcccacgtgcccacctacttcttttctatttcctacatgcccacctatttcttctaacctatttcttctccatttcccacaccctaaaacgaaaatcttaactctccaaaaccccacccacgactccgcaccatcgccctcctctttcgccgtctccctccctctctcgatctccttttcttctcgtctctcttgtccatc

SEQ ID NO: 272154 - DNA, 2392 bp, Cannabis indica
cagaaatcgagagaaacatggctaaaattgggagatcggaactccaagtttttccatgcgtccacgattataaggagacaaagaaaaaaaattgtggccatcaaagaaaacaatggtgattgggtaggacatgaaaagaggattggccaagtctttaatgagtttttcattaatctttttgattctagcaacccgatcattggggaggattttaattattttcaacccaatgataactagtatggataatgaaatgattaagaaagttcccctgctagatgagataacttctactgtcgcatccatgcaacccttgaaggctctgggccctgacggaatgccaggatgattttatagaaaatactggaacgttgttggtgatgtggtaacttccatggtgcaaactttcctcatggatggctgcttggatagacaaattaactatacttatattttttttgattcctaaagaagagaatgcgtgcacggtggataagtttaggcctattagtctttgcaactttgcttacaagatcatatcaaaaataattgccactagactcagaggtgttattgagaagctggtttctcccttacaatccgctttcatcctcagaagatggattgcggagtcatctatcttaactcaagagttggaacacacgattaagtcgaagaaaggcaaagggggtcttatggctattaaacttgatatgcacaaggactttgatagaatagaatggagcttccttgagaaagtccttgagtgcaatggtttcgacaaccaagctagggggttgatcatgaaatgtgtctccacggtctcttattcagttaacctgaatggggtccctcgaaagaagatcttcccgaagcgaggcctccgccaaggagaccctctttccccattcctcttccttttgtgtcacgaggttttttctaagctccttcttcggcagcaaggaatggggaagcttcacggtgttgcaatttcaaggtcctccccagctatcagccatctcatgtttgctgatgatacaatcatttttgcccgcgccaacaagaataatgtgatgcaattttggaaagtatcaatacttatgaagcgtcgtcaggtcagaaatgtagtctcactaaatctagtgtgcttttttcgaagaacactatgccgtctgtcagacaagacatcattaggatgctgaaagtgaaagaatgtgtgggtaatgaaaagcatctcgggaacccttttgtctttaaaagaaggaagagagaggaattctagttcctgggagaaaaggttctgcagagaattaaaggatagaaatccaaactgctttcttttgctggccatactaccttggtaaaagccgtcgcctcaagcattcctatctacaccatgtctacttgtagacttccagttgcgacttgcagggaaatggacagcctaatcagaaagttttggtggacggggggtaatgataaggattgtttcatggctttgacaagttgggataaaatttgtcggtcgcttgctaaaggagggttgggcttcaggagaatggaagacaccaacaaagccctcttggcgaaattggcctggcaatgcgcatctagtcataacaccccctaagttaagtgttttaatgctaaatactgtcgtcggaagtctttttggaatactgagatgaaagggaatgactcttgcatttggaaggggattctccattctagaagcatcttacgtaatggtagtctatccctcgctaggagaggcgactctattgacatttgggaacaaccttggatcccatggttggagtatgaggagttcatggctctcatgagaaatgttcgaacacaatatccacttctaaaaacagttgctgactaatccaactcgaatggggggggggggtggaatagtactcttgttttgtaagtgtttggtaatgatatgggcaataaaatctacaacattctgagattacccactaacagtccagactctcttgtatggaagcccacaaaggatggaagtttctctgttaaagaagcttacaaggccatcacttctgtccacggccataacactgatcagaggttatggaggttaatttggagcaaagacatccacttcagacactctatcatgatctggagggccttgatggggtgtctccctacaaaggacaaattgcctttcgtgaatgataaaatgtatcctttgtgtgattcggcttctgaggaggtcatgcatttattttgggattgtccgcttgctcgtgccttatggtttaggggtcctttcccattgaaccttggcattagaactgaatcttctttggcagatagagtgggtgatgctgcttaatgcatccctagggagctcact

SEQ ID NO: 272155 - DNA, 2028 bp, Cannabis indica
tgatagcaattagttataaaaaatataatatataccggtaaagaaaaaaaatgaataacttactggttagagatggacgtttgcacaaggaggaactttgtaactggggttgagatgaatgactaaatgaaacctgagaacttctaaggttaaagattaaatgtgaagaaatttgcagaaaataagtcaacgacaaagagggtattcaagattttgagaaattagaaaaaaggtttttcgcagaaaagttcgaaggttttgaaggcagaaatagagaaattgtgattttctctcaagttttatacttttaagttgatcaccgttagatcaaaaaagtaaaaatctaacggttaggaacaagagagaattggaaaagatggacaattaatgctaatgatgtgtctcgaaatcatgaatcgctaaaattcaaagcatgcaattttttaaattgggttaagacaaaagtacccttttaaatgatttaaaaagctctctttattgataaagaactttttaaggagaaattgctcctaaaatttagctacactttagagggtgacacgtgtcaattttagagggtgacacgtgtcaattagcggaatatgaaccacttggtataataacgttatatcattttaatgcaaagaggaatgactcttcaaatatagaattaatagagtatattcataactcactgattgtatagttttaagacattaccctagaaattactcactgactgtatagtttttctttctctctggttaaaaatttcgaaattactaaaaccaagcgaagagaacaatgatgcaattagttataaaaaaaatatataccagggaagaaaagaatgaacaacttactcgttagagatgaacgtttgcacaaggaagaacattgtaaccgaggatgaaaggaatgactaaatgaaccctgagaacttcttagattgaagacgaaatctgaagaaattcaccatgaagtaagtcaatgacaaagagggcatgcaagattttgagaaatcagaaaaaaaaagggtttattgcagaaaagctcaaagattttgagggtagaaatggtgatttactctcaagttttatactttaaggatgatcactgttagattaaaaaagtaaagatccaacggctaagaacaagagagaattggaaaagatgggcaattaatgctaatgatgtgcctcgaaatcatgaaccgccaaaattcaaaagcatgcaagttttaaaattgagttaagacaaatatacccttgtaatatttaaaaatttcattttatttaaaaaaaatttttaaggggcaattgttatacccaaaatttggctacactttagagggtgacacatgtcaattagtggaatatgaaccacttggtataataacgttatatcatttaatgcaaaaaggaataactcattaaatatagaattagtaaggtatatttataactcgctgactgtatagtcttaagcgagacaagaatataaaactattgatacatgtattgacgagacaccaggctgcctcagaatacacaaatccaaagacaagattcatttattttaaagaaataagtgaagttactcaaagcaaccgcagacaatatgtagtgaggcatccacctcgctattcataagaaagattaatgaggcaaatcagttgttaaacacttagcgtattttccacattacaataactaagtacaacaacttggaaatatgcaaaagacatgattgtccaatctgcgaggccttttggtcaaagatcagttcttaagtttgctcagtacactagtgctcatgccattgctggaaggtatataattgtccaattcagtattgatcatctacaagctaagcaaggtgctattatccaaatcaacatctaccatctttgaagataagaacaataaacagttatgcgattatcaattgtcatccacacgtttttaaatgaaacgtgatcaattctcacgtttcatgaaacggttatgtattttgaatttaaatgta

SEQ ID NO: 272156 - DNA, 736 bp, Cannabis indica
tcaggagcacccggggatttggaatctctgtctttgcgggcaacaggtaagacagtagttgcacgtagagatatgcacggtggtgcttatattgaatattatattggtgataaattagaaaccgagattagggttattaccctaaagtgagcggtttaatggcctagggttattacctagtaattattaatgtgtaaatgctatgccatgctaaatatattgtaataaagaattatgcgcacaaggcataattaagttagactcggtaaattagtaccttgagtttgatagtaatgcggtctagggttattaccctagaatttatgtgaaggtaagaaagcgatgatgtacaataatattgctaatcaagtgaaagcatgaattagggttattaatctctataagtgttattttgagcatgcaataatatgttatatgagagactatttggtatgcaagttagggttattaccctaagattttatatgttatagtgtatatggaatgtatgtatatatatcaagagttatgtgtataagacataacttggttagacctggtatatattatcaggataaaccactgaaagaacgtaatgtatggattacgtaaatatatatgaatagggttatgcgagcaaggcataaccaggttagactcggtaattataaccgagataaaccttactaaggccttattgtaaatagacgtgtgagcgtaacacgtaggtctatgc

SEQ ID NO: 272157 - DNA, 1816 bp, Cannabis indica
tattttttttgtattatttatttatgtcatataaaaacaaactctactaaattttttcatatttatatttatgaaagaactcttaatataaatgtgtgaggtaaataaaaaaagtagagttttgatgatgtattttaaagaaaagagtagagaagttgttgggagtggtcaaagtgatcttttcatatccaaagtacaacggaatactataattaacctattaatggggatttcactgaaacattttaagcaactgaacactgagttttcacaaccaaaattgtttcccacaaaaagtttctacctcactgtaactacgtacaaacatcacaattatcaaaatgcttgactagcctagcctagccattcacacgcgtttcggaggcacatactgaactcgctcgtcttcgcataagttctgcataaagtcagcacaccacaagtcattaaactaagaaaaatatgccagtaaaaataaaaattaatacctatcatattgctaattttggcaaaagcataatgcagctgagctgttactaaactcatgaaaaccattttcaaattgtatctactttattgatcaatgtaaaaggagataaacaatggaattgaaaaataggacaagatttgcagaaacaatcaatggcagagccgaatgaggatcaagcgtgtcagtggctccaactcaaacttttatgtgttaatttgcatttagattttgctcccataaacattaaagatttctaccactgctccaaaatacacgatttatacagttgtcatgtccccgtgaaaattttaaatttaaaattaggccttacaacccaaatcagattcagaggtaaatgttttattcaattttatcccgacccaaaagaaattaaggacatgtattaacaaaagtttactcctagacatactgtcttaagactaagaacaaatggaatctatttgcgtgtgcttaatatttagccttaccccacaggatgtaagtactggctctgctattggaaccaatgaacaagcgtatcaacctaactttagtttaagttaataattttttataatgactacagtcatgaatagaaagaggaatgacaggtttaagagtttgcagcacacaggtggtaaaagatatctcagaagcgattcttaacccatagagaaagggcagcatgctaacacaattggtaaagattctaatgtcacatttgcacccaagaagggaatacatttagaccctttccaatgccaagtataagcaatcaagctattcaaataccgaggcatcaggagcccataaaaatttagggataaatagttagagaaaatcataaatttgtgcaataaagtaaccactcagcataagtcaagagtcaagactagccacgttcaatttttttatacaataattatcacttgaaattactagtctataacaaactagattataataaacaaactagttatctcacctgcaagtcctcaggtaatgcctctgagacggcaagagtgtaacagccaggggcaaatttgcctgccagaaccccggaaaatgttttattacagaaatcaactattctaacagaacaaaaatataaaaattaaagaatgcataattccaaagtaataagaacatttatacttaaccaggcattactacattcagtttttcaagaccaaggagaaagagaaattggttaacttccaaataaaaccaatgaaaaaaaggaatctgaataaataaaaggttaccgattctcaaccagcgagcagcccaacttctggtaggatccatcactgatattatgctatc

SEQ ID NO: 272158 - DNA, 592 bp, Cannabis indica
tttcctcctttttgtccgtagtgccccccttatagaatggcaacccggatcgatagtttggtcataccgagttgggcccacctttatactctaaggcctggatgtatttattttgatgggccttttaatgtgggctttttggtagtcctttattttgttgggccgtttatttccaagttcgattttttcccacaaacactactcctcccagttccaattatagttttataatctggaactgccctagataactgctttagcagttttattgtcagtttttatttattattattggtttctcatcatatattttttgtgtacagttccttaattttgaattttttcaatttcttaggaagtggcggctaccctcgatgtgatggtggtgtctcgagaaccgtttttcttataaatgccttattaattccctaacctccctctgtgttttggcggcacactctcgagtataagactcccaatttcgaaagttcatttcgtgtttttctctctgctgctcgtttcaacttctctgtgctagatcttggtgtcttcaggtatatatatattatgcttctctatttaacttaatttt

SEQ ID NO: 272159 - DNA, 971 bp, Cannabis indica
tttattgaacttaataatttattctatttattgatatttgtagtgtcaaagtgtacaacccacaccccaatcgtcatctagaatatacaattaggaatgaacttcaaagtgtgaagatgactcctggtaagagtatcactacacactttctcatgatgaacatgaaattccagaaagcagctatgttgggaattattttatctggaaagcaaagagttcattttgttctcaacagcttatcacttgagtttaaccaattcattgttaacaattggaactcgtctgacatagacaagctggacgctcagttgcgtgcttatgaacggacactgtcacttgcatggagatccttctccagtaatccagataagggcaaaaggaaagctaaagttattgagaataattcctctaacaatcctactagttcaggctcagtagaaaaggagagagaaagtgattccacttactcagattatctttcacaatagattaaaccaacaataagaacaatccaaaaacagttaagcagtcatcttaatggtaatgctttagtttttgaatcatgtgttttaaagaatgacaactccatctcgattgttgattctggatctactaaccatgtttgttgttcatttcaattacttgaaagctagagagttgaaacttaaagttggtaatggcgaaatggtatcggttagagctagaggaaaagccaaactgaagtttcaaaatagaattttggatttagacaatgtcttatttattcccaatttcagtagaaacttgatttctgtttcatgtttacagctgcaacaacacaaatttaatttttcaagttctggttctatcatttctcgaaatggcattcaaatttgtgttgcatctatggaacatgggctttatgatctaagaccagatgaaccatttgcgcttaataacgaactatttaaggtagctaaacctagaaacta

SEQ ID NO: 272160 - DNA, 1809 bp, Cannabis indica
attgagttactacgtatgtagtcatgcgcaaatcttccttctttcaatgagcctaaactagccattgcagacaacacactcaccattgtaatttcatttgcttggatcccactgtctatcatttcatgaaagagtcctagagccaaatcaggctgctcattctgtgtgtaaccagaaatcatggcactccacgagaaaacatctcttttgggcatctcatcgaataatcgccttgcctggtcaatcttcctattttttatgtaccctgcaacgagagcgttccaagacgggacatgatctgtgatgccaatttctaactgcaaacgtgcaaggcttgttctgccacaagctgaataaaagtttataatagttgcctgaataaagtcataacaatcaagaccttccttcacaatcatgccatgaaaaaccagaccttcataaactgctgtaaatcgcccgcaagctgaaactaagtcaacaatcataacatcatttgctcgtaatccagtacgcagcattgcacggcacatcattagagcttcactcaacctttccacttgcacaaaaccatcaatcatcgttccccaagacacaacatctttagcaggaactttctcaaacaattctctggctagatcaacaagtcctgcttttgaatacccatttagcattacattccaagaaactatattaggctcagacatttcatcaaacaaacttcttgcatccccaacactcgaacaagcacaataaaagttcaacaaatttgtcgaaacaaatacagacccaagtaggtgcagtttgattagcagtgcatggatcattcgacaatcccaaatcccacctatatgggagcatgctgagagaacactcaccatagtcacatcatttgggacaacaccagcggacttcatgtccttgaaaacttcaatagcttcagcccagcagtcatttcgagtaagacccatgatcatggttgtgtaggagatacaacccttgtgaggcataatatcaaaaacatggcgggcatcgtccaagtggccagatttaacatacccagaaatcattatattacaagagacagtatccaatgtaggagaagaatcaaacaaggaacgagcatccgcaatgaacccacatttggcatacatactgatcaaactattagtaataaaggagttgaaaccgagtccagacttaagaacacgagaatggatttgctgaccttggaagacggcggagatggaggagcaagccttgagggctgagaccaaagcgagctcgtaatcggtgtcgttgaagttgaaggtggaacggaagaaggtagggagatagtcctccgaaggagctatggcggttggggtagagaaccatctgaaagtgaaatggtgaagtaatggaaaagacttggacttgggacgtatagagaagaacatcggagaaaacaagagaaaggaataaggcttcaacctcaatttctccaacccatcactcccgaccctcccatggtcccatcccaactctttggaggttggaacgattttttttttctttttaattaaattatggctatatcatcgtttttcatttttcttttattaattaaaggcttcaaaatccaaaaaataaaataaaataaaataaaaagtaattggcacgtcacatgccttagtgtcgtgcactttggggactattattatccgagtgaaaatagacatgtcaaaaatatccatttagttagagcgagttagaactctaatccaatggatcacttctgttctgaaacattcagatacttattggatcttg

SEQ ID NO: 272161 - DNA, 717 bp, Cannabis indica
gaaaaaactttatactaattcaatatataatatgtagattatacagtaaaaaaaaatatatgcgtataacagtaaaaaaaaagttttataaaagaaagcagtactctgtggaaatatcccttataatatagacttaaatatatatataaaaaattatttataaatattaattactaaaaaagtctattaaatatattaattaattaattttttaagagtatataattaattataattattttaattttataaaaagaacatttacctattaataatttattattattggtaaaaaaaatataatcatttaatagtgatccatatatatatatatgattaatacaagagttctataaatataggcaactatttcatcctgaaaattttgctccccataaattgttgagatatcatcaagtctcaatagtgctaaaatgcttctctgaggatttggagatggaaaattacaagtgatgagttatcaactggaggaattaaattattgatatgattttactagagcaaaataaaacagtaatttcgtttgctagtgtaatttcaatggataattgaaggtaataaaacaatttcatcatggattgataaattatttatggttataaaacaaatactcggtaatttattaaacacgaattcatgctctgctggttaaagctggaaaagggaaaaaatagtgaagctggtttccttataaat

SEQ ID NO: 272162 - DNA, 505 bp, Cannabis indica
cattgatgttttcttgcttagtacctccttaataagaaatgacttgaaacttttgtgtctacatgatttaatagattgatctagctttacaatgcagaattggttattggaatttgttgtaattccagcagaaataactttgaggattcaatcataaaacctgcaataaactcacaatttggacaataataatgaacataaaccaattaatcaacccaatgaatcaaactagaaatcaatcaaagaacaacacaagattttatcctggttccggtcctagagatcaacatgatccctggccatactccagctgaaaaacatcactaattcttcattaatatgtgaataagagagcatcaatacaattacaagaaccagagcaatcacaactctattggtactcgacacacaccagagaaaacagtcacagttttttctctatcaacccgagtacaccccttgttcttgaccctctaactaattaactaacataacagaaagttag

SEQ ID NO: 272163 - DNA, 642 bp, Cannabis indica
gttctagcccaccttctactaggaaggacattctcccccaaatcttgtacccagccatataatgatggctcgtacaaagaaaacaacgtgtttggttgacacatctaatcctgaagtggctcagcacgccactttgccaagcgccgaacaggatccagccgtccaggaggagggggatcatgaaggggacgctgaggtccaggagattgaagagcaggacaacgtacgtcctagaagttcctccgacgcagacgaagagtaattgaacccccaaactatggggaggacaatgaggttggggagctagtcgatgctgacgagacgtcttgcttgagggcgtggactacatcagtgaggagcttactcctgcggttcctcaaagaaggcaaggtgccttgggcgccaggtgggtaagccctctgtctagggttactgagccgcgcctttgtactctcgaccagggtggctacattcccgcccacaataatcgagccacaaaccctgaaaaggagatgtgcgcttggtttggtgctcatgcccagcaaggggcattgatgcctttgcatgaatactttagaaatgtgtcggacttctttggtctgtgtaaggcccagttcaatcctaagggcattaagtatctgt

SEQ ID NO: 272164 - DNA, 516 bp, Cannabis indica
ttcatccatgttagacttttttgggtaaaattgtataaaagtccttaaagccaacaatctcaataattcaggaaccatttttaaggaccttaaaagttcaggggcataatttggtacacgtcaaagttcgggagacaaaaattctaattaccctaaattttaatggcttaaggatttgagtttttaggttgatcttaccttgaacttgagaagattatctctatatacaaggttcactatctactactacctatttaaaatgaagaataataatcagcaataccagactaccaaacatgcttattttccaaagagagagctaatttagcaaacgcatgttcattttccaaattgacaatgtattttgtttttgtttcttgcaattctaaaagaaaccatgttagttatattttcaaattattcgtatataagagaaaatgactttgcttactgtttatcttcattttatgtgatgcatgacaactgtggtttgatcttggtgtacttatattagat

SEQ ID NO: 272165 - DNA, 1115 bp, Cannabis indica
aacatagtaaatagttatctctttgctgaatttatctgaacctaccgtgttgataatttttgcttaagggacttcatactttatacagtcaaatttgttcatattattataaatcattgagattttctctctaataataatttttccttttctatcttttgatctatttctctctacggatacatctttatctgttcttctattttctccttaggtccataacaccctgggtttgttccttgctgttgatgtgtttcctatgctaattttctagtagaatttcataactatgcaactgtttttcagatgcctttcatatttctataatcagcttacattgtcttatttgtgtttcaatgtaggcttgtataggaaaatactttctatattgatgtttttgtacgttccttacataacatgataaaataaaaatgataacaggatgttagtctttgaggcatatcttctttgatgacatgattattttctaagacgcatcttctacatgcttttttatggatgctttaaatagaaaatggttgttcattttaaaaattgaattgtgttgcagaattatgaacgatgcaaatatggggcacagttatgagggtttgctgtggactctgaggtattgaatagtttgtttcttttcaaattctctccatctccaattttctcttgtgagctcatatgtttctatatttttgcatgtaaaggagtttgcaagaactctcttttgtattactgctaccatcagaggttgcaattttgtctagttcttcctcatcaaatgaggtacatatttggattttttaccttttggttgttgctgttaaacatgattgtcctaaaaaagttgaatttctagcagtcaactggattattatttttttttttaaaattattgtaaaaacaatattactttattattaaatggcgaaaataatattacagctaaaaaattgtaataaataagaccatgacaaactcaactaaaatttaagcatctgataactgggaacacaacaatgacaaatttcaaacagaaataagaagcaagacctctcaatctctcaagaaaatagaaataatcaaaggtttaaagttcattttac

SEQ ID NO: 272166 - DNA, 387 bp, Cannabis indica
agctattgataagatcaaggctcggatgcttgcttctcaaagcaggcagaaaagttatgctgatccgaagcgcaggatgttacatttcaggcaggggaacatgttttcctgcaggtttcaccaatgaagggtattagacgcttcgggaagaagggtaagttaagccctaggttcattgggccatttcagatacttgagaaggtcgggcaggtagcatatcggctagccttaccaccagcactatcggctgttcatgacgtatttcacatttctatgttaaggaaatacgtgtcagacccgactcatgtcttgagttatgaagcccttgaactgcaaccagacttatcctatgaagagcaacctgttcagatcctggataggaaagaa

SEQ ID NO: 272167 - DNA, 790 bp, Cannabis indica
taacggacaaattaagctgaaacattgagtattattcgtatgatgaaatttaaaaaataaataaaaaaattgttggcagtggtttgaagtcttggatggtttactgggtccatactggaaagcagctggattggccttcaactgtacttttctcctctttggatccgttatccagcttatagcttgtgcaaggtctctctctcttgctctctctgactttatttctgttaataaatttctattttacatgcataaaagggaaatgggtttggtttgattttgattgttccagtaatatatattacataaatgacaatttggacaagagaacgtggacgtacatattcggcgcttgctgtgcgactacagtgttcattccctcgttccacaactaccggatttggtcatttcttggtcttggaatgaccacttacacagcttggtatatggccattgcggctcttgttcatggccaggtaatctttcataatatactgacttaatcctaatcaacggctcctgatttttcatttcatctagttttaagtcacattgattttattttgatttaatttattgttactgtgaaattaaattttggcaggtggaaggtgtaaaacactctggccctactcaattggttttgtattttacaggcgccaccaatatactgtacactttcggcggacacgccgttactgtgtgagttacaatcaattttctaatttttttatatatattttactcattaaaaatggtcaagactcattatataacaaaaaaaaaaaaa

SEQ ID NO: 272168 - DNA, 667 bp, Cannabis indica
aacaaattacaaaaaagaaaaaaaaaaattgtacttataaaaaaatatttaattttatttttaattgtatgcagaaaagaaattatacacaaaagtaaaatatacatttgatctattaaattttgtaatataattattatatatattaaacttttaaattactattttctttatattaaaatcttatttgtatatataattttttaatttttttataaatatgtgtggattggattggatcggtcatttttacatgtcaatcaacatctaatccgcacaagtgcagattttgaattttccaatcttattcaatccacacaagtgcgaatatctacactttgcggattagattaattaaattgtatggatttgaatcggctattttataaacattcctagagttggtctaaagtacaacaaaaatttatatcagaaactaaagagaaactaaaaatttttgttaagtaaaattaacaatgaaaaacaaaaatcaaaatgaataccgagcccttaattttatcaataacgataaaacagcttaaatcttaagtggtgtatcaccgtacctttaacatttcttgttatctaacataaaaaaatttcaaagcttttttactattaaaattcttttgacaccagctaagcaactaaagttttattgttttat

SEQ ID NO: 272169 - DNA, 841 bp, Cannabis indica
tatccttattggaaggtcaggatgagagcattcatcaaatcacaagatgagaaggcatggagagctatacttacaagctagtcacaacctcttgaagatgatgaaaaaggtaatactaaggtcaaacctgaactcaattggactactgaagatgaaaaattgtctggttataataataaggctctacatgctatttttaatggtgtcggtgaaggttttattaaattaatctcttcttgtaaatctgcaaaggaagcgtgggaaatccttcacactcaatttgaaggtaccgctgatgtgaaaagatcacgctttaccatgctacaaactagatttgatgaattgagaatgtcagaaactaaaactttgtctgatttttatgaaagatcatctgatatttctaatgagttttttgccttgggagaaaaattagatgaatctgtcttggttcggaaaattgtttgtgtgcttcctgacaggttcgacacaaaattgcttgcaatggaagacgcaaaagactttggcaaaatgaaggttgaagaactcatgggctctttgagaacttttgagttaaatccacatatcaagaaaaaactaagcaaagtttcccgactaagaaaagcaaaggtattgctttcaatgcttcggaatatattgtttctgataatgaaaatgatcatgaaatggtcttgttagctaaaaacttccaaagatacatgaaatctattggtaataaaaataacttttcgaaaacctcaaaaggtaacactttaggtaacaatcccactaaacctttttcctctaacattaaaaaaggtattcaatgcagagaatgtgaagg

SEQ ID NO: 272170 - DNA, 1105 bp, Cannabis indica
aaatggcgagtttgtattgatttgaacgacctcaacaaagcataccccaaagactgttttccacttccaagaatcgatcagcttgtggatgcaacagaagggcacgaaatattgagctttatggacgcctattcggggtacaatcaaatcaaaatgcatcaacctgaccaagaacatacaagttttcgaacagatatgggcctgtaatgctataaagtcatgccatttggtcgaaaaaaatgttggagcaacataccaaagattggtaaacaaaatgtttaaagatcaaatcggacgaaatatggaagtgtacgtggatgacatgctcgtcaaatccaagaaggctagggggcacatagatgaccttgacgaatgcttcaaagtcctcaggaaatataacatgaaactcaatcccttaaagtgctcctttggagtcagctcgggtaagtttctaggctttattgtcaatgtccgaggaattgaagcaaatctagagaagattcaagccctcctggatatgaaatcgccaacaagaaccaaggaagttcaaagtttgattggtcggatcatcgcactcagcagatttgtttcaaaatcaacagataagtgtattccattctttaacatcctgcgaggaaataagcaatttgagtggacgaaggaatgtgaaaaagcttttcaagagctaaaaatgcaactcgcaaaacctcctatactttctaaacctttggacggagaagaacttgggatatatttagctgtcacagagcatgttgtacgtgccgtaatgatcagagaggaaaacaacattcaacattcggtctattacattagtaaaagactcattgaggccgaaagttgatacccattgatagagaaactcacttactgcctgattctagcaataagaaagttaatgccctattttcaagttcaccctattcaggtgtacactgaccaatcgttacgccaaatattgcaaaaaacggatgcctctagacggttactcaagtgagcagtagaattgggtcagtacaaaattactttccaaccccaaacaacaagttaaggtcaggccttaacagattttgtagtagaatgcaca

SEQ ID NO: 272171 - DNA, 676 bp, Cannabis indica
tttttgatagatacttgaggattgtaagagatgtcgaactgatttaatttcattacccatgtgagcagggccggccctgaaatgtagtgggctatagggtaaaaattattttttgggccctcatttagaaaaaaatggtatttttcaaaatcagcaaaaaaattgtgtaattttaaaagggcaaaattttttttttgggcccctggactaggtgggccctaggcacaggcctagcccgcctatgcccagggccggccctgcatgtgagtaatcttccatacaattttagctttcgaaggacttggtaaagcgggtgattagttaagactctgatagagtgagcctgtaagttcttggatgctatgagcagacaaaacgtgagtttcttcatccagagatatctaatctcagcatccaacaacttcttgctgatgtaatggtgttgtttctttattcttttttcctgaccagtgcaacagtgctcaaagattttactttgcaacggtgcaaatgtattttaggtcataactaatttaatatatgagatttgcgtattttaggtatatatttggctaaaaagatatttttaccaaacgactctataactataattttgtactggcataataatgtttcaatgtcgatagccacatgtttttaacttaagctatttaat

SEQ ID NO: 272172 - DNA, 932 bp, Cannabis indica
tactcttctcgtcctaatgctacgaaggcagagaatggcttaactgaacttacatgaacacattataaggaatttgttattttatttttatacagccttttagaccagaaatgaacataaatccttgctctttattgattttggctgttcaattaaacatacatgtcaattgctcagcgtattaattttctcctcatttttatttcacgttttataatctatgtttagcaggggaatcctcttgtaacttttagggcaccgcctgccttttctgccaatgctctcgaatgcaggttcatatatttagaaacgtacttttcttttatgcgcactagttatagtgtcataattctgactctgttcatcattattgtgggcaccaccagatcatggcaagcaagtataactacagattccattaagcgcatttgctcaaatatgtttgtaggggctcatgctgataggatacttactgcaggtattatttatttatgaagttacgaaagttgattatttctttgctcaaatgaattggtaactatttgcaggaagaacgaattagttatttgtttatattatattgttttgtcctcttcttccacgtctttccgttttttttcgcactttttattcagtccttttgttttctaaactaaaagttagttcaacaaaatattgaacaaatgtttatccaaagttgccaaactaagtacaaacgggaacctcgaatttgttcttctagtcaatagtttcacttcagtgaagccagataaaccaaatgtaggggaagtggttccagatgaccatttgaatgattatggagtaaacatagtcaatacaaagttacccaaaactgcaaatgtcaatggacaagaagggatggtgttatctcctacagcagaggcgttaaaatgtgatgagaaagttaccat

SEQ ID NO: 272173 - DNA, 3016 bp, Cannabis indica
ttttatagcctgtttccacgaattgcaccaaggatctgctatttccatagaaaatagttgtgatcattaagcatgatcaagatcgtatgattgaagtgaaccgtagtgtcttcttgatccatggtgcgatttctttgagttgaaatgggggctccatgatgaacaggttgagaattcgagtttttaggaccaaccgtggccatgttcgccattaatggcggccatggctctgataccatgtaagaggtgccaaccttagccattaaaatagaacagagaaaacaaagaaaagaaagagaaagaagaagaaaggacgaggagagaaaagaagcctctgatattattgaataagcatttgttataagatgatatttatacagtacacaacggtaacaaacgcctaaccaactaactaacaatataaccaactgtcgacagctagcaactaaccaaacctaacaactaacgaaaataacagaaggaataacaacctgtcctaatacacgtccatgtaactactatattaccaatgatatccataacataacaatttaactacctctaaacaattaaataataaaaaaatcattttctaattttataagtgcaacacttaaggtattaagccttaaaacccatagtaaattataagaagtccaaaaaagaaaatgacataattctcataacttagaaaaatagaattttatttaacgagttactattatattcttcgcaagcattaattccacatctaaataactagaataatttaatagacaataataactaaatatttttgttattacaatctatcctcctttaaaaagaaattcattcttgaaatttactaacctgagaataacttggggtactgattttgcatatccgtctctaactctcttgtcgcttctctattagaactatcactccatagaattttgacttaggctatagtcttatttcgtaagacttttgttcccttttctatcacgcgcacagggcgtgccatataactcatatcctactacaagttcaaattcttatatttaagcacatgtgtctattcaggtttaaacattcgtaacatgaaaatgtagaaaacattatgtgtttctactaatgttggcagtaaggccaaactataagctacctgaccaactttgtccaatatctcaaaagaacctataaataatttgcataacattccccttttcccgaaatgtataatcgccttcattggtgatatctttaaataagtctcctacaaaaaactcaacctcccctcttttcatatctacataactattatgtctactttgggcagtgaacatcctttggcgtatcttttcaactacttttgaagcttctcttctgtacctaaatactatctttctccaacttcatcccagtgaagtggtgatctacatttttgtccatagaacatctcatatggcaccattctgattatggcttgatagcgattatttcaagagaattccattagaggtaaatacttactccacgagccagtgaagtataacacacatgttcaaagcatatcctcgagtattgggatggtgcgctcaaattttccatctgtatggggatgaaatgttgtactaagttttaatcgcgtccttattgccttatgtagactctccctaaacttggaggtgaatactgaaactctaatagagactatcatctttggaactctatgcaacctcaatatctcttgtacgtacaagtcattgtactgctctgcattgtaagtagactttactagaacaagtgagatgcctttgtgaacatgtctataattacccaaacagaatcatgtttcttggttgttcggggtatccttgtcccaaagtccatggctatgtcatcccgcttcaattttaagatttctaagggttgaaacatccctgacggtctccaatgtttagccttaacttgttgacatgtgagacattaggctactaattcagctacatccttcttcattctttgcaaccagtacattgtttttaagtttttgtacattttggttgacctttgatgcatcgagtagggtgtattgtgtgcttctatcatgatctttcttttaagctctatgtcgttggctacacacactcttcccttataccacatcatgtcgtttgtacctttaaaagaaattctctccctccttctctggcaagtgtgcccttttcttctataagaactcaccaacaacttatgcatctttaagttcttgtagcagcgttgagacagtggttaggttagctagtctttgtgtaatgatttatataccactttcttaaagttctcgttacagtggcttttccatttgtactagtattacaaagctggcataactacgttggccttccacgagtcgtagtgggttttacaatcatagtccttaacaaactctagccattgtctctgcctcatgttgagttccttctgtgtaaagaagtacttcaagatcttgtggttggtataaatttcatatttctcctcataacgatattgcctccatatctttaacgcaaaaaccattgctaccaactccagatcatgtgttggatacctttgctcatattccttaagttgtcttaaggtgtacgctactactttctcattctacatcatcacacatcccagcccttattttgatgcatcacagtacaccacaaacttgtccttgttacttgaaacacataatacatggcctattattagttttgtccctaagtgtttggaagtgttcctcacacttatctaacaagaaaaacttttgtgtcttctgagaagagttttttagaggagttgctatcttggaaaatacttcgaaaaaatatctatagtaactagctagacccaaaaacgcttcttacttcacttataatcttaggcattggtcagctcttatccgctttaatctttgtaggatccacctcgactccatctttagaaactatatggcctaggaatgctaccttctcta

SEQ ID NO: 272174 - DNA, 678 bp, Cannabis indica
acaagaaaaatataacgactcccacaaatcttcatataaatatactggttaaacttgttctctataaaaaccaaacgatatcacaatcttatcaaacttcaagtaccattggcgagatgctgtttgagaccataaatggataatttcaatttgtaaactaaattttcgtttccattttccttaacgtcttcaggttgtgacatatagactttctctcccaatactatatttagaaaagcagttttaacatccattttatgcagctctaaatcaaaatgtacaactgaagccataataattctgaataaatctttagtggaaacaagcgagaaagttatggtataatcaataccatctccttaggtaaagcttttgccacaaaacgttctttatacctttcaatctgtcccttattatcttttttagttcttacaaatccacttgcaacctattagtttaaaactatctggtaaatagaattaactcccatacatcatttttctccattgactcaatctcatcatccatagcttttatccattttgaagaatgtgtaatattaagtactttactataagtgagaggatctacaaaatgaccaataccatattctcatttccatggtaaacaaaattatcatcacaccttgttgatgtcttttgtctctgagatcttctt

SEQ ID NO: 272175 - DNA, 1182 bp, Cannabis indica
aaaaatctaacaaggatgaaagttcaagggacacaatttagtacatgtcaaagttcgaggggcataatttagtagatataaagtttggggagcatgatttagtacataaataatcactaaaatagtaaaattgaatgaaattaaacaaaattctttaaatctaatcatctcaatagttcagggcatttttaacgaccctaaaaattcagggacatgatttggtacatgtcaaatttcagaggacaaaaatcctaattagccaaaataataattaataaattgagtaaatcttttaagtctaatataaatagccaagaagacatttttattttctgttaattatttgttggaagttttaagttcttagttcatcactacttttaaatggggttgtatttaattagttttgagttgaaagtagaatcatattgttgtgaagtgtcaccaaaagggttgtatacttgaataaagctttgttgcatataaccataaggtcagaatttgttgaaatcttttgcatttaaaaaagtagaacacaatcatgaccgactttaaattaattagaataattattgggtttggttcccttaataaatgaaattgaaaaaaaaaattaaataaagaattccacaatctttagaagagaattatattctaaaataaaacaataaaatacacaaatgtatcattcatcatcaaatactgtgatgcaagttaacacgtggtgtggtttctagccttgtaatgtcaatttcactcgaccaagtgatgcaagtttttcacagaaaaaaaaaaaaacaaatgcaagttttgatgaaattaaaaatgatttaacatattgcattgtgaataatataatatttcaacgtgtacaccacaataatagattataaagtctccctcgccacccccaaactaaacatgaagaaggtaaatacattgtgtgattagctagagagcaaaagtggaagaagaaaagaacagagaaagcaagaattgaatgaaagcattaactcaatagagttagcttagccctttatttatatgaacaaagattacacaccaagattcaaaaacaaaaaaaatttaaaaaaaaaaaaaaaaaacgattacaaaacaaaaaatagtaacagcttagtgcatgtttgacattataactaaaaacttgttttttgtttttag

SEQ ID NO: 272176 - DNA, 864 bp, Cannabis indica
tcttacttgttgtccagctatagatagagattctgaatccccaggtgctcctgatcaggtgccggtaatgctagtcacacaaatctgggatatttcacacttagggttaacccttgattccatactcataaaattcaatcatggcatttaaaattcagttaatcatacagagctcggaaagagctttccaacgatataaagaactcccaaattggagttcagaatcaaaagttatgcattttcgaaattcaactcgaatctgcccaaaaacacgagggcgggccgcggcatgcccaaaccatgccgtggcacttgggacaaaacccaggttccaccaaaaggggcgggccgcggcatgctccagagcatgccgcggcatctgggtgcagaacccagaaaccagccaagaacatcacgattttcaacaacgaaaacaaaacttttcatctccaaaactcaaccaaacactccaataaccaaaaattattgctagcaatcaacaaggaattaaaactcatgtttcaaacaccaatttcaagcaataaactcaagatttcagattgtacaaccactcaaaaatcatactcaaaatcacaacctcaagttcacaaacttgagcttaacttcaaacctatccaaaccaattcagccataactaatcacaaacaaccagaatttaaggtaaagaaaaaccctagaatcccaactatagctcaattaatcaccacatcaaagcttcaagcacaagcatactcaaattcatcaaagttagctacaacatcctcatacatgcataaacaagattatctaactaactcaagttcttcacaaagtaatttcagcaagcaaatcaatttaaaaaaa

SEQ ID NO: 272177 - DNA, 1009 bp, Cannabis indica
cacgctctaactcagcattacatcgtttacttcctccaatcgatgcctgagatgacaatttttcaattcaacgattggtatgtatttggttaggttgtaggcgccatcctcatcaacctagttaggaagtggtcaattgttgtttatccaaggtccctcaagccaagggccccaatattgggtcttcctggggcttgaagtctgttcatgcgatgactcaatagatccctgaggactcaatggttcttttctgggacgatgattgattccttcttgaggattattatctttggtgtcatccatcacttttatgtcaggaggctttttgtgagctttttaacagaggctctcaatgaaagaaccaaactgttaacgcagattttcgttaaccaaattcgagcctcaccatattgattttacaccgaaaaaattaaagctatcaaaataaagaatatgagcacagggtttttacgtggttttgtagttaaaattctgcatagtccacgagtcaatcttattcagatttctgaaaaaaaaattcagggactcttttgtataagattttgtcatcccctctcttgatcttgtttgccactatttataattacatagtgagcagttatttacaaaagttgacaataatcgttacagtaattattccctcaaatcatgggatttaattacaaatcaagctaggtaaatgaggattttataattcacacagctgtgagtatcccacttttattgggccaagatgaacgcgtaattaaagatatacggtaaaccttatcccatagggatatctcgctgacaatggatccaagttaactttgatggcgagcaattgcttgtcatctgatttcccgagtctaatattgtcttaactctgataactattttctctggtgtcaagatgatcaccctcgcatgcacaccatcttctagcgagataaatgcctcgctgtctgttatcttgacttaccaaactatctacacttagtttgtatat

SEQ ID NO: 272178 - DNA, 1222 bp, Cannabis indica
ggtagccatactggaaggtgtggctggatcatctcctttgctgggagagctaatgcttgttgagtattttggtttgacactgcttcacactcaaaaagaagcgagctacatctgagttaaacttggatatggaagtcttctttcgtttctcgatggtgaagtaagataactgactacaagactgcaacctaaacccaaatttgcctaacggttagctaaatgaatcacttccctcttcacatgatgaattttaactcatcatatatcgagaaatgttttctcagaataaagcacgccaaggttctttattcttaccatttgcccatctaatcatgttaagagagcccctttttgtttgatatggtgactattttatttcaacaaatataatttaaattatttattatatttaaaaacacaaatgcttattacttattaaaaaatgcttattactcaatattaatattaaataatattaaaataatctattgacggtgaaaactcgtcaaccaactggtggctggaaaattaacttatgcttcaagctcaaaaatgagagaaagaggaagatgaaatatgaactcaaattgctctcttggaactattgctctcaatatggctttacaagtataattttccaaccccctcacatctgagatgggggagggggtatttataggctttaatggcattgtgtacaaagtggtcccatgaggacaaaatgttgttttcctgctgcaggctgcaggtattgaaggtagtccagcacctcgcatccttgtctggtgtgaggtggtccctagttgcaggttgcaggagggtggttgtagtgtgtggcctttggatacactcgtgtggtccccagttgcatgcggggtggtccccgagtacatgcgtgtggtccttggttacatgcagggggtccccgagtataggctgtaggaaggtggttgcagcgtacccttggtcgggtcttcagccctcgtaggtctgttgtcgccgctacttgtacctccttgctctcagtctacagaaggcgtggttgtatgctcttcctttgcacgccttgtcctttgcttcctctcctaatgttattcttgtcatcatgcattcacctctctccttatcttcacacccccctaaaacacactcacacaatgcacacataactcgtgatcgagccccctatcccctcacaacatgccaagctcaccccttcccc

SEQ ID NO: 272179 - DNA, 1717 bp, Cannabis indica
tggtgtgatcaaattggtgtttgactcaaacaaaaggaaaaaaaattaacaaatatacgaatacatggagaaatgaacttttatacggtattaaataattaaattacataatatacggtgttttcatcttagacacttttgttattctctgcccaaagaatgacagagacgctaatgttcttgggcaaagctttttgaaacaaaaaattaacagcaacacaaagaaaaatcctaaaaaaaacatgcatattcgattagtcaggttacaaaaaaaaaaaaaacaatcaaaatatgtcaatcgatcaacaacaaaatctcatagaataaatctgcttaaaaacatgtatgatacatctgaaacacaaatttcgaaatgaactgagtaagatctatacaacataatttgaaattatcatttcaatgttgtagatcatacaataaagagttgaaaaattattaatctaagcttcctactaaattaaaatttatattcaaaatagatatgaaacatcagaagcacagaaatcgaaataaatgggctaagatctatactacttaacctataattgttgtttaaatattacaaatcatactagaatgacttgaaaaattattgatcagagctccctgtcaaattcaaaaacagttacaaggtattagattactacattatatataaattaatttgataattactaactggataatatgcagaggattgcttgctaatgattgaaaaatttgatttgaaaaaatgaaagaaacatatataataacgaatgtttattgttgattaattgtttaatttatgtaatttatttgtatttactcatgtataatatatataattgagttttatatatcttgaaacgttaatttgttttggtcatataaacatataaattgttgatttattgttaataatttagaagaaaattgatttccttaattacctgttagtaattataaattttgttttgataaataattaatattttttaaaaaaaataatgtttattgttgattgattggttaatttatgtaattgaattatttttatatatgaaaaaaaaacaatttaatttaagtttcataaaaaatgttgagttgatttgcaaaaaactagaatcaatatttattctagttcaaagtaatagatattgggatgagaacaatcagtacattggtttcgaagctactgggatatgcatccaagaaaactacaaatatacaaaattagtgtacaaactgtttagaaagcataactgtaacagaaacacaactaacctacaaatgcagtttcaggtacaatctagatatccaacattaaagatcacggatgatgaaagcctagagttttacttgcagttataatcaagagaacaagacatgacaaaatatcctttgtaacataaacatggtccccaaacacaaataccacttttacttattgacagaggggaagaagtccacatgcttgaaatatgatactcaattagggggaacacaacacatcaacaaaaagaaaacacaaatgaagataatgaatgcattgactttgttgactatgtcacaaatagttgctgcagaaatgatcaaaaaactaacaagacagacaactaatcaacaagaaaatcaacgatgaagaagcaattggtcatcacacataaacaacatccaaaaacttagaaaaaggagaagatgtacaaagataaag

SEQ ID NO: 272180 - DNA, 688 bp, Cannabis indica
ccttggttacctgatcctaatccgtgtgtgtcgagtactcatcctgctcttgtgggggccgtggttaatcaattgatgacagcatccaaggatcaatgggacgtggaaattcttgaggacctgtttgagcaatgtgatcgagatcttatcatgcatattcctctgaattcgggtgaagagaatgacatctggttttggcaacatgagaattcgggcttttattcagtcaagaactgctatcaatggttacaagtgtcgaaagggagatggtctgctgatatggaatcgaacctttggcgttctttatggaaaaccaaagttcctcctaaagttattcactttgtttggaaagcaatcactgggtgtctccccactcgtactcaactttataccaaacatgtgcctgtgcaacttgattgtccttgttgttcaagagaggaagaatcgattttccatgtcctggttacttgtaactttgctcaatcatgctggaacttgtcaagtgtgcctactggtgctattatggggactgaaattggtgaatggatagagcagattttagttaaatgtcagccggtggtgtttgaagaagctcttatggtggcatgggcaatttggaaagcaagaaacgaactgatatggaataaaaatgttactagagcggttgaggtaattaccactgcaacaa

SEQ ID NO: 272181 - DNA, 1534 bp, Cannabis indica
tattggcttcaggaaactcatgacttttcacattgtttccttcagagaaaagccatgccgcccctctctctcttttcctctctaaactttcgaaattcccttgagtgatagagtagtgcccacacacatcaagtggtatctcaatcatagtatgtaagaatatggaaaatcagcatcaaagaaggagaggaggagatccaaattcagatcttgataatgctctgctacagaagggaatcaagggctagagatctgaatggaaggagtcataatattccgctgcacccaatgtaaggttttcttaaactcttatgtgtttatttcattgttttagaattcatattaggatgttaatgaaacatacttggtagtaaatctagatcctggtaaaatatttccaacaggtcggacataggcgaaagaagttcgctatattttttaagtacgagtgcaaacgcaacaatgccccttgctgggcatgagcacccgaccaggcgcacatccccctttcagggtttctggctcggttattatgagcgggaatgtaacagtccaactcgcccaggtagccatcctggtcgacagcctgcaggcacgcctcagtaaccttggatacagggctcacccacctgccacccaaggtaccttgccttctatgaggaaccgcatcggtaagttcctcactgacgtagtctacgccctcaactaggacgtctccatcatcatcgactggctccctagcctcattgtatcccccatagtttgggggtgcaatctcttcctctgcctcagagggactgctaggacggacatcgtcctgctcttcaacttcttggacctcagcctccccttcacgatccccctcctggacggttggatcttgttcggcgctgagcaaagtggcgtgccgagccaatttagggtcagatgcatcagccatgcgcgttctctttttggttcgagccatcattctatggttgggcgaaagatttaagggtgaatgtctttcactggaagaaggtaggctagaacagagatgaggatggtcctcgtgcaagagttgaagcaagtcctggtcgattcgatgttcgctagttcatctacaaaagacaacagacaagatgagtgttcggtcggaatatcaaactttaaaataagcaaatatgccgaccaggagtactcaacagattaaagaataagaatgttcagcgaaaagtcaaaactcaggaagtttgaaattttcctcgagttcggcaaaaaaatttcatgaagcttagaataagcaagatgaaagataggcattatgcaattcagaaagcaaacattatggactgtgaaaatgcatgaatccatgacaaagaaaaattgcatggtttgtaaacttagggtttcctacatatcttctacagcaaagtcggaggtgcattcaaaaagtaaacataaaggaaatcaagaacttactcaagaataagatgtccggattcaggtaatgtcataccacacgagcagtgtcgatgaaggcacttcagcaagc

SEQ ID NO: 272182 - DNA, 1105 bp, Cannabis indica
atttttattaattttttttgaattaattgttttattttcagaacaatttggatttcaattattagttttggattttattccatattttttatattattgcagacaattcctttaatttttgtagaattttataataaagttttctcttttggaaatgaattgcatttatgaattgagcttcatttatttcatcttgtgtatgccaataccaattatatttatatgtttataatgtttgtatgtgtttgtgttttattattgatacaaattctatagtatatacaactatgcaaagacttaatactacatgaacacttagaattaagaattattaagaatttgtttaataaaaagatcttttgttgtgataggggtggaaaaagttaagaataatatgcagttcaacgatctttttatatctattgaactctgatattcataactccacacgatctctatatcactaagggatggaccatgatctctatatcccttagaggtggatcatgatctctatatacttgggggtggactatactattgaaatatgtagttcattttgaactctagactatactcaatacaccacagtactctatggcacacatattttaattaaacatggatgtaatataatgaattatcaaattatcagaatatattcttaattttaatttatgttccaattaatatttactgttgtaatagaagttgataccaataaaatttctttgacattgtatcacagtacctttttttgagtgggagaattttaaaattctaaacccattttcatttggataatacttgtgataggaactttagaacaaaactgataaagtaaatctaaccattcatatggatagaaataacttatcagaattctgagaataagatagtagaattcttgcatagtctattcgagtgacataggtaaaaattcctaatcctcatgaaacgttttatggtatctctaatgattacttaatcttaagcaagtattttacattaatgttaatactagattgttatgttgatgacttagtctagaaggaacttgcagtttcagactaagataatatgtcacaacaagatatccctcaaa

SEQ ID NO: 272183 - DNA, 589 bp, Cannabis indica
acgtgtcctttaaataggagtcttgtgttgagtttctaggtgagagaaatctcactataacaatgtttatattttgtaaaagtgaaattggggattaaccctatttgtgaaatctcgaattgtgtgacaaggattaccggcacctgatcgggagcacccaggggttttgaatctctattattgcgagaccacaggtaagacagtagtttgcacgcagagtatgcgcagtggcgcttatgttgaatatgatatatgtgagtaattgtaaatactagactcgtttaatagctagggttattactctagtgatatatgttgtgtaaatactatgccatgtcagatatatgtatatattgagattatgaattatgcgcttaaggcataattaaactagactcggtaagctagtaccttgagtttaattttaacgcagtctagggttattaccctagaatattatgaatccagtgaaagcatgagttagggttgacactcttagtaaatgttatctgagtatatagaaatgtatcatatgagtgattacatagtatgcaagttagggttattaccctaagattatatatgttgt

SEQ ID NO: 272184 - DNA, 1074 bp, Cannabis indica
ttctgatagtttttatgtgaatttttattatgatttaggttgctctattagtttctatgtgaattgatatatgaattttcataaaaataacaaaaaaaaaaaataaaggataattacaatataaataggaataattaagcctgaacattgtcaaaaatgatagtagggactaagtttgaattcatttcttccttatttctccccttaaattgaacatcctcaaaaaaagttgtagttcccgtctctaaaatatttttgactgtgggatcataaaatttatagccctagattgttctgaataaccaataaaatagctactaacggttttggagtcaaatttatttccatgtgacatataaggccttgcctcaattggacatatggaaatgctttagactaggctttccacctgtccaaagctcataaggtgtctttgcaactgctttagttgatactctattcagaatgtaagttactgtctttaatgcttctccccaaaggggctcatgtaagctagaatgagcgatcatactccttaccatatctttaagagtcctatttcgtctttcaacaatatcattcatgctaggtgattctcgcatggtgtactatggaacaatacaatattcctctagcaatttagcaaatagtccttaacgttgttcacccgagccatcatatctaccataatactagctaaccaccacgatcacatttaatctttttgttgagttgatcctcaacttcagcttcgcaaactttaaacacgtccacatactgagattttcatgaatgagatatagatatgcataatgtgagtaaattatctatgaatgatataaaatattattgaccattccaagatgtatagggaatggctcataaatatttgtatgaatcaattctaagacttttgaagctctattggcacctaatttcttatttttggtatgttttcccttgatgcaatctccgcagactttaaaatctatgaaatcaagagattctaaaatttcattagacagaagacgctcaactctacattttaagatatgacctaagcgtttatgcaat

SEQ ID NO: 272185 - DNA, 1218 bp, Cannabis indica
cctctaaatatatcctttttcctcagttacaactatatactgcttcttttattaaaataatatcaataatatatagaaatttgtgaaatatatgtatattattagataatcatggcagtactactgtatccagtaactatcattcttcatattgagcatgatattatttaatatcaaatattccaaaaatgaaagttaattactactgacactacttatttttccaatatcatattttatttttcatggaaaattatgacatgttatagattattggaataatacaataaaaaaaaaagatatatatcaatatatatagtatataatattaattaatgaaggaaagaaacacaatataatatattttgcacgcgctgtagtattgtacaaaaagatcgtatatatcttgccacaaagataatgatctacattttacacaataattaaaagaaagaaaatatgagtatttttattaagacaacttttttttttttttgtatatatatgaaaaaatttcttcaaaacgtttaaaattatttaaaatttttgcagtttgaagtgacgtgttttttagctttaactcgatcccttggaaatgattcatttatataaatatatattcgatcatattaataatggatacaacttttttttttcgataatgaataatttattaaaaataaattcagaacagtacattaattaggaacactttataaaaaataattaggaatattatacacaatcgtcaattaattaggaacacattataagaagagaaatgctaaagggcaccactggtgcctagcaccctcctacgtgtcaatatcgctattggtgcaattaagtatcgggtcccatatagtttaatataataatttttatagagtatcgctagccaattgcaagtcgacacatttagaaggtactagccaccactggtgcccaatagcaatgctattataagaattagatatatacgtactgcaagtagtcattaaatgaaaagatctattaattagacaaagtagcaatctacaacaacagcttcggcattaattgccacgtcatcactgatatatttatatataaagtattattattagacagtagtgcctagttgagatagtgcgttgcgattggttaataatactccctaaaaactattatattaaattatataggaccgatacttagttagaccaataacaatattga

SEQ ID NO: 272186 - DNA, 1191 bp, Cannabis indica
aattttcaaaccatattaatctggtcccaaaatctgtttcttataagttggattcccactcttaatttctaaactgtaataggtccccaatatcatttgtcttaacacacacaaaaaaaagggtaaattattaatttttagagcacttaatttatgcataaagatgacttaaggtaaaaatatatacactaatttgttacaccattttcagtgtaagtgtaaaatttatattaaatttgatataataactaaatttatactgtatttagctcactatttataagtatatttcaatacacattatataaaataaaataaaaaaatattattatattgataaaatattaaatacacaaaaataattaattttagtgagtttggaagttacggttacacatcatagtaattatattatattttaaaatataagacgtgtttagataagaggtgataattactcatgaaatcttaatgtcttgtttggcaaaattattaatttttacacgagaaaataacaatttttagtacttaatatttataatagaaagtttttagtaattacacccaggggcataagaattagagagtgtaattgagacctctcaaatattacttttaattatgcagttacaatgtaattacgtattcaaacaaatatataaaagtgtgtaattaccttcaattacatctaattttagttccctttaccttttcaaatgcattatattgtttataaataatggtaaataaaaaatttaaagttttgtcaaagtcaataaataataataataataattagtgacactatagtaaataaaaagtaacatttattgtaggccaaatttagcataatgctatatcttttgctaaatttgacacaactttttaccatgtgtcaaatttgacacattttttagaacaccattggagtaatatatatatatatagcaataaactacttttttcgtcattctattggataggtatagcaatatgatccgatttttctagtcagattggagctccgatctgacggggcagttctaatcctaacaaacagatctcttattagatctcggatcgaatcagatctgatttggtagaaactatctggatcgaatcatacctaggcgcagtatagcacagttgttgtaaagttcctttttggcaagttagttgacaaaataatat

SEQ ID NO: 272187 - DNA, 2935 bp, Cannabis indica
tatgagactttacatggtagaatatagtcactaatttacaagtatttcatgacaagatattgctatcataaggacggccataactttgaataacacagttcaaccaattgtaataaataaggtaaaccatttttctactaatacaaacaaaaccagctattttccaactcatattcacaactagatattttttttgtataaatcacaggtttagaattggctaaattttcttatttaagattatatatgcacacatgatttgatgagccattttcttctctttagttcattttggtgagtaaataggtgatgtcatcacttttcattgaccgaatgagatattctccaaaagaagactaacacaaagaaaagccaactttaagagctatttccaaaatcaccatcgatatttcctatttcctaatattacttcctttaacacattctattctaagaaaaagaaaaacataacatgattattttctctactctttgaaaaaatttcagtgaaagttgttgtcatggaaagtcaagatttttcagatcaaaacttggacaagacctctaacaccctcagcagtgtaagcagatcaatttttaagatgattgagttgtgatcatgagtttgttcaaacctctagttttgattatttttagattttgcttattacttggtgtgtataacagaaaactgatcaagaattgttgaaagatgtaaacttggataagcaaaaggatattgatgattggcttccaattacttcatcaagaaatgcaaaatggtggtatctgctttccacaatgtcactgccatggttggagctggtgttctaagtcttcctttcgccatgtcacaactcgggtggtaagctaataataaaataatggggaagacttatgattaagtgagctcagttcattaatttaaatacttaagtttgagatttccttaatctcaaggcaaaactcttacactaaacaccccaataagagaaatcgagtaaaaatagactataaaaagagaaaaattggtattgactgtgttgaattttcaggggacctggagtggtgattatgatactctcatgggttatcactctcttcaccttatggcaaatggttcaaatgcatgaaatggtgcctgggagaaggtttgatagataccatgagttgggtcagtatgcatttggtgagaagcttgggctatggattgtggtgcctcagcaactaatttgtgaagttggggtggacatagtttacatggtgacaggaggaaaatctctgcagaaagtttacctttcagtctgcgaacacaaaaaatgcactcatatcaatctcaccgagttcattatgatcttcgcctcttgtcacttctttcttgctcatcttcctaacttcaactccatctctggtgtctctctagccgccgcagtcatgtctttaaggtacgccacaacaagagaaatgctaaaaggcaccggtgcctaacacttttctatgtgtctttatagctattggtgcaaataaatatcgtgtctcatatagtttaatatagtttaatatatctaaaagtattaggcaccactagtgtctattaaaaataaaaatgctcccacaactaaaggatgtttataactttgcttcagttgatacttcgtactgttttccttagcttacggcacagttacaactattaatattgcataagttagagagtcaaccctaggtaaagataagctacatctacacttagggtggactcaatcgagcccaaaacaaaattcttttttaaaattacattattttttttttattaattttcaaaaatattatatattttaaattagcacctaatactaaattacaaattttatgaatttttatactttgaggtgcaaaaatatgaattttttcaaaaaaattatgagaaaaatgaaaaatatggagaaactaagggtaacgagatactcttagggtaaccagctactaaaagaaatgccattaaggtaatcagttacttaagctgttttctaatattttttaatttttccatataataacttttttaaaaaaatatatatattcttacatacttataccttaaaacttataaaaaaaatgaaaaaactctttctttcctaagattccaccaatctcagggccggcattaccaaactattgtttctttctttatgtatacagattctgctttttttaagagtgtttttgattgtatttgtagttactctacaattgcatggggggcttcagtgcataggggtgttcaaccagatgttacatacaacagcagagcatcaaacacaaaagatggagtgtttaacttcctgagcgcgttgggagatgtggctttcgcctatgcagggcacaatgtggtgttggagatccaggcaaccataccttcaacaccagagaagccatccaaaggtcctatgtggaatggagtcctcatagcctatttagtagtggcaatgtgctatttcccggtagcattcattggatactatgtgtttggtgacaaaatcgacgacaacattttgatcacattagaaaaacccaaatggctaatcataacggcaaacatgtttgttgttgtccatgttatcggaagctaccaggtaagttttaaggttatttattggatcacatacaatgtttgtttttagttctatccaaactaaattcaattatatattgaatgttagattttagacgctccatctaacattcgattggttacttttagctatatgcaatgccagtatttgatatgatagaaaccgtattggtgaagaaactgaaatttaggcctacttggtaccttcggttcatctctaggaatgtatacgttggtatgtacaaaattaagttatttttttgtttgttaaagtttttgtttaagacttacttgcatatt

SEQ ID NO: 272188 - DNA, 804 bp, Cannabis indica
cccctaacctaaactaggattcggacctgcacatggacacgaacgtagacccagaccccaataccgacccagacccaaactagaatcgaaacatgggacctggacccagactcagacctggacccagaccaggttccaaaacacccgtaccaagattcggactaagacttggaccccgaccccaatctggaccgagaataaaacccagacttgagacgagaaccgaacccaaaccatatccaactaagaccaggacctggactgagatcttgactaggattgggacatgagacttgggatccgaacatagatcgggacctagacctgacctaatccgaaaccctcaccgagacctgagaccagcgaccgagaccaggatctagaccctaataaggacccaaacatgaacccagacaaagactgggaccgagacctggacccgaacccagactacaaactggactaaaacatagactcgggactcgaacacaaccctagacatagaccaggataaaacctgaacccagacttgaaccaaaaaaaacggacctgaactcaggacccaaactcagacccagacctagaataagacccaaacatagacctggacctaaacctgaactcgaacacagaccgagattggaacccaggacttacacctagaattgtacccaaacacagatcgagttcaaaccttgggacttgaacatggacctggacccacaccaaggacccgaacccacactcggagcctgatccatacctagaccaaaatctggacccgaacccaaacttagaccaggg

SEQ ID NO: 272189 - DNA, 808 bp, Cannabis indica
ttataattaaaccattataataattttttttacaattataccaataaatcataactataaaattatataatacctattataaaaaaaattaatctgtaataacatacaattatgtttattaatatataaatatatgttcaaagctttttgagcaaatctgtaaatacaaattatttgaatgtaactgaaaatttgatatatattacacaagcataatattcaaaacagttcaaactatgaaatggatacaaaatgtagaaattaataaaacacattttgaacaataaaaaaattacacaaaaaacaaaatcaaatccttgcacagatctatggcgatgtcgaacgccaaaatccacatccgtcgaacacgaaagttgagagccatagggagctttaaatgttgtcaacaacggaggccaagatccctgcacataagagagagagacagagagagagagagtgagagaaacagagaaatgaaagaactaggaaaattgacctaggatttcgagattggggatctgagaacttcggtattggtttcttggtgaggagagatgactatgtctgaatacaaaatggatgtcgtcgaaggagggtggagcactggctcgcagcagtgatcgacgaagaagaacaacatcgacgagatcaacgaaaaagaagaggaggaggccttctagtcgtccgtcgccagagatggactgggcagatatcgaaagaagaagaagccagagagagagaagaagaacgacgagagagagagagagagagagagagagagagagagagagaggagagagagaga

SEQ ID NO: 272190 - DNA, 3357 bp, Cannabis indica
cgctgagtcatggactaaacccgcaaaaaacactatcaagattaatgtagatgcatcactctttaatagcgacaataagtatggtttcagaattgttgtccgaaaccatcttggtcaccttgttgcagcacgggccggttgccatggtggaagatatgtagctgaagtcattgaagccatggggattaaagaagctctcagttggtaaagaccaatggttggcaacatgttcagatcaagacgcacaatcttgtttcagtacaagctattcgaagcaaccaagcaatactttctgccttttaatcaaagactgctaatttttgttatctaccctcccaaatgttaatttatttttcattagacgatcaacaaaccgagtagcacattatgttgctagacattctcagtatcaatctgatcgtagtatttttgatatttctatttctggtgaactcttacatcttttgtattcagaatgctaatttattcaatgaagttgatatttcatcttaaaaaatatatatataaattttatataaaataaaaattattaaaataagaatttttggtgtaaataaaattatccttttcttttttcctgactaagagaaaagaaagacatgtttggaaggatgaaaatagtaaaggtgtaaacttgaattgaagggagcaaaagacgaagagtaagaagaagaagaagaagaagaagaaaatggcatcgttgaaaggggggatcggtagtagtagcggcggaggaggaggattaggaattgagaagttgagcgtcgagcagctgaaggcggtgaaagagcagaccgatatggaggtgaatctgctgcaagacagtctcaacaacatccgaaccgccaccactcgtcttgacctcgcctccatcgctctcaacgacctttctctccgtccccaaggcaagaagatgctcgtccctctcaccgcctctctctacgtcgctggaaccctagacgacgccgataacgtcttggtcgatgtcggcaccggttacttcatcgaggtctgttccttcttctttttctcttgttcattttcatggtcgatctttctagaacttaaaatctgttttatgttattaaattttaggtttatgtaatccggtgatagctagggattctgactaatatcatataagttaactaatcactgttcttgcttataatatcgctgagcttttagtagtttctcaattggtgttgaagaaatgcagtttcttacaattatatgtatatggaacgatcgatatgaatggatacggaaaatttaaccaactgagtttagtattctagtatagtgctttctctcgttgagagttttgatagtgttgattggtgtctctgtaacagaaaacaatggctgagggaaaagattattgtgagcggaagatcaacttgctgaaatcaaatttcgatcaacttcttgaggtacatttttgttttgttttgtttttgtgttagataaatagttctttcttctttttatatactacattaagttcaatgtttttattgttttatcagacacattagattttgcagtgataagtcgattttattgtttttcatcctcttaaaatatttctaatgttttcttggtttggtctctttatttattagtgtttggcaaacacaaaggttcagtagagttttaatccttaagctattataattgctttaagtgaaccgacttaaatttcaatggacgtgattttgtttgggcagatgcatagcattaatcttggttttcatcccagaatttttctaccattcttcctctctcttctatatgttttcattgtctatatataacacataagttttatggacagaaataccgttctttaagaacatacaaaatgtatatagagtggaattctatccaagaggggtagcttaaatggtcaggcatgtgggttgctctcacaaagtcctaggttcaagtccctcttgggtcatacataacaacggctttagtttgttggtccccaaatattgtagggttagacaggatcctagtatgaaaaaaataaaaaatatatgtagagagtggaatccttagaacttatagctggagtttttcattatgataaattgattatcatatttggccgattacaactacatccctttatttcacgaattgctttcatgtgatgttaatttcgtgttcttatagaaattgtcagattattagcagtttattgaactaaaattctgcagtatactgaatgttgagatcagatgttcttgcaaaactcataaaaattaattagggatctaagcagctcagctctacttctggttggaaatttttgttacccattttttatgtgtactatgatgaatattccatatacttatttgcctgataattaagagattgaaagaaagagttgttgatcagattggtaaggggaaatgttttagttctggctacttgtattgaatatctctctattatatcagccttttctttactgtaatgtgttattaacattgattgaaatttggaatgcaggttgcttctaaaaagaaaagcattggagatgaagcaggggcaattttgcaagctaaattaaagcagttgtctcctagtgcgcagtgaattcttgatcatttgtagtgctgtaaaattctcaatttccaagatctaagccatagtgatgttttaaaacagggtgaatatacaatacatctttgttctttttgggaaaattattttgcttcattgagtccaccaacttaaccattaatagctctcgatctcctctgccgcccgccctatgtaagagctctcatggacatgtgacatttgtccctgtcatcccaaaatccataaacacatcatctaatatttttttttggtcgaaatgttgggtctctatttgtatttgactttgctgttaattgagtttgggaaaattatttagataaaaatgctgctaaacaaaatggagctccgcaataggtgaacaagtttctagaagaacttgaaaggcagattgttatttatatgattattttgttttccagttccactttgaagaaatggctcaaaagatatctataacagtgcacacaccaaattatactttgatcctaatagataaaaaggtttagaaagtgttcagatcgtcaacgattaaaacatctgaaatggactaaattatggaaaaaatgaacacaagcttcgttggcctagccattgattaaaacatattggaaaatctccggagtcgaatatcattactctatacagaattttcatttattttgtaataaaacgtaggtgggtattgagctgagttctgaaatagtgcaaaaaatc

SEQ ID NO: 272191 - DNA, 1025 bp, Cannabis indica
tcaaaacaactatgaacaagatgcaaatgctataaatatattgttgtggttttatgaattagatttagttactataaagtgttcttagaatagtccaagtggatcttgctcacaaaatataaaactcttattccataaataagatacagttcggatctattgacagaaaatagatattaataacttgtgaaagtcatactgtattgtccaatgtattctaggaaactgaaaaataaaatatctatttggaatctgaaatttaaattcaaagacttagatttataccaaatatacaatgagtaattattcaagcttggaccaccactactaatataactctaagattaagttgcctatagtaagcatatacaagtaagagatttctaagatcgaggatttatatcatttcgggatagaatatcgggaatatagttatcgcgcaacttaatttcataagaaaaattagaatgacatcataagcagatgttttataaaccattcgtccaatgatgtataatttaagcaaattcgaaatgaaaagctaagagaacaaaaataaaggataattttaataaaaataagaatccaacgatatcccggtaggcgagagtcaaagtcattcttattttataaacttcttcattttttcaatattgtaaatactagtctaagttgacatctttaaatgtacaactagatgttgcatttacaaatacttatctgttgtgatctaacacttttatgtttgtctaatggatgacattcctttcggatttatcccgttaaaacaacaaactaagttagaccaacaatgaagattcaaaattgaaactacaacaattaataactaaaacaacatggcccaatataaattcatacacactctaaaatttatcgagtaagaaagacatgtaaaaatacaaaccaaacacatcttaaacaatttccaaggtttccaacaaactgatacagtgtcccaataggcgagagtcaaagatatcattcattgaatagagtagtcagct

SEQ ID NO: 272192 - DNA, 562 bp, Cannabis indica
attttcatttagtttggatgagtaattagattttatattgttatacgctaaatctatatgtatatatgaaaattaatattaaatttttactttttttttcttggattggatggatccaatctaatccaatacatactggatctaaaatattggatggatctgatccgatccaaaaaatactaagtctaaaatattagataaacccaaattaaacaaataaatatatatgaaatacatccaatggatagaaccgatccaatccaacatccaatggatgttggatcgattggatgacgaaattaattggatcagatcagatggtaaaatctaacacccaatatatgattggatcggatctggataggcctaaaaatattggatgtgatccaatgaacacccctctcactcatcagctctctctcgttctccctccaatttctctcgtccctctccaccgacgatgcacagcaacagccaccatcattcgcaccaactggtccacctcgtagtcagcaccacaccaccagtcacaccagtagcaccgttcgtcaatatcattctc

SEQ ID NO: 272193 - DNA, 646 bp, Cannabis indica
ctgatctttattaatgagtaaatctgagtgtctccgtattatgaggggcgcgagaacgcgctctaaaaactgcgttgaggtgatcacgcagatcaccccgatgtacctggtaatgtcctccctgttgcgtctgtacagagccggaccttgtatatctacttggtgtacgaccatgtgatgacgaagaggctgattctgcgtcgttgtctcttgatggtcgactgcgaggattgcgtcgttcagggtcttcatcaacctgtgtgctttggtttggataccttgcggattgatccctcgacgttggatggttcaggtccaaaccttcagggttggttctccgttccctgcgtacacgattagtatgacgtctagaatttgttacctgagggttatccgtgcgagtagcaggaactcgaggggggcgtcgggcccggttttgtccatctacttcggcctgtagtgcgcgcagttgatcctgaatcgcagtatattgatcagtggtgagttggatgattccctcggataccactgccggagtgacatggggaaaatgcatggttgctggtagtgtggatgtgtccccgacttgagggttagtcgtttctgggaacaggttgaaaggtctgatattgcttctccctactcc

SEQ ID NO: 272194 - DNA, 2566 bp, Cannabis indica
ttgaagttttttgaacacgcgtggtaaactgaacatcaaaaactttgttttcagtattgtaaactattcaaaatttctcaaaaaattacaagatgatactatagctataacgaatatcactatgaaaaaaaatatttcagcatgtaatttcagacgtaaaagtagactcaaaagttgtaattatcactctttatctttaatttactacacttttaggaagtttggaaagaaagtgaacgacctgtcgtttataaggaaacaaaacgacaatagagattgagtctgcatagggcaaaatagtaaatttaaaaccctaattttcgtgcaagcctcctatttataccaaaaccctcgaagaaccttccaacatttccagcctctccatttagcttcgccgctctcaaaggttcaaacccatatttctctgtaaatcttacagttttcaacaatttatttatttttttcgattaattatttcataattacttaataatggcagttgatgatcattaacaaaccgcttattgatattctgattattttgtgttgattcatacttttgcttatgatctgatgccaattcgagttttagttttcaaatttgttaacttatcaaggcaagtgaagaaaaaaaatacaatcacttatactacacactgaaaatattcatatgtagataacaaattctctctaatttctgatgcctttggtttaagatatttatgattttttttttcaatgatgagattaagcagacgggcggtctgaaatgatgccatgtcgattgtctgcgtcttccaatttttttggaatttctctgagacattttcacataataacactcccgagtcacttggaaaagatcaggtgacttgagagacccgccgaggctgcaagatagtcttgtagcctcggttagaatacaattatgaattagactattattatggttgtatagagtaaattaagtgagtttattttgaaaattttagtgtttgaaatggttaatttggctaagattcttttgaatagtggtgttgttttatttatttgctgtgatgaggtttgcttcctttttatgtctggacatatgaaattcgttagtgaattggaatggcaatatcttctgagctttaattggattattatgtgattttgtttttttagtttttttagtttttttatttttctttttttttttgggtgttttttgattgttaattaattggcatgtgatgatacaatgatatgcaattacagattaattgtgatgatacaactccgcttattatctgatgccaatgcctttggtttgtttttttattctttggggtttcgtttggttcaattttgccaaaatcattagttggtaacatcaaaattatgcaatttgtttttttatgaagaagttaatacattaaaatctaaatttggctagtctagcctaaaaacatccaaagctagaaacccaaattatcttacaaggtaaatatcattttgaattctgttttgcaaaagttataaattggattttgcaaaagttatagattagactattttctagaatagtatgaataggaatttgagtttaatttttgataatttttttttaatacaaccaatttaataataatttttaatacgaacaaatacaaaaaaaatgtaaacagttttgtcatagcacttttatatcggattataattaaattttattttgacaaaattaatttagggtcctatttgattttgaactattttagaaaatacaaggtacggtctaattgttaatttttgcaaaatatctaaaatggtatttatcctaaatttaaacctgaaaaaagtaaggaacacatactagccacctttcaagaatgctaagatttttgttaaaaaaaattgagaatgaagaataaatcttattaatagaacgtatttgtttattttgatgacttcattaaaaccatcacagaagattttgcaatcaatctagcaacacagcattactagcctgcatcctcctcaaccatattagaatctaaatggaagaggttactcagccttgaaataatgatttggaatgcccaaaatagatccatccccataaaagctaaagctcttacagcacactcagcaagatcgaaagaaccattgacaaagatggaccaatgtacctatgaatagtagacaaaataatactgaagggatgaaatccctttgttgtttaaaccactaatgttaattggtagtttatcatttgatttttgattggaattgtttttgtcttcatggcaaatattgccattctattaggactcttgaggtttttgaatataatctctcttttcattcaattttttaactctcaatcctttatgttaagaattgaatctagatattctcctcgattgtcacaagtcttagtacaaaattgtgttcatatagctcaaaggcttgagatacattttgacattgaattttgttagactataattagcaaaacttaggttagatttttgtcaagaaaatttactacttatctcatcaaattatttaaatactaatttta

SEQ ID NO: 272195 - DNA, 803 bp, Cannabis indica
aaatcctgtgtcgaaaaacaaagcggtcactacatcaagaaaattagaagtgatagaggcaaagagtacacttctaatggatttaataagttttgtgaagatgaagggatggagcaccaactcactgttggatacacaccagaacaaaacgacgtatttgaaaggaaaaacaagactgttatggaggtagcaagagccttgctgctagagaaaggtctcccaaaacgatttagggtagaggcagtaagcactacagtctatttgttcaaccaatgtccaacctaagccgtgccgaataagacgccaattgtagcttcgagcggacgtaagccatcagcgaagcatttcaaagtcttcagctgcatatgctacagtcatattccaaaagagaaaagaggaaagcttgatgagatgactgagaaaggaatcttcttaggctatagtactcaatcaaaaggttatcgagtctatagcttagaaacaaacaagctaataatcagccgagacataaaagttgacgaagatgttgcatataattgggagacacaagaagtttaaagaaagacgatcaatattactctaccgccaagacaagaaattgatcaaaatgaagttcttactcaaccaacaacacaagtaccagtacaagctattgaatccccaccagactcaccagtaaggcgaacaacaccactattagaaatctgcgagacatgcaacttagtacttatggagccaaaaagctttgaagcagctctaaaacaagaagtatggagaaaagctatgaatgaagagataaagat

SEQ ID NO: 272196 - DNA, 1842 bp, Cannabis indica
taaaagaaaaataaaggttgagataaagaaattctcaaatagcgaagtaaaaaaacaatgcaatattttttgtacatatctctcttctcatatcatattgacaaaaaaaataattttttaggtggatatgagtgttttgacaaataattataaaaaaaataaataaaattaaatatggacataaaatgaatacaatgacacctattaaaaaaacaactctatataaaatcatttttaatacttgcattatcctatattataatattaaactacactaatgctgatatgatgtgtgttagacgtacgtatttttatgagccttcttacacctgctaatttacgtgccaaaaacagaatagtccaattgaataagctaaaaaagtaaattttcactaattttctttctatatatatttataaaatataagaatatacacaaatgtatgaaactaaaaaagaaggattttaaattgggatttttaccaaatattagattttggacaaaagtttaaaattttagtgtcacacgaaatttttgtaactttttataaaataatctaaaataaccgtaaaaaaaataaaaattaaaatttaaaacaacaatagatcaactaaaaaataaccgtaaaacaataataaaaccttaacacggtatacagtaagaaatttattttttaaaaaaattccgctccacaataaaaaatttaaaaatttcaggtataaaaatttctttttcaatttcatacacattagttctcgaccactttttaaccggggccattattttcttacgttatgcaattttttttttctctatatctaatttaatttatttcaggtaatatttacagctctgaacctcttttgaaataaattcgaatacattaattaatctcttttatttcaatttggaaatgatcatatttcaacattatcccttaattaaacaaacaaaagtctatcatcagaatgatgtgttgttatttcttaggaagtaatttaaattctgtatgtttatacaaatcttccttatataggcctagaagtcagaaatagcatatgtaagtttgcaatacgattacaaatatacatttggagagtgggtagcaagaaaagaactaattactgtattagtccaatttcttcgtacttctctgattttggaatttttatactctagtgaacaattattagcgtctagaattcatatctacaactatacgcatctacttttaatgataataatatgatatagtgggtaataattagaggaggaaaatcactatcattgagttataacataaacccatatatttctacactgtatatatgtatataagaagaagattattctctcagaatcttaaatatagtgggtattattattacttgaacaaggttattatggcgacatatgcaactgtaagcatttcaaaagtcactaaaggggttgaaaaaaatcgcatctagaagggagcatatagtggcagctatttactaataaccacctctaaaaagaccttatttatggtgttggctatgtacaaataaccacctctaaagcagttatttgcaaatagctgccaacataagtgtttatatatatctatatagatataaatatactaagtgtttatatatatatatatatagatatactagttactgtgggtttagaataataatttagaaaactatattgcggtcttagaataataatttatacaaaattttcatttaggacaacaccttaaataatattgtatatattaatgaggtaatttgcggcataaatacttaatgttttagattttctacacttaaataccttatttttatttt

SEQ ID NO: 272197 - DNA, 1647 bp, Cannabis indica
ggaggcttttcaagccctaaaaacgcgctcggggcaacccccaatactgtccaagaagtctttgtagtaatctttaagagggagaattgatgtagctcttatatgctcaaggctccaagcgcctagctattctagaaggctcactggtgttataatcctcatctcgaactagacattcagagggatagcatatgaatttcccctcagcaacagacctaatgcgacatccctgctcattcctaattttgcattaccttaaaacgtccccaacataatgtccaatggacctaattttgaactctattaattcagcctccaaagtgacagcagtattctgaggggtcttggatttacaagccttttgagacattatctcaaaatctaagtcacctagtgaaaaagaaagagtgaccaaaggtaaaaatatgggccttgctaagggtatattaactaaattcgagggttttggccaagctgcttctcgcaaacactgatgcctaccctacataacttcttataaaaatttcctataacggcaagaggtttcatattgactagatttaatgaggcgatctctaattttctcatcatttatttcaagaatggtttgaggtcttccaattttaggcttaaattctatggcagaatgttgaggacaaacagattctaaagattttgggattgtatatccttggataaattgggacatgcttaaaaaataatgccccaattcttggaaaaaaagagcacaaataaaacccaaaaaatttgtgaatcgtatagccttaaattttcttgccctaaaaatatatgaacactcaaaattaaattacctaagcaggaaaacaatgcgaacaagaaaaatacacattaagaattcaaaatggaaagcacagaaaaaaaaatcaacaaagataaatgccacttattggttgggtgaaatgttctgtgtaaaaaaggacttcgcgatgaagattttgatgatccaaaagctgggttgagatgatttttaagaaaaggaatacaatcagatgaaatttgcaagaagaatgtgagggacagaggcggcatgcaaagtcagattagaaggtggttgagatttcttcaaagcttaaaaattcgtgggctgaaaatgatgaagatgatgcatggtttcaaatatatacttaaaggatggcaaccgttcaaccaagtgaaagataatcaaacgaatgggcactgaacaagaaaaggaatagtcagagcattaaatgagaaatgatgtacctcaaagttttgaatcgccaaattctaagcatgcaagttttaaaaggaaaaaatacaattatacccttaaaaatatttaaaagccctatttaagtaaaaggcactttttagaggcaattgttataattgaaattcggctatcaaccagaaactgacacatgattttaaaaggaatatgaattagctcaacgattataatattagattgcattattaaatagcgacttaaataaactcgtttcaataaattacaaattgataaaaataattcaaaactcgctgccatataagcataatgcgagataagaaaaataaactattaacgaggtacagctgacgagacaataatgtccatctcgggatagaaagagtatacaatag

SEQ ID NO: 272198 - DNA, 7423 bp, Cannabis indica
catccactttctcttcctcttcatcttctttcttctcatctattttatattattttataacatattttaaattataaagtcatctaatttttttttttaaaaaaaaaaagaaaaagaaaaacaaattgtaatctatacattatggtatgtaaaagaagcatttataattagttaaaagtccaatgcattataagccaagtatcatttctcagtcttcacagctaccatactacggttactctcttcaatttttcggtaaattttcctattaatttttaatattttattttgtttatacttatatgtaagtttcatcaagtattttgcagctattatatatctggtttgaagttattttttatttagttctgtgttgatttatttttttaatggaagtaaagtgagcttcggagatctgtctttgccatggtatggctctccattgattctagtttcctactctatgtgttgttggtagcactcagtgactttggtgtgttctattttgtactcaattttggattttcgtaatgaattaattaaggtgtttttgtttgaggcatcctattttgataaaaaaaaaaaataaagttttgcttttacaagtagataagctctgtacattaaaaataaaaggctagttgatgaaatacagaaatgagtggacaatatttctatattagatccatgtaagataatattatccaataaaaaacgttaagagatgagatgagaaaagacacaataatatgtttataaacaactgtaaatttagtatgtttatattttaaggtttgcacgttttcatattttagttgctggtgcacattttcatattagaaaggctagttgatgaatcaatgcatagtttaaaaattttgtcaagagtgaccaaactttcatgtcttttcaattttattacaagcattgtcaacttttcaaatgggtatgttagatttgaaagttatattctattagaagaaaagcatattctgttgacatccacaacaaattatgttaacattttatggaattgtcagaataaattgtttcctaatactccacatttgaaaaagaccaaaaaaaaaaaggaatcatgttaattatggttaggaatgattattaattgcagtcttatttactataaacaaattaaaaatttacaaatttgttactacaatattgttttctttttttttggataataataaaatcaccccattacatcaaaacattgatttaataacgttagtgaacaatgacacaaaaggtcacaaaactcataacaccccaagcccaaatgtagagttacacatatttattccttatataaaaagcaaacatgccttgtttgtacatagtcattccccattagtatatattatacacctcagccaattcaatttggtctagaaaaagaaaaaaaaaagttgttaagaccaattattccacataattgcagtgtgtcacatcttccttgtctattaacaataataattagtgaaaataaatatttaaactaatagagaagagccacaaagtaaaaacaaacaaagagaaatagccatatttgagagacaacgagttgttgactcatcataattatttgtgtttatgagagattctaacatagaaaactagagtagaaacctatatgaatttattatttttcatccacaaaagacctttcatagtacagaaaaagagaaagaaaggcagatagatctatttgtgaatgaataattaggtatcggagatagatatttacgttgttgttgcgagctttacatcttcgccatcgagtaatccagagcatccaccaagaaatctgtcgtaaagataatgttcgataaggttaagtaagtaagaacatgtgaacactgatcttcactagttttctatgtatgtaaatcagaataactacctgcatcttccttgttgaagcagagaggaggtgtaattctgaatacatttccatgatatccgcctttgcctatcagaaccccgagatctaatcgaacgagaagagtgtgtattagaatagatttaacaacttggagaggatgtaatgatgataagcacacaaacctttcatttggtccatgatatgtaaagtttcagctttcgcaggggttttcaagtgacgatcggtgactagttcaactccaagcattagtcctcttcccctaacgtctccaataactgcaaataacatttgcttagtgctacttattttagagaatgatgattatgtgagtactgatgtgtttgttaccttcatatttgtccttgagagaggtaagtctatctttgagataggacccaacaacaaatgcattctcctgaagcttttctttctcaatcaccttcaaaacagctagtcctgcagctgtgcatacagggtttccgccaaaagtgttaaagtaactgcggcgagttaggacctctgcaatctctggagttgttacaacagcaccaaggggaatgccattaccaatgccctgaatatgacacacaataaattagcaagtaaaaaccagtttctaatgcttaagcagtaatgaaaaggcgatgtaagggatttacctttgccattgttactatgtcgggcacaacaccttgggtctcaaatccccagaagtggctcccagtgcgaccaaacccggattggacttcatcagcaatacaaagcccgccggctttctttacgctactataagctgcaggcaagtaacctggtgccaattcaacaattcctcctactccctgttgttatatatgaataagatttcatcataataggaaaaaggtgttaatataaaataatcagactctgggtggtagggagaataggcattcaatcagttaaatgttgtacctgtatagcttcagatataaatgcagcaacgcttcctgaagttccgaagtcaataatttcttggacatctctagcatacttctctccatctgaaccaaaaacacctctataggggtctgggttttgagcatgatgaactccactctgtaagtaaaacagttaaatagcgaacgatgttagtcatctctagttttgggtccagcataatcttctaaaaatatacaagcaaaagcagaatgcaagttagctattattagtgttgtgaatcaacaccccttaatcaagaacaagaacagaaaattaagcaatctaaaacaagaattcaataccaaatcaatgaataaaacagtgcaggaagcagaacaccagaaaattgagtagactgaacaatgaaacaatgagtttcatgatcagatctactatgaacaaagaagaagcttttattactgaactttaagtacaaaaccagagatagagccatggatcgaacaccctaaactagcctaactaggattacagatttatctcacttgagggaagctatttaaagaataaacattcgctttttgcaaccctccaagaacactcaatctctcttgaattctctctgttacaaaatgtaagtcccgactcgagtgtaagtgattattactacttatagatgttggttaggacagttactaactaacagaattatttagctgagatgccgatgtgtcaaagttgtatttctgtagtgacttaattataacaattagtgtatgggtagataactaatcactaatgaagatagagatagttcacactctttatcagatggaatcttaaagaatagagaacccaacaagcatctatatacggcaaacatgaaaaaatgattattgggcactgatacggcacggcacttttatactatatatattgttgcataaatcatacatgaagaagtccccataaagtaaagtgaattgagtccactcttttttgtaaaaaaaaaaaaaacaaaacagaaaagtatgatgtggtagttttcattagctttaaagtggcgtactgaaacagaagcacccttgttttgtttcttaatatcaatcaaactatgacaccttcaattcgggctgacgtgggatgtgtttggcatcattggtgattgataatatgtcacaactactgtgatgtgaccttctcttgtgattatacacaaggaagtgataactttattttatcttttatggccaactcatttgtccatttacaccagattcccacacatcagacaattattttcacctagtcctaccacgggaccacatcagacaattacagtgttattcttttggttaactctagccataaatgttcacaaataataaaacaaatcaccacatagaaattttaatctctgacaaagaccagagaaatatttgatcattaaattagaggaatattatgaacgtgatattaagattcataatttgtcaaagaagatgattgttttcaggactaaattaaatgataagtgattatttcctttaaactagaataaattttttatatattaaagaaattatctatattcatagtgaagtcatatcaacctatcttacaacttttacatttcacacaaaattatttatgttcaatattgtaaaacctttcacggtcatctaatataacaaggcaatataaactaaacaggtcacacttcaatttacaattattgagatccataatccattccatactagttgataatttttatggaaatgaaacgacaattttttcataaagattcaagcttttaatatgataaacgacagtgggtgtatgaaacgcttacctgtacgacattaaatttccagttgcactgtgcggtggcccccatggtcccagcagcgttaccatggtacgcgtttctcaacgatataatatcatggcaacccgtgtacaatctcgctatcatcatcgccaactcattcgcttcagtcccagagttcgtaaaaaataccacctttataacacacacatacacatacaacaaacccaaattaatttagatacgtactagagcaaaacaaacaaacagccaaataatatacgtggtgggttatcaaaataacgagttccccatcatttttcgaaaagaatagttcccattttcgaaactgtaactataacgaaaagactgcaatcaatactattcttttctgaaacgttttccatggttatcacaattcaatctagcaaaaaaatataaaataaaaacccaatctacatccttatcacgataacgggctggtgatgactcatacccaataattattataattaataattaaaaaataaaaactcataacgctcgatttgttcacaatccgacggtcagtatttaatttttatcgaagcaagtgtacggtcagattttatttagttttaaaacaaaaagagttaagcgatgatttgaagaaaccttgagatttccaggcaacttggaggcgagagcctcagcaaaatcagctatggcgcggttgaggtagagaatagtagagtgttgtaatcgcttcgtttgggtaacgatggcgtcaaccacatcaggatgacagtgaccacaacacaccgtagcaattcctccaaatgcgtcaaggtatctccgcccagtatcgtcatacaagtattgcctcttcccatccaccacgttcaactatacaaaacgacaaaactccgattaacaaacatacaatgaatctgagacggtcaaataacaaatcaacacaaaaaaacaaataagactatatatacaaattcgatttgatcgaaaaactcaccggtttgttgtagaagcaaaacatagaagggcttagatactccttgcgcttggccaaaatctcatcggcggaaggaccttcgtacggcggtggagagtaatcgaagtgagggattttagggatgggaataacaacatcggcggcagcgacgccattgtcgtggagagaagatgcttctttctgagctgcatgagagaaacacctattccatcggtgaaattctcttcccgttaaagccttcctgctcgacaagaataatctctgcattttttggctgtttggttagcgagaaaaacctctctctatattctcgaatccccgaaaatggtgggctttgtttgttttgctgcggtgagtagtaataggaaaacgaagcgcgtgtaagcgcgtgaggggaaagaaggttatatagagagtggttgtggtgatggtggaccttgttggaattgaggaggggagggtttatataggccttggtgtaaaggacagaattgtcattttacgaaccgaaggaaatcaagatgaaattttaggctaggttcagtgacgaggacaatactgtcttatcacctaacaagaaaaaaaaaaatggaagaactaacaaaaaatttataaaagcactatttaataatttttattttataaaaggaaaaattaagcttttttcttaccaaatttatagttatgagggtttttttttttatttattttggttaagcctaataggggttgtattttgctcatacaaaatttgatttttattactgcgattaattttgtttttatgatatgattttgaatatttaagttttatctcttgggtgtagttttgaacgtttttatcttgtatctgtcacatagtttgaagtgttctagtctaatctgtgtgatatcgttttgttttgttttatttcgttgttgattcttttttgtttttcaatagttcgtcatcaaatcgttgttaatggttgagaataacaagctctttgcgactgaataggttattagtagtgcaataccttacacaatagttgagcacttaagctacgaggttgaatggacatgcttcaacaatttgtattgttgtgttttctgagcgatgaatgaaacagaatataagtattttttaaagttaattgtgatataatctatttcatatgattttattttaatttttttgtcatgacgatctgggaattagacaattgattatttagtttatttttctaattctaattctaattctgatcgtatctttaatgggaagatgtacccattgtattgcatgctattagtttaattgattaccaataataaaattttattatttattcaaaaaattatttttttattaagaaattatatctgtaatttatatcaatttttaaaattttttttctttgcctcttatattcttacaaaatttatataaaataaaaataaaatatattttaaatattaagagaaaataattaaaataaaaaaatatatatgaatttttattgaaaataaataaaaataattataaataatttttttttaagaaattcatcttcattaactcatctcaacccacaataatgattgaataaaaagtaggtaaagagttcccactaagaacacgatcagcctccacaagtgaagttctcgcaaaagtatgtgcgagattattagcaaatcgttttacaaaacaaacaaaaatagaacttaaaacatcaag

SEQ ID NO: 272199 - DNA, 3127 bp, Cannabis indica
taattaaagtaaaataatttagcgaaaccaaaataaattttaaataatttgttgttataatatatgtaaattttaaattgaaaaatagaataaaattcatatatttatgtgaagagtgggataaagttgcggcttaggtacttttcttaagtttcttttcttttttatttttaggccgacaacattagaaaattatgaaagagacatgagtatatatatatatatatatgtccactcaaattttaaggcctatatttgtacactattttggatatgtattactttccattaattaatttatataattattgagttgatatttcatttatttataattatttttctaataatttttaaaaatttaaaaagatttcggaacctctatgtttgtcatttttttgtttttgaagaaaaacgtgcaatatattagcataaatcagttagacctatcggtcattacataaaatattgtcggacaaggaggtcggcagcaaagtaccaaacctctgatgggaaaaagcccacttggccacattatgggccgcaaaattacaaagtctactaacatgttcataactacaaccgataaaggagggagcgattctattacaaaagaagacgtagttctcaagctcccaaggggaatctttcccatagggattctatgtttgtcatttgataatatgcaattatatatatgacattattcacaatcaaataacaataggcttttaaataaaaataatgatattgtgattaaattatcttttattctcaacataaataatttttgtgataattaatcaagatgttatttttagtatttatatttacaacaacaaatgattgaaagactttatatgatataagtgatacttaattgtatataatttattgtgtaatataaacatatgtatttagttataactaaaatatttataatttttgtggctaattaatactttaagacatgaaattttagtatatatatgttttcatatgtattcacattaatttgcttgggatgtcgatctaaaaattggattgtaatgactcaaatgatcaaaattgtagaaactaatttatttgaggggagctaaattaatttaaaattttaaagaaaatttatttgataatatactatttaatttaagtttatttatactaaatataaagaaaagagctcccaacacatgataatattattaagtctatttctaatgcaagatgtaagaacccgtattttctgtagtgataaattatgtatagttgcatctgagattcgtagtattttgtctaaatttcgtaatgttagcgttagtccatgtcaacaaagatattttggattttaattgttcagatggtaacaactatctatttcggtattcttagtttagctgggtattaatataaattctgggtattatgttgagcaaccttttttatcagagatcagggattacgtttctttcttcttgtttcgtctttatgttccaggcaggtgatctttgagcttggtaatattaatccaacgttgcagatcagagcttgaagatgttgagttcagactgaagggatttcagtatcatcttcatcaccagatctgaaaggagttcagattgaagaaaagtattaaagagagctcatcattcacacaaggggatcttgtgtccccaatcaagggttttggttggtatgggtatagattcactgtattttgtaaaagagtgtactgtttacaatattgttggtatttgtaagatacatctttgaatatagtgaaagttattaccctagttcggggaacccaagcactagccgcctagaatgagtttctatggcaggtgaagcttgtaaaattctggtattgaatctttgattttgttttttgtattcaagcataaatcaaaataaaatcaatctaaatatgtaaaagataggttagacaagaacttagggtttacacaagatataattttttttttattattagtttatgttagaacattacaatattacaaatttttagtatatgtttgagtcttggagtggtcgctcatgtggttttcaggtgtccttgctccaatgcaccaatgctcattttgagctcttagagtattatacatgccaattaaaaaatatgcatgcaatttaaatgtttcaattaatattatatattccgtttatggattagtataatttaaatgttgcaatttaacaaaaggttgtttatggattagtataatttaaatgctcattttgagctctaaattgcaaaatatatattccgtttaacgattagtataattatatattccgtttaatatatattttgttaaatcaataaacaaagttaaataatcatattttatatataaaaatattatttgtattaataatatacaaatacatgccaattaaatgcatgcatgcatgcaattatttctcaacgtcgtagcaatcatattcataagttaaaaaattattaaggtgattgggtggaatgggacaatatggcctgcaaaaattagtgataaattatttttctagtttattttcgacttctaatgctaactggttggaggtggttcagtgtgtgtcgagtattgtttcggctgctcagaattcagagctggtcaagcttgtgttggaagaagaagaagaagtgaagcatgctctgttccaaatgcaccaaggcaagagcccaggactggatattatgaatcctgcttttttccaaaattattaggagatagttggtcatgatatggtgaggatgattcgagatttttttgatcgtggtgtgtaacgtccccgctttaagcctccattgggcccttacacccacgaaataatggctcttatacacgagtacatcactctggctacttcatggactgatgactgaccccacaaaacaacacgagtattttcagtgtgctttgtcctcactcacacacttcctgagaaaacttttcaagaggtcacccatcctgaaattaccccaggtcaagcacacttaactgtggagttctttcatgatgggctaccagaaaacaagatccaccttgttgatataggtagtaccaatcaatccattaaagctctcttcaactgtgtagtccca

SEQ ID NO: 272200 - DNA, 765 bp, Cannabis indica
actagaaccgaactaggactaggaccaggacaaggacctaaacccaaactcgatcccaaatcaaaacccatacagagacctaaacccgaaccgagactaggacttgaacccgaacctagacccgtacccaaacccacacaataacaaggacctggacaaagaatcaggatagggtcctgggaaacagaactaggacaaagacgtagtacctgacccagacccgaacttgaacctaggacccagctcgtgacccggcaccagaaatggaatcacattaggacccgagattgggttccggatcttgatcccgggcttggaaaaaacctgtagtcagtgtctgtatttgggacgcagccctggacctgaaccctaacgaggacccgaaaccacacccggacctaaacccagtcccaaacccaaaagtggacctgaacccgtaccgtgtgacccaaaattggaaccaaaaccggaagttgaccgggactggaactaggacttggacttggaatcataactgaaattggacttagatccagaaccgtaaccagaccaggacccggactccaaatcagacctagacccgaattgggagccggacccggatccccaccctaacctggactcgggacccgaacccgaacctgaactcagacccaaacatggaaccaaactagggacacaaaccagggtcgggacctagaaccgcaccacagtctcgatcccgaacccaaactaaaaaataccacctgggacgtgaaccagaac

SEQ ID NO: 272201 - DNA, 468 bp, Cannabis indica
ggcataaaacccaacagaacattggacgaaaattgtcaacccactattcaggctcattagaatgaaactcgtgcaaacccttgtaagaagaaaaaggtgagtcaaaccttgagaggaagggcaaggtccgaccattatcatgataagagtgatctacgagaacatctaaacttgaagaatcctgacctccgtgaacgactcggttcaaggccaaaggattcatcccatttacgaatgagcgagttggagaataagtttagagggcatcaggtcacgaagcccaggagacaaccggggcacgatactgttggaaaacctgatttggaggccttgggataaaaaaaaatcccaaaaggctgctcaaggataagaagcccaacaaatatattcctctttatgccgaatataccgagctcaatgaaacttgggaaaaaatttacctcgcacttgtacaggaagccgtttttg

SEQ ID NO: 272202 - DNA, 789 bp, Cannabis indica
taagcataatagtaagaaaatagtaatcaattcactaaaaattaaagagaaatctaactgtagctggtgcgctacagaaaatcttatttttagttacaacaaaacttatgactaaaagtaaaaaaaattgtgactgattataaatattcattcatatgttatgactaaaagatctgtggctaaaagcatttgtcacaaaaattataatttattgtgattaaatatatttttagtcacaatacttgttgtaaatagtaaattactgactacttgtatctaaatagtatgttcttgtcacaagtaattttttgttgtgactaaaaatcatattaagttacaaaaaaaattatattgtggctaaaagatgtcactaaaagtagcttttttttgtgtagtggtggattggaggaatgggttcgtggcagagatgtaggagattgtatcgaagtagaaaattcacatgatttttgtaaagactcggttttgaccgagtcaaatatgtatatatataataataattaaataataatgtatatatgtatgtataaaaaaaattaatatatacaataacagaccccttcgtccccctctctctctacctatctctctttttctctctcttcaaacacaagaaagaaaacccacaaactccataaccaccaaacttcggcgacccacctccggccaccgctcggccccacgcgccaaaaaaatcggaaccccaggtgccggcgacctcacccccaagcgcaacaaccccttcgccaccgttagcttgggatcgcaagt

SEQ ID NO: 272203 - DNA, 4232 bp, Cannabis indica
ggcagccaaagtcttcttaataataataaactaatttgttaaaataaaaatgaaataatttaagctgttggtcattgagtgaaaattaagtaatctgtgtggattaattccgtaaccgaggttgaactccagctagatacagctaaaactagtttaataaagctccattcaagatacttaaatcaataatatagtgattttttttttccttttccaaatggaaaacttgtgcaaaaatagctatttacgtccattccggacctgggttttcttcttaggaccaaccaataacgtcactcttacatttcagacaaggaaaaatctcattacaagaaaataatattggcatataaatgggtttgaaagctccgtagaataactttttgggagtatttgaaaagatatgtttatatctaattttttatggaaatgtttaaatctttaaaatatagattcacaaagaaaaacaagcaaatgacatgacgagtgaacaaaggcttacgatttggaaaaagtagtaagaatccttattttcttttttctttttttttttttctaaaagttaagaattattcgatcaagtttcattcgccctacatctcatttatggtaaaaaatttagtggcatcccacttgtaatggtgtaatcatcaatggtcccgttccgaagccctaaataaaaaaatgatttggctaaattcaagaaaggttttaattcaatgaaatgccaaaacctgtcaaaaatatctttatgtatctctgcaaatgtatttgatggaaacaacaaaaataataaatgctttcatagtatccacatataaataaataaataaataaacttggcatgtcactttcttttccgtcgtttaaaaacccatactacaaatgaataaccttttttagtatcacaatatgtggatcatacactatatttatgtaagatcctgagaataatatggaataaagccatgtgaggattgacaataacttattcaggcgcatgttcttctgccattgcagatttctttctcgctgtccaaaatgctgcaaagtaccgattctgcaaagaaaataacagccattaaatagcctggagtaacgaagaatcatatacttccatgaggaccaatgacttcgtttatcaaatacctagtaccacatgctcattgccaatataattaaacctaaaactttcatttacatacagtatccagggagtgttcactaatctctgtaatgaatataagaggaataacgttggtagaggaatgaaaagaaaaaaatgtaaactatcttttcgtaagtcatctcatcatgtttaggattcactaaagtttgtttcatacatgtgtaagtaaatacatgaatgaatggatgaaaaagagaagcacttcacacactataacctatgttttgaaaatattgaactgaaattgactgctgcatcctcaattcaaagatttgttgcatcccggatgccatcgactagataagattgcaatcctaagttacaaatctagaacctgttctggtgtgtgaggtaatatattataaacattcttataaatttttctgtggttagtagataagaaaaagtaaagcttacttgcatcattgacctggaatttgttgtgtaggttgtctctatcgttttttccttctgtagaagaaaagaatgccagattcagactagtggaaaattactcaggcagacaatctatacgacaatttttacctcaaaattgaatccataatgcaaagcaaccttcttcacatcttccaaactcagttcaatggacatttcctaacaataatgaaaatttagacagcattctactttagtgaagtgtggaacctgatctacttagcaaaaggaatacatacatcttcttgaccatacatatctgcgaagtgatacagtagggggcctaaatttatccaaatctgccatccaatcaagattaaataaaaggcagtgagatatttggaaaaagaaaagaaaatatcatcagaacaattatgatcaggtacttactccgccgtctttcaggattttagagatgatttcaatgtattcaacaatgttgtgcgcggtatcgataaaaaaacaagtcacaaccacatcccagatacctgcaaggcccatagattactctccgtgatcaaaggggacatggtcgaaatcgaatcgccatgcaaacatgatcttattataataaacattcatcccacaaatactatagaactcgtgtccagagagcccgcccgttttattttactgtattgatttccacaaaaccaatgagaggttatgtgaaagaatgattggaagaccaaattgttttaatcatccagtacattttgtttggtgtaagttctactgttatagttatttgctaaatgaagatctcaacaattcagccgtgctttagaatttgtcatatgatgcacttttagcatgatggtacattcaaattcattatcccattttgacaaacaaatggcttagcacttcttaaataaaacaaaacaagccaaaaaaatatatcattagctggtgtgaagtacttcctcttataaaaatctgattacaaaataaagactgacaaacatgtatacttgacaaacatgtacagatcagacaaacgtaccaacttgacttggatcattgtatacttcaacaaagtcaccaccacacatggaaaagccttcagtaagcccagcactacttcaattacgagaacatggattattatttagaaaaacaaaatgataaaacaacatacgccaaaaatatgagaaagttgtttcacaaagaaactagctgtaaattgaaacaacacactccaaacatatgagaaagttgaccttgactcagcagtaaatttgaaacttattttttatggttcaaactttggtaagttgttggaaagctgtaataactttctggaataacattctttagtcagtttaacaattgtttacggaaataaatcaacactattaggttattgttcacaaaacactcatcgtagctacagtctttattgaagagggaacaaacagattttgaatatacataaatataaatatttctataattatatattcaatcatccaaagatgtaataagctggtttaattattttatctttagatggaacattttccttctctcctgcttaggatagatagtgagaagatgtatccataatcagaaacttcattgtaataaatcacagatgttgtcaaagcaaaaattaatagaaacaaggccacagaaggcagacatcaaatattaaacatcaaggagaaacttcagaagattaagaatacctagctgggtggatatctggtattgacacaggacgaagttgatcgctgtctgagagtgaattacaattgctgtgaatccaagggtaaattttccactctcctgcatcttcagtactacatacaccaagcaaaacattttcatcaatgaaatgcagaaagatacaccagagcttgaaaatcatgtagatttgagtataatcagattcatacttattaagaataaaactcgagcatatcatcatgtagtacgaaaattcatttccctggcttatgaaacctgtttaattatagagacagtaggcactgagtaagatcacaatttatggtagaacttgtgacaagctaatggtgtatgcatacctaggcgagagatctctaaagctagtcgtccaagtccagcaccaggaactaaacaggcaggagggctgtcaaaacatattaaatattttagagtaagtggataaaacacaactccactggtagaattgtcaacataaccggaagaaataacataggagaacggaaacagcatcagaaacaaacatacctttccttagaacggttagggaataggatatcaagctcttcaaggacaggcttgtagcactgatctcgttctttctgtccctgtattagatattatataaggaacaagccttggatgtgtataaatatcagaatctaaaaaacatgagaacagatacagaacctcttccgcccaatctctaacaatattccttataatacagcgaacctagaagacaaaagaataagaaacaaaattaacacggcaaaggtaaataaataaacaatgaaaaaagcaaaagttagcagacaaagcagtataatttctcaatgtgtgtcatacagcctattttagagagagagagagagag

SEQ ID NO: 272204 - DNA, 932 bp, Cannabis indica
cattgtttaatactattatgaaatgttgaataatgatatgtattactgcctactggaatctgctaatgtattatttaatactgctaatgtttgaatacgactatgtattactagaaactggtatgtattgtaaaataatgatatgctagactgttatgtattgttgtatatagtttgtcactttcttactaagcattatgtcattcctattttctctccctttaggtaataactaagggtggaaattgcaccatatactttttttttttgtttaacccattttatttttactattttttttttctatatatttaattcatacactttttttttgttatatcccgattatacccttacgtaatgaaaaaacccttccttacctccctgaacagtatccttatgtgagggtataatcagtaatggacttataaaaaggtacatttcaattgaatttaaaataaggttattttttgagttagctgatgaaaaaaaatagtacatttcaacttaccccctaactaaggcataggccacatacgaagggttagcgagaggggtaaattgaaaaatactacttttattaatcaattaattaaatttacctctaattttatatttaattgaaacatacctttttttatatgtattgtaactaaaataccctcacataagagagtcacatggagaatatcttaaagtgacaggggtaaaattggtataatgtttaaaaaaagaggtaaaaatgatagattttaaaaaagaatgtaaaaataaaaaaggacaatataaaaatagtatagagtgtaatttacacctgacggggtaagttgaaaaatgcctcttttattcatcaattaatcaaatttacctttaattttatatttatttgaaacatacctctttttatatgtattgtacccaaaataccctta

SEQ ID NO: 272205 - DNA, 1918 bp, Cannabis indica
gaaagtagaataatccggaaaagaaattaaagcacgaaggattctctcttcggctaacctttttaatccagtgaacaatcatcgtccctgtttgagggcattcctccagtattttacaatgcgcaagcattgtatcccatttaggtcgaaactcatcgtcccagaaaaaatctttaaccagctctggtgttgcatcttcaaagacagtcctactacggtaaactgttggacctgtctgataaatagaatcaatatcagtcgaaataaaatagaattggaccctttttctagggggaaaagaaaagaaaaacatcagacctgcaccattaagaagttttcttctattaaaagaaaaaaaagcatattttgttaattgacacacttcgtagtatgccatctactctattgccaccaaagccattaggcatctcacatcttataacatgatgtcaccaaataaggacatatggtgttgtgttctccatcttttgagattgtctaaatatattccttgataacataaacaaattttataacttgcaaatgaattgaaaatcaaaccacacatatgagaaatcaaagtgttgatatatacctcaggctcatggcgccatgcttggtatgacatgcttggggtagacctctccatcatactttgccattccatttctccatctctcccttccaaaaagtgtagtaggtgatctagatcattctctgtgattacatccggctgtctctcagaaggtgtggtgctgtggcaagaagaaagaaaagggatcacacatcacagctggaaaatcatatcacaaagcacacattctagtatatcaactaccaatatcgttattaaacctcaaaaacgtcttcctatgtcaggatttactcaacacattcatctcagacctaaattactgcattataagcccaaatttctaacttcttaaaggtcatgaggatgttcagagtacattttcttcacaggaatttattaatggctttcatgtgcattgactcctctgaattaaaaaaactaccttaaatttcccaagtgccatgcctaccgagcactcatttgtacattctcaaagagctaccgcaataagtaatataatcctaaggctatatcagaagatacattagacttcgtgggtctattccatatttgacagccagatatctatatatcatcctacatagaaagcttataagaatggaaagcacccagggatgtctagtccaaatattcagaaaactacattactacacaagcatagtacattttaatagtattagagcttcgaaaaacctctcttaaatgcatgaaactaaaacacatcgcaaaaagcatacaaagttcaaacttcaaaaccagaaatgtagtaaaacattaaaatcctaatacaattcaacttaaaatgaaaattgtgatgacaaagcccaagagtactcacctaacaacatcgtcgtggttctctaacaaatcatttggggaacctggcccacccctagccccagccatgacccctgaatctggacacctaggcggcaattccttatccttgctcctaaaatttgaccaaatcgttcgacaaactgagaaagcagagagtgctgtgaaggctaaccaaagtcggcgagccccgaaccctggcggagcagtccagaggaaccgaaacttgctccgaagaccaagaaaaacaagaccggtccaacgaggcctccaggcccacccgatcacgagcccaatcatcacagcaagccaaattggaactgcacatagcaaaatgtcgactaatgtttcggttattgaaggcctccgaagaaactccacgagatcgaagaatggctcctccattttctcttatttagtctagtcctgaaaataaagaaaataaacaaattagtatactaatca

SEQ ID NO: 272206 - DNA, 884 bp, Cannabis indica
ctacactaaaccattttgcccagctcgctactttttcctgtgatatttttatagctccgccccttttcggcgattttctggcgacatcgtgtacagttttgacaaacggtcgacatgggtgtgatctactcgtcgaggtggtcgttttgatatacactacccctattttcagtgacatttccggtacaccaatttttactgccaccgaatgttaatgtgcaccacttaggtgaggcttcagaactccaaattttaaatagtcatattatatgttgttggactcggtttggaatgtagaatgcaatgatgatgattatttaaccatttgatggtattggtgagagtaatatgtaagattggactaaacaattggagctcgggacttgagagcttaagattgtcttttggacaaagtttaacgacttgtgagtggtagggactcaacttgattatttgacttgatttttatatgtgttgtaaaacattgaacatattcaaaatttttatgatttgcaaattgtttgaaaaatcaaaaattaatctttgtatttttttggactgttttggggcactgagtgccaaatatatttttgtgtacaaatatttatggaggttatgatttttgggtttattcaaaatacagatgttatgttgccgaattttctaaaaaataaaaacgaatatgttcttttgttatgcttattatttgcatgatttggttatactgatgagagccattgtaacgccctaacatttaggcacgctacccaagatgattatgaaaccctaatcccctaaatgggattactaataaaatgagcgtggaaattaaactttaaacaaaaacgaaataaaaataaacttgtaataattttaactttaca

SEQ ID NO: 272207 - DNA, 614 bp, Cannabis indica
accagaaactatagttatcaaaaataaaacaatatcaacctcgggaagttatatgacgaactccagctcaccatcaaagttaacttggctccattcccagcgacgcatccccataagatgaggtttaccttatatcttaaatatgccttcatctcggtctaataaaagcgggatactcacagctatgtgaattctaaataaaaaccgtatttacttagcctgatttgtaatcaaatcccatgatttgaaggaataattactgtaaagattacattcaacttttgtaatttactacacactctataattataaagagtcagacaagatcaaaaagggggacgaaaaagactcatacaagagaggccctaaaaaataattagaaatctgaataagattgactcatggattatgcagaattttaactgcaaaaccacataaaaaaccctgtgttcatatctttatttttacagcttttatcttttctagtgtgcaatcactattgtgaggctcaaatttaattaatgaaaatatgtgttaacagtttggtactttcattgagagcctctgtaaaaaagctcagaaaaagcctcctggcataaaaataatggatgacg

SEQ ID NO: 272208 - DNA, 1148 bp, Cannabis indica
ttctcgaaagttgatgttggtaatgacttgtgaataagtttataagattatcaaatttgttgaacatttatatcactattctcttgaagattgtgtataattacacataatataaatataatatatatataaaatacatgttgaaaatagaaagattaaaatggcataattgcaaataaaaatcattaccatcgtttattattaagtacaaataattagttttcaatttcaaaatgaaagtgtaaaagagattgtatagcacttctcttctatatacaatgggctctttaattagcttaatatattactttcaaaagacataacattttactttcctagcaccaaatttctaccaaaaagacagaaagtaaaattttatcttcttttttagtaacttttttcagaaaaaaatgttggggaagttttgctgaatggaacttaattgaataagttttatacattatagccaagagaagacaaatggtaacaagtggaatattacaatgaatgttatataggtcaacaagggcatgtaattatagtttcttcttaggacacctaagaaagttccgggaaatagaggtttaatataaagtaaataagagagtagaggaaattccatataagaaaactgaaatcccactaaaaacaaacatggcatcatgcacttttctgtcaattcacacccaaatgaaaaaaaataaaaaaaacacacactttaattcattgttgtttctcaaaatttaacatataataatagctcgtatgagtttacgcaaggtgtctaataaatgtaaccacaagactttagatcatttactgtttggtataatgtttcacattaacatacatacaccactatggtattgattaagagaaatctactaatatttttgtgtagatagaatattattgttagtataatttaatattaagtattatttattttacttttaataaaaattatataaaattattaactatatatttataaaatatcactacaaattggtgcccaaaacaatactctttaattaattataagcaaaagcctatcaaattctactctcaaattgaaatttttctctcaaaaaagtcagtttgcttcgtaatcaagattaacgctgcaatttattgactataccatg

SEQ ID NO: 272209 - DNA, 614 bp, Cannabis indica
aaaaaaaaaacaaaaaaaatcgttctttttctcatatcagtttttgcttagttgagagagtggtccagctgatcttcactcttcttggaccacatgagatcacttctcacacacgtatggagattcaagttttagtgctctcatgcgtatcattgtggatgggtgtggggtaatgatctgttgctcaaggtgtgcaatttttttactcagaagctatattcattgatcagttgataccgattttttttctaaaatttgagtatccctaagttttttattatctgatttgtctaagtgtgggctgtgtgcaaatattgttggcatatttgacagatttctggtctctatattactctcattacctgatgacgttggtttgtttcattttgtgtgccgtattatgtggtggcaaatattcaatttgggcgcgtgcattttctttggcgaagatcaaatttaaaaaaatgatcattatttttgcctggtcagttgtgtcagggtgcctatacttaaggcctacggaaagtgatcaatctcactctttcactttcttctcagaaaccctaagccctgcaacattcaaccctttttctctctaaaatggagaataccac

SEQ ID NO: 272210 - DNA, 782 bp, Cannabis indica
aaagtagcgttttattacaatgatttttctatcattttaatagattgattattttattttaaaatagaaaaaatgactatttaattacaaaaagaattttatttttataagtaagtttgattttcttctatttttattcccgtttcccatttacatctttatttttatgctttcattcattccaaccaactgccaccaaagtatttgcgtttggttgaaatgaatgaaaacataagaataacaatgagaattagaatttggaatgtgaatataggcatgaaatcaaatttaaaatgtataaaaaaaatagataaaaattattaatttttttttttctcatcgtgcattagaataatcttttttttctatttcaaaatagaatagtcatttcatcaaaatgatatgaaaatcattctattggaatggtattctagtactttaaaatacaaccaaataaaataatagtataaaaattaattcttttctattctattcaatttcatcatctttaaccaaacgccacttaaatgtaaatacgtaaacatgtgtgtatgcggtcctatttatatataaaagaagaaaaaatgctaaggagcaccttaaggtgccaagcattaggtggcatattgatgcatttcaatatcgagttctacacattttaatttaattaataatatagggaacccctaaccaattataaagtgtcacatgatcggtgtggtattgatcaacaccttaaggtacctaatagctactacaaaaaaagctacctttagtgacaa

SEQ ID NO: 272211 - DNA, 3381 bp, Cannabis indica
agtttttagtgacagctacgtttccatctagatttaaagttttaaactagtaaactctattacattgtgtacgtcggaaacaatcggacggctgacttactgattgttctcagagacagtttatttgattatctattgctgaattaatttaatggcggttaacaatttctgcgtcatattcaaattttacgtgggttgtttccagtttggagcgggctagttcatggtaatcttttgatatacttgatgatctatgtgatctgtgtatattcttacaaaagaagattattgatgctttttttttggtgtgtgtgagagcgtgttatttcaattttcatttttcaatcaactctttaatagataatataataatgttttgttgtaattcgttcgttgaagtataaataggactagttggttgagctagctccaagagactaaatgcattctatttctttcagattaataaaaggggtgagacagttgaagagaagatcaaaaagcttgatgtagaacttagtaaatataaagagcagattaagaaaacaagacctggtcctgcacaagaagctgttaaagctagagccatgagagtcctcaagcaaaaacgaatgtaggtgtctcttctccattttactatctcttttattatttgttttgcaagttgagagctttttatgcaaggggaggatttaagactttactgtgttttgctttctcgttcatgatttctcgactcactaaacatctgggcaggtatgaaggccaacgtgatatgatgtacaatcaaacgtttaaccttgatcaagttgcatttgctgctgagggcattaaagatgctcagcaaactgtaagcttctactttgtattgaaatgtttgttattatatccttttttagggatgttgacctatttagaatgtcaagctaattcctgttgtgattaattatgtttacgacaatatgttggctgactagttcagtttcaatttgtatcagatactcctcctcccttccctctctttatctttgtatatttattttttgtgattcaagctttcttgtaatttgttttggctaggaaagttctcgtacccagttacatttgtttttattgtcttgaaagtgcagaactttttcttcaaacattcctattaaatgaacatgttaccttgggttataacttattgaaactgggtggtccaatgtacttaatttttgagtctagtatgcattccattttaactttgctgctgaagtatctagtagtaagcattctcgttactgttaaagtcaatgaaacatgatcttctgggattgccataacatgggtctagatggagaggctgttgaaaattaagttatgagcatagatctacaatggtgggggtatcattcattgctattaaatttggctgtgctggggctttggtttttaccttgaaatatatttttttttcttcgtagcatctcgagggtcacagtccaaggctgtccagacggagctttttcagtaacctgattggaatcggctgcctacctcatgagaagtaggggatgaaattaggagggattcagccataagtatccaaataatctaagtcttaggttgccttataccaaattggaatgcatttaggtttcaatgtgttaaatcttaatagaggtatttcaagagctttatagatgtttgaccttgttacaatactttcttataatctttgcagatgtcagccctaaaatctgctaacaaggagctgaaagggatgatgaaaactgtgaagatacaagacatagatgtaagtaacttctcatcaagaatttccttcctttagtttttttcttgctctgaactctatatattttacttgcatagaatttgcaagacgagatgatggacctgatggacgtcagttcggaaattcaagataccctgggtagaagctacagtgttcctgacgatattgatgaggatgagcttttgggtggtaagataattataaataaaaagctatgtagagcaatctcattgtactgactaacaatttcttgctggttgtatttgttgcttggaagtaaaatccttagaaagctgctagggattatgctgtggctgtattgaaacgtactctagattgcctcaacaattgatagactgccttgacgattgataatatcattttttttaatagaatagaataaaaacatacttcttcatctccctgtgctgattatttaccaacttatctgaataaattttatttggtgtatctaaagcatccactttcatatgactcacatttcttgttatttcacttcatctttagaactcaacttccataaatactcttataccataactatttcacgtcgcagagcttgatgctttagaagctgatatgggaatggaaactgagtctgatggtgtgccttcctatcttcaacctgataaggaatccgatttggatgcagagctcaacttgccttcagcaccgatgggatatgcaggacggtcaaatgcacatgtacgttggctatgctatagcagtagatgagtttgtgtgtgtgtgcccctttttttttagtgtttaataatttttctttaaatctgacattgtgacaggcggatgatgaactgggtttacctgctgttccacgggcgtcccttcgtgattagtgaaatactgattgattatgtaatatctacatccatttattactggtggcaagctgcttcgagggtagcctttgtaatcatatttgtgcagaagtgaacctttgtttcgttttggtattcttgactcttatatttagttggctgtgtcatccatgtacggtgttggtttatcaataaatattacttggtatatttggcatagaagataaacatagaattgtttatatttgggactcgatatacttgctgtgtgtactctcttctttcttggttcgaaggttttgtgtctttagtcttttaacagtcgctctacttcttgaagtggcttaagtgatcttttaagtaggtaggaacagttcatccatatttataaattaaaatacgaaacaaagttcattatgaaactaattatgtttgtgtcactaatgatatgggagattttgctgcatgtttaatttctataaaaactgtatagattatatttgtagctaatcttttctcaataaactttgcttctcttaaaaaggagacaactaaacttttatttgtcactatagtttttttttttcataaataattttaagctacaaatattaacttatcaaggaataaaactgttggactagaaagttaaattgcctaatcaaagccttagattttggctatgtttttatttttttgctaatacttttgctttttaatttt

SEQ ID NO: 272212 - DNA, 734 bp, Cannabis indica
cccagatcaaaacccagacagagacctaaactcgaactgagactaggactcgaacccgaacctagactgggacccaaagccacacaatattgggacctggaccaagaatcaagatagggacctgagaaacagaactaggacaaggacccagtacccgaccatgacgcgaacttgaacttaggacaaagctcgtgacccgacacaagaaatggaactagactgggacccgagatttggatctggatctggacccagggcttggacatagcccgtagtcggtgtctagatttgggacccagccctggacccgaaccctgacaaggacccaaacccacacccggacctaaaccaagtcccaaacccaaaagtggacccgaacccgtacactgtgacccaaaattggaaacaaaatcgaaagttgaccaggactggaactagtatttggacttggaatcataacttaaattggacatagattcagaaccttaaccagactaggactcggactccaaataagacctagacccgaattgggagccggacctgaatccaaacccaaacctggactcaggacccgaacctgaacctcaactcatacccaaacattaaactagactagggacaaagaaccagggtcgggacgtagaactgaaccccagtctcgatcccgaaccaacactcaaaaatgggagctgggacctaaaccagaaccagaccgagacccgtgacagtga

SEQ ID NO: 272213 - DNA, 6033 bp, Cannabis indica
ctctatttgggggattgagaactatgtgcgtcattgcaagctcctctctacttttatgactaattgtaatttttcttgtatagctagaaactgtaactacacggtccataatatggccaaatgggcgtttgcccacaatattacgggcatgatagagatatctactatacctgttaatatttttttataatgactatgagttctaacttaaattatatttataaacgcatttttcaagaaaaaaaaaaaaactaaactaacactgaaattgggtttgccgttggagttgttgggttggcctaagaaaaatttaggcatttggattggattagtggtttaaaacaactctctttctctctctttttctctttaaccttacgaagaagaaggaaggaaccctttctctctctctcactttcgattttctctaactccaaactccattaacggatactcaaccaaataccttttctctcattccattccacaaaccacacgtttccacttggacttgggactggcatgcttaggaggaagaagatgaagcactgcttcaccttcttcttcaccatcatcatctcctcttgattcatggcttcttcttcacagcatcgctgcgttttcggtactttctctctcgatttatgcttctgtttgtttctccacaaatgtagaggattcataatataatgagtttgattttaggtttttgaaatttctagagtttttccgtttttggttgtttggttctgattttagggatacgtgttttgtgtgattacagtgggtaatataccttatgatgcgaccgaggagcagcttatagaaatttgtcaggaggttggacctgttgtgtctttcaggtgtgtttttcagtactcaaactatgcttcgagaaccctaggttttgaattgtttgattatagctactataggtttagcattttatgttttatttgaaccataattgccacgaaaatttcacttgtttatatgaattaaggaaattgagattgggaattgggagttcttttgtttgtttattgatttccattgaatgtttcaaaatagtttttcttatatgatcaagtttaagaccttgtttggctggggttcattcctgataaagctactaaagcgttaaagagctttttacaactaaaagctgaaactcacatagctacccaaccagcaatagtaaggctttcggagcttctaaagtccaaaagtatcttttagaagtccaaccaatctgggtactagtttcaaacccatagatttgagggtcttactttgtctgaatttttcctttgtctccttttgattcagattagttattgatagagagactggaaagccgaagggttatgggttttgtgagtacaaggatgaagagacagctttgagtgctcgacgtaatcttcagggttatgagatcaacggccgtcagttgcgagttgattttgctgaaaacgacaaaggcactgacagaacccgagaacaggtgaagtgtgaactgtcctagctgcaaactctgtcttctttgccttcaaattcttgatgtcacttgcttgctactcctgctcctatatctggacaatctacatgatataccacatttgattaatctcttttgtgcctaacttaatcttgaatgctacagatactgtactttttagatttgtttaaatgttgtcttgttgtaaacttgaaccaatgtttttcactgcagggtcgtggaggacctggactggctcctagtgccggttagttttatatgtttatctttttttttccttttctgttattgatttgagttattgtgttaccaataccctgaaacaatgctatgtttttttcttatggataaataaaagatcttccgaaaccagtcgggggtccctcaattcaaggggactctgttcaacatcaaccaattggtctccatttagctatatccgctgcatctgttatggcgggagtgctaggtggttcacaaggccagttggcattggctaatgaccccttaagtcttcacctggctaaaatgtcaaggagtcagctgtatgaaattatatctgatatgaaggttggcagctgagcaaagtcttaatctctaatgtctaatctctgtttttttttcctaaagaaaaaattgctcatgtttttgttctcttggcagttaatggctacacaaaacaaggaattagctcatcagctgttgattgcaagaccacagctggcaaaagctctattccaggtacttgttttttgttttctaatgaattgattactttcttgtctaataggatggttaataagatattgtttcgtctcactctttgataaaactctcactttaaagtccttatggttatggttgtttgttcttcctttttagtttattttttttctttgatgagagtttgttagtagtatgatttaggaattatagaacgaatgattagcaatggcttgggtgtcaaggaaattgaaatttaatttccaaaagttcccctccaaaggtatactctgaatatatttattgctcccatttcattaatctatgttaaacgataacaatttacacttggggctgtagctgtttcctttttgttaattaattattaatgatttcttgataaagtgtcatggtgatgttagttatatgaaaatgattttgcagattcaagctgttttttcttgttatgtctattattcacaatgtacaaacttaaaaaataaatcattttctttctttgcaggcccagatcatcctaggaatggtgacgacacaaatggtttgtttcaagccctaaattattttcttagcatgttcagtcattaactgttagtatgtaagaaatgatgtttcattttaaatttgcagttgcaggcaccaaatctcaggcaagtttcgcagacaccttttcaagatagccaggctggtcaactaccagccgttcaacctcactcgctgttaccccctatagcgatgaataatatgcactctaatttgatgcctaaagttcaaggtcaagtttccgcagggcttcaaacttcaattcatagccagttttctggacctccacaacttcctatacagcatcgagtccagcttccccagaatacaaacgagcaggcttttcaacaggtcgtattgcctgggcaatcattagtttcaccttttcctcctcttcaaccccgctcttcaagtagtctttctattcgaccaacaattcaggttacaagctcctctttgaatccacagatgcagcggccttctcttaaaaatccaggacaagttgtaacttcaaatttggggcagaatattcaaatggttcagtcaattgctaacatacagccatcgcttctaccacgtcaatcattaccggatggaggctatcaggtgctttattttgctacttttccttattatttgcatgtaaataatgaaatgattaatttatttcgttggaagctactttatcttcaaactattgtctagttgcattttcatttttcattttggcgggctttgtgggtggcaacgggagaaggacctatttgcattgtttggtagaatgtcgagagctagttgagctgagtctgcttccattgttttttatattctcggtgttatctagtattttgtttatagtgaggagaattatatttggtattggctaaacaaatacggcacactagtagtgatggcaaggagctacggcctttcagttcttgggtggttaaaattttctagttattttaattataactaatgtaagtgtaatctgacttcctttatgttaacagcctggaccctcaatatcatcaggtatttcacagccgattagtaatgttgataggtctgctcaagtttccgccgatgcaacttgggcccgcagaggtaatattaatcaaaatttgcctctggggatagtggaaaaaaggagtatgccttccgagccaatggacttgataaaccacccttcaaaaattaggaaactagatgatgggactgtaccatttacaaacttgaattcgaataaaaatgtcaatggatctacaccatcccaagtttcagcagctgcttcaatacttgcaaatgctgttcctatttcagacgatgctcagcacttagggaaacaaatatctcaggtaatctctccttttagtccgtcactaatttagtcatcccgcgttttgttctacttttctgtgctgtgaatttgatgggtctcaaaacaccattaaataatgtgttgttctgttattgttttttctctctaatatcccatttggaattctgattttgcttataatgtcttaagagtttcattggcattcattttcaaaatgggatagaacataacaataacattatttatcgttggtatttgatgataaatgtagatggattttgtaccgaaacagatctgacatcataacttttgtttttcttcttcttctttagccgcagcagcttccatcaggggaagaggctgccttattacaacaagttctgaacatcacgcccgagcagttgctttcattaccgccagaacagcaacaacaagtggttcagctacaagaaatgctacggcgccaacaattacagccgtcttagcgggattcaattagaaaaataaacaacatttgttgattatcgacgatgattatgatgatggtaaacaaatagaggaggcctcaattcatttactggaggtaataaagctttatagttgattaaatcccactccagtttcttgtaaaattaatagtagcagagataaatttcataatctaaaatgccaattgattattatgttggttagagaaagagaaagaagcttgtgattaacatagtttctggatagtttttattttttgtttttaaagaggaataggaaaatttttgtgtaatctctagttgtcagttctttgaaattttattttctcatagtttgatttccaagttttagttttactttcagtgatttttttttttgtttgttggactctttgtgtgttattgaatgagacaaaatgaataattaaagtctgaaatgtctagttatgtgttatttatttatttttgtttgtcttttaatgaataattgtccaataacagacttcctgttttagcaacgtgtaactactcaatcaagtatacatatagaaagagtttaggcacatggcttacataactcgcttaacaccaatttgatggtgtttttttttttgtttaaaaaaatattaattataataatataattatatatttaatcattctaagttaaaaaaaaattatatttaatttttcttgaaaagaaattaaaaatattttaagaaaattaattttttttttgcaatgaataatttcattacaaatataataacgtcctagaggctagttatgaatactatacatcttatgtttaaatgaatattatttttactaggataatcaaaataatactatacacccaacaaaaaataaggatattcatatctagctaaacaagttatttattcattcgaagagcatgtacaactaatccatgagcaacagagattagggaaatcatttgagcgagaattctaatagtaaaagcaatcatagttgtaaaatctttgtaatagactgtaatctattgtcatcattagcaacatgcaatttgttatagaaacttgctatcatttctctaaaagcttgaagggacaatgatattttaattgcacataaacaaataatatattagtgggacgaaaattaaaataatgagtaattaaatattattgcaaatttatattttattttcactataaataaacaaaataaacactaaaaaagaataattaatatttttgtttcctaaatttttaacactacctgctccctaaaataaaaaagttacataattatgtatctcctattagattttattttttaccgttaaaatttaatatttttatcccctgaactttgactaatacaatattttgcccctttttattaaaaaaaaataa

SEQ ID NO: 272214 - DNA, 526 bp, Cannabis indica
aaattgtatacattaaactataaacataaaaactacatgtaaacataaatgacttctaatcttctattgataacaaatcagattatattgaaatgtgttttatttagggcataaaatcccaacacgtaaccatttggtgagcttagcaattgggctcaggacggcttaagcataaaatcgatatggcattgtctatgtatgttttatgcttatcttactgagtcggtcgactcatcagtttgctaccttgtgtaggtatggataaagctaagcttgaggagcagtgagataagcttggcaaggattttacatatcgcggcagtgcaacctaaagggtttcgatcttactgcattttaggttatattttgttattaccctgtggtgtaaaaaaatatattatgtaactatgtatatgatatatgtattttgaagagcgattttagactcaggatcccgacctacgaggtttataaatataataaaataagtttttttttcgaaatagtcaatttttaaatacgagca

SEQ ID NO: 272215 - DNA, 940 bp, Cannabis indica
ctatatgtatttatgaaaaaatttaattttacttttttttcttggattggatgaatccagtctaatccaatacatattggacctaaaatatttgatggatccgatccgttctaaaaaaattaggtctaaaatattagataaactaaaattaaaccaataaatatataagaaatacatccaatggatagaaccgatccaatccaacatccaataaatgttggatcgattggataactaaaattaattggatcggatcggatgataaaatctatcatctaatatatagttggatcagatctggataggcctattgaatgtggtccaataaacactatagtttcttatatattgcaagtgtccacataattttatatattaaacttgggatattttcacaaacatatttttcgattttttattatgaaatgttgtggctacgttgtacatatacacattttttgaaataattgaatgaaaacaatatagtatatagtgattttcacgtgtcaattattgttttaattaatttgaagtgagaccaaaatgggatacgaatcttatcaactcttccaccatgaaataatataatagtaaatttcatcatctttctgtcttttagtaattatataagatcattcgttaaagatgccaaataatttttattttattaaacataaaagttgaatatattattattttatttttttattttttttaaatgcggttattaattttctatttatttttttaagaaaataaatacatcaattgcaaagataaaaaaacattttaaattttaattgcatgcacaacaaatttataagtaaactaacaataatttttaataaagatcctaattcattaggaaaagataaatgctttgactttgacaggtataaaagagcaatccaacacttccataaaaattaaaaataaaaat

SEQ ID NO: 272216 - DNA, 736 bp, Cannabis indica
aactacaaatcacctacatatcaacaaattgtattacaaaaattactcaattagaaatcaaccccaaaacacatggatctaataacaagcatatataataattttttttcatggtaactctaaaatatttttaacaaattagcatgatatatatgtatatatgttaataggtatgttaattttaaattggttctaacaagcatattaacaaacacattatatacaagcatattccagtatattttaagctataacttaaacataattttaatcacccaattgaagtaatagataaaaaattataaaaataaagataatttaaaaggcaaacaaaaagacccattcatcttttggatctaaaatttcaaaaaaaattatatatgtatgtgtttgtaaacacatgtaaaagagtcaataatatgtgtttgtagacacacataaataagtcaatgcatttgttcattcctaccattatcagagaaagaataaataaatcattcaatatatattatattttttcataagtaaagatgcaaaaattcaagtcaaatggacgtctatttctcaaactggtaacattggcagattgttgatggaggccctagctctctttctgtttctctttctcagctctacggtctaccctcatcactctgtgccgtgagctcaggcgaatcccatccccgaaatattcagcctctgaaaatcctagccatgttctcctctctctctctct

SEQ ID NO: 272217 - DNA, 1803 bp, Cannabis indica
acaaatagcatgtatgctagtaagctactatggatactaaactatccagtaggtcctactaatatcaccaaaaaatatataaataaataaaaaacccccaaaaaccaaacttttactagaaaattacaatgccaatttgttgttcaaaaatatcaaacaatgctacttaatacaggaactttttagctgcattcttttaaggacattatagcacattaactatgacaaagtagactgaattaaatatatatttattctaaaattttgcccttttcactcttcgtccatatttttccttaaaaggtctttaaaatgctaacaattatgcttgcatttcatagctgcactgaaagacccaaatgcagaaaatggatacgtacctgaatgggctttgcaaaaccttttgaaccaattggtagttcctgaaactttcgtctttggggaagccgtttctccttctcaaagttggaattgcgcagcatagattcatttggttctgatattgtgggggaagcagtagaactgacaggacaagttgactgtctaagtgctagagcaacttgttgcaaaggtgtggcctgaggatatatcccacaatatccactatagcttgttcctccagataacataggcagggaatggctaactgggtctacctgagactgaccacagtttaacaaccctccagattgagatgtcttcccttgaggaaagacagaagtgatcccagcgatcctaactgaggaaacgggagatattggagaaacaaccattgttgttgaagtggtcaaaccagcagttgagcttgtacttgcttctaaattactcacagaattctgaattccagccaacaactgctgtggtgggggaacagcactgtatacctgctgtggtggtggaacagcactataaaccttagaagaagaaaccctgtaacagcacaaaaatgatcacaagttatcttctatacatggtataaataaatatagggcaaaaacaaaatgatagccatgagcaatatctttgtaaaaacccaagccattgaatccttgaaacataaatttagtacccacagaagagtcactccgcagtaggtgaaccagatacttgatgaaaatatattagaaagacagctaaatgctttatacatataaatacaacaaaaatcttacacacaatgctcgatgttatgtgaaatgcaccttactgaggaaaatatacacaccaagcttaagcccatgcaatgatcagaatacacgaatgcattactgatttgtacaagatgctaacctggaaacaccacactctatgctgatggtatccaaaaggttttctgacaaacgcctagcatcttcaagacttttagaactgtggcttgacaagaacaaatgcagctgttgttgttcttctagaaggaaaaaaaaataataaacactagttaaaccaagtataataggtccagagcaacagtacaaattaaagtcatgagttagcaccttcaataggcaggcttccattacttcctgaaccacgacctctgaggatgaccgtagctcctgtttcattcataatgtgatttatatactggtcctgtatgtacaaaaccgaaccaccaccaacacaaaaaaaacaatcctcccaattgtatggagatgtcagagaaagctccaaagattagaatctctcatcttcatcatgtacattatagctataaaacataatatgaaggaaaaatgcaggaaaatgcaggaaatactaaatgttacagacagccttatggcagagatctcaaacagtgtttga

SEQ ID NO: 272218 - DNA, 744 bp, Cannabis indica
cagtgacaaaaaaatactaacaaatagtttcttacatatacacattcacaatttacattttttagttgcaattaagctgcatgttagttggcgcaacagatataactgttgcattacaatttaaacaacacccacgatccatgcttccaaggattgaacattcgtcaaatgcaaccttcggccaaccatccagcaaccttcgtttgattgaaactttcgtgtgatgcaactttcgaacaatcacccaacaaccttcgtctgattgtgtaagtgatagtgtaagaggtattttagtaattaaaagtacataaaaggtataaatattgtccacaccttatgaaggtatttttgtaaataaagtgtaaatttttatttttcatgtaataattcctaaagaaaattagtataataaaattgaaaaataaataaatttaaaaggaagtccattcatagattgtagtggacagtcaccaggccaaatagtttatggagtgtgcaatgtggcctgcgcccaaccccaaccctaacaagcaaagagagttgctttctctctactcaatagacttccatgaatagaacttgtaggtggaggtgcacaaaatatgtgccaaaccaactaacttcgccaaccaaactaattttttgtagtaaaaggttacattaagagtaagagtaggtcatcataatgcacaatataatatggcaatcaaagaagtcttagggtctctctctctctctctctct

SEQ ID NO: 272219 - DNA, 1648 bp, Cannabis indica
ttaaaaataatttataattttatcaaattgttggttgtaattattatttccaattttataaaaaataaatataattttttaaaaataattgtaagaaacttaccataaaaggttattagattgttaacttattaatattttttagtgtccatcaatgggtattacctattaagaagtgttccatatatattatatttaaacacaatacaatacggcgtaccgaatgagctttagtactgagttttactttattgattcttttatttcctttgaatttttttatttaaaataaaaatcaattgtgtttctgtataaaaaccctcataatattgtaataaaggacagtaaatacctccttttccatagaaaaaccaacacaaacactggtcaatcaagaagatcctcatctttacttatattggacagatgactagaatttggaaggtatattattagctttgtttgtggtgacaattaattcactggattgattccgaaaatgacaatgcacctttggaaccaaaggtttctaccaagagaatcgattttaatgacttaaagcgaactgatgatcatattattgcatcttgaaatacagaatttaatttattttacttttgttatgatgtgaaagaaaaattggtaattttgcaagaacaaagtggaatttaattaagaggtaacacaattgtgccagcccatcagctttctgtcttccccagctcgttgtcccatgggctttgactggcacccgcttgccaaagctgctgtatgcctcccctgttcttcccacaatcactcgcctcctgtaccattttatcacaaaaatctcctgtttttttttggaggaaattatttatatttattttccttttttattttaactagtaaaataataccgggtgattgtacaatgcaccctcttaaaattgatgtattgatacacactctacttgtttcagcatctagaaaaaaaatttagtctaatttttttcatattcatgtacgttatagctatttgagatatcctacaaaattttaagaaattcggaataatttacaatatagaaaataatgttcaaacagtctattttacacgcgtataaaaatgttatttgcggcaaaacccctaaacttaacttctgttagcagttagccctttctgtccatttttagatgttaagtgacagttagcagctactctaccaaaaatagttgcattcaatatccattaaaaagagaaaaattttaatcaatattgtactgccaaacaataatggaaaaggaaatcacttaaacaattaaataagaagattgagagttcatctaatgaaagataatttgttgatgcataattcaataataatgttgctgagagtaagcgatcatttgaaatttaaaacttgaccaactttaaaaaatgagccttgaaatcaagtttatgcagtgagaaagtaaaatagaaagtgtaggagagcaaagtgggttaggtaacgaaaaatagagatttggtggttaagggagtgagtattttttttttttttataaaatagaagagtggaacgtgtgtgagaaaaagagaattatattctctgtgcaacaccccactaaataatgttgttaaattagatcccccctgtcacactta

SEQ ID NO: 272220 - DNA, 1187 bp, Cannabis indica
cttggttctgcgaaagagaagggtgatggtcctgtaaagtggctggagcttgaggagctcgacatagacgatgatactctgttgacattagatttagcaagtaaatttccggtgagcagtgagtgggtgattttactattttggataaagacatcgttgtgagtggttttctaaagctcatatggcttttgttcaggatttaattgctcttagtttgtatggaaacaagattgagaatatagatgttgtggtccaagaagttactaagctcaaaaacctaagagctctctggctcaacaataatccggttgtacaaaaacggtatggtctatgatacgaagcttttttttttttgtctttaaaaaaaaaaatgaagttttttttccttttcacttcagcggagatcagttgacagatagagttctgcaagaattgccaaatttggaaatctataattcgaaattcactcctaattatggtgaatgggcattggagtactgtggagatgtatatgacaaggaaaatccaggaagcggcagacctcaagatgacccttcactccaaagaatcacctctcttgacctttcacttagaaatattcacaatttgataaataaggttccaaatttgaagaactgttttctttttttatctctatttcatgttccatttttcttggtttttagatatttcaaatgcagatagatgaatatatattataatcttatctggtagacaatactggttctgactggtatgctccacctaacttttttgcaggcattttcacctcttcgctttccttctctttcatacttgaatcttcgagggaacccgttagaacagaaggcggacttattacgtctcttgaatgggtttccatgcttgcaatctttggaggtaagttgaattggatatgatattgaagggtgtttataaacattaatgtttgaggattatattacatagacttgtttttttaggtggtatattcctggtaccccttggacgaaacggctgtggaaatccgttgattcgcttcctaatatcttggtcctgaatggtgttatggcatcaaaaaatactagaagatacaaaaacctgtgtgatacaaagctacaccaacactcttcctgtaattgctgcggatgaacctcttgctgatcgtgtttaaatgcaatgtgcta

SEQ ID NO: 272221 - DNA, 935 bp, Cannabis indica
gggaatgtaaaaaaaaagagaagaaaaatctctattttctcccttttttttacatttagttttttacctaaattaaaataaataaataattaattttattacaataacaactaactttaaaacacattcaatttatacaataacaaaataaatacataaaataaataagaaagtatataaataattggtcattctgggaaacacgacaatttttcaattcccattgcgtacaatcaatgtttcctaacatgcctaaaaaatcgcgcactttatccttttgaagtaagaaaatgacttctcgttatctaaaatattcggtccttaaaatctcattcaccattctaaaaaattaactaggtaacaatagtagcggtttcaccaatttgaacatactcgtcaccgtaatcgataggtgctccatatgccaacatacattcgcttagttgcaatgcacttttgtaatgtcaaaagccctcttctacttaatatgaatttggacaactcatataattaaaaataatatgatcattttgataaaattatattaatcaaatttaaatttaggggtaccaaatatgtatgatattagctatagatatcaaataataattattcaaaacataataaggtatcaaactagtaaaatagttctataaattttgcgtgtcacgctagtccgacctttattttctttattttttaaaatatgggttgtgtcgtgccctaaaaaaatatggatcgtgtcgtgtttgttgattttgcggtactaaatcacttacacaatgaattaatgtgaaaatcatgtcatatataaaatgaatgtaaaatttcaagtgcatttggtaatactttttgaatcaattttttccttttttaatctatttttttaaaaaaattgaaaactgaaaaatttttcaaaatcatgttctatataa

SEQ ID NO: 272222 - DNA, 646 bp, Cannabis indica
ttgcgatcgcctatgtgagtcttaagatagtaaaaaccctctgctccattcttcctcactagagcagcgttaacaaagtaaagatactctacttccaagggagtggggcactcccaattcaagatgttatataaaaccctcaaacttgcaaggattctatatgaaatgggattcagctggaatggggcaagaccgacgtggtttatgaagtccttgaaatagtcttgccgggggattattgctgcagcctgatgtgctcaaggctccaagcacctattctagtcgagccacttgtatcggtctcgctagtggccccttggatgtttgtcttgtgatttgcacaggaggatagcaactgaactcaccggtacacaccgatctaacccgacagtgtcgcctgtattcgaccccacaagccctcatggtgttacctacatagtctctgatggctcgcacctttgactctattagctaagcctcgaaggtgacattagggtcttggggagtctttgatttacgtgtcttggatgacataatttcaaagttgaagtcacctggttcaaaagcaattgtgaccttgggtaaaaatagaggcttagttaaaggaatagaagacacattgggaggattcaggccaagcagcatc

SEQ ID NO: 272223 - DNA, 520 bp, Cannabis indica
ttagaaacagaattcaagatccatgaaatgacaatattattattcctaatccatgcattatatagaatgtaatcagatggcataggtttaggaatagatccatccaagaatccaagtttatttttcacagagattgagagttgcattgctctactccaggagacatagttgtcttgcccagtaagaagttgtgagacaagtatgttacctggattgtcgccgtggtgaaggtagtatggattcgttggatcctcgagtggattcttttgattgatgaactggagttcttgatttccatgaccagtagaagctgatggactatctgcagatttcgacattggttcttcactttccatttgagttgtggaaggattatcattcgacatgaatgacagacagaagaacagagaaggaggcgcggtagaaaggtcgtcggagaagatcacaaggacacgacgctagtaccggagaagatgaacggaggcgattggatcgattcagggaaagtatatctttccct

SEQ ID NO: 272224 - DNA, 933 bp, Cannabis indica
acactacggatgacttttttcctgttctccatggagcttcccaataagttcttataataggaaagaaatggatcagttacctgttcgggctgatcagttcgggttccatcttgctgttcaatagaccagattttattctatcttcttctatctcgaaggcttgaatggaatatcgaagtgttatcatccccgtttttcacccaagagaccttggctttctgctgtagcatggataataggtcactatgaacctttcaaaattgatgtcgagcctctaattcctcctggtgcagcagcaagttttggggttccatttgcagcttattttgacacacagccagcacttctttggcctttactttagcaacatgaagctcagaaaaaccttgcttcacaaaatattattcagccattacttgaactcaaatacaagtagaggagttggaactgaaatactagggggaaaatcattgttcaagataattggacaagtgggaaacccagtgatggtggattcagttactaaagaaagagacaagttaacctttcctagagttcttgtcgaagtttcaatgaaccaagagttcccagacactattgagtttgaagatgagtatggaagtaatgtagaagttgcaatcaagtatgaatggaaacctgcacctctcacttatatttctgggatgtatagatttagttcatgcactaaggaatgaacaacctgcacctctcactaaggaaaattccaatgatgagtaaaggaaatttgagaggtgggctcgttcaaatcgcatgagtctaatgattatgaaacacatcattcactactacaaaaaactcttttaatgtcgcttttttaagtccaacaaaattattgttggacataaaaaaattggggagttttctagtctaacattattagacttaaaaaaa

SEQ ID NO: 272225 - DNA, 1030 bp, Cannabis indica
ccacgcacgcgccgccgctgggtgtggtcttgaaggttaaacaccgcatccaaattgactctgtaattttgaagaaatctgggatttggtgtaataatttaatacaatgaatattccactcattataaagtagggttagtttttttaaaaaaattaaaaaaataaaaaaattattaaataagactttacgcttatcttatgatcttatgatcttccagtataatttagtaccatttatatgaaatataattagagcaactaatttcatgtccaagtctacattgactatatcaaccaaattaataggaaaatggtacatctattccttaaagttaaggaggaccatataattaatcaataatcttgtaagaaatggtcagtataccttgtttatagaactgatcttattcccactttttttttcatgcacgtgcaccccaaacgccaatacattttcttttctaatctttgatgtattcctctcacaaatgtccatatagacaatagcatcaaatttcattacttttttctttttttcttttcctttacatgatcatttggattgaactgagcccattatgattccttttactgaacaaatggatgagttttttggtggaatggcgggtagattcagagtctccataacagattcaaccatgatgagaattgttcaccgcgcaatgaacaaagctcataagagagttaagtcgaaagaaggtgtgatagaacggttgaatgagatatccaagttctatgaattggctgtgatgcaattagaagggtgcatcaagtttgtacaagaagagccagacatttttatcctcgagaacaatagtgaagaagatgtgcttgctggtttggctgagattagggaccgactcagaggtcgtctaagcgaatcagagatggcgattcgggagaaagatagagagctcactgagagattagatagtgagttgaagctaaggcaggccttggaggtaaaagaaaaggagttggtctctttgcgtgcgaaactcaagcttga

SEQ ID NO: 272226 - DNA, 1107 bp, Cannabis indica
ataatatctttaccaagatcaatatcctggaaagaacataatacttatccaaggtgtaagtaagctttattgctgaccatcacaacaatgtaaatccagtgcactaatgaatcatgggacattatcttttgaagcataaccttccactgtgttgactgtaattgtgagtcactatatgttctggatttaacagaaattgtatattaaaccataaacatgaaacttacatgtaaacataagtgacctctaatcttctattgataacaaatatgattgtattataatagattttatttagggcataaaatcccaacagaaatcaccattaaaaaagcttcatcacacctatacacaacttaattcaccatgaacaagagaccattctcttttcttggcttctttattataattgttcccaagaacattgatgaacattacatttattgttgagtttgtggatattttgtctcccatgagccgctgttcataatcgctgacatagatttcacctagaaataattttttatattaatgtccacacactcttaagaatataattctggtgtgttggaaacaatcagtaaaatataaagtagatgtagccccattactatcgcgacatgggggtgaactactataaatcctggtgtcttccttagttttttgcagtttttattttgcaaaagcctaattagcgtagtcctttaattttttacaatcttattagattatttgacaaaaaactgcgtcaatagtttggtgctttcattaagagcgctgcagtgaaagattttattatttttctctgaaaaatcaattaacttaccattctcccaacaatggtgagtaccagaagaacaaattttaaaagagatattgaagtactaccaaggggtgaagttaatcaaccccttggtgaaaggaaaatttattccttcacaaccatgtggagaagaatcctcgcgacgccaagaaaattgtcccatgccacctatagcagatgataagggaaaaatccaagactgtgaaagtttctcatccctatctaggatgcgtccactaattgatccatgcctgtgcatgaggtgtaccaagagaatgaggccc

SEQ ID NO: 272227 - DNA, 949 bp, Cannabis indica
tttttttattattattttaacaatcaaatattccatttaggttttaactgcaagaaatattcatatactataataataataataataataataataattgatttttttttcattcaacagatgccccctcaagcaagtgcgtgtcatttatgtaaacgtatcttgcttgagaagtttttttatttattattatttttttaacatactgattttttttgcagcatgtctacgttcggggctctaggctctcaaagagctcctgatgaatttgggaaagaagtcaacattggactgcattatcatcgctctatgtcattaatagaggttcaagcatctaataaccaccaagatcctatttctctttttaagatcgaggatgtcagttcaggagacttgagataccattcttctgatgatgataacattgttcaccatttcagaggttatggtgccattttttcgagcaaatttcttaggagatgttgataataaagaggatgggaatttgacttaccaagtgagcaaggatttctttccatgtctttaccgttacttaaaggataagaaagtgcataacgattttctcttttgggggtgagctggttttatgaggtgtctcattgaatggactgatcaagtgttacttcaacaccaaggtgtcttaagtaaagctgggatatatggtgctatttctgtatctaggtacccttttttatgggtttttcatgtttggcgacctttttcagaactttggggtcctctgtccaacacattccatcatagtagtggtgaaatgagtatttctttgtatgacttgaaggttattggtggtttgcccattttaggagttccttatgaagaatttatccctcttaatgagaaactggtgagcggtgatccatgttattctactactgaagagcttttaaggatccatgctcacatttgt

SEQ ID NO: 272228 - DNA, 1489 bp, Cannabis indica
ctatcaaatctatgggcaatgcgatctacataattccaaatgtaaaaattgtattgactatccctaaatttaactaatgaggtacgctcggccctaagtacaatcagagactatccacaagtactaggtttattacctcgggaggcatcatcttcagcttctctagtggattgcttgccgctgagaacaatgtaggtcttcaagttatttttgtgcaacaagaaattagctactcgcagcctgaaaggaagaccaacaaggattttgtgtttcctttcaatctcgagagtcgcaataggcctcctcataatcgttgtcaaacaacataaataaaataagtaaaagcctacatttattgaatataaaactcgaaaccaagttttacagttaaggcaatacttaagtattatgcgaatcacagttgtgtttatgggggcaacaccagttgtccaaaagaattcatccttgaatttatttttatttagcaacctgacaatgatctttggatcattagtgtgggtcttgagatagtagaaaccacctgctcctcgcttccttgcgggacaggccttcactgagtaaaaatagaaaattttgagtggagtttgacactcccacttcaaaatatgatatacaacttttaaactggacagtattctataagaatttggtaccggctgaaaaggaggaatgccaaggtagtttcagaactccttgaaataatctttgatagggaatactgctccagctcttatgtgttcgaggccccaagcacctgtcctagatgactcgcttgtactatagccttcttctcgactcacacgctcaagaggaaaacaactgaactcttctggggcaacagacctaactcaacatccttgcccatatttgatgccacacgatttcaatacctctcgaacataaaatcctatggatctgactttagactcaattagctctgcctcgaaggtaactttagggtcttgagaggtttttgatttttgagctttcgaggccatgatctcaaaatctaagccacctagtgaaaaagtaacagtgactggaggtaaaaacaaaggtcttgttaaaggaatatcagttaaattctagagttcaggccagacaacttctcgcaaaaaatggcgtttaccctcagttatttcttacaaaaattgcctagattgaccaaagattttgtcttggttggttttaataagatgatccctaatctttgcatcgtttaattcaagaatagttttaggtatgtgtgttttgactatgaatggaatggcagaggtttgaggataatctgattctagagattctaagattgtaatttttggattgaattgggtcatacttatagacaatactatcccaatttcagaaaattaaaacataagtttaacctaaaaaacctatgaatcgaataaccttaatctttcaaggcctagaattatgcagacaaacaaaatcaaaattacctaaa

SEQ ID NO: 272229 - DNA, 5653 bp, Cannabis indica
taaactaacaacatcagaagaaaacattgctcctcggcagttcaatacaaataagccaggcagtagcattggtgcttctaggaacttgattagtaattcaatatgtaattttgactaaaaccctactaaagtccattcaccaaaactactctgcatgctcaacaaccatgtataaaaatgtccacctggcccttttttcatatttctcaagaaaaatatagcaactcattaaacattataatcaccttagaagaaatatgaaaaatggtgaattcggtttgttaaatttgtcaataagagcaccacggtcactaccagatgtatgcccatccaaccgaaggtacagatactgtttccagtgaagatattcctccataacatcaagtagtcgggtcatggtggaaaagaaaagaacctacaagagataatatcccactaattttaaaaattgacatcaattatgatacttaattaaaatatatatatttttattataaacatactctatgatctgttgctttgagcttaggtaaaagccgatctaacatctcaagcttcccacaaagcctaatgacaggtggcagataatgctttggtatataattatcaacctggaacataattcagtatgcaagaatatttagtagcaaatcaacatcaggttgggactcaaaaataaaactaaatgtcaggaaaatgaaaaaaagaacactaaaaaatcagtaaaaactttggagagcttcattatccaatccattaataaacaatttctcctacttataatcatttagtttataaaccatgttgttaataaacatacctcctccgcatgaagctgactaagataaggatgattgcatatattacgaagttccataacagagttgtgcactgagcgagcctgagaaacaagtttttggggtcacataaaagaatagtgataatcccataatagcttaactaggaattattctgcttttaggaaaacaaacataagtttgagtaacaaacacctttgtacttccaatagatcccagattttcttccaccctcttcatcaaaagtttctgataagcagaagcctcacatcttataagtctctcaatcttctcaggcaactcattttccacctgccaaaaaaaatatgaattttcaaggtctataatgacaactgatttccaaacttgcaatggaaaacaatagtataatcataatggctatttaaaacatattacagaaataccaaaatgcaatcctacgtaataagtcaaacctaatagctaggtgaacacaccaccaaaaataccaaaaactcctttcctaaaagaaccatgcttcaaatccattgataaataagaccatttcattgataaccgttaattaggtaatgtcttaattattgtagttaaaaaaaaagaaaaaagagaaaggaatgtgtagactatgaagttggaaattgcactgttacacaaaatataactttaagcaccttgtgtttcagccttcgaagtacaaacggtcggagtacttggtgaagacggtttatgatcaaaagattctcttcttcggagagcaaggccttttttataatgatcaagcaataaattagaaaggcaatcagagaaagataagaagtgtgaatctaaaaacaatgtcttgaagcaccacttacttcatctgctgaattatcaccattgctttgaaatggtttattgaaccactgagaaaaatcctccgatgaattaaagatgttaggcaacaagaagtttaacagtgcccataactcatcaagattgttctgcataaaataggaaacacagactttttcagcatcacttgactcccataaaacgaataataataataataatttcatttattttttttaatcagaacatagcgcttgtattattagtatgaaaataatacaagaggtatggttgtttttaaaaaaaaaataaaagaggtatggaagtacaagaaccttactacccatatataatcaatcaaacaggaaagaaaatataaagttgctacaacacagatctaaaagcgtaagtataagaatatttacacaaagcattgccaaaccctacataaatcagagaaaggcacatttcttatacagtaataataaaacctgcgtcatcattatcctcatcataataattaatgaataacagtaataaagatggtcaacattgttataaacttatcatcaccgaaataataataactagcagggtagtcattttcaatttatcaaaaataatattaacaacaatgacaacatcaataaaagccactaacataatacaaacaataatagcaacaataaaatttaaacttgttatagttgcaggtataaaaaaggaaataagaggaagaaaaaaaagtgtcttgcctgtagtggagttccagtcaacaacaatctatgaaagctctgataatgcttcaagtcagaattcaatttgcaagaagcattcttgatacgatggccctcatcaattattatgtaatgccagtgaatcttacttaattttggtctatcatgcttgttcattaaatactcatatgttgtcagaaggacattgaatttctgctgcacaattctttccctgcaaatatagaggaaaaataaagtttatacatgccacgactcacaacgcagaaaagtaaatgcaagtgttgggtttctgtatttacttaaataatttacgcctttcctctggaggcccagagtagacaatcctattaatactaggtgcccagaagtttatttctgtctcccatccaggtaaaactgaagaaggcacgaccactagaaaaggtcctctatcattcttggtttccatcaggtaacaaatcaaagaaataacctgcattacatatcatcagattccaaacatatgaactagaaacataatgcagccatcatcggagagttctataatcaacccgtacctgaacagttttaccgagacccatctcatcagctagaataccatttaaatgattattatatagtgaaacaagccaccttaggccattcatttgatacctgatgagcagaagcaaaattataaacaaacaataatggcatcagtaagctttcccgtcaaaccatcagcaaaacaataagaaaacatgacaacaatgactatgaagtaacaatatcacagatgataaatgaaataaataaagctcatcaatacaggttaagattatatatatatacacccacagaaattcaaatctactcactctcttaattttccaccatgaagcatagatggttgctctgcaatgctctcttttatactgcgcaaaatcacatcaatactaagttatttgaaccaagcacgcacttcactatttatagcaggaaaaaacacaaaaatcttattatcagccacagaaaacccttccaagaaagaagatggggggaaggaagagagcatgtttcccatggaaaacatcaaatttattctgtttcaaataaactagtaaacaaacaggagaaggccaggaaatccaaaacaaccaacagatattcattttactaacaagaggcaaccaaaacttacaagagacgaaaaattccaaatccaatgtcaataagagaacgaaaaaaggaaagaatatgaaataaaaagactgacttagcaactacaatacaaaaaacacactatgctaagatggagatataaattaggagatagtgtcaacaatgaagatattgaagcttccatacctgtgagccatcatgtagtacttttcattgctttccaaataatgctgcaaaaacataatacagaaaaattagtgataataatcagtagtggataattttattaaacttggaggggaacttacttttgcttgatcactttcatcttcattgtcaatggcactttcacctttatcaataatgcctggagctcctgggtcatccatctcttgttcaaaccgtgttgtcatagactttgcttcctgcagcttggatcctagcttctggagatatttctctgtctctttgagaagttgcttaacacgatcagatttggcatcctattatttaacagaagtgtcaggacacgaaaacaagaataaattgtgatcttttgcaaattaaggaactgtaagacagacctgcaccattcgtaaatacccctccacatcattgatcttcaataaattaatcttctcgcgctggatacgatcaatcttctcgcgatgaatacgttccttccttttgtgaaactcctttgcatatttattgaaaactttccaccgttctctcttgaacttaaatacgtcatccagtctttccctatattttcaggtaatgagtgagtaaaacttaatctcaaaagaacaaatacttcagagaaataaatgagaaaagcaatggcactgaaaaaaataaaatgacatacttgtgaacttctatctcaccaaagaactccttctgcctctctcgtattctcttttgtcgctcttccttcattttctgctcaaacttttctagttgttttactctccgaccatgtttgtgcttcttcagtgatttcaagcgatcaatctcgggattgattggcttaaaaaaatctttcagaaaatcactgtccaagtaaaatagaaccactgttaaaaataagcccgcactttacacagtatacctttagatttaaaaataacaatacttttttttgctgaaagattcaatttcattaaaccaaacagagaaatttggtgagtataacaatacttgaatgcaagtgtaacaatacttgcttaagtatgaatgcaagtgtcatggcaattgaaagttgttgtgtggattaaaagtgttattaataaggaactggacatcgttgataaaagttagatttccctgggtggatacttacacagggcatggctcttctaaactttctcgttgtgaatatgcttagcttaacatgtactagccttaggtagcatattagcaccttatccaattttttaatttcaaatattttgatatgtaattttccagtgcagagaagaaagctagctaatatattaacttcaaaatataatatcacaaactaaaactaggacatgaataaagcacaattagactaaaacctgaattgaaatatataattgttcaaacttcaaatacccctcctccccaataaaaccagctctcactcatcatattagcaacagtaaagtccaaatgtttttatccactatcaaaaaaatcaagtgacactgtaaaatcttttactagaacattaattattaaacattacatcatgagttaaagtaattccttaaaaaaatatacaattcaattcagcagttcaaggatatagaagtacatgatacataatgcattaagggaaaactactaacctccgaagacgacgttgaagctccaagagttgcagctttttgagttctattacactttttgtttttgcagatatatcttcagaggaactcacgttttcctacataaagtaccaaaagttaagacatgggctgcactgcaaaaatgacaccccattataatttaattttatgcaggcatctttacatacataaaagtagcagacaatcatattaaatttatcgttactataagagagagagagagaga

SEQ ID NO: 272230 - DNA, 1105 bp, Cannabis indica
ttataaaaactgatgtgtttaatcaagtagagaaacttgatacattcgatcaaatgactatccatattccatttctaattttacatatgcacattgcaaatgagaaaaatgagagtcccatttctttatcagaatacaaatactacatagttgatgcattttaaccataccaatccatgatatgatacagtcataatataagataggagctttacggcaaagaccattctctattacctctttgaacatcttcttgtcaagagcaaaaaactcaataatccatgagctcattaaagttaataaaccccaactgccaccttccttggtttcacaaagaatataaattaagagcatagcatgctatggggcaccaaggtaccagacactactatgagacccgatattaaattgcaccatctcacaggagtgtttaacgcatatcggtcaaatattttttttacctttggttccaaaaccaggggtttccaaccttcagatgttgttgcaaaatactactagcgataactggtgatcaatgaaatgaacactgaaatacttctaacatgatcctaaaaaggtttttatgtttcactaagtgtacaagttgaatgcctagaagagctaaagagcttacttaaaagttcactctaagcactccaacaatatcattcaagaagttaatacaaaagatagcaaaatatatccctagttttcgaaattgaattaaataaagtagcccaaaacaacaaacgactagaaacatcaattttctttacaagtatataaagttattaaccattactacaaatcagaaagctcccaatccccaaaccgaaataaacatggacttgttaggtcaaggtgatatttaaagaacagcactttgcataactttacttggcatgttcacactacactttataatgcaaaaactgcaaaaagtggcagccatgttggatgataatgaccctttaaaaaattaaagcaaatcttatccaaactagctcatttctaactatatttagcctaactaatcacaatattcaatactaaactaatattcattatgagagagtgtggacttccacactttttaagtacaaga

SEQ ID NO: 272231 - DNA, 1400 bp, Cannabis indica
aggaaagtaattttatttaactattattagggaattaaataatctagattcatatttgtaaagttgggcagaataatttgttataatttaattaatttcctaattaagctatatgcttttatcgaattaattatgcaggctgtagttatggcctcctgttctggtgtcgtttccccagaggttgcagaaggcaaagcaatccttgcagctattaagtggattcaagcgatccagctccctgttttgactattgcctcggattgccaaagtgtggttgataaaatttatagctcttattgtaataactctattcttaatgatgttgttaatggtattaagaattcattgttattcagttctaatctgtctgtgctttatgttccaagagattgtaataaaacagctcattcgcttgccaaggttggattaggattagacaatgaatgtatttagaatggttctttaccttccaatctcacctgaactttgtactctctgattatatcaatgaatctcaggttttactcaaaaaaaaaaaaaaaaccaaaaatgaatttccaagtcttaattacaatattcaaattattaagagttgagttgctcttgttcgttttttttttttttttttttgtattaacagttgagctgccttgtcatggcagccttattgcaatagttactcaaaaaaaagaaaaaagtcaaaaaaattttagaaagaaacgaccaaaagatggggtcattgcataaatttgtattaaaagaaaagaattgaaaagaccactaaattaaaacataccccgccgcgtcatgaatgacattttttttttctactttaaaagaaaaagaaagaaacaagagaacaaaaaaaaaatcgtctgtgaatgatatttgttatcctccccaccattgcaagactactttaaaaaaaaaacctgactacttttctttttaaaactatattaagacttagtatcacattgctaatgtatagaaataaattgtaatagtgaagatgaatggctactcaattaattttaagatagaacgattcattttattcctaattctaaataactactttaataccccttctaatctaaatcttgttgtacattactgtgcactttaaaaaaagctttgcattattgacataaaaaaagattaattgcttcatattttattgacataaaaggaatatccacgtggtttattctttgttagacaatttatatgtataaattgaaatatatgtatgtatatatataaaatgcggaattaaattaaacatatatacactaagaataaggatcgaaataccttcagccattgattcttgagcttcaaacccacataagctttgatctgcaaaggaaattgactaccatgggtaatcgggcttc

SEQ ID NO: 272232 - DNA, 3671 bp, Cannabis indica
gcacgacacaactcgtattttttatgtcacgacacgacacggtccgtattttcttataacacgatacgacacaatccatatttatgacacaatacaggatttttgtggcaaaactctcttaacatttacaattgttacacatataaccctaataaaaaaaagtgacagcgaaagtaccttatcatacgatcttgttgcaaccgtatcctttgttggccatcaagtgtcaactcagaaacacgtaacaattttttattagactacgtattaaataatcttaagaaatatgtcgtcatgtgtttttgagttggcacttaacgagcttaattggtacttaacaaccaaaatgtactatcgcaacaaaatcgtaagaacaatgtacttttagcaccactcttttttattagaatcataagtgtaacaattacaaatgttaaaagaatttcctgcaaatattccaaaacacacataattctatactaattttgtatcatttactaatcatgttgtcgtataacaaccctttaattttgtgaacatctcaatatcagctatataaaactcagtacgattttgctactataatcaaggtgttattatatgttggggattaggtattaggtcaccgtagatataggcgcagcaatagaccttaaagtagttggcggctgagtgagaaagtgttgtttttgagatacaattacaaagtgaaatcaggtgaccatgactatagaacggctagtcctagatgactgagacagctctaattaatttctacttaaataataataataatattattattaatatgcgagacaaaacttgatgccctaagcctaatgttgacacgtcctgtattgggttggaatcagtctccctcaaatctccaattggccttatatgtttgtaataagcccaagccaaccggcgtttgcacggctcaagacccttgtttcttaagaaataagagttaggccccccttgttgttgtgttgtatacccctttccactcaactactctgccaattgaaagtttccaaccaaaagacttgtgccaaaaataagccagcattttgcaactatatcaacaaacttatacgtatacatcactatatagtgtggatgtggtccccaattgctccctttcaaatttcaaaatatatatatttagtgtgtaattttgtcatctacaagtacaataggtgacatgtcttatgtgagattatatcatggcacaaactaatagacaacttagacataatttttgaaatctttctcaaggcatcattcagattttatttcatgtgatgtgtactttatctatacatccttttcctagtaaaaatatgaataatattatagtggtattgatttgtataatgaagtatgagatcatatataatatatttttgataaatggactagaaaatgctctttttctagtttttatatcatatttacaattaggaaatttttataagtgtctaaaattttgaaaaaaaaataataaatacaaaaagtatgttttttgaagaaaagacataaaaatagaaaggggtctaatcataaatatagatttatatatttgtaacactcaaaaacagaacttacacaatccattttattatttttatttttataagatagatatttttaatttatacttattttttaaaaaaataaaaaataaaatcttccttctaatattatacacacaaaataaaaataaaatattaaaaaaattgtttgtatatcattatttcatattttattaaattcgtattttctagctgctgcacaactccttaaaataaaaattatattaaatcttattagaataaaaatatataaaaataaaattaaaaaagttatagaaattttacagagtataaattactgtgaaagaaaatatttaagaaaatatcacgagtaaatttcaaaaatgaatttaactttttttttcatgcgcataatttttgggatgtaacaatatcatttttttgtaactaaaaatttataaagttgtagctatttgttacaattctgtgaataaaaaatgttacttactattacagaattattacaaacttgctgactttttaaaaatgaaaatggtaaaaaaatgtaatttttctattaaaatttggctaattaggatttttgcctattgaactttaatcataccccgaatttttaaggtcattaaaaatactcactgaagattgttagatttaatgatttttttttccaattatagtaaaaaaatctgatatggatgaaagtccagagaccataatttagtacatgtcaaagttcgaggtacatgatttggtagatatcaaagtctggggagcataatttagtatataaaaaatcactgaaatagtaaaattaaatgaaattagacaaaaatctttaaattcaatgatttcaatagttcaggaggtatttttaaccaccttaaaaataaaattcaaagagtataatttaatacatgtcaaacttcatcgtacaaaaattttaatatcccttaaaattttcttcctctgaattttgaaagcagcaaccaaacacgtaaacgagcccccacccaagcccacaacccaagcccaataggagtcaaactaatgggcctttttttaggagaataacgaaacagacttaagacttgagaaaaggcaagagatggaaatgcaagccctttggggctcaagaaccaaaaaaatgcgatcataaatgaagatgcttaggccgggtgagggcccagggccccaaaataccattcaatacaagtactgggtttactggtataaagcactagctcaccccagacattctttaaaatggcaaaaccccaataaattccaccccatgtctacactactgccttcattaattttcactgccaaacttgtcatcaatccaaaagggacgtcctagattattacgaaataatggcctcttccccctatatatcacactaaaaagaaagaaagaaagaaagaaaaaaagagagtgagagaaagagctctcttctctttcacatcaaacacaactctatccttttctttctaatcctatacctatattcaatgaaatattgctgtccaagacacagagttctgatcttctgatgataataaatgcccacattccactgaatagcggtcccccacttttttattaggtctaatcctaatccaatatgcaaaagggattttggtaatatattctgtctgtatgtgtaccttgaaccttcacatacaacaaatatataaaaaaaaatatatatttaatttcaattccatcaattgtgtcttctttttcattttcggtttttgaaccaaaatcccgattgtgggttggccactgaatttcgaattgaaagttgaaatggacatatcaattccatgcacaatactaatttaaattgaccaatcaattagaattggttagttttcaacactggaaaatttgttctgatcaggctctatcagctaccctctgacttgcagcaataatgtgccattttgcttggtcctttctatttgctttgggagtagtaggaggtcaaaacttaaaacaaaagctactacttgtttctatattatgtatgtttaaacttagcaaataactatcttttatatcactaatgcttattcttgtttgaa

SEQ ID NO: 272233 - DNA, 786 bp, Cannabis indica
ctaccaaaaattcattcccaatggctgatcccaacaataaagctcaaatctttgaactcaacaatggaaatatatgtgttttggtcaccaactatggctgcaccatcacctccctctctgtccctgataaagatggttactttctcatacccaatacattaaattttacttttttgattgttatacatttaatttcttgttgatttgtttatctttgaattttgaaggaaaattgggtgatgttgttcttggattcgattccatcgagccctatttggtaaaaagaatatatctttctggctttagtttgttgtgattttgattttggtttttgagttcttctgagttttgagtttggatttggttgaattatggattgattacttgtaatgaggcatcccaatgctagaggttttagcccctttttagttttgatctttgaaaagaggaagaaaaagaagggaaatattattttctgaaattgtttattggatcttctattttgttaaacgataattcgggtcttgtaattttcaaaatagtacaaaatgatacaccgagctccatttttgccaaagtaaaacttaatagcgtgagagtatttgttatgataagactggttatattcgcttcgggttagttatattaaaaaagaaaagaaaaaaatgagttggggtattattttataccatcttttacaggttctgatttgtcatttaacaaagtaaagagttcgattgataacttttgttgaatacattgtccgaaattgtattttcaatgttg

SEQ ID NO: 272234 - DNA, 523 bp, Cannabis indica
cataaacaaaaaaagaaaagaaaatgagtctaattggtaacttgatatatagcttactttatattgtggttgtttatgctcaatacttaacaatttgtttatgcatttaatatttcgtatacattacttgttttatatatagctaattttaaattttgtttgttaatggtgtagatatggccaactcgggttcaggatctgattcaggcccagaggcagagggtccaagagtaatacctacacaagggcaaacgcaaatgaatgaaatatctaaactaatggatcagggcaaatgattggccctcgaggttaatgataaaggacaatattgcgggaaaaactatgccaaactcgtatcaactctaggagtcagatgccggaagacgatagggttttcctataaaaactggaaagaagtcaacccaactctgaaaaataaagtttggaaagacagacaagtaagaggttatttgttagaattttgatttgtttttttattaattcaaatgttcactctaaccgt

SEQ ID NO: 272235 - DNA, 2477 bp, Cannabis indica
aagcagccaaaaaagttaatgagatatgtggagaaaacaagagattacatgctcacatataggaggtcagatcactttgagatcattggatattctgactctgactttacaggatgccaagaaagtaggagatccacttcgggctacatatatctgttaggtggcggagcttatcaaggaggagtgcaaaataaacactcatagcttcatcgaccacggcgggagaatttgttgcatgttatgagacatctaaccatggaatatgactgatgaactttatcatcaggctgacatttatatggatggaatagaaaaaccacttaagttgtattgtgacaataaattagttgtattgtattccaataaaaataggagctcgacgaagtcaaaacatattgacatcaagttccttgttgtaaaagaaagggtatagagaggaaaaatttgtatagaacacttaggtacaaactccatgattgcagacccctttactaagggttcgccacccaaggtctttcatgagcacactgctcgtacgggtgttttagagtatgagaatatctagattcagtgggagtttgtctttcttatcctttgtgttttttgtttgtttcatgaaacttgtgtatttgaataatcttctaatcatattttatgttattcagtttatttcactttgtacatttaagctaaaattttgatctttataaagtaaagtaggaccaattgaaaattgatatgaatagatccccatgcatgtaattttcataccacattatcatgattgatctatgtcatttagctatgttgatatatgtgaccattgatgggtttagttgtgattgatacaataaagattgctttcaccctatgttgatatagttaatggacgagattgtatatgcctacaattatgatgacaacgttataagctcaataaggttacacttttatatatatacgtatgtgacctagggaaattgttagaaatttatttatttggggtcacaattgtatatataaaaatatgtgttgggtcatcatataaatgagtcaaatttatgtggtctattttgaaataaagtttatgacttaagggtatgattatcatgattttaatatgtggataccattgagacaatttttgatttgatgatgggtcaaatcagaaatagtaaataaatgattaattattgtttttacaattattaataaataggtattggtcccctttttccatcgtaccatttcatattcctgaatccccatcattaggaaaacaaagactttagagaaagttttgatgaaaaattagaagatcataccattctaagacgattctatggactctggtatgcttttgctattctttgattctattgttaaatttctcatgaattaattagggctaaattcaaatttacagtgttctaacaatttatgctccacttttgactgagagtacacaaggatattgccgataaatactataacataaatatcgaggaaatctttgaatacccaattcatgaaatccatgaaagctacaagagcattcgttagcctaaaagacataaccaaaatttcataatgaccatacctagctagtgagaaagcaatcttcataatatctttctcttagattctcagttgatgatagatcgagcgaagattaatcttggaaaagactgtctttccttgaagattatcaaaaagatagtcgattcttggtaatggatacttattcttgattgtcaacttgttcaattctctgtagttaatacactaacgaaggttcccatctttcttcttaacaaacaacactggagttcctagggtgatccactgggtcgggtaaacctaatgtcaagcatcccttgaagttgtaatttcaattccttgagttcagttaaagccatctgatatggtgccttagaaactagctctgctcccggtgctaaatgaataatgaaattatctctcactgtggtggtaaactagataactcctctaaaaatagacttcctttacgaactttcttatgttccagattaaaataaaattacctctgattctcttcctctcttaaatccatatcaacatttcaccaagactccttcctcttttactagatccattaaagcacttattaaaccatctttcaaagctccaaaagaatacattcaagcctcaaaattcagccagtgccaacttgcaccaacaccagaggtccaatttgtgactcttgaaattccccctgaactccctccacaatggatggcacagggttatacccacatccactttggtgctattcgacttgctctcaattatcatggcaggaagggccttccagttagcgctcgtattggtcttcttgatactcgaatgaggaaatatcaacatgccagtatagctactattgaaactattttaaatgcaggaacagtggttgtcactctgtttcccaatttcaa

SEQ ID NO: 272236 - DNA, 4578 bp, Cannabis indica
gcgaatgcagttgctgattgtttggcaaaatatgcactaagggtggatgagactatctcttggttggagaattttcctccttcgatctactctgttattgtaaatgattacccacaataatttataataacaaagttatcttttcaaaaaaaaaaaaaatgattttaggtgtgtaaaaagaaattattgtgttcttttttctttcttttgaacgtgttctttaatttttttttgtaaggtgtgttctttaatcttattaatgtgtacaaacgaataacataaagaactaaaccctattgcctagtcattctttgaaaaatataataattaatgagaaattttatttataccccacaaattaataaatatattttaatattaaaaaaattaagcttaaaataatttttaaaaattataattaatatttttttaaaatattttttcttatattattttgtattgatttcaatacttatcttatttttttttaaatcatttataattttttttttctttttcctaataaaatttcacataattttttattttagtttttttgttataatatttaaaagataatttatttttatttaataagtatattttttaagaatataaattagaagaaaaaaaaattaaaaaaacttattataattaaagatgtatattttatataaaattaaaattattaaaataagtacatttataaattattaggatgtaaataaaatctcctaattaatttattgaatgacaatagtactcccacaagaaataattattttaagcccaaataatacaggaggttccaaaaacctcttacaactacaaccagtaatactgcccttttatgtttttgcttacaatttttttttgtttttttagtatagcgtaatagttttttaaaattatatattgggttcgaactcacgatctctgccttttttctatccctccctcaccactaagttagctttagtggcttcaaattttttttttgttcttttgatagagtatttcatgtgttattgtgcgccactaaactacaatattagtacaacattgagagcaatataacaaattaaatacaatattatgtcactattttaggattagaaggaaatgtcaaaggtggtaggatgtcacaacgcaggtgtaggagttatatttgataattatttctaaaatagtttactttctgttcttgctctaaacatttcttcgttgtttggcaaattccaaactttttattttctctcttcctttctcgcggtaaaataaaaagtatatttttatcacatttatagtttaaactaaaagcaaaaaattgtatctggcaataaacaataaacaacaaccaaaaaggtttttttaagtcatttcttgtttgtggtttcattctttccatcctctgtgctttcttcaaagaaacttttgcagaaagtaaaggtatgtttttcttttaaagctttgttcattatgttttgatttttttctattgatttggttgattgattaataattattaataattatttttgtactggttgattgattagaactattgatttggatggaggaatgtttttctttcttagcggtgattttgagggtaatggggatttggatttgttgtgagttaatacgaattgggttgattgcagttttgtgtgtcgttatgatatttgacataaaccaatagcttattttttgtctatttcttttttcaatctatattaattcataggttttaattaaaggagatcgtgtgttagttttctctggtaactggaacttgatatatctttgggatacttaattctgaaaaatacatttgtagaagaaagatatttttcttgcttgtaataggtatattaatgcttaatttatttgtcttgacaaaatgatagttatattgttgaacgttttcatcaccttgaataaacaatccatgattgtgtatcatctaatatgtaattgacttttcgttttgtgtacagtatgataatatttttatgaattgggtttttgtttgatcttatgtgtattgaattagacccattaactgctaaaatggctcggataggagaataaatgggtttttcattgttacatccatttttgttggttagcataatgttccaatggtgctttccaaagattaaataagaaaatgggaggagatactgattataacattattcatgaattgtatattattgtttgttgttcttcttttgttatgtttttctaatggtaagctttcatctgcagcagcaaggtgtagagttttgcatctgattgtatggctgaggcaggctttgaaatccctttaccaacccttgaacctaaacaagttgtgttcaaaggcatgctaccaaaaaaatacactccccaaatagtactacggttccatctcgctatcttaaagcgtcaactggttcttgccatgatttttgcaaatatggaagaaaacatgaagttgaagcaaaatcatgggctccaatacgaaaatttatagcagcaagacgaagtgcacgcaatgatcaaacaactatttcagaagaaagtaagaggaaattaaagattaattctcagaatgaagcttcctatttgaaggaagacttatcagcccttgaaggcacagatatttctgctgtagaagatcctaacaatccaagtttgaagcattcaaactctttttctctctcagagcatggctgttcaattaatgaaaaaagcaacagaagcaaagaaggcaagggattgctagatgatcaaaacaacagaataagaaacaagaacagaagcaaagaaatgaggacctctttactgggtgagagaaagattttgcattttccaacagtttctttatctcccaagccttcttccaggagagttcccagcacgatcactcgaaaaagccaatacaagaataaagatgaagaacctgagcatgttcctgaaaagactttatatatcattgactcaactatagagaacacaacctctgagccaacacaagatgttaatcatacccttcaggtttctccatcctcaactagtacaactcaatcgattctatcctctcagacgaattcaagatattccagttctggaatgcccgactctcggtcaccaccttctccaatgtccattgggcgcaaaggcctcagacattcaagtaacaaaaataatattacagaaagacctttgtcttcattggaatcaacaccattattacccacaacaccctctgagaagcttgatagcaaagaaaattccatcacctatttgcgtcgagcaaaggtgctaactgagaagaagaaacccgatttgcaagcagaatacagaatcagggctcggatggctggaaaacttgcttcagaaaaaagcagtcctgctcgaaaggtgaagttcaggagaggaacaataattgaccttaaacaagagaacaatactcctaggagactcaaattcagacgagtaaaatttattcatgagatccaaagtcgaaaagaagacaacatgaacgaaagagtccaaggcaaggaagggaatgaatctgagttcagcactatgacaaagcaagagaaagttgtcacaaaaaaccaaaatgtagaaaggaaaggtaccactttaaaaagaagcttgaggaagaaggaatctaatgaaagtgagttgattggtaccaaagtaacttcagagaaagctgtcacaagacaccaaaacatggaaggtaccaccacaaggagaagaaactttaggagaaaagatactaatggaagcgagttggctggtactaaaatgaattcggtgaaagttgttttgagacaccaaaatgtggcaggaaaaaagatagttcagagtttgttcaataatgtgattgaagaaacagcaagtaagcttgttgagagtaggaagagcaaagttaaggcactggttggtgctttcgagactgtgatctctcttcaagacactaatcccttagccacatctgatgcaaattgagtttcaaagaggtttgttaccttttatttattcctatagctattctgtacatattttatgaaaacaaaaccaataccaaaacccaaaaaagcaaataaggaaaaagaaaagaagtgaagaaactatattggagtgacatattttataagctatgtgaagcctgcaaaggtttgaattgcatatttagaaagacattcaaccaagcgaagatggtccgctggggagtgcttagattatttattgttgtgtgtaatactacaatgattgttggttgcttaaatttctattttttaattttttatttttggttctgatgatgttttctatttattcagattgttctgtattgaagagacagaataatacttatattgtatgcatattgtttaaaataaatcggtatctataccataatattgtatagataaagatttctttgttataaaataatataaagtagatgagaagaaagaagaagaagatgaagagagaagagaaagtgaatgagaatatttaagttatttattccaatggggtgaacccctatttatacaaatacaagagtga

SEQ ID NO: 272237 - DNA, 831 bp, Cannabis indica
agtgaattgttcattattactttttccaagttagccaaacacgtaccaaaagattccccaaaaacctgaaaaatcatccatgaagatcttaagaatactctccgccatatctgaaaaaattgccatcatacaccgttggaaggtagcgggggcgttgcatagcccaaatgggatcctcctaaaggcaaaggtgccatatggacaagtgaaggttgttttctcttggtcctccagcgctataaaaatttgattgtagcccgaatagccgccaagaaagcaatagaactctttacccgccaaacgatccaacatttgatcaataaatggcagcgggaaatgatccttcctagtggcattattcagcttccggtagtccatacacaccctccaaccagtcacggttctagtaggaatcaattcattgttcttgttagccaccaccgtgattcctcctttctttggcacacattgaacaggactaacccatgaactatctgaaattgggtatacaataccataatctagccactttatcacttcttttcgcactacttccttcataacaggattcaaccttcgttgatgctcaatggagttactacagccagtttctaggagtatcttgtgcgtgcaaatcgttggactaattccttttatgtctgccatagtccacccaattgctcttttatgtttcttcaacacttctagcaacaaaccttcagtttcagcttccaaccatgctgaaataattactggcagcgtttcattctcccccaaataggcatattttaggtgacttggcaagggctttagctctagtttaggtggttc

SEQ ID NO: 272238 - DNA, 796 bp, Cannabis indica
aatgatcaccgaaattttactttgtttcccaataacgaaccaacctaaaatattaaatataatataaaaagtttcaataaaagttaaattataagggtaataattaactcatacatatataactagtaactaaataattatctaagtaaatatagtatctagtaactactcacgataatgctcttgatgcttcttaaaaattaaaacaaaaatacaccacattcatttatattaagtttaaacaaactacaattaaaaattatttacatatagttagtaaataatagtacataactaaaaaaatttacaataatccaactattactcttttagataaaaaattctctaaattctatttgagtttaggataattagatattatttaatacaatttcaaataatttaaattttctacaaaattttagcatacaaaataaaaaagtattagagattttttcaactaagtaaaaattgtaactagtaactacttaaaataatattcttgaagctcttagaaatcaaaaataattcaccacaaaatcacttaatatatctacaattaaagtataaacaagcacaaataaaattatttatataattagtagactatagttactaaaactttctcatcatcaatatatattagagcaattgaaaactaatcactcttttaaacaaaaaagtttcttaaaatatattttagtttctaattcacctacaccttatttaactacaatattctattttttttttttgaaaaaataatattgtaacatattctaattataggtgtaaa

SEQ ID NO: 272239 - DNA, 644 bp, Cannabis indica
catgctttgtatgaaaaatttattgcacagaaaaaaaatctttctttgataactgcccagcatgccattgctgattatataagaggtagaaaaatgttatgtggttccccttggcatttgtgcgatcatgttttctttatcatccatatggagactgaatcacattggattcttggtcgattgaatattgaggaaaggcgtgtgtacatgtacaactccttgtcgactgctatgaaagacaaagcttgtcagccatttgcggtgttgttgccccacttttttgctttgttctatgagttcaaaaagaaaaacaaaccggtttctttagacccttttgaagttgttaaggttgatggtttacctcaacaaacctcgaagtaagttgtttatagtttatattttcaagtgttgttttatttatttttattaatttccttttttttttagtttttctgatgttgtttttgggttgttttccagtgactgtggttcgtggcatcgtttgctgaataattcattgatatgaaaccaattcctctcatgtttgatgttgagaaacactgtgataggcttgctgtgttgttcttcaagtatgctcgcatgaaagaaggggattttatggatagtgaagatgaggctcctcc

SEQ ID NO: 272240 - DNA, 1551 bp, Cannabis indica
atatatatatatatataactttaaaaataaaaatcagcttaaattaaaatgtgatatatatatatctattctatataaagtgtgcctatataacagaattcttggtttatgagaaattcatgggtcaatttttttattttttttaagttttctattaaaaataataattttttccaacaaattctcttaatcaatttatttagctatttaataataggatcatatttataaatttttggccgatttcagtgaatggcataacaaaattaaacacgactttatctccaaattcagatttcatcctctctccaaattcagatttgtgttctccaaacgtaaagttaacgtgccgtttataatttgaaaataaagtcttgcagccaatcccactcccaatccgatttcagtgaataacataacaaaaaatacgactttatctctaaattcagatttaaccctctctccaatttcagatttgtgttctccaaattcgagccattcgcttgcaaaaagttagtaattctggccccgccgccactattgactcaactcccttaaacgacgatcttattccaaacttcttctacaaccaagcaaaaatgtatgttctttacatcattcttcagttttaatcgttgagcggtcttaactttttttcttgagagaaatttgaaactgtcaaatatacgagagaatttcttgtatggagaatcataaacttggttttgggagtgttttgaacaattgggaggagaaaaaattaatctctaaaggggtctttgtagggtcatcaataactctaattggccatcgtcctcggcaacaacaatcgttgtcgaccccctcaatcgtccattctccaactctgccccagctgtatttgcagtatatatacatatataatttatttattgaataatttttaatatgtgggtagctccttcattcactccctcatcagtcactctgtaatctctctcaattattcataatttaatcgcaggaaatttttgctttcctttatttagagttttcatttattaacttaatgggacaagttcttgaagtcagattgtgacgcctttgtatttagaagaggtaaattcagttaacaagtttatgcctattcatcttaaaaaagtttttcagctcagtttagtttagtttaaaaattccatatcctataattcaaagtaattgttcaaaatgtaacatcaaatagtctaaatacacgtggtcttgaagatgcaccaataaaatatgactgcaggtagaggagtggaagttttagagaacaagtcatttgaagatgatgtatttgggaaaggctggtatacatgtaaagtatatcatctacaaagataagttaaggatagacattacatattcaaagatttgatattggctaaaattggcatgtgaaattagtctagcacatgcttaatatcattcattctaggaaaattcatgattgttgtagctggaattgataataagtaaggaattaattctctggtgctatatgtgtgatttttatatatgactaagata

SEQ ID NO: 272241 - DNA, 971 bp, Cannabis indica
tacatttctcactgtggtatctaatgtggtgaatattgttggagcatcatctaagcgtcgtgatatttttcgagaaaagcaagctgctcaagtcattgaagccttaaaatatggaaaactttcaagtggaaaaggcttaaataaaaaaaaaaaataggattaagcatccatgtgaaacacgatggggatcacaatttggccctttggtaagtttcactatcatattttcatctatcctttatgtacttgaggaaattacaagtgatagtttgaatagtgaccaaaatatgaagcatctattatgttacaactagtgcaaacatatgactttatttttagcttgcatttagtgaaaaatatacttgaaatcacaaatgagttgtcgcaagtcttgcaaaaaggtgatcatcaagatattgtgaatgccatggatttagttgaagtgtgcaagaaacaattacaagtgatgagagacaatggatggaattctttagtagaagaagtttctaattttgtgttgagttcaatattgatgtgctatggatggtatgtattgtgctcaagggaaatcgcgacatagagctccaaagtttacaaattttcactattttcgtattgattttttcaacagtgtgatatatatatttacaactacaagagctaaataatcgttttgttttaatgaggttaacactgagttgttactttatttggtgtatttgtctcccaataattctttctgtgcttttgacaaggaaaagctactccatcttgctcagctctatctacataatttttttatagtagatttgagggtactagaatttcaacttcaaacttatgttgatgatttgcgttcccatatgttgaattttcagaattgaaaggaattgctgatctttcaataagattagtggagacaagaaaacatgaggtatatccattggaatatttgcttattaaattggcat

SEQ ID NO: 272242 - DNA, 566 bp, Cannabis indica
tcagcactaaagaatcagagaaagatctccaggttcagatcttgataatactctgcgacacaaaggatacaagggttagagatctgaatggaaggagtcatattattccactgcacccaatgtaaggtttactaaactttatatgtgtttatttcatggttttagaaagttcatatttagggtgttaatcaacatacttgtgagtagatctaagatcctcataaaataatttccaacactataataatagaatcttagctttcctaacggatctaatgttggttccctttatgtgttaattctagaactagaaagttggatgcaaatttagatgggatctaaattattcttccactagtgaattaatgatactaaaggataaagaagtaattagaatggtaaaacaataatttgactaaaactaattacgaactgacacaaggagggccaatcaatagaattaattatatcaatgagtactgcaatgaaactagtaaatataattctgtaattactaagagtttaattctatatttatactagagtaatcatacaattaataaaca

SEQ ID NO: 272243 - DNA, 3781 bp, Cannabis indica
taattttttaattttttttaatttaattttttaatataattatttacgtggaccaataaaattgtgccacgtgtatattgtgtccacgtggacaagccaacctggcatttaacagctaaatttggacggaaagggtaaattgctaacagaatagtggttttgggggtttacccgcagaaatttgggttgtgggggtttaatgaaactaaaacgaaagtattgggggttttgccgccatttacccttcttttaaaataaaataatgacacacattaaaaaaagatgactctacataaagtcatttttgatatctctaccgaagtattatcctatattatataaaagagatatttgtggcggaacacccttaacatttataattgttacacatatgatcctaatcaaaaaaagtagcggcaaaagtactttatcttacgattttgttacagttgtttacagttgtacctttttttggtcattaagtgtcaactcagaaacacgtgacgacatgttattgaattatgtattaaataagctaaaaaaatatgtcaccacgtgtttttgagctgacacttaatagatttaattgacacttaaaataactagaaaatgtacgactacacttaataacaggtttaaagtatttttaacgacatttttttttattagagtcatatgtataacaattagaattaatttcaccacaaatattcctatataaaattatgtcgggtgtgtgtcatgtaccactgcacatttttctcattaatataaattagtaagttgtttaatctttgattatatgcatacgtaactaagtactgttataacaagtacttatagttatcattacaaactactcaacccttcataacatcatatatatatccactatatatataaatgtatatatattatatacatataatatttatatactttcacattgaaatttcaactatataagtggtccttcaatttaattaatggcgtaatgtcacataacattattaataattaagaatggaaagtaacattttgatgaggatattgttacattcatttaacataacacaaagttatgtattattagagaatgattcaattaatttaattatatatagagttttatttagaatatttatggactttattgtctaccacacatatagtctatcaagaaaataatattgtccaaataatacgagtagtcttaattaacaattaatattctctaacttctccttcttcttcttttgttaatgatgatctttaataaacaaggttttgtttagatttttgtattggttttaccctaaattaatagcactaatattaacatatttcatattgaattcttgtaaaatttatcattttcaaaatagtagctaagttgtataacttcatattgtttgaagaatgtcgagtgtaatgattctgagactgtgtagacataagattacataattgaagatgacttaaatgaattgaaaagtactacttctatcaacaaagtgcatgttattttcggtagttcatctcttgataatttcaaagttaagggtgcttgatttagagtaatcttaggataggtgattttctgagaaatttttccaaaaaacgtgcgagtgaggaaaaaacatgttcgaaacactcatatttaagagacatatatgtgtaacgtcacaaccccaatggaattttgttatttaggtgtgtgacgctctctctttctcacctaacttcaacatcttttcgtacagtagtgtctctactgggtgtagcgtattctagcagtgtatggctaggttttgagagcagagctatatctatcatttggggcgacttattgggtgggttgtactcactttcatcctctccttggaggagggcgcttgttttaagtggcatctttggggatgttttatgagtcggaataatggtgtacgtttaacacctatttcttgggacatttggtttgccacaaccttacaaccactgttaaagttactaagataacttagagcatctcacttatttgcaaagtttcttaaaatcgagtttcatacttatgtctttgttgcgactttaactaggttaatcaataaagaaaaacaataaatagaagtaaagtgtaagatttatcttaaaaaaacccacaaataataaagatataaattttaataatttttttactaaattattaagaattatttttttcgttactttgatgctttctaacacagtttagcacgcttaattttgaaatttttaaaagatgaattactaaaaagaagacacatcttgttcgcatagtaatacccattaatccatttaattcatttttaatggtgattctcatatctacacacgattaatcatcatacataatattttccaaacaaattaagtaaaattgtaaaatttacacaattttctcattaaaaatcaccagattctaatagtcacacataactaggcacaagcacaacttacatatttttttatccataaaaattatgcaaattgatgatgtagcacatgtagtttaatataacttgtgctataattattgaatttataattgttaaaacatttcttcttctatttaatttattaatggtacgcacattttttactttcttattattaataataaatttagtcaaactcaaattctaccttaaaattaactcttttatttttaaagtgagtgaaaaaatattatttactcaactcataaaaaaaaattcatttttattattcattattgttgacttaaaatatacaaaaataaatattcaaatgtcaacatttttacaaaatattcatgctacggcagttaggtatttataaattaaattattacgatttgaaattagattggatagttaggaatttttgttttatttaaataaataatttttgtatgattttatattatgccatgcgtgaatgatttatatatatatatttattatatagttgaggacggccttttttttgcttttttttgctttattttatttttccactataatatttatcactatatactcaattcttactggactaattatcaacaccctttcacacttcatagagtcacacacactaaaaaaaaccccaaaattcatttcaaatattatgtatatatatatagttgacattctcaagtgttgaattgaatttaaatttttattattttcacaattaaattgaaaaaaaaaaaaacttatagagtcaaattaaataaagtactagcctcctttagtatattatttgtctacaatatttgtcaactatttttactcaataataataattaattaattatttgtgagagactactttgttaaggccggacttaattaggaaaacatttatatagttttgactttgggattatgagatatataagccagtaatttaattaaatattttaatatataagccaacatagttataaattttcaaataattatattctccgctttagtattttaattgacgaaataattttgaaacaccctaataagttaaaatcccccaatcactatggttattgattagtaatctaataataataaaattaaattgcatagttattatatagatagtctaaagtttaactagccttttaaattaaaattttcatgcaatattatatttataaaaaatatagaataaaataattccacttgcatccattaataaaagtataataatcaataagtttcttttttgggtctatttttcatgttgatataaaatggaaaaa

SEQ ID NO: 272244 - DNA, 836 bp, Cannabis indica
tttttagatgacgaaacaagtagatgatgcatcaatacatcccttttaagggggcattatagaatcatccaataatatttatcttaaaaataacttacatttatttgatgagtactttatgataacgtcatagttttgttgtttgtagatgctgatgtcaaattttaatttggtagtgtattttggaaagataattggttatatttagatgaagacaaattagaggaggactctgttatattgtcattgtcaaatttaataaaggcagactatatatatgtgagcacgtgattttcattttatataaactcataactaaatcgtagcaatagcttgtattgtagtttaatctcgacctaacctacgaacaagcctacctaaactaatcaataatcattcaagtggaattgggctatcgagaaaatatatatgtaatatttatagaatagcattacctttacattaggtaagaaaaaaaaagtgtgtaaatatttgataaaaacaatatgatcatattttttttttccggtatattaacggtaaaattaagtgatttttttaatatttaatatataaattggtttttttttaccataaaacctactaaatttatatattttttttttttacatttttattcaaaagctttaattaaatgttaaagttaattgctcacgtatatacaagtgacacattttagatgtccacataatattaattaaaaaaattaaaattataaaaataaaataattataaacaaaatatatttttattttatttttctttaaaactctaatcttttccaccttaacctatcttcttcttcttctccaaaa

SEQ ID NO: 272245 - DNA, 1264 bp, Cannabis indica
tatcaagctacagacctccaagttgactgaatatcttttcggcatcataatcacttccagacagcctcttgagtcaatgaccagatgaacaaattaatcatagttgttggaagtcattagatgataatagtttgaagaatttgttatcatgttttcctttgttggagaatttagtattggattattactttagtttttgtgagcttcatatttatttccctaaacttagaacattacaggtcaaatactatggcatttcggctccgaatgttgtgatcaaaatgaatgaatttgtaagataatccttagagatgacaataaatggaccttgcaattcaaaaatgaaactaaaatgggttgccaaagaatcacccccaaattaatttatcacaatttctaataattacaatcacccaaatcagatcagatctaaaaagggacagagtacaagcaacctacagtaccggggaatgcactctcgttcgccgataatgatggtggacaacgatcatgacagtcgcctctctcactatcatgagttattactattcaaattaaaaattggtggttaacgtttctaaaacaactctaacttagctacttaagttgttattggtataatattacatcgagttttctaataatttaactcataaaagagtaatattatatcatactccactattattttcttttatagattttacttaccttaaataatgaaataaaaatacaatcataaaacgacataaaagtacctttttgaggagtaagtaatgaaatactctccaatcttcttcatcattctcaaaatcaatacaaataccctaacaatatatgttgatttccataattttcagtcattaaaattcattagaacctatttcactatgtgagatgctaaaataaaatctgatttaattcacatcatcaattttccccatcaaccaaacattacattgtaaatacacacacaaatagaaatcaattaatataaaattcttaatagaaaaaacaggaaaaaaaagtaccttttggattttttctttcttttgagctaagatcagtgattgagagagtgatagaaagactaaagacggggaggaatgatcacaccaagagtacccaaaaaatagtaagtttaaagagaaagaggaatgaaaagatgaagaacataaaaaaaaaaaaagagaaaaaatattactgtcgaatgaggaatgaggagaggcggaattcagacaagagagagagatagagagagggc

SEQ ID NO: 272246 - DNA, 1502 bp, Cannabis indica
tattatttattaaattaaaagatgtggcatcttatatttatttacactaataaaagtgtattgcatgctttttatgttgcttcacagcttaaggtacctcttaataacgtttcttttattgtgtatatatatatataatatatatatgtagtgagtatatatgcacgttgggatgccacggtaattgccgctgtactacataataatcaagcagggcaatttctaattttactaggtcaaaactggatattaaaactggcccctggtttaaaaggttctgtgttacttcacctataatttacataaaccatgagaacatacgattggagcattttattttcccctttgtagtaaaaataacatgatcagctttaggaacaagctgggaaaggactagagttaaaattctgaaaagctccaactatatgaaataactgatcaaaaatactaaattaatacattgcacaaagaatatatatttgtatattatatatatttatatatattaaattttgcaagttgatcattattaattattctatatatattttgttcaatggcaaaataaatgatgaagaaaaataaagaaaattactttgcaatgatgatctggagtataatcaaaattgaagaatatatatagacattgagaagagggaatgatgcaaaaatgggagacatctttgagagatgggccctatacccctgagtatatgtctgttaaacattattatagtggtgctgcttggagtttgggcaatctctttacatgtttcagttgtaattaagcactactgtgtgtgtgagctagtgaccctttgtcatgcgtcatggatcactacgaatatataaacatatatatatatatatatttatataaatgtgcagctgttctaaagacctaattggatgcgttccacatcacatatctaatttagagcaatcgtagttttgaggttgatgatgaacaaataatgaaggccgatatgggttactgcggtttaagatttgattatgattttaagaagaaaaaaaaaagatgaccgaaatattatttcattacttgtttattatttaataataatattaagaaatcaagacattgtataagtatatattttaaaaatttgtatgttaacttggctgcttttattcgtaggaacaacccatggaatgatgatggaattaaaataacagtaaatagtagtatgtgtatattaagtttaagtttataagtggtataattaatatttatttttagcgatataagtagtcgttgattttagaaattgaccaattgatagcagagtcgtattaagttgatgcttgctacgctacgtagtacacaattaaaattataaagtaaaagaacataagaattttttatagaggtttggcttccttagttagcaggtaatgaactatttcctttttaattgtcttgataggtgggatctaatatagctcttttaaggttacaatgtaggaatcaaagatggaaa

SEQ ID NO: 272247 - DNA, 536 bp, Cannabis indica
tatttttagcattacgtttggtctactttttatagtttgtttccttctttattattatatttggaatagaattacgcttgtttttttttgtttcaggtttcacactgggaatgtataaattgatcaaatttcggaaaacaacaatctataaaatagagaaaattctgcaagaaaataaagctgaaacttcaagattaaattttactatgttctaatcagattttggaaaaagtcaaaacataaaagttttagatttctttttcttctttccaacgcatcttgaatcaactcatttggagtttgtatgtgaaagttatgcatattttactgaaagatgctgaagctgtcaaattttgctccagtagtcgcgaccaccactttccatggtcgcgaccctttttcatggtcgcgaccatggtcgcgactaggagccaaacagcgagcttttttttcgtattttgcctatggtcgcgactagactttatgtagtcgcgactaggggcgaaaaacgagatttttgggcagtttttgacttt

SEQ ID NO: 272248 - DNA, 1348 bp, Cannabis indica
tttgttcaaatttgaagaagaaagtaactaataacaatattgttggattgaaatcccatgactatcatgtcataatgcaaaggttacttccagtttgtattggcaagtttttgtcaaaggaagtatcaagcaccataatagaattgtgaaatttttttagaattttatgtgctaggacattgaatgtaaaagatatgaagaaggcacaaggagatctcattcatattttgtgcaaattggagaggatttatcctccaacattttttgatatcatgatacatttggtgctacatttgcctgaggaagctatattaggtgggccagcttttatgagatggatgtatccatttaaaagatacatgaaaaagttgaaaaattatgttaggaataaagcacgcccaaaaggatctattgctgaaggatatatgatagatgaggcattgacattttgttccatgtacttcaaaggtgtgcatacaaaattcaactactctaagcgcaataaagatgctcctcttctatctcgatacttaatgattttcaaatctcaatgtcgtccactcggaaagaaaacaataaaaactctcaacgagaagactcgcaaaagagttcagtggtacatattagagaattgtatcgaaatcaactcttacatgacgtgagttaatcaatgtttacatggtgcttaatgaataacattgtattattctttttagctaaatttgtaataacttttttgtttaatagagagcactcgaaataatcagacagagggacccgaacgctaactataatcttttacataaatagaatttccttcgtggttttataagaaggtgtgcaagtatttctttctctattatctacttattcaaaatcatcaaatctctcaaatcataattgttaaatttcttttttcagatttttgatttgtataagctcgggtcattagaacatagtgttgaattgctagctttggcatctgggtctaatctcattgtgtattcatatccgacatgtatagttaatggtgtttgatttgttgtacacaatcgagacaaatatcgcaatactcaaaatagtggggtgtctattgcagggacagttttgactattatggggaagttgaagagtattatatttgtcttttagtggtgcatattcggtagtattatttcggtgtaaatggctcaacacatatccgagaaagagaaaaataattactgaaataacatcactatcataaatatcagtggtgtatggtacaaagatgactcatatattcttgctaatcaagctaagcaagtattctttgtggatgatcttgttagaggtcaagattggagag

SEQ ID NO: 272249 - DNA, 975 bp, Cannabis indica
cttcaaacttctgggatttgacttatttttgaacactttcactcttttaatctgttcagtactcatggtcagcatatttgcctgtttattatttgatatcctgaccaaacactcatctcgcgtgttgtcttttgtagatgaaccctcgtgagttttggggaagcgaacaccgaattgaccaggattttcttcaactcctgtacgaggattatcctcgtcttcgtgcgagtccgtcctcttcaagtgaagggctctccacttctaattttccgtccagccataggatgatggctcgaacaaagcaaatgatgcgtaaggtcaatgcgtccgaccctcatgtggcccagcacaccactttacccagcgccgaacaggatctgcctgtccaggaggagggggatcatgagggggacgctgaagtccaggagatagaggaacatgacgatgtctgtcctggcaacccttccgaggcagaggaagaggaggaggcttcacctttaaattttgggggatacaacgaggctggggagccagtagatgcggacgacgatgtcttggttgaaagagtggactacgtcatcgaggagcttactgttgcagttcctcacgggaggcaaggtgccttaggtgccaggtgagtgagccctccatccaaggtcactgtggcatgcttaagtgaattggaccaatctggctatctgggcaaactggactgttctgtccctacctcaaacaaccaagccacaaacccgaagagggggatgtgtgcctggtcgggtgctcattccaaacaaggggcaatgctgcctttgcagccgtactttaggaaggtggtagactactttagtctctatctgacccagtttactcccaagcgcatcaagtatctgtctgccatgttcgtcctctacgccacccagaaatggggtatgccttctgttggaaattatttaccagaatcttagatctactcac

SEQ ID NO: 272250 - DNA, 576 bp, Cannabis indica
ttatgtaattattccttattatatagcttaagagcatgttaagttaaattataatggatttttataaaaatattagattttgggtaaaagtttacaattttaatgtcacacggaattttttttacaaaaataatgtcttttataaaacaacttaaaacaatcgtaaaacaacaaaacataacaattaaaaacaaaagtagaacaattaaaaaataattgtagaacaacattgaaaacttaatacagtacacaatatgaaacttacacagtaattttgaaaaaaattctgcactacagtcaaaaagaaaaaaagttaaaaatttcagtatgtggtgtaaaaaaactcttaaatctgtatatatatatatatatatttatcgaaattgaagcacctctatccatttttgaaattagaaagaaatttttagatcatttttttatgattgtttagttattttaaacattctgtaaaattttaaaaaatttaaacatgttgaaaataaaattcaaacagtctatttcagactcgtataaataaaagagtcttgcgtacaataaattttttaaacattattt

SEQ ID NO: 272251 - DNA, 2700 bp, Cannabis indica
agttggcattgttccgacagacacacaaaacaccttggggccacctggaggccggcgaaactgctagcgcgaaaattaaaataataataataaaggcgggaaacttacccgacatctgtatctgattccagatgcagcaaaagcacagcttcatttcaatttgaataaactagaaatggtactgcaaaaagacagcaacccttcattagcaattgggaaaaataaaacaacaaagtttgttcaatcatagtctttactagtcactcttgtccatagtattgaattataagtatgacttttagacattaaacagacttgtgcatttgatctgacattagactatttactatactctttcatcagatggcataaaagtcaatgagcaatcaaattttcccctgaagaagtcaacccaaaattgaccataataagcatgtacagactccagactaacatcaaacaactcagtttaagggaatcaagagctcaccgatcaaaaatatagtcagcattaacacaagcgttacttgaatcgatcgaccatagtgtaaccgaggtgaattctgcaattgcctctgtgacccaataacccaaccataaagctgcataacatacataaaacaagttaatttcctattgaaagacgataacgaatttctctttaaaacagcaacataaggattacctggttcaacaaactaactgctccatttgcctgggaaagatctgaagactttttcttccagaaaacaagcttagaccccttttctttaggtgtgctctcatattccgacatcaatctattattatcttgacattcatctgctattacaatcttcaaagcaccgaaattcggtgtactccatgttcttcttgtattagctgttctttctgcttggcaaataacatcgttccttgaccccgcgttttccacctccatggcatagttgacatcctttttcaaatccaattcatctttaacacaaactatttccaaggtatctctttggctggaagcattattaggttcaagacttgcagcttttcccttattttgattttccaagaaggtagacatcgagtaaggtctcgattctagcgattcatttttgtcactttccgcaatttgggtagttgttccagagagaaacgcagctaaatcatcacgttcgtcttcatcaaggttaacccatctaagaggttgctttccttgttcaatatacgattctcttaaagctgattccacacgggaaatttgactttcaatggcagcaacaaattgactatgtctagcagttgaatgatcttcaccacgatgtccatagctcaatctgacagccctctcaaactcttctaactagacaccattcacaattcaaaataaacataatcactacataaaaccaagactctccctcaaaaattaaccaaaacaaaaagattaacacagattcaaattaatgctttccaaacactaaaacataatgaaataaaatttgagatgtaaaatagttacaacgaaacaaactcacctgccatttagcagtacctaaagcagtttggagctctctacatagctcatcaagattctccattgctggtctttccctcctttctctgatccatgttctgtatgctgattccattctgaaaatttaaaaaaaaaaagaaaagaaaagaaattaaaacacattccataagaatgataattggtaagagcaaaatgaaaaatgagattcagatttgtaattaactaaagatcttcaaaacgctctataatttttttctcactaactaataatgcttcattttctcagcaattaataaaagtaaacagatgatctaaatcataaaacaggcttcaaatgttgaagaagaaaatcaatagcagcaaaaataacaaacaaactccctcactacacagacacacttttgaatctaacaactcccttccacacacaaccaaattaatttttttttttttcattacacacaaccaaataaattttacagaaaaaccaactcaagaatccacacaagccaggtccttcttcaaatcccataaaccaaaacccatcatagaaaacttataagcttactccatgcaaaccttaaaactagttaaaaactaaaatcaattcatacccacataaccaaaaaaaccctagaaccacaatcccccccccccacaaaaaaaaaaacttacatatcagcagattcttgaacctcctctgcagcaaagaagaaagcatctttctgccatagatcaaagctattggccaccaacatcttaaacacaacagaagagaatagaaacccaataaaaatttctccccaaacgtaggcaaaaatagacaaaagtcggaaacttttttcactcaataaccgtgttaaattgtttatataacaatcaatgaatgaatcaataataacaataagcagatcggtatgttgttagtcttaggaaaggggtttcctttttcgttgggttcggtgtctttctctcccctctttcccttctgagccaagcaattagcaaagaaggaaaagggtttgaagaaagaaagaaaaaaaaaaaaacttcaccagagaagaaagagagaaagacgtaatagcgattttcttcttcttcttcttctctctcttggttttttttttcttttttttgggttaaggcagagaaggcaggggcgagaggga

SEQ ID NO: 272252 - DNA, 627 bp, Cannabis indica
gctcaaggcataaattttggctaagggaattagtagtcaaggtcacagcccggccctctgcatcgacataccttgccagcttggatctttaacttcctatctcagtagtcaataataaaagtttccctaatgaactgtcgtctttaatttcctaggtagtaaatgaaataaaaagtagtttttacttgagtttcactgtgttggttttggtaatggtagacccaacatgagtttgaccctgctagagttaaactttgactactcatagaaagaggttaatattctgcatgtgagtctgtcatcgatgtgggaccatcgaggtgtttgaatatcagagatactacttctgcaattatatcagtgttatttttctaccaaattttgtttggcttgcattacatttaatatttattaattgtatttgaccgtcactaacaatttagtccattttaaaaaaatatatattaacaatttagtaaagtatgacataatacgtaagcaccgaaagcaaaaacacaaaggacaaacataaattaggttaaattaatttacatatattgttcatgcagacacattataaaaatgcatgataataagagaaaaagtgaagggggtggaaatatattt

SEQ ID NO: 272253 - DNA, 599 bp, Cannabis indica
aagccagaaatttagttaagtgaagggcttgaataaatattaagtcaaaactaataaaaataatgataaatgtatctttcaaattttcatcttcaacaaaataaaataatactgttgacaaaaataaaataaaatattgtcaatggtattattttattttttaataaagtattattttttttattatttgtattagactacttttaaaatgggcttgattagaataagagtaggctcatgaatcatgattaagatattgagtgagggcttttgcgaattggactttaataaattgagcaaagtgaattaatatatgtatatatctatatataaaaaatttaatgtatatatttgagtgagggcttttgggaattgggtttgttgttttggtccgatgacgtttttgcttcccttacaaggacccgataagttttccaactctgatatggtcgctgtttctctcgtggatcctagcgagatgggtgattcatcctgatattcacactgacacgatgcatgccaacgcctccgtattcaatgctctgtttatcttggagtttttcttttcctattttaatttattttattgttgttattat

SEQ ID NO: 272254 - DNA, 900 bp, Cannabis indica
gttatcttttctctaaaaagttatcttctttctcaatcaaagtacactactgatattattgagtgtgctcgtcttactgatactagagttgttgacactccctctaagttgaatgtgatcagtattccttttgattggctctccttgagaagatcctactttgtatcgcaccattgttgacagtctggtttatctcactattacttgtccagacattgcatatgatgtttatatttttagtcttgcttctcctactactattcactaagtttttattcttttcattcttcgctatatatctttgtggtaccatctttcagagcctattactgccttccaccttctctttggagttgcgagcttactgtgatgtagatcatggtcgtgatcccatagaccaaaagtctgtcactggtttatgtatccttttaggagatttccttatttcttgaaagagcaagacacagtctgttgtttctcaatcttctacggaagctgagtatcgtgtcatggtgtctactactaaagagattgtttggttgagatggttacttgcaggtatgggtattattcacttttgtcctatatactcgtatgtgctgagaaaatcaaagtgtcattgagattgcttacaactcaatttttcatgaatgcaccatgcatattgagattgatttttcattttactcgtactttgccttttattcctttttcgttcagcttgctgacttttttactaagtcgcatacgatttttctttttgttttcttttaggcaaactctcgatgtttcttgcagcatgatcgtgagtttgaaagagggtgttaaatagttatttagggttattttagtcttttatgttcgttgcatatataagattttcttattagttgtaatttt

SEQ ID NO: 272255 - DNA, 708 bp, Cannabis indica
ttgttttttttattgtttttgtgcatttgtgaaattaacccgttaacttatgtactaatagactaacaaaaatagtaacgggctaacgaactaactattaaggaaattacattgaatacttattttatttatttatttttatttttacttttatttttatattttttttaaaatataccgacttttataaataatgttcttattatactttttcaattaatataaataaaatataatataaaaatttttattaatagatatgcattcctcaacttatctcttaactattagtgcgcatcaaatataaatttttgggatttatgcttcaatttttcttataattatatttttttaaaaaatttttattttgaaaaaatatacaaattataattacaaagctaaagtcaaggacaaaattggtaaacactaaaatacaaatgcgtcgggatcgcaatgggtcccattataccatctgcatgttagccaggtgtcctttcttttttcccacatatatatatatatatttatatatatttttagagaaatgttaaagacatagtagtaggttattttctaaatgtcaatattgatattggttcaattaagtatcgaatttaatttaatgtaataattttcaaggagtatcgttagctaatcgcaaaacgatatatctagaaagttttaagcactattagtatctaataacaa

SEQ ID NO: 272256 - DNA, 853 bp, Cannabis indica
ctcagaatcgcaaatggaactagaacttaactaggaccaggaccaggacctaaacccaaacccgaacccagatcaaaacccagacagagacctaaacccgaaccgagactaggactcgaaaccgaacctagaccgggacctaaacccacagaataactgggacttggacccagaataaggatagggacttgggaaacataactaggaccgggtcctagtacccgacccagactcgaacttgaacataggaccccaacacgtgagttgacaccagaaatggaaccagactgggacctgagattggtatccagatctggacccacggcttggataaaacccgtagtctgtgtctggatttgggaccctgccctggacacgaaccctgacgaggacccgaacccacacccagacctgaaccaagtcccaaacccaaaagtggacctgaacccgtaacctgtgacccaaaattggaaccaaaacctgaagttgacccggactggaactaggacttggactaggaatcataactgaaattggacctagatcaagaaccataaccggaccaggacccggactccaaataagacctagacccgaattaggagccggacccggttccaaacccaaacctggactcaggacccgaacccgaacctgaactcagactcaaacatggaaccatactagggacacagaaccagggtcgggacctagaaccgcaccctagtctcgatcccgaacccaaactcagaaatgggacctgggacctgaaccagaaccagaccgagagccatgacagtgatcgagatcatcagttaggattcaggtaaaggggcctagaacagaccattag

SEQ ID NO: 272257 - DNA, 726 bp, Cannabis indica
atattaatatattatttaacattgttatttttaatattgtgagtatgtttaattttaatattctttaattttatatttatttttcttaaatttttaaggctataaatattttttttaaaaattaataaaattaaaaattaattagcttctttaacttataaaattttaatacaaagcaacaataaaaatttacaatataactaagtatacttccacgtaataataacctaatatatatatatattaattcactaactaaacagtaatatgtatagataaataataataataataataataataataataataataataataataataataataataataagtactatatttattgtgtattctctgttccttttctaactaaaaatatttagtttgattacaaaatatataaagacaactcgaataaaataaaatattgttgttttataaaatgaaaaaaaatatagaaaattgtatatttatttttttgatatgattgatcatataaaagttagaaaaaagaaaaaaaaaaaaacaaagagtgtgattgatcatatataaaagttacattaaaaaataagagtaagtaagaaaaattaaaattaaaattgatatgcatgagaaacatacttggtgtagttataaaagtatactttggttaagtattgtttttttttttgaagaaatttaactgttattataaatggtcactacaagaaatgtcac

SEQ ID NO: 272258 - DNA, 3170 bp, Cannabis indica
atataactttgtaaaaaattacatttaaaaaataaacttttttcaataataattataacttatgatttttttaagaccgcgcaacgcgcggcttttgtttcctagttattaataagaaaaaagagtatagagattagcggacatataatggctggagagaattttaaccctctcatattgttatattttagtatttatagtatattttattattaatttatgaaatcttatattataaatttaataattttttaattatatatatttattgaatatttaaattttgcatcacgaaacataagctgaaaaaatcaataaataacattttctttatgcattaaagttacttaataaatcgaccttttcttatatcatataaattttttaaacaacaatttcttagtttagatgtagaaagttaaaattgtttttcaaagtattttagttgtattatgcaaataaaataagagtattgtgttcctattgaaaacaaattggacaaaaactcaattccatgtttctttttatgtttgatgattagaagttttttatgcttttgtcatagtcatagctaattagaagcttgagtacttaatttttaattcttttatttttttggaggggaactttaaaaatcaagtggttcaagaacaaaaggaaagaaatacccattctaaatcattatctttatctaaacaaaatgccatcagctaaattgaggtagaccatcttgtaccattgtgttgaaaactcatatcatttacaaccaagcaaaagtaaatgagtcgatgaaaattagtatagaaagggaaacaaagggttacttttcattaccctgcggctgttgttgcaagaaaaaagaaattaatctttgttttattgcatagaccagagaggtctataccaattccagtacaaacaaaacagatccacaacatgaagtaagaatctagtccagaaaaaaatacaatatggaatgcttaatcattattttgacctcaaaagataatgaccaaatgttatgcatgatgattatcaacattctcaccctccttcttcttcctggcagctgctcttattttacgctgctcctccttgtaaattcggtttctccgttggaactgtaatacatatccattgaaaaagataacatgaatcatgaatcagtatttgatccaagttaaagaaagctaaatcaaaagataaagattttgcaagttcacaagcttgtttcagcaacaccaaaatactactaatggttcactcatgatcaagggtaacatgtcaaaactatatgatacattaacgaatataattattgcgtcaatgaccagaaagtcaataagtgcaaagacatcgatccagaacaactttctttcaagtgtttatagatataagcaataagtttggagaatccttcacataattagtgaaattgagaagaaatgacatttgtaattccttcgcattactctccaaattgtttcccttgataattcttttttttttatttgcacaatagtacacattcctcaaatgttgagcgagtatatcaatcacaggaaagcaaataatcatgctgcatagtattatgatgaattaagcctcatgcataatttaattttcgttggctgaaataaaaatcaaaaagaatcccaatagtcataatactcttcattggttacacaacttgttgcctccctcgtacttcaagccttaaattagctgacagacaattatctaacactcctaagccaatataattcccaagcaatgtcttcgataatgcaatccatcctggactcaacattgtttagaaccacaagtcgtcgtcgtcctctaagaatgtacctactaaactacaatattctatttctaagagatgccttgtgatatgaaattccctctcaaaagaaagggcttgaaaatgtaaaatgcagcatcttcttatgagccacaacttcatacacgcagtatcaagataattcatggcagatgacatttgaaataatttttagcttgttgtcaatgaagcttgatttgaaagccacttttaatggatgtgagtccaaaaatccgaacgatctattaatgtacatatctaacacttcattcaattactaaataagcaatcatactaccaatttctacacaagaaaaactgaaatctcttttagttctctctagaactttccatgtactacaaaaaccatcatagtctacaaagaaaaccactcatgcttcaaactaaagaaaatcccagaagagaactagcaaacacatacagaaattaataattcatacacaaaaagttgaaatttgaaacccttgattggttgctttgcagttaatgtgatcaggagcaatttcacttccaacaaaaaacaaaagaaaagtaatttaaacgagcaagcttaacatgacaattgacaacatttctgaataatatttcatcaattttgaatagcatatacacataaacagtaacactaccttcatatgaaatgaaaaacagggcaactacaagtggtttcacaatttccctaaaaactaacagacccttcaaacaacattgtcgatctcgtgaattagggtttataaaaggaatcgatggaggagattgtgaatgagtgaagaattcaaactaataagaaattatgcagagaaaaaagaaagtttagagagaatgacctctttggaatggtgaaggcactcaaggtagtcttcccggagaagagtacaatccttgggctcacggcatcgagacatgcactcgctgaagtcaacccaaaagtcgtagcaacgccctttgttccctgtaataccccaccctgatgccatatctatctctctcgatgaaatcaacaacaccttcttcttcttcttcttctcaattgaaacaatcagagggtgttgggatcgatttggtgactgtgtctgtctaggctggagttgggttgggtaagcgtggtgccaaatttaccaaaaagccaccactttcagacccggacggaccagggttcagccatttttgggcctgggctaagtgggcttccgtttcatttgttgggaaagttctcttagttttgtcattttacttcttgggataatttcagaaaaatacaaaaacaaaaaaaaattaaaaaaatacagttatacagaattttaaa

SEQ ID NO: 272259 - DNA, 5558 bp, Cannabis indica
tcctcagattttgatatctaccaaatcatgccccttgaactttgatatgtactaaattatagcccctgaacttttatctatgttagacttttttctaatttagtccttaaatccaacaatctcaatagtgcagagagtatttttaacgagcttaaaaattcaagagacataatttaatacatatcaaagtttaggagcaaaaatcctaattaggcattaaaatatcgttggcagcaaattaaagtaagaataagatttttcaacaaatgatattgaggtgggaaactgggaatatgagatctacatctatttacaactacaacttcaaatgctgggccgattgatatattattatatggccagacaaattaattatgtaggacccaacctaccattcaaattcaatcacagacaaggtccattattactgccaccactattaatttattttcaactcttgttttctttggtgctaaagttaatctgcacaactatacaattgacctttcacatattttgatttgatgaaaaacaaagcaattacaagttaaaccttaattcctcagaattataatcaaatcgtcattagataatgatgcctaatctgcacccactctaaacttttagagacatgcaaaagaaaaaaaaacgatagttaattagttaacttaaaaaattagccaatcttgcaacctttcgagaactcaaatcgtttttttacaaaaaaaataaaataaaaataaatagcatatgtttattaatacttgttaagatagtagacttcttaacaaaaatactattcctaacgaaatatataaattataaaaattaaacatcgataaagacattttttttcaacaacaaacttaaattctctttcaaaaaaaataaaataaagtacaacgacaacaacaaatttaaattcagttggaggggtgaagtaggtgtcattgtaagaagacgtggtacaagagaaattaactccgattcagggaaaaattaaatgctcttattacaaataaatcaacaaaaaaaccttgttagctttttttaagcttaatcatctgtaacaataagatccatgatatacaagcgagtaaatagttacatacatatcaaagtttattaaaaaaaaaaatcactatggctgcctaaacaccttaaccaaatcacaaccatcaaatgagtatggatgaaagaaaataaaaaatcgagcagtgctgagcaacccaatagcgttcacccgagtatacgataacggcaccatgaatttaagagttgggggcccttcaaacctcaagagttactttttttcttttttttctttactatgaactcatggtctggatctgtaaagtgtaaacagaaataatcagggtgtaatgtctcaccaaaggtggcttttttattagaaaaaaaaacatgtgaataaaaaggagcaatttgttcagtcttgcgtaacccataccttgttcacaagcagattgacttgctctctgtacatctccttcaagtctataatatcagcacggagttcctccaactacaaataaagcaacgatcgtgaatcagcgaatcagcaactgacagctaaattctcggtataatcaaaagtacaaacgtgccactctttgtggaagaattattaaatccttagtggttgtcttgaatgcatgtcaatgcaagaaagtgatttcttttttaagcatcaaagacaaggcttcgtttcgaagaaacagaaaagtttggacctcatcttactaaataatataagaccaaccaataccccaccccacaacatttaaacttgaggccaaatccatttacgatcaaagcagaaggaaccaaagtgaagcaatctatacctcctcgtctcgttcacccattagctccagtgcagcagaatgtctcctcctcagagattctagctctgcctttataccaggaactgtggcagcctctgctcgtagtttttcacactgtaaaagtgtacacaattctcaagctcagttacacagacagacattaaaaaaaaaggaagaaaaagaagacaacagaacaagacgaggaaaaaacaaacataaaagtgaagaaataggagcccacctgctcagtcatttggaccaactcctcagcaagagaatcacgtattgattccattgttgcctgaagtaagtaaattatcagagtattaataaaactgtgtaaagatgaaaacttaagtagtacagaatcagttgaagaaaaaagaagaaacttttttgacacaaacaaaagcagctctttgcaaagctctgatatgaattgagatacagcacccaacatagaaaaggaaatgtagagccaaaatagttaaacactagagcttaggaggaaagagaaaaacgcaccaagcgggacatgtatgatgcaagttcaccctccttttgccgaagggcagattcaaaagcaccaggtgtcatgctcttcatataatagggattcatggctggctccccagcactcctcctctcagataaattgtcagaagagtccagagatgcttgtagatagtagctttcttccatgctgccgaggctgctagcatttgaaagttttcggctcaagtttcctgcaagaagttagagattagcaatcacagaccacacaaataaaacagagtgatgttgaagttaaaaaaaatatatgtaaattacaatccaaggatcaaaccattctcaaaagcagaattctgcctagtaggagtctgatcagatgcagcagctgaatgaacacgagctgtcctttccatatccagccgagcagctttctccttctctatttcctgacaaaattcaaaagcttaaatcagtgattttgaagagaattaataaccaaacaaatgcattgttatagtctactgcaaacttattttttaataaagataccaatatttttttcgttttgctttgtggggatacctaaaattttataaattgcattattttaagataaaattactaagaaaaatgaaacttctctaagcattaaactttaaagagaaacaaacaaaagagcaggaattttctcagtcaattccttcatcacattcctaactcaaacatacctctcaacctggccaacaaaaaaactttgaaaagaagaatgaatccttgttcaccaaaaatattagttataacaaagaaccggatactcaaagaaaataaatacaaaataatgaactccaagaataccaaaaaacaataaaaacaaaaaaatgttttttttttttgtatgagaccaagaggctatagccacttggttggcagatcgtttcacaaacatcacagaaacattagaaagaaatgatagaagtctttcacaacactacaacggatgtagaaacaaaagcatcacctgttgtaacagttccctgtgcatcagagcctcttgtaactcttgcttatgtttacgtttgagttccctaatttgttcttcaagttgggtaacacggccttcctgagtgtcagcttcctcctttgctacaaggtactcctgcctattttcagctgccctttgtctttctttttcaagagatttacttaactgtgtttgttcggctctaaggcaagaaatctggaatatagataatgtgtgagcacatgccatataaatgaaattcctttgtaagaaacaaacattaacccttaaggacaacctatacctgtgcctcaagaacattaattcgagataaggtttgagaaagacgttcgttcacagatcgttctctttcctcagcagctgcagctttgccctccgcttcctattagatttgagaagaataaatgacagaagcaagttccaaccaaacaataactagcagaaacaaattacaaacctggagtcgggagttaagggatctctctacagcagcccaagcttctgcccttcttgcatttgtatcctgttaccaataaatggaagggactcaacactcaagcaataaaacaacctaattggttacaacattgaaggaaatgaaataccactagcccaaacacaatttattctttgtaatagatcaaaagtttattaataacatgctgcacctgcatagcttcaatctgccttagaaggggccttgtagaatcaggaacttgtgtaatcaactcctcacatcggcgctcactttcctggataaaacaaacaaattaaatttgcaaaaataaaggcgaacagcgaacaaggatagcaagattagccaagggagttgtactcacttgataacgcttctgaagatcttcaatgtctcgacgaagcatgtcttctctaaatacagccttgacaataacaaagaacataaatcaaataatgagtctaactaagcagaagatttaataaaattaaacagaacaaaaacctgctgctcgtttctgcttagcgtttgcctcaattcatctagtgcctgaactaacatagactcacgttcctcggcctctctcaagcgactctctagttcagatctggcctcgttgttggctcttgcttctgctaaggcttcagcttccttggcagcatttaaagcattagtatagtattccttttgcaatgtaagttctgactggtgtctttctattgtttcctgcaacaatttctccgttgctgtcttgtctctcttgatgctctcaactttattctcttctacctggatgtaaaataagagttattcacaactcactttaaattgtttcagaaaagaaatgaatgaaactaacaattatttagctggtgaaacttctttcattaaaatggtttgacaacatttacacatccattaaactttctactacaactaccgggtaatcatatatgcatgaactactatttctgtgttttctcatcaaggtcttaaataaacttgcatgatttcatatacatttaaagtacagtatagctaaacaatatcctactagtctcaaatatgagaacgtgaacttaaatttgaagtgaagcaaatgctggagattagccaatttatatgaaagaaatctaaatacacccacattctctagaaagagtactcttaactttcaaatgagtggaacaaacactaagccaaatatatttatgtcataaaggtcatgcacattgaaagagttagtgtgacactaagagaaacagtcatttcagacaaataaagcaataatcatgaacttatagcacgtcataggaatcactgacctgaagcttagtaatgaagactttcttctcttcttcaagctccctaatctagctttcacaaagcattgatgtaagttaaacattaatatagataaaaattgaaactaatagaagacaagtatgaagaaccacacaattaaaaaaaatcctttaatacctgagcccttaattttctaatttgaccctcttgagcagcctgctttttggaaagctcttcacctgtacaatattaacatatacaaaataaagttggctggttttattgaattaagctgacataccagacatgatataacaaaaccatatcaaaactagttcacctaccttcagccataacc

SEQ ID NO: 272260 - DNA, 1143 bp, Cannabis indica
gctgtaaataaaggttaaaattatgtttttttttcattcattcaaaaatttgaaaaattaggaaagtaaggagttttccctcaagctctctctctctctctctttcggtttggattggggctgctagggctgggaattttcttgctagttcaagcattttcagcaattctaacagtgattcaagtggttggtaaggttcttgtaactatcttctatgtttcttggaattttttgaagaaaaatgatgatttgcatgcttggtttgtttgttgttgctgctgttaattattgatgttgtttacagaagtttaatcatgtttaattgagtagaatagggctggttgtgatgcatgctagttgtgttatttaaagttgtgaattttagctcaaaactatggtttttcaaagtgaaatgtggaattagttgctgtagttattgttggtgcgtgggtttgatttctgcaaatgttgtatgcatgtttgagtagattcaagcaaagtttgatgcatgtttgttatatttaaccaagtttgagttttgaactcaaagcttggagctttaatgatggattcgattttatgcatgaagcttggttttgttgctttagaaatgtttattagggtctatttagcaggtctggaagttttggtgtgaattgggtttaatttgagtgagttatgaatttttgagtatttcctgcttaaaactggaattccggttcagcaactggaatttcggatggtgttcaggaattctcagaaccagaattccggttgtagaaccggtctgccagttgggggatttttgggaaccctagtttttccaatttttaagttatttagggtattgccatgctttttatcgatagataaacttctagtttctagtttaagtccccgggaagtgatttagcatgtcgcttatctagtgttgtgattgttatggtttaggagcctgtaaatcgttgtccagttcgttccactcaggttgaccggcacacctgaattcagaatcgaggtaagattagtataatagtattcatctgtattacatgtttagcgtgcatgttaggaagcctgttagattacattaaatatgtatgttggcttcgtaccatccaactgtatcacatcggttaggct

SEQ ID NO: 272261 - DNA, 1506 bp, Cannabis indica
aataataataataatatgtcattaaaaagcattggtatttcgaacactggttctctactctatttattaaaatatatccttaaaattacattttgtctattttaccttaaatttttatattatactatacccgagtctctatttcttgtacatcactaaaatattatattttaaaatatatatttatttattttaaatatataatgttaaggagaatttttaaaaatattttttttctatattttatttacaattttacagacctaaaacttttaattacaaatatactcttgtaaagttttgaaattactaaaataaactttgttcaaacaaaaagttaaaaaaaataaaataaaaaataacgtgaaatatcaacttcacgataactataaattaagtataaaacaactaaaaaactgtttattattttcactgaacagatattttttataaataaaaaaattcaaagactaaaatgaaatttttttcgtgttgatgtatttttgtaaattttttcaaatttttagtctatatttctaatattaatttatacatatacacttatacatatataaaacaaatttaaaaaataataaaataagtttaaagcacccacaactacttctctaaaatagaaaaactttaaaatattgaaagaacattactaataacacactacatcagatgctcacttcttcttcattttaaagcttctttaaaattaactattcatgttttatattttatagaatatgattgattgcaatgaataaattttattttgaaggctaaaggggttttggtagaaggtttaatgaagatggtggggaatggtaactttattcagatcactagtgatcaatgtgtgcctttggattcttggtcagtaccagttccaattactcttggtcttgataatttttggttagcaacttatttcaggtggattgtcaggcttgggacaaggaggttgtggaagatttttttcgcatgatgatgcatctgttatccttgataagtaatgtgactgaggcaaactttggctttgtgaaaaaactttggtagcttaagttcctccaaaattcaacgtccacctattatggcgtgctctttctcaatgcttcattcctacacgaattaatttaagagaaaagcatgttgatatggtagaagtgtgctctttctatgatgcttttgctaaatctattaactactatttgattaagttggtttgcttaaggtgtttgggaagctgtttgttagttttgttgctctaggatggaattatgattccatttgttgattggtttgaagctcaggctattgtgtttaatcttgacaagttgggtagagtagcaatgatatattgggcgatttggaaaataagtaaatgataaggtttggaatcaatgaatctggattgttactagagttgttatgtttgtggataactcttttgaccaatggtgtaaggcttcaaggtagggcactacaagaaatgtcact

SEQ ID NO: 272262 - DNA, 4652 bp, Cannabis indica
aagcaaattaaaatagttttaattcatctttaacacataaaaagaaaaagaatctatgcatcactatccaacaaaacaaaatatatagaaccataataatgcatcaagtgcttgatttctagctactttttaatttgtagtgtgtagtgcaagtgaccagaatctttgaacttcatttggctctcctactcctaattaattagcaaatattgatttcacaacacttctagttctacttctcctgaaaaacagtactctcctaatctctttctggcaataccataaacaagatatatatagctaaatatatacaagaggtaaaagaatcttccatttgatgatataatcattactgggttggtaagctttaagatgttacatatatataattatctgtgtttttacgtaattattatagcgaactacttcatttttctgcagatattctttcaaaagtttggcacatatagaaatcaacacacaaaagcaccttacctttgggaacaaagcgatccacatactaattaattagggtatgctttttctattaattatttatctacttatcatgcatgcatgatgcattataacactaattaaatatattataaataactgtatatttcgtacgtgtatatatatatatatttcagattgtacgtaataagaacctgaagccatgtcggtggcagaagctatggtctccagccttacgcagtgcgtttacactgctcttgtgaaccacgcccagttcgctctcgaattcacaggccaattcgagcaaatgaagacacgacttgatctcatgaaggcttttctcaccgacaccgaaaatctcaagcgcaaaaatgaagttgccaaaacagctctcactaagctccgagaagtgcttttcgaagccgataacatactcaccgattgcctagtcagagacgagtaccgcaaaagaggagtttgctttggctattcactcgaggatccctttttcttgcaccaaacaggggaagaagttaagagacataaattctaaaatggagcagattgagaagactttgggaagttttctcaaagccccggaaagcattcacggcgatgaaacatacccaattagacgtttcacttctcaagattttaatcccacagagataagggatggaagaagatgtaaagaagatcaaaggttggatctttgacacaaacgaggcgcttcaacaggtggccattatagggatggggggattggggaaaaccacgatcgcccagaaaatatttcacgatactgaagtgcttgctcgttttgataagatgatttgggtccctgtttcgaggggttataatgaggagacactggtgaggtccatgttggagagattagggaaacatgtttctgggattggtagtgcttctcaattgttgggagaagttcaacttgttcttgctgacaaggcttgtcttattgtaatggacgatgtttggcaagtgaatgtggagtggtggaccaacttgtgctctgtttttcccaaaagagatgggaaaaagagtactataataataacaactagaaatgaaggggttgctagtgatatgggggtagagagttcaagaattcacaaaccggaacctttaaatgacgaacacagttggactttgtttctaagtttgccttttcttcaaggaagggaatttgttcggatcccaatttggagaaattgggcaaggatatcactgaaaagtgggggggttgcctctagccattaagaccattggggctctgttagcagcaaagattgatcatccccatgaatggagggatatttccaagaattttcattctcaattgacaacaggagggaaaaatagctcagttatggcttctttgcaattaagttatgatgaactcccagctcgtttgaagcaatgcctattgtgcttttccatttatcctgaagattacgagattagagcagagcaactcatacattggtggattggggaaggccttattcagggcaagagttcaaagtcagcctatgaaattggttgtgaatatttgtctgagcttatcaaaagatgccttgttgaagtggtcaagcaaaggtgttacgatggaagagtccacaactgcaaaatgcatgatatggtgcgagaactgatcataacaaatgctgaagaagaggcattttgccatttcgattcgcagggcattcaaacaccgaatccaggttctcgatggttaggcttcaccatgcaaatgaataagaattcatcattgagacacgtaccaaagctcaggactatgttagtattcaattcaagttgctgtagtgctgacttcaagaactttggggtacttcggtccctaagggtattggatttctctaacgtccgacttgaagagatcgatgtggatgatctctttaaatggatcagttctctaaaacgtctagcttctctaaatctcacaggagttcaaagcttagaaactattccaccttcaattcgaaagcttcgaaaccttcaattgttagttttatctggttgtagtaagctgaaaagattaaaccagtcaattatcactttgaggaagttgattgtgttggacataggattttcccctcttgagttcctacctcgtggattcgacaagctttgttaccttcaagaactcactggattcaaggttactaatcagtctaaaaagaactgctgtcaatttcaagagctcaggggactatcccaactaagagttttgaggatgagcataagtgatgaaacagaaatcttagaaagtgaaatgaacatcctgtgtgagctaaaggaactcaagattttatccattgatgctgaaaattgcaggagaaacaacaaggaaatcttagggatgattgataggctagcacctcctccaagcttgcaagagttgtatcttaggaactatcacagggaaagtcttcccatctgggttaatccaggaacgctctctgaattgcagtatctttgcgttgagaaaagtgatatccataacttgagtcttgagactgaagataagaattgtaataaacgatggaagattgaaggcctgtgtttgaagttcttaactcggatagacatggagtggaatgagttacaaaatgatatgccttcgttacgccacctggagattagccattgttacgagttgaaaaatttcccatgctctgttaagagccccggattctggtccaaaaagtaattaaggaaacttgtgggaatcttgaaaggtgatatttgattgctacttattcgtgtgtgcatgtagtattcaaaattctacattattgtgttatattttattattactatttatgctagacagactcagatatttgtgagatgagatactagaacgttggtgtgtttcaaataaaatattgttcaagtgtgctattttccttcttttcatgttttgtggagtgtactgtttcagcttgctgttgtctcatttctatttcagagatgtatctgtatttaactgaaaataataataataataattataaaattaaatacaggtatggtaatataatatttactctattttcttttttatctgaggtaatatttactctttagttatattgttaaactccttaaaaaggattaagttcataatccactcttatgattgagtgctatatatagtaactaggaatattactataatcccctcacgaaaattttctcttaattaaaagtaaatatatatatatatatgataggctagttttagttgcattttataattagaagtatatttcaattgattatttctcttgttttctatttgtttcaagtttaaatttaaaaataagtagaaacatgttaaatagatgaattatcatagaatttggaattctaggattaagtggttaaaaattttaagtttgtgatgttcaacagctccgtttgtgatcgaaatttaaatttgaagcttcaagcgaattttcgactatgatgcgttcactttgaagaaaaatattgtgaataaaaattctagatctctactttaactttccaaaatatttcgaatcgttcaatttcaagcaatattgaaagagttatgaccaaaacattatcagtcatcgcattaagaagctcgctaccaaaaatcaagcttcaagtgtcgtggcccgcctcttttaaattgtgagaaaattagagttttatcttttttttagctatataaaagattctttttcaacacttttcagtatacaattaaggatggacgaaagttgaagcaaaagacagctttagagacttttgtcaacattttaatttcaacgagtccttttcttctactctagttctatgttcttagttaattgttatcggatatttttaattataaagagtaacaagattttttatttagaaagttaatggagattgtttgacattttattcttgttttaattagtgtgatttaattctttctcaattttttatgtgcattgtaacgtccccgcttcaagcctccattgggcccttacacccacggactaatggctcttatacacgagttcatcactctggctgcttcatggactaatgactgaccctacagaccaacacgagtgttttcagtgtgctttgtcctcactcacacacat

SEQ ID NO: 272263 - DNA, 1632 bp, Cannabis indica
taatctaaaatagttccatcaacactctagaatgagtgtttagttcataatcacaaacacaataaccacaataatcatgttcataattaaataactaaacaaagaataaagaagaagaagaaaagaactcttaatgatgaaagttgatgatgattgcttcaaatctcttttctctcactcttcaatgtattttctaatctcaaagttacttgtttctatctctccagtcgtacctcaatctaatttacatccttctttatataggccaacaaagatagatcaatcctcttagaattaggatttatttcaaaaaaatgataagtgctgcggtataacgcctaagagaaaaaaatctcgaaataaccacgtgctgaaattatctttttttctcattgtaacatcttttttccagtcgtgcgctatagcgcctaacaccaatttttcataattcaacttcttcctcgactcggttgctccttaatttcggcacttcgctcaaatatgcacgattcacttctaatttatcttaattttatcactttatgcataaaactgcacactatagaaaacacatcaaatttatataaaatttaagaaataaatactaatttaactaataatggactaggaatgagtgtacatatgtacactcatcaaagttcaatatcggtccaatccaatatatactccatacatccaatactagaatactttttcaatgccctggaaaggacatagcacttattcaaggtgtaagtatatcttatcgctgataatcacatcagtctaaatctagtgtactaacaaatcatgagactcaaacttttgaacatataatcatgattatactccactgtgttgacaacactataattaagaataaatatatgttctggacttaatagaatttatacattaagtacataatcatcaaataaatcatgtgaattatggaacataaaatagtttctcatcttttattaattagtaaatctaattatattgaaatgagttttaacccaacatctaatagtatggggatataaaattaatctttaccactatatgctaattaaccttgtaaatgatttataaatggtgggtgtatatattcacttattatagaagattggtgaactaatttaattatttattacactcaaaatattttaattatttatttgtttattttaaaaaggatcaaactatgtaccagaaaggcttcaaccataaatttaatgtacattggattgggagagaaaaaaaaagtgacactcctctttttttttttttttttaaattcttttctttaactatcggtagttgagtaacctttttacctatacccgaaaactaacttctttactattttattttataaattagtaagatttttctttctttttactagtatgtaatttgtttaagatcttcatatgaaagagtatatttgatagcgtttttctaaaataaaattattcaaaatagatatttatattatgtacaaaaaaaaaattatactatttactaattataaaagtaatatttataatttttttaattacaaaatacaattaagattttatttctaaatgcaaaaaaaagagagtgagatacacttgtggataagac

SEQ ID NO: 272264 - DNA, 4883 bp, Cannabis indica
gcgagtcttaaacccgatcttcgatcctactttgtgcgagctataagaatgtgactagactcgtcaaggtcacatcatcccgctgagtctggttcaggcgaggtttacactcaagaggtctccttctgacatctcagccctcctcgaggagagtgagtccacgtgtcatttttataggagcttggtctcgagtttctaggtggaaaattctcactataacacatgtccctagttttgcgattgacagctatgtcacgactcacgagggaaactataagcgagaggcaggcgaaaggttgtcacgagatggtgactattggttgtctaattgagggtttcgaaaagacggttgtaatcattattcttaatccacttggggtgccacgtcatcgaaactcttcggagtctgtgcaagcatggttatagataaccgttggattgtgagaccttaggcattcccttgccacgtgtctccatcccaataaatgagggatactattatttaaactccctgatacgaattgatcatttattcatttgcctctcattttcatttttctcctcttcttcctttgaatttcaaattctcaaaaaatttattttgcattttttctaacctttctttgtcacaagaaaagttggaagtccttgatatctacagaattgttcaaagaagatctgcattttcaaggttagtgaaaaaaaatttgcaactactcccttttcttttgagagttaatatgtgcttttagaggtagaaaatgcatgagatgataggatatatgtatggaaatttatttgccctttgagaaaatatgcgttattctggaaaatatatacctaaaactggaataatcacaggtttcaggaagaacaccttgagtgttctcatatttctcgttgagtattttgaatactcgcgagtttcttgatgaacatctcgaatactcgcgtgcatttctgactatccagaaatgacttaattgatttgttccctagttattttaaccctgttagaatttagggtttattttctagccttcaggttatatgtgcttttgttatgaaaactatctgagtcttttaaatggtgggtgtgtcacagtaacttaatgttcatgcaaaccttcgcatgttccttgggtcactgtgaaacgcccagccatttgagacatgcagtcagctttcatttttcttgctttgtagtggcatgttaggactaaccaggttcttcaaaatggtgagggtttcccattaactcaatgttcatgtgaggaatgcatgccccttaggatactgggatactcccaaccatttcttgaggtacacagttagttgtatatgtgcaacttatcttttgcggggattgaccgaatttttgaaatggtgggtgtgtctcattaccttaattctcatgtagcaacatggtcattatgttattgagatacacccaaccatttctggagatgtccgactagtcctttatattttctgaattttatgcgggtgagggcattttattattctcgcactttcaccacattgaaatgatcttctatcttttagatgagcgacttgtcggatagctagatgctcgactctacaggtgcggcttttgttgacgagttggagaggagcgacagcttcatacccacctcgatatctgaggaagagaccactgctaccagggctcgtcaaggttcgctatctaccaacaagatagataggatggttcaagaactcgctgaactagcaatggttaaaattcgcgatagagaatcaacggtgtctggccaagattatctcgttcattcgaggcatgcccctgacattgaggttgaaaaaatgggggaagacttcgaggtacgtacctgatccgattctaaggaaggggagatgctgatggaagtgaggcagattcaattgacaacactcaactgaataaacctttttcatgcgaggatctagtctcgcgagtcataaaatcagacttgcatacgtttgcatggctaaatttggttcgtatagggactttacgtccttcagcatctcagcggcctcaccttccatttactaaccctgtgatcatccctacgcaagacgtggtggtctcgattcccattttgcgatgcggggtaacactgccttttcattcgtttgtaaaagctatcctcagacattacgatgtctccccattccaactaactccaaacaattatcgcataatcctggggtttcatgcgatgtagatggaatatgtccaaggggagccaacaatggaggtctttagctatttctaccatataaagagtgttggccatgacaacggcttttattgttttagcaaatgggccaactttgagattaatggggtagaaggtataatttctaatatgggagattagaaatcaaaattattctacgcgtttaaagtaccaggagttagaactagggctgttcatataaaccggaaaaccgcggtttaaattcggaccacgacaatccgaaccactgtaaaccgtaatcggggaaaccgtttttggtggcttggtcaatccggaccgtttacgacgtaatggtttggttgcggttcgaaataaatagctaacggttaacccggaccggaccgtttataataaataattaatttatatatattttatatatgactatatgtataattttgaaattttttgtgtgtcaagttttttattgcatgaattttggattattattattgtttgacatttgagaatgcttttatatcgttatttatatgttatagatcttttacttatcatgttaaatatatattttgacaaataaaattaaaaatttagtaaaaatagtacaattacttaaaaaaatagaataattataaattccacttaaaccgtggtttcgaaccaaaccaaaccgttcttaatggtttggtttggtttgatttgagaaatttattggtctggtttggtttctaatattcaaaaaactgttatactggcttggttcaaaaattatgaaaattcagaccaaaccaatctgtgaacagccctagttagaactgacttcaatcgtcgacctagtatgtcgcgtatcccaatacttagtttatatttttattaccttgtatagtctctaatgtctgtttttgtcaattgtagatagggcggctcgacttgtactggattctgctcgtagagaaattgctgaagttctaggtagcttgcgtgttcaagatcgcgattggcggctgctgtggactactgcaaaattacgagaacataagcttatacctgagaatgccggccttcagcgagaaccagtatacaaggagccttctaaaaaacaaaaggaaagaatagacaagcatctatctaaacaaacatcaagaccgacatcaggtaatgtgtttaacatatgcatgtgcttttatactataaaaaatatccttatctcatggtcttctcgcggaaatgacattcttgaagcaagctcccattctcaaccgaaagcctaaggttggaaccgcgacaacttctcctgtcatcctgcagaagaggaaaagctatgttgtccccacgccaatggctgactcgttgaaaaagcagctcaaatctgcccaagacaaggagaagaaggtcatgatcgatcctgctattagggaccgcgacatcatagctcttcaagacaaattcgtgagcgatgagttcgtttccaaggtcgagggggttcctgctgaggacttgttaccgcgctctgcagaattagcctcacaattttttactatgtttttgatggcttttgtcacaggttctaaggagcttgacctcctgaggaagcagaacacgcttcttcaagacgtcatgaagaaactaaagctggatgtgacctcgaaagacaaagacatcgaggattttgggaaggctaaggagcaggcggaggaaaaggtcaaactattggaatcgctagttgacaaactcactcgcgaccttgagagtgaaaaggagaacgggaagaaattgtatgatcaggtcgtctctgattatatttatacgaccttgtccaagctgcttgacttcgacttcgcaattcttggagcggagggggctgaaatagccgatgcattttgtgctatgttgcctactgaaacccaaggacttgggggaaatctcttccctgaggatgctgagaacgcgaatgcggaggaagtcgcagatggtgctcaagcaatgtcgcaaacgatcccaacactccatcctcctaatttttctaagtttcttttcactattgtcaaacttttatatctgtcgttagcggtacaggggtactcgcgctttgtactttgaacaaattatctttcttttgttatcgaacaacacatcttttcgaggatattttacttttgcatacttatttagcggtacacgggtactcgcattatttaagctgtacttttaattattgctttttttttcttgcaaaagtctttataaatcttttcacagcttggtgtcataacttagaacaaaaatttggaaaaggtctgaaacttcaaacatttcattaatgtaatcaatagtacaatattaggttataccccctatacttagtacatttattgaaataaattgaccaagtataaatacatgcgagtactattaatagtaatactttaaactttctccattctaagctcttttgattgctgtaccattgagatcagataatcgataagtcgcattactgatttttttagtgattaggtacggtccttcccagttatcgatgaatactctatgtgttgagttacgtgtgttaggcataactttacgcagcactagatctcctactcgcgggttttgttctttgaccttcgagttaaa

SEQ ID NO: 272265 - DNA, 2466 bp, Cannabis indica
atacgctatgaaattatccatcgttctaaccccaataatcaaagatcatttatagatgatttacattaagtagggacaatctaccgtttcacccctcaatgtattttatccttaaaacacttagcttcttacaaatgatatttcagtaaactaatataatcactgaaataagagctcttccatttatctatattaagccaagctcgaaggaaatcatcatttcacttctatgtccaaatagaagctatacattccatatctatgattagcgctcccactcaattgtactatcatgttctcaagttgtatgtgtgacccgaatcaaatggtaggctttaactaacaactctaagagcacaaataacactcttgagatcgaacctgaccatgtcagggttaagatgtttgatctaagatcaaccagtgatattgagttagaaagatataacgataagattataatatctttagcaagactaatatcggtcccagtccaatgtatactccatacatctgaactagcatgtgaatccagtacactgatgaatcatgtgacattatcttttgaagcgtataatcacaattaccttctactgtattgacatcactgtaattgtgaataactatatatgttctagattgtacagaaattgtacattaaaccataaacattaaagatacatgtaaacataaatgacttctaatcttctattgataacaaatattaatattgaaatgagttttatttaaggcataaaatctcaacattagctttacaatacacaaaggaaatctcaacaacattatcaacaagtaaccgattacgaatatgagttaaaaccccatccacatccctacaaccatcctccttactttggaacaattagacaacttcaagacaatcgatttcaacactaaaacgggataatctcctctgaataccagcctataaactagcatgaatagacaacaattcagcctacgatggagtgaattactgctgtaatagtgatgcaccagcaaatgtgacacgacctgcactgtctcgagccacacagcctggcccagaacagccagcacccctccaaacactcacatcaatgttgagcttcaatgtaccagttgtaggaggtatcgaagcagcagcttcccttttattttgccttctgcaacctaatttgcacctctgtattcatcggcatattggacgcaccagtcaacagcatcagcagctctaggaggtcggccaccatgctttgtgtcatttctaataaattacatattccaggaaagcacaagaaaatattcaaaagtgtctcgtggccaagccttagataatctcatttataaagccaatgtatcctctcgtccaatgcgtttcactaattgttgaaaaccacaaagtttccaaacccttctagtggatttgcaactccataacgcatggaaaacaatttctcaaaccccagtggaacaatggttacaagtaggatcaatatccataccccttaaagataaccccacattggttagaagtcaagaatgagctaccttccaaacaaaatgtttaaccttcggtggaattttaagtttccaaagatacttccaccacccaaccacatggttatcatttgattgatcaacctccttcctcaattccactgccattttttagttgcttttaaccgagtattccccgttcctactgtaatgtcagagaattgtatcctccacctcccaacttgtataaggcaattgtagaatcatgttagcatcatcagtattaaatttggcatggatgaactattcatcccatcttccatttggaagtttcagatccaccacataaagattctctgaaagaggacgtttatcaaatattttaaagcttcttggtctcagcagccacgggtcctctaacaccctcatattgttcccatcccccactctccacctataaccatttataataatgtccttaccccatatcaaacttctccaaacaaaagaagcatggttcccacatttggcttgtaagacttctttgttcggaaaataacaaggttttaggaccctactacataggctaaaaggaaaacggatgcaacaccagatttactttgaaagcaaagcttgattaaataactctaaatttcgaaaccgcaaaccaccattctccttcaatttgcataaataagaccacttacaccattgcactttattatttttctttaaagaaccccactgaaatctcgctgccatcctatgaaggttattaattgtggcttttggtaagattataatatctttaccaagatcagtatcggtcccactccaatgtatactctatacttccaatactagcatactttgtcaatgctctggaaagaacatagtacttatccaaggtgtaagtaacctttattgatgactatcacatcaatataaatccagtgcactaatgaa

SEQ ID NO: 272266 - DNA, 613 bp, Cannabis indica
aactaattaaaaatggttgagtaatgatccaaaataaaaagttttcttactttaagcttaagaaaactcacagactagaggtggtgtcgtctcttatgagaattgagaattattctctagagagtccatgaattggaattttgcacatggccattaacggtgcaagagcgagacatgcggtctcaagtgagcattagcgagggtgtgtgtgttatcaccggtttgtactaaaggaatagtggttcaatgctacgacaaccaaaatttcatcaaactttgtggtaactacactaaggtaaaattcaaagtcgaaagacattttaaataaatgcacctaagcaagacttcttaaaagtgtatatttattcaatcaaagtgggcgaatgttatattttgatgtaatatttttgattgattaaataaatgttacgagtttgttactaaagagataatatttaatttagttggagattgttatattatttatcaataatataatgtatagattaaatatgagtaacaaattaatatgtaacatatgacaattgtcatctttttgtaaaattcgggggagttacttgttactatgagtaacctccactattatcaccaa

SEQ ID NO: 272267 - DNA, 1222 bp, Cannabis indica
ccgcatattgtaggggaaagcaataacggtcagaatatatttatgaaggagataaagaacgagcaatcagtctttgccccagaaccttccaagaaggtgaaaattgaggaacccccgtttacgttcacaaaggaagacaagacgagcgtgagataccctcacgtcgatccgctggtcataaccattcaactcgccaataagatgatcaagagagcattaatagacaatgggagctcggtaaatatcatttataaggagactctaaagaaaatagggctcgaaaaggccaagttaaggccttgtatggtgaatctttgcggtttcacaggggatagcatcgctagccttggcgttatcgagctcgcattaactttaggtcaggcacctttaactgctactattatgcaagacttcttggtggtcggcctgccctcggcttacaacatattgttgggtcgtccagcactgatcggactaggggcagtcagttcgatcaagcacctatctttaaagtttcaaacaccagatggcgtggtagtggtgtgtggcgaccagatgctggctcgcgattgctatcgcatagagttgcagcatagataggtcggtcatcagttgatgacgatcttggaaggagaaaacgagaagaaagaggaagatcttgatccccaagttcaagatgaaagaaacctactaaaaccaattgaagaattggaagaggttattctcgacccaagaaatcccaccaaatgtgtgtacgttgggaagaacttggaggagcagctcaaatagaaattaattagctttttgaatgcgaaccaagatcaattttcctggagtcatggggatatgatagggatcgaccctaagattatctgccatcacttaaatgttgatccaaactacccggcgaagagacaaaaaaggaggcccttggattccgagaggcaaggggcactaaaacaggaagttgaaaagttgttagccaacaattttatatgcgaggtattttatccctcgtagagagccaatcctgttctcgtcccgaaacctaatggaacttggagaacttgtattgacttctacgatctgaataaggcaatgcccaaaagactattttccactcccaggatcgaccagttagtggatgcaactgctgggcacgagcttatgtcacttatggacacatattctggatataaccagataaaaatgtacgtcccag

SEQ ID NO: 272268 - DNA, 644 bp, Cannabis indica
tttgtgtattatgtaatgttgcaaaggaatcaatattccatctcttagttgaatgttcctttgctcactcttgctggaaccgttcgtcactcggtgttggtgtctctgctgcaacaacatatgttgactggtttacggagttggcagcaagtggtaattctggtgtacttgaagaagcagtgatggttagttgggttatttggaaaacacgcaatgacctgctatggaatggaaaacacgcaatgccctgctatggaatggaaaacattgtactgcatcggatgttgtttggttagctcgaaatactcaccggcaatggagctttgcacagtcaaaccgcttacattctcttgctctagagctttcactagttgacagcaacgattattggatcaaaccagcagtaggcaagctcaaaattaatgttgatggagttgtttttgaagctacaaaccaggttggtactggctttgtggctcgcaatagtgacagagattagttgaggctttttcaacggtttctaccacaagttgtcaacctgctgttgcagaaattttgagcgtcaaggaggcgctaagttggatcaagcagaagaataaactgaatgtgatcattaagactgattgcagtttagcagttcaggc

SEQ ID NO: 272269 - DNA, 794 bp, Cannabis indica
ctttcagtctaatcaatgcggtctcaaaaaatcaaaagctgatggaaaaaagacacaagaaaaacaaaaagaaaataacgacaagtatcctccatgtggcatttgtaaaagaaaaagtcacttggagaaagactgctggtttaaaggaaaaccacagtgccaaaattgtaaaaaatttggccacactgaaaaaacttgtcgtttaaagaaatcccatcaagctaatttttccgaagagaaaaatgatgaaagtaatctcttctatgtctgccaagctacatcagaagaagaaaaagatacttggtatcttgatagtggttgcagtaactgtacatgacgaaaaatgaaagtatcttttgtagtcttgatagatccaagactaaattcaaaatcggcttcatggaagcattcggcaaaggcaccattgccattgacactaaaaagggcaagagatacatcaatgatgtactcttggtacccaacattgatcaaaacctacttagcgtaggtcaaatgattgaaaaatggtactctttgcattttgaaggaaattcttgcacaatatatgataagcaagataaatcctttcaaattgcaaaggtaaaaatgaaagaaaacaaatgctttcctatacaatagagatatgcaagtagtgtggcaatgcaagcacaaacagatgaatcatggctaaagcatagaaggttcggtcactttaacttccatgggctaaagatcctcaagcagaagaatatgatgcgagacctcccagcaattaaggagatcagcacagtctg

SEQ ID NO: 272270 - DNA, 5623 bp, Cannabis indica
atatgtttttgataaaaaaaaaaaattcttttgaaataatgtttttctgctttaacatatgatgtgtttgaatttttcacctacactctatgctacttcctaaagaaattttatgtggcagtatttataaaatcataggtaatcatgtaagtgatgattttcatgtaagctgaagtatgtaacttttaggtggcagcattcatgtatctggtttcttttaaatttttataagggttatggctaacgtggttttcttttgtcagggttgctttaggcgtaatgtcactgtcgtcaccatatatgcatctttgggggaggaagctctttgtcactcactaaatgaggttctatatttctcccttggagtaggagtactacttggttcacattttatttcatttttttttttgaaaaggagaacgaggcctttgtcttagattagccccacccccgaaatggataaaaccctctcttgtggcggaggaaaaccgtggttacaaaggtaaaaacaaaactaaatctgcatacaaaactagacagtataaattgcagcagacaacataaactaaaccagaacagaattccttcaaaaaagcattccaatctctacataggtctaataaggacagattctcaaaatttttggttttgaaagtccaagtggttgtccaaaacttcaccttttcccatatatttgatgccgaactttcgactccttcaaaaattctagcgtttcgttccagccaaacagcccaaataattgccagtactaatgttctccacaattttgatctttgtttactgctactcggtttactaacaattagttgtgttacagagctcagcatgacctagcttaactcaaattctttcagcatgttagaccaaagttgcctaacaaacaggtattccagaaatagatgttgcactccctcgctgctgactttgcaacaaacgcaccagcccggagagatgtaaagaaaaggcttccttttttgcaacttttcatgaacatttactttaccaagtgacacaagccatccaaacaatttaactttgggcggaacacaacttttccaaagtgtttttgtccaaaacagttcaccattgagtggatccgaaataaaccagcggagagctgacttacaagagaaaatccctgaggtatcaggcttccaaatttgcctatcttcgacagtattaagcactcttacatgttccaatttttgcatcagcattgtgatatttggaacttctctatctaacagattccttctaaaattcaggtcccaactttctacccaacccctggtaaaccttcgtcgactatgtgatcctttatgtttcccttaacttagatattaatgctaagtcggggaattcactacttaatgaagaatcgcctaaccatatgtcctcccaaaatcgaatcttgtcacccctaccaactttgaattgtaacccagatactcctcgtacaaatttgagatatctcgccacggacttttgggagacaaacgggagttaattttcgtatcccaaaaattatcgactttaccataacgacttgccactaccttgtgccacaatgcttttggctacaaaggatatctccacaaccatttcatgagcaaccctttgttccgtgcttccaaacttccaattcccaacctcccctcttcccgacacctacaaacttccaattcccaaccccccctcttctcgacacctacaaacttcatcccaagagactaagtgctcaccaccccatgactcacttccttcccaaaaaaaatccctcatcatcttttctaatgttttgatcacaacctttggtgctttgaataatgataaaaaatatgtcggaagggaagatatgacagactgaataagcgttaggcttcctcctttagaaaggaaagcacttttccaaccatctagccttagcacacttatccaatattggttcccaaaaactcaatttccttggcgagtcccccaaaggcatcccaagatatttcattggccagcttccaacctcacaccaaatcatggatgcatattgtgacaccgattcctcattcatacaaatccccaacaattgacttttactcatatttactttcagtcagaaatagcacaaaaggcctccactatcctcaccatttttagcaatgatttctcattgttggcaaatatcagggtgtcaccagcaaattggagatgactaacttgtattttttcttttcccaccgtaaaacaagaaaagttttctgattctactgctttttccaacattctcccaaggacatctgctaaaaatgttcacattttatttctcttctatctgcattccttgaaatcctcatgtcttttgaaggcagaaatcttttctagctaatatgatgcctcttgacatagaatttacttttactttgaaatgtagaagaaaagtaacaaaagaaatgttttttagttactacttagatagactagtctgttttaaaagaactagtcaaagatttgaaattttcatcatctgagcatgtcaaaaaaatttaattatataattatataatttcatgtgacaataagcttaagaaaaagaaacagtatatattatagtcaaatgattagaatttcatgataaaacattacataatgaaaatatatattttgaaatatgaacaatatatgagagattataacatattgttttattttactatttttaagcaaggttaagataagaaatctataatttgaaaacagatcaaatgagaaatatcaaagttttcaattctgaatagggctttcaaagttatgaacattccgtatagtaactatgctagcttccacattttggcttttcatgtcaagtgccgtaacttcttctacttgcacgggctatcaaattaaattttaggaatacaatgttgctagtaattgtatttttcagcatgtaatgtaaacattataatccagtatcagtttgcaacatgagtttgtgtctgttacacttggtgcatttctttgtttgtgttttacattgaagcagatcttcaaagtttacttagtagcttacaaaaaatttatgtatgtgttgtgtgtggtgaatgtaactttagctactggtttatctcaccttattataagtactttctcacgtcagttgtaatgattaatcagaaagccataaaagaaagaaacaatatgatattaatctgtattagggcaattatctaaccgatatctgagaatggtcacgtgtttttatgagaaagctgtagaagagtctttaattcctgcatactgtaaaaatgcttggtaatattcttcaacaaaattattaaaagaaagtttttcatctcattttttctgtttccttgatattttagtatcttgtaaaatgtttgttgacttctaacatcaagtgattttttagtatctggtaaaatgtttgttgacttttaacatcaactatctttgtgtttagttactactttacatcttctgtatagttactgagcccatgtatgaaaatgaaaatatctatcaaggaaaaattagcataaggttgttaatcacattcacatgctgatcaattagattaggcaaccaggtaccagcctaacaggtgtggctggtggctgtacttattcttattgtttatatgctcgtaactcgccagtttttactttaactctgcacacatggttcttattcttgtttacttttatcatttccctccagacagaggttacaactgtaatctgtgggaagaaagagctggtgaaacttgtggaaattagcggacaacttgacacagtcaagcgcattatctgtatggatgatgaaatcccttctgttgcttcgtctgttgagcagagcagtgcctggaatataacattgtttgctgatgtggagagacttggccgagaaaaccccattgatgctgacttacctcttcctgctgatgtagcagttattatgtatacaagtgggagtactggattacctaaggtatggagcatctaagatataggtagtttgcaaaattattctccagaaaaaaagaccttggaccaatgcatgttattgagattgagttatcatttttctctaaacatttctttggcgtgaaatttttagttccattttcatttcaagcaagactatagtgcaatataatattggcatcaaaatcaccttaatgaaagtatttttataggcacaacttccatgcctaataatttcataggactgggttagaaatcaacagtagagtaagtgacagaatgaataacactctctaccaaattatttactctaacccattaggatgattgcttaaggattatccaaagaaggaatgaaattgggatacaattagcctttaaatcttcaagcaagcaatttttggagtgagagagagaaactatgatcaatcccttttaaccatctaagaccctttaagtagtgttagcatcgacttagacaactttcacagggttgcaatttaaaaaatgcaacttttgaagctaaaatttcaagaaaatggtgacgtgacctaggcaacgtgtcgcctattaggtgcaacacgttgccacttgtatggcaacgttgtctcattggacttgcaaagtgtcatctggaataggcgatgtaattgtaacgcaggtccatctgaatttagatcctttttattttggttgtccaaattgtctcaaaattgtcaaattctctgaatatgtttagatgtgttcataatctcaatatgtacatctaaattcatttttgtcaaatttttttatgccaattactaaaatttacatctacttgtgtgtaattttctaaataacatggcacctccttatatattgttttattttatatttgtccaatagataacaacatatttatatttatgaatgtctacacatatgcgcgtgtgcctaatttatttatctgcgtcttctgcaacttcttttatggactttgttggtcacaatggacatgtttggccaaaacagtggtttattctatccaagtaacaagtcttactcagttttttcattttgtacagggtgttatgatgacacatgctaatgtccttgctacagtttcagctgtcatgacaattgttcctggccttggaagcaatgatgtctatatggcatatttgcctctggctcatattcttgaactggctgcagaggtatgaagattgccgtggcaggttaaattgttgtagctaataactgtagtagtattgtgcgaattttgtgtcttaagataatacttattacttgattgttttctctctattagttttaaattattttctgtttttttttaaagaatgtcattgctgctgtgggaagttccataggatatggatcccctttgacacttactgatacatcaagcaagattaagaaaggaacaaaaggtgatacaactatgctttcgcccactctaatgacagctgtccccgcaattcttgatcgtgttcgagatggggtgctgaaaaaggctagtaaaatttgatgtctatgcaagtatttattttacatattaatttatatatatatatatatatatatatatatataatgaaact

SEQ ID NO: 272271 - DNA, 960 bp, Cannabis indica
ccctttcctgcacagtagagcacccgtgagccaagcccagcaagacagtataaaacatatcattaatatgctcatcatataatataagcaacaatgccattaaaatttgtctctgtgacacagacctgcatgttgcgctcacatgcctctttatgtttacatggtataaacctacgtgtagctctcacacgtctatttatgtctacatagcgtagacctacttgttgctctcacacgtctaaatacaataaggccttagaataatagttcatcttggttctggttaccgagtccagcctgattatgccttgaacgcataatccttaatctaaatatatataaattacataattaatggtgccactgcactatttgtctatttgctatagacctgacacgcctatgtatgtctatgtggcatagacctacgtgttgctctcacacgtctatttataataaggccttagtaaggtttatctcggttataatttccgagtctaacctggttatgccttgctcccataaccctattcatacatatttacgtaatcaaagcatatagaatcttagggtaataaccctaacttgcatactaaatactaattcgtacaacatattacggtatgcccgaaataacatttattgagggtaataaccctagcttatgccttcatttaattagcaacataaccatacattattgctttcttacttttataatagtctacggtaataatcctagaccacattaaaattaactcaaggtactagtttaccgagtctagcttagtcatgccttagatgcataattctttattccaacatatttatcatggtataacatagggctgaacattttgagcgggtttgacccgaacccgagcaacccgcccgaacccgaactggtgaacccgcaaaaaaaaattttaaaaaaagttttgggcgggttgggttcaaccc

SEQ ID NO: 272272 - DNA, 1581 bp, Cannabis indica
aaaaaaaaaaaatatgattgtttatttcataaaaatatttaatttcaagaaaatattttatttttgaaaaagtttttaattattaaataatgattgataccgataaaaatatcaaatataaatctcaacaacaaatattgttagtctgtatttacttataagaatataattaagcaacaattctcaaaatcgaatatacaacttagattaacaagaatggagtaaaaattattatactcaaaagagaagatactaaaatattattattctacaattaattaaaacaaaacaaacaattagaaatactcgaacacaacacaaaactcctaataaaaacatgatatgtcaaatgacccagtaacacaccaccaatgagccttctcctacaacactcgacgactccaagtactcgaggttgccattcccaaaccgaatcgatcaacacaatcttatgacctaacatgtttctaaacatattcttaacagttcaatattattaccaaatcataaaaataatacacaaacgacgaattacatcttaaagccaacaacctcccctattgcatagacaaagccctaaatataaagctctaagaaaatgcaacaaaaacaagaaagcattgtcacaatgactaaccaccatcaagtgaagccaagcaccatgaacaaaacctaacaattatagggaaaaatgcaagtgataggcatcttggtcaaagcatagtcatcacataaaataataacgacatacttaaagctaaaagaaagtcgaataattagtcagattgtctagctttatcaaaaaaaaaattcaaaaaattaaattagttagattgtctggtaactgctaaaacttttttaagagagagcttttgaaagttcaaaattttggagaatcgttttctatttttattttttttaattattttttattgaatcttaagaataaaaaaattgtataatttttattcaacaaaaccttttgcttttgaccaatcatttcctcatatactcaagcccttttcttatgcaaatccttcacactccttaataataccaaatgagcataatttaccatcaatgaatcaaacttgtgaatattaaataaaagtagaatcttataaataaagatttagactaatttaaagaataagaatgtgagacaaaagtcattacacatcccatacaacaacaacaacatgttactttgttaaactcaaaaatatatatatattttaatttgtgcaattaattattttctattatcacatattattcatgatggaaaatagttttttttttttttttttttgtagaggaagatccaaggctaagaggagactaagatcttcagaaggaggaactgataaggttccgagttgactcttcgttcgttccaagtgcaaggcgggcgaggttgtgagctgtagtatttatggagcggggaatgtgatgaaccgtgacacctggaaaagaagacaaagaggagactatcttggtaatcagaccagagagggctgagcggtcaggcgagaacttgttgatgcgatggaccaaattctggcagtctgaatcaatagc

SEQ ID NO: 272273 - DNA, 1503 bp, Cannabis indica
accatcaaggaagtacaaaacctgacaggatgcattgctgcactaagaaaattcgtgtccaagtcaacggaatagtgtgtacccttctataacattgtcagaggtaacaaaaaatttgagtggacataggaatgttaaaaagcattccaagagctgaaaaaacaattggctcaaccacctgtattgttaaaacccctagacaatgaagagctaagcatgtacttagttgtcatagaataagttgtgagtgcagtcctaacaagagaagaagacggtgtacaacaccctgtatagtacttcatcaagagactaatcgatgttgaaagtcagtacctactcttggagaagctgacctaccacttgctcttggcatccaaaaagctgaggccttacttccaagcacaccctatgaaggtgtacacgaaccaaccattgcaacaggttttacagaaaccaaaagcatctggatgactactcaagtggaccaatgaacttagccaattcgatatcatgtatcaattgagaatggccgtaaaaggtcaagccgtttagactttgtggtcgagtgtatgaacacatctcttaaagtctcttaagaatcacgaaaaaagaaagaggtagagaagaagcgagagcaagagtagtagtaaaatcttgaagaatcaacatggaaacttcatgttgatggaagctacactaaacaattgtccagtgcaagtatttccctcataaaacctgggggaaacaattaaacggagcaatcaaatttagcttcaaagcctcaagcaacgaggctaaatacaaagtgtgatcgctggccttaagctgacaaatgatgtacaggttgaccacctagacatattcaacaactcttaactagtcatgaatcaagtcctagaagaatacacatctctaggtgaaagaatgatggcctacttgagcaagattcaagacttgctaagttagctcaaaggctatactataaggcagatccctacagagcagaatgtcactacagatgcattttcccatttggcaagtagcaccgttgccgataaggaaaacctagtgccaatacagttcctaaaggaacaaagcattaccatccttgaagaagttgacatgttggatgacagtccaacattgacacctattgcagcttacctccaaactagagccttgcctgaaaaaataagaatgaggcaaaaaagatgagaagaaaggctattaggtatctaatcctagacagagtaatgtacatatagagcttctcaatgccgctcttgaggtgtgtcaccaagacttaagtcgagcagttgataatagaagtgcatgaaggcttctgcgacaatcgttcgccgtagttgctgtagactactttaccaagtgggcagaagctgaacccctatcaacaatcccctccaaaaaagtccttgactttatttttaagaacatcatacattttttcgaacttccacagaagattatgtcagacaatggaaa

SEQ ID NO: 272274 - DNA, 614 bp, Cannabis indica
ccagtattattctctttcatcattctaatattatttagtaattgtttgtgccatgttaatatggtaacattacgatggcactttgattataataagaattatccattacaataaattgttatcaaacgtaagagaagtagaagaaaaggagaagagagagaaaaatatgaattaactctggaaatgtattcttgtaaaaaaaaaaataatctgaagtgacatgcttatcaaatgtgtatttttttttttgggccaattaggtttttttgttcatttggactttgtcatgtaccaaatcatgtcttctgaatttttctggcagttaaaaattctccataaactattgagattattggatttaaggatttttgtccaactttattcaattaaactaattcggtgattgttcatgaattaaatcatgctcttcggactttgatatctactaaattatgctcctcgaaattttgacacgtgccaaatcatgcctcctgaatttttatccatgttagctttttcttagtaaaattagataaaagtccttaaatccaacaatctcaatagtttaggggcaatttttaacggtcttcaaagttcagggagcatgatttggt

SEQ ID NO: 272275 - DNA, 785 bp, Cannabis indica
ctgtattcagttagactctttgagtctattctatttatccttagcttgtatataagtgtatataaaaatagtgtttattcaatgagaatagtactttcatcattcttttctctctacttttcaatatccaacatggtatagtagcttttctgctttcgctattttttctttccatttgatcgttttctttcttctttgttcttccttcctctgcatcaatggcggcaccaacgacttcagttttcaatccagttgtatttgcacacaaagtttcaattaaggttgacgacaataattttcttctttggcgtcctcatgttctctcaactatttgcgatcatcgacttcaaaacttcatctcttatttgtttcagccttcgatcaagtttctcactcaagaatatgaagttcttgaacaaattaatcctcattttcaggagtgggaagtctaggatcaacttccctattcctggcagctctctttcatgtccgttgggatcttaactcagattgttggaggtgaaatttcggctcagatttgtaaaactcttcacatatattttgttactcaaatttctacaaaaattgatctttatactcagctccaaaagtgcaagaaaggatctctttctatcaattatgaatacttgtttctattaaaaactctcgtttaggttatgttggtcacaaagttgttgtcaaagaacatgttactgccattttcaaaggattgccttctctttatgatacatatgtgatttctattaattcaagaaatgatcaat

SEQ ID NO: 272276 - DNA, 1725 bp, Cannabis indica
gtcatgttctttggtgtgacaacctaggtgccacttctcttgcatccaatcctgtttttcatcaaagaacgaaacatattgaagtagatctccacttcattcgtgacagagtccttgcccaagaactttacataagacacatttctgccactcatcaatagctgacatcctaactaagcctctcctcaacatcagttcgacacttttagagacaagttaacactaagggaacctagtgtaacttgagggagggggggtgttagagttagttaggaattcaattagttagttttattctgttttttatctttctgtcaagtcggttatgtgtggtattgtaatacaattcaagttctcaaattatataatacatatctgtgctccattcttggatagagcttctctttcaatattctctgtttctctctcttgattctgctcttacagatataataaaaaaatattttattttaatttgtaaaaataatatataagattcatgtgctcaattaaataatataattcaattaatgagaatataattacttattactgtttacacttttctctacaattgtattctctttcataatatttcttataatcaaattatattaaacacctcgtatcaaatgcctaatgaaataatatagataaaatttaaaataataatagtaaatatcatttaatttgtgaatgagtttcttctattaaaaaaaattaattttctatcctaaaatgacgctaaactacttcatgaatcataatatcaaaatttgtgatttacatgagatagaaatatcttgggaaagctagacagtaaaatttaaatataaaaaacaaaacacctctttgtgttttttcgtcccaccattctacaaaaaataatgaaaaaatagattaatatcaattatataatatagatgatttttatattacaaaagtaaattctaatgcaatttcatgattgaaaaaactgatatgtgaattagtctctattagtctctattgttgagactgagattgagtgtgccaaaagtatatctaaattttccttccaacaataaaatattttggtgaagtcatttgaaaaatatgttatcggtgtagagagaaagctaatcgaaataacaaaacagttttataaaacgaaaagaaatttaatcataatgaccttacatactaaactagtaaacttaccatactcaaactacatatctggccttacttaaagagggaaaaagacagatatgcgcctgtatggatataaatgatcattaaaataaaaattcataattgaattattaaggaaaatactaaactggctcatgaactaaacactttttttttaaggatgtactacacactttttgtgtggtatgcatttcacaaattcaaatcccccttcccttgaaaaatactacagatgcatgcatgtaccacgtgaagtaaaaaatttaggaaaattttataatctaccttctaaaagagtagtatcgatatatctctatttattttagtaaccgaaataattttttagtcaaattttttcccatgatcatgtaaattacagttatttaagacatcctgtaaaattttaagaaatcaaaaaagttaacacgccgaaaattgcgttcaaatagtgtgttgcacgcgtgactatttaattttatacgcgtgtaaaatagactctttaaatatttattttttatattataaattatt

SEQ ID NO: 272277 - DNA, 652 bp, Cannabis indica
gggaacccaagcactagtcggctgagatgtgttctcagtgcagatgaagcttgtaaatcgttgtgtgatctagtgcttgattattgattcatgtctataattcatatcttgaaataaatcaatctaaagataatcaacttggtaatttggatcatcaaaatcaacaagttgtactttcagtgttagattcccttgataaatacataaagaatgagtctttgttagaagacccgacttgaagaccacatgagcacaacatgcagtcgagctaacgatgctaaataaagcaaacttacgagagtttttcttaccattttctttttattttttattgattttatttaattgagtcttgaggacaatgcttatattaagtgtgaggggaagattaactgttgtgtctatccagtttttttttctttagtgatttttttagtttatattaatttttcttgctttaattttagtaagtgtaggttgaatgaaattctgttgacaatgattgctcgtgtttgatgtgtgattttactttaatgtcttatgtatagttttggggaaaataattttgttgatgatgaaattcttgattgtgtgatagttataattataggaaaatgatatattctcacgatttgtgtgcttaactcatgat

SEQ ID NO: 272278 - DNA, 1222 bp, Cannabis indica
tcgattgttgctgatgatcattccagccctttcttcctcagcaccggcaaccatcctggtctggttcttatgactactgtcctcaacggaaccaactatcagccatggaaacgaggaatcacgatggcgttgacagccaagaacaagatcgcgttcatcaacggatctctccctcgtccagaacctagtaacactaatctcaactcttggttaaggtgcaataacatggaaatgtcttggttaattaattctgtttcatctgagattgcacaaagtatattttactttgatttagctactgaaatgtggaacgatcttgctaagcgtttcaataaaggcaatggccctcgaatatttcaattacaaacccagctcactcggcttcaagagggtgactgttttgtttttacctatttcataaagatgaaatccttatgggatgagctgaaagaatttcaacctataactacttgcacttgtggtgcaatgaaaattttcttggattattacaaccaaaatcaagtacttcaattcttgactggtttgaatgaatcctatgcttcggttcgtggtcaaatcttgcttaacgaacctatccccaatctgtcccgtgtgtttgcaatgatcgttcaagaagaacgtcaaagatcgttgggaacctctgattcaatccctttggctgctgcatctagttccaccaaccccccaagagccaagaaacctagaccatcttgctcaaattgtggcaaacccggtcatctagttgacaagtgctattttcttcacgggttccctcctggttatggggacaaaaggaagcaagataagggcaaagccaaggccaatgtagcagctacaaacaaaatgaaaaccgacattgagagcagctctattcatgctgatctatcatctcaatgccagcacttaatctccctgttaagccagcaactcaacaacacaacaaatgcagaccctgctgcaatgacccctactgcatcaaacttggtaggtaaaaattcattctcaacttcttggattgtggatagtggtgctacccaccacatgtgttgcaatctcaattgtttttcatcattttctaacataccattcccaaaatatgtctccttgccaaatggataacacatccccgtccaaaacattggtattgtcaagattaattcgaaaatcatactgcagattgtgctttatgtaccacggttta

SEQ ID NO: 272279 - DNA, 3255 bp, Cannabis indica
atacttgcatgttgaaaataccacaacaagtttgtggcaccgttgttggggattgttagttaatatttataaaaaataaattttgttataatttatttttcttttcaatttttgtacttattctgtttgttttaaaattttctctattcactggtttaactagtttatgctacgttaagggccaactgctagatttcctgctgatcctgaaatagagaagacttgtagacaaaacagaagaaggaaaagattggaaagagcattggaagtggttgagcaagaagtagggatggcctataacaacaataatggaggcgtcgtagatgggcaggctaatggtcttaatccactagaccgtagcttgagagattatgttctacccaatctgagaggggtcagatcctgtacatggccacttgccattaaagaaaacaatttcaagatcaagttggccatactgcaaatggttcaatccatagtctagtttgggagattgccatcagaagatccaaacatgcatcctgctaacttcgaggagctgtgttagacattttagatgaacgaagttagtgatgaagccattagattgaggctgttcttgttctccttaagggatagagccaagagttggttggtatctttgccactcaatctatcaacacttgagaggaattggcctcaaaatttctctcgaagctctttctcttgctaaggtagccaaactgagatttgaaatcaacaatttcatgcaacatgacaatgattctctatatgaagtctaggagagatacaaggacataattagaaagtttcctcatcatggaatagagaagtggatgtaagttcacaacttctataatgggttaacctgcactaactagatccttattgatgctgcatctggtggggaagagtgcaaatgaggcatatgatctactagatgagatggtcatgaacaattaacagtggccatctaaaagaagccaagaaaagaaggtaaccggtatgcatgaagtagatggcctcaccaagcttatagcccaagtagaaccattaacaaagatgatggaagctcaagtcaagcaggcttaggtgatctgtgaactgtgtgagggccctcactcttatgatatatgccatgttaacgtgaatagtttaccaatggagcaagctcaaattggatatttaaaaagatgatacctacccctaccttgatggacgtcgttagtatcatgattcacaactgtctagtaagaatcattaaggctttttcaactagagatataggccactattccaagggagtcctcaataacttgctcaacaaccaaattctagtggaggttcaaatattcaagcagatttattactctaattcatgctggagactagagcttccattaagaccttggagaatcaagttggacggttaactgctcaaatggccaaccatactcaatgtaacttgcctagtaatatagagattaactcgaaagagcagtgtcaagcaattttcttgaggagtggaaaataacatgagagcccaagggctgagcaataagtggttgaagagaagtcagatgacgacgaccagcaccagaataagaagaaaagaagactactaaaggtctgcaagcaagagaagatacaccgcctataagcattgagcatcatataaaaattccctatccttcaaggctcaagaataagctggacaagcagtttttgaaattccttaaaatattcaagaaactacacatcaatattgcattcgcggaggccttggaacagataccaacttacctaaagttcatgaatgatattttaacaaggaaaaggaggttggaagaacttgagatagtggcacttaatgaggagtgcagggcaatcctacaaaagaaactacaaaccaagattaaagatcaaggtagtttcaatattccatacttgatagggggttcggtggaaacaaaagctctgtttgatatgggagcaagtattaacttaatgccctcatttatttttaaaagaataagaccgggagaagctgagcctacaatactgacattgcaaatggtaagccattccttgactcatcagtggggtataattgaagatgttttggtgaaggttggtaagtttatcttctctgctgatttcttaatacttgacatggaggaagatgaaaacattgccatcatttttggaataccattcatagctacagggagagatctaatcgatgtataaaagagggggaattaaagttgtaggttcaagatgaagagatgagttttaaagtatttgctgcaattaacattcctactgtaaggttgaattagtgagaggttgtcatgaagtaactctcgagaagaagaaagagaagcgcaaagaacaatttcaaattttttgacgtcgtatgaaaagattgatgtgtagaaattgtgaaggtgactctaatcttatggatagcttcaaaattagcaatattataggatatttttcatcattttgtataagggcccctatggatgcaagaggtggactttatcccagttcacttttgtaagaggaaatttgtgtccagctatatgacgttaatgacatcgctcttgagaggcaccccagttaaattctcttgggaggcacccttgttaaattctcttctttagtctttagtgtcacattggggacaatgtgtccaataagtttgggggtgaacttaaaatttttagatttttagtcttttaaaatttttaggtttcatgttagttttagtttttgttatttttctatggttatatgttaatttactaaatgtgagtcaacttgaatgtaggtgcataccatggtttgaaaatttcatttatttttcaaaaaattcatgtgcttggtgagattgcattcttgactaattttaattttatgctttaaaagaatatggaatcataataggaaaatctctagcaattgaattggtttatgtatgttaattgtaaaatgtaaaaagttatctagaaaattctagaacttgcttacttgctatttgagatgaaataataaattatgcatgactagaaaagtaatttaggtattctttggatcgattgtgcctttcatgccatccttgtaatatttatcttggttaccctttttgagatttaacttgattctttaattctacaaattttcagcctgaacaagataaacccattattattcaaatttgatcctaattataccataagtggatct

SEQ ID NO: 272280 - DNA, 583 bp, Cannabis indica
tgaatttgagaatgagacatttgatttcttctcacaatttcaagcttcaaatgctactacaacaacatcagatgatttcttcttcttcaaaagctcctctatttggcatgaattatcataatatcactagtctattgaactctaatgattatgtatttgataagtactataatggtaatggtactaatctttttcaagaagatcaacgtgatcaacatggtcaatattatgatttgaaaattaatggtagtaacaacaacaatatgttggaatttggaggagtaggggagctacaacaaaatgatgagaatgtgatgagctaaccattgcaaccattgatgcctagctcagtggttgacagtactgaatggccttacaatcaagctggctctaatatgagatttggccctatgtgatggtctaattatgctttcttggtagtagtaataattgatgatcttcattagggaatttaattatgtttaattagtttttattatgtgggtttttttacttttggtttatcatatgttctatgatgtaataagtgaccatattttcttaatatggtattggaaacttt

SEQ ID NO: 272281 - DNA, 525 bp, Cannabis indica
cccactccccacagagtaactaccatgatgtatagtgccagaaccacgaatcctcatgattaaacaggcttaaaggtatggaaagaaacattctgcgtcagatacattgaaatattgatttactacttcattattccatttccctggtgactcgataatatctgacactcttgccacctcatacgcagggcgcgaacttggaataaacgaaggaggtctgggcaaccaaggatctctaaaggtcctggtattcataccattgccaatacttcgtcgtagcccttttaataatagatctcttccccataagattccttgccacgtagatgatggataggaacccttgtctgcctctaggatgttagatattctaaaatatcttgctttcattacttgtgccagaattgatgatgggttcattaagatgcgccatgcttgcttggccaaaagagcttgattatactgactaaaacgtctaaaacccaaaccgccatcagtctttggtttacaaatcttatgccaagc

SEQ ID NO: 272282 - DNA, 531 bp, Cannabis indica
tttgtcttgagtcgttaagcatggccatccacataataaaactatgctttggatagtttagccgactccaaacaatactcggccaatgttcctttggttcggctatgatggctttagatagccttgagtaatgacatacttgttactcaaatgctccctttcttctaaatcatagatctcttttactctctcttttattgccacaatctttttccaataccaactatcactgcttttagctttataatcccaccaagattgctcttttatgtatacacaatgcacccatttcatccacaaattatcttctttttagcaatggcccaaatatatttaaacatagcagcaatattccattcaattacctatttgaggtccaaaccctctgttgatttctccttgcaaacagtcctttaagctacggcagcaacccttttgagtaggtggttgccactccacaagaaactcctgcaaatggcctcaatctcagcaacaattttctttggcatcaccattatttgactccaatac

SEQ ID NO: 272283 - DNA, 784 bp, Cannabis indica
tcaataataatgttgtttagtacgcagaagtcaacagctacaaaatattatagttaagacatcaccatcacatatatataatatatatatatatattgatgaactcacccattagcaaaggaaaaactggtagctcaagtggtttctccggagcaccaaccataataagctttccatgaggcttcaaaagaccaatcaaaggtagcagaggatggacagcagaaaccgtatcaataataccatccatgcttcctatggcagccttctccatccaaattacaagaacaacacaaatgcatttagtttattaggcacaaacttaattacatttcatttatgactgttgaaaccacactaacactacataatggtgaaattaactaataataaacatttttaatcagcaaatttaaattacacattataatgtctaaacatctcatatgatcattttgtgtaacaatattaaagtaaacacagttatttgcaccacatgtgggaagactaattaattaataaatagcaaaaataaacaaactgagcatatgtattataccttcatttgttcttggtcacggctaaccaagaatgagtcagcaccaaggctttcaatagcttcttgcctcttatttggggaggtactaatgacagtgaccttagccccgagagccttggcaaatttgacagccacgtggcctagcccacctaagccaacgatccccacatgaagaccaggcttatcgagtccaaagtatttcaagggactgtacactgtgatcccagc

SEQ ID NO: 272284 - DNA, 1340 bp, Cannabis indica
actcctagaattaacactataagagaactaatattcgatcatttcagaaagttttaattctattattgtataacatgtttctagccacttatgttataaagttccccaaaaagaatttataagaatcatcttcttagagaaactttaatgagtgaatcaaagaactcaatgaacacaaaataggagttcatgtatactcaagatttagactaatctactaatgattatcattgtgatatgaataactcttttatggtaaaaaatatgttaatgaaagatattattacatatcagtctagtcatgtataatcaaatcttacaacacttttactacatgtctatctacatatgtgatccgaatcaaaatcgtacacactagagtgtagtgtacagtaaatcgcagatggtaattctatattaaagatttcttactttaatacgctaccgacttgttttattcatattgtatattctaattctcttgtacgcccttacaagattttaccatctccatataaataataaatttttagatatttattaattatacttctataattaaagtattcatttatcttataattgcattttatatattctataatatattattcatcaaatacttacttttatgacataaatatcaacaaccttttaaccataccaccttccgtatttatcttatatatatttatatatgtaatacaatgttgtatgaaattcatctgctataatttatcttcatcaataaaaagatgctaaaaaaatcgacactaatgtaggggagtctacttcttcatgtaccgttagtagcgagaattggatgttacctattgaaaacatgactaagatcaatctggatgcttctattgctagtgggaatgatagctttgggattggttggttcgcgcgtgactatggaggaaatgtcattgaagcttattcaaagttgttgcctggttgtatacaactggctatagcaaaagctgtgggagtcaaagaggttcttagatggataaaatatcaaaatctttctaaaattattattgaaacggaccgtcatgtacttgtacatgcaattcgttatacacttcaaatgaattcactgtttaggttgattatttttaattgtaagtgtttactttatattttaaacaatatttatattatctttgttaaataatatgtaaataaggcggacaattatttgactcgtactggttattctttttaggccgtcggtttgatggggggttttatcccggttgatcttcatattattttattagcaaatttaaaaatacatctgctatacttaatttttgcaaaaaaaaaaataa

SEQ ID NO: 272285 - DNA, 967 bp, Cannabis indica
attgcaaagtggggcccaatacctatccatggcttaccacttcgcaaggttttgccactttatttttccattactttaatgctagttaaatctaacctaaccctaagtggtttcctataaataggtagtgatggcttaaaggaaaagatgatgcatctcattccttcagttaaaatttgagcccctcttcctatacctagccgaaatctctctctctctctctcttcctctcttcaaaaccaaagcctatagtgaaagagtgagtgcccacacacatcaagtggtactcaatcatagtgtgtaaggttgtgaagaatccagtttcaagagaaggagattcggactcagatcttggtgattctctgctacagaaaggatgcaatggttagagatctgagtggaaggagaaattatattccgctgcaaccactgtaaggtacctgatactttatatgtgtttatttcatatcgttttagaagttcatatttgggatgttaataacatacttgttagtaaatctagatcatggtaaaataattccaacattgtcatttcttaagcaattattaagattatgtttgataaaaaaattgatgtgataggggtagaagaagtaaaggaacaatatatgggcagttcaaagatcttttatatcttttgaactctagactatattcataactccacaagatctctataacacctagggatgacagaagttattgatatatgtagttcaaacttttttaactttgaactctagactatactcaatacaccacagtacctctatggcacacatattttgattaaacatgaatataatataataaacgtactagcaaaccaagagaacttattcttgatcttgtaagtgttccaattaatatgttactgtaacaatagaaaatgacaccaaggaagttctttgacatagtatctgataggttttgtgccctaaataaa

SEQ ID NO: 272286 - DNA, 443 bp, Cannabis indica
acacctgagccacttttgatagaatttcctgaggatcactcccaccttgcagagacttacccctgtcaccttcccaaaatgaggctgttcgagttgaccattgaggagattgaggcccagaccgcggcccgtcggaagaggcttatgtcgaagtcccctaagcgaaaaagcagggcaaagaaaagtaagggagtaagggttgacgaaaatgctccatcggaactcggcatgtcatctcagcatgactcagccactgatgatgccattggggccttacttagtgctctcctcgagatctcgtcaggctagggcctcctaatcaagaaggtttctctcaccctgagaacctcccggcggctacgctgggccataatccggggcttccatcctcttctcctgctcggactcctgcttctctcctcggctgttgggttttatgccct

SEQ ID NO: 272287 - DNA, 2229 bp, Cannabis indica
ggttttttgcaagtaaaatgatagttgaggggggttttgccgcaaattactcttaaataaaaataattagaagatggaagttaggtcaagattcctgaaaatgaaaaataaaaacattatatttaattaatattgcattcaaacaaccgcaaaaataaatatatataaataaataaaaatgataagagagaaagaggagacaagtttaggtgtgtcagatacatatatactattcctatgtatattatatataccaaacgttaaaactatatatagatattatgggacaacaaggatccaatcttctaatttttcataatattttaacttattggtcggttcttaataatgggtttttattgtttgttctttcttttttttttttaattaataaaaatttataattgtcttgaacttttatattaattgtatttaattattttaattatcttctagtggtcaattgtttagtatgagaatcttcatggaggatcataaaaaaaatatattatatataaagggaactgcaaagttggtactgtaaaatttgcctgcatgtatagatagttatgaaatgaataatctattgttaaataattatgtttattttaagattttttctaattaaataattataataatgaaacggtttgtctctttaacattatagtttaaatcaataggggttgtgcaatgcaagtatatttcacgttataatacgtgcatgtaatatataaaaatgtatctatgtatatatatatatattcaattatagatgtagtgttttaaagaattttccttaacatatacattaatataagtaagtaatttttagtaataataaagacaatattttttattcaaattatttatttttattttggtctctgtcataacaagtcaaaattaattttgaaaactgaaacaaaaataatttatgaatgactttgtgtaacttaaaataaaaataaataatttaaaatatatcacaaaaacctcattttcaaaacagacaacattaatatatatgagcatgattggtcgataatctacaaaaattatttaccaaccaattaaatcataaccgcttcgaaaagtttataccgcgcgcacccccatcgtgaaactaaaaattcgtaaaaaccgcaccacaaaaaatagtgcggtgtgatttttgtagtttatgcggtttagactattactaaataattaagctatcacaaatacaacaaattttgagcaaaacttgtcaaaatactataaaacttgaaaataaatatgaaaaaaaaaaattaagtgtcaacaatacaataattaatgggctttaagttaaacatttacatattgtacctaaataaatatgaaaattagtatttttataatgtgcggtgtggtgtggtttgaaccgcatattaacaatttaaaacgcaaaccgcaccgcactgtgaggttaaggaaaaattcaaactgcacgcactgtaaaaaatttcaaattgtatttttttgtaatatgatacagtgcaagcagtttgaacaatttaagcggtttgatgaacaccctaactctttatactactcaaattatcattatattattattttacagaagaaaagatttattatttagtatttttattacgtactataatatatatacaatgtgaaaatttgacctttggagtgttatgtagacctaattgtcgtttatggcttatgttttcaatgataataataatgattgtttgagttgagttttacaaagtttggattttgatgtttgatgtaaatattatgttaaaatactctaaaatttatgctcctaaggaaacccttcatcttcgatctattcattcacttaacttttattatttataatattatcttccattaattatctcttttttttgactttttggacaacaaaagtagttgcaaagtattaggtactagtaaccttttatacataggcatgtttaataagggaaatttgattttctatgcttagaaaatcaaaaaatttgatttttaaaccaataattaaaaccctaaaaaactatacctttttttcaaaaccccaaaaatacccccaaactaaaactatctctctttctctctctatctagccggtcccaataatcccacaccccaggtccgatggtcggaccatggggtccggatggggtccggaccaatcggacccatcggacccccaaggtccgaccatcggac

SEQ ID NO: 272288 - DNA, 720 bp, Cannabis indica
gtaagagaagggttaacgggcataatgaaacatgcatatagcatgcttcaaacgagtacaacgaaccttatatgctgcattaagaaactccatcattgctgaaatcccagtattgaaacgagttccttcaatttcttctgtcacctgatgattaggaaaaacccatcagtcaaacaagttagacaaactaatttgggatacagacatgctttcttataagctaccatattaccttaacaatgcatttatggagggtgcgaagttgttccaatgtgggttcctcatcagtcaccacagttccatcatggaaggtaccatcaggtaaaggtgaaccaacaaccaacctccaagttcttcccaaaaatcggtggacaccttcaatgccactagtattccatgttttcgagtctctagtaaaatgtaagcaccgtaagaaaagagcaagatttgtttgctgtactaaatgaccgataaaaactgtttcacaaacacaaaagcaaagaatattctgtacctaagtggacccatgaacatttcatataaacgaagtgaatctgcaccatactcagaaactacgtcatcaggattaacaacatttcccctgcttttactcattttgtggcgcgtgcaatcaaacgatattaggattgtctttcatgacaaaagaatctcctgatttcatgacctacaagtcccaaaaactatcatttctagaaaaat

SEQ ID NO: 272289 - DNA, 1301 bp, Cannabis indica
gttataattttggtatcagagccgccaggtttgtctaccgaagctttccaagacatgtacaatcttcattagagaaagctcggttcacgattcagtaagcccgaacttgtttagtattctaagtgattatgaaagcatgttagggagcatattagattataattatttgttttaagtgtgtttcctttaagttcataagagcggtattaagttgttgatcgctgtctaccctgcctggcttatgggttcgcatgctaagtcctataaaatggacgccccacgaaatacaagaattcagggtcacatggttgagactagagacggttagggaaatcaaaatccccagaatccctgtggtcgcggccgtggccgtggcagagcacagggtggtcgtccagtaaatccaccataagctcctacagattgggagcagaggtttgtagaaatgcaagaccgaatccgccagtaggatgaagaaatttagagatcgaggcagcagggtcctcctgccgtgcctcctcagaaagttgctcaggtcgttgtagttccagcagtgctagcagaacaacttgttgctggcaaccgtatggagccgttgtacgagaggttccgtaaacaagcacctccagtgtttttgggaggtcctgatgtgatgaaggctgagtagtggctcacattgattgagtgtattctcaactttatgggagtggttggtaatgatcgggggacctgtgccacttttcagttccaggaggatgccctcgtgtggtgggagttgataaccctcactcaggacgtcacagttatgacctgggaagaattttgggagttgtttaactccaaatattacaatgaaaccgtctgtagtgctaagcggaaagagttcactgagttggcgcaaaccgaggggatgtcggttactgagtatactaccaagtttgaccgtctggccaagctcgctgttggaattgtgccaactgactttagcaagaaagaaaagtatttggccggtttaaatgccaagattaggcatgatctggtgatccctaccactgaagcaaccacatatgatgaaatggttgaaaaagctttgagagccgagggtgctgtgaaatttcttcaagagccccgagtgactccaagtattggtggaacccccacttttcctactcctgtctatggtagggatggtggtgactccaccactgatcagaaaaggaaagttaccccagcatctggtggttcggggcaaagcaaacgatttcgtgggaaccaaggtagaggtggacgccagggttact

SEQ ID NO: 272290 - DNA, 665 bp, Cannabis indica
tcttctctctcattaacactgtcaaaatgggatgagattgaaatagttgctgtagcaatttcattgctgccatcagatttgaagtccaaagaaacacctggaaaatattcgtccgccatggatgaaccgaagaagagatgataaaattcaagaagcagggtacgtgagggttctcaataagcaatacttgcttttcttttgtcctatccagccccaaaagaatagataattgggtttctcctgggtcccatatcaccagcccattacttgagtattctttgcttaagtgggcccgatcaataatgtaattaaatgaattgggcttgtggtttatcttatatgatattattgctctagtagaagaggaaaacattaaggccattgtgttacgggtattcttatggaccaaatttaaaaagtaacccaatggattgggcctaaccttatagggttgaaaggtacaatttgataatcttgaattctcagatcgtcttctacagtttgccgtcatcaaacagctcgcaccaggtacgagttccttggtgatcagcaagctaaactcctctttgaccattgccggccaacgaaagatatccgctgtatagcgcgtcttctccgacaccggcgagcggcccatatcatggtgtaaggccggtaacgtactc

SEQ ID NO: 272291 - DNA, 1211 bp, Cannabis indica
gctggagtgggtctcgccggagccctcggtgcctctgatcggagctggggacaatccctattgtagtgtccgggcatgccgcactgaaagcatccctgacctttgcactcaccctgatggtgccttttgcaactggggcactcagaataagaaaactgggtctctgcaccactctgacgactacctctactctggttcccccggaacctcttgttctgactcgagccaccggatgcagtggatgttctcctcttctggtccatggccgaaccactacctcccctgctaaagcctgatgcaggaggggtaggagccttggtagtatactcgcagtgccttctccaccatctcagcataggtggtcttgtcgtcggtggtgatcatcaggtcgtgtttaatcttcacatttaacccgtccagatacttctcctttttgctgaaatcggttggcactattcccgaggctaacctcgccaaccggtcgaactgggtagtatactcagttacgctcatattttcccgctgggtcaggtgggtgaactctttcctcttggcacttctgactgcctcgttataatattttgcgttgaagagttcctggaacctttcccaggtcatggtggtgacgtcgtgaatctgagacaccatgtcccaccagactagagcgtcttcttggaactggaaggtggcacacaccactctgtcattcccggtgacacccataaagttcagtatcctggtgatcaccgttagccactgttcggccttcataacatctgggcctcccagaaaaaccagaggtgcttgcttccggaacctttcatacaagggttccattctgtttgccgctactaccatttcggcctgagcagcaggggcgggtgccactggaacttctggcacaggcactgcaggagccccctgctgcctcaatctctgaatctcaagatcttgttcctctatcctggcttgcatttcagcaaacctagtctcccaattccgggcttcctgatcggcttgggcagcctgggcagcctatgtcgggttctcacgacccctagcttgcgggggaaattggtctccctgcccctgatttgaccctaccgagttgccctggctcctggtatttcgcctggcgtccatctagtcggaaccgcctgcgaaaccaagagttggcacatcaggtcatgatcaaagagagcttactaatg

SEQ ID NO: 272292 - DNA, 705 bp, Cannabis indica
agatttagtgatctctaattgtttgtaaagttcttataactttcttctatgttttttgaatttttttaaggtaaaaatggatagttgcatgcttggtttttgttgttgttgctgctagatttatgggatgttttctgtggtttttatatgtttaaattgattggattaaagtaggtttgatgcatgctagatggattaaccaagtttggatctttttaactcaaaaactatgatttctatggaaaattgatgagttttgttgttgtgcttgttggggttcatttctgttgtttgcagaagtttagatttgcatatttgagtagatttaaacaggttgtgatgcatgttagtgagttttagtcaagcttgagttttgaactcaaagcttggagctcacatggtgattttcgttttagtgcatgaagctttgttttaatgctttgaaaatgttccttagggtctaaatagcaggtctggaagttttggtgtgaattggggttgatttgaatgagatatgaatttttgaatgtttcctgcactgaaccgaaattctagttcaaggaagccatcaacaaccggtcgaccggttggggcttccaggaatttcctagaaccggaatttcggttgtagaaccggtctaccggctggggaaaaattgggaaccctaattcttcccatttttatgttgtttagggtattgccat

SEQ ID NO: 272293 - DNA, 1125 bp, Cannabis indica
cactcactcactcactcactccttacacttcactcttcaccactctcactttttgttactatggaaaactacaagaaatctccattgaagccatggaagaaaggtccaacaagaggcaaaggtggacctttaaacgcgtcgtgtgagtatcgaggtgttagacagaggacttgggggaaatgggttgctgagataagagaaccaaagaagagaacaaggctttggttaggctcattctccacagcagaagaagctgcaatggcttatgatgaggctgcaaggagactatatggccctgatgcttatctcaaccttccacacctttatcatcatcaacaacaacaacaacaaaactcaatcaaatctcataactttaaatggcttccttcaaaaaatttcatgtcaatgtttccttcttgtggtttgcttaacataaatgctcagcctagtgttcatgtcattcatcagagactacaagaactcaagcaaaaatcatctcttactcaaatttcaactagttcatcttcttctagtgatacaaaatctgaaactcatcagatcaatacagaggaaaaaacccaacaagggaatttaacagagaaggagaagaatcatgatggtggtgataatgagaagcctcagattgatttacatgagtttcttcaacagataggagtaatgaaaggagagagagatagtaagttagatgaagaagaagaagttgatgatgatgatatgggaaagcatgtggctactcaagatcagacctcatcatcatttgaagaaattcatgatcatggtcatgagcttggagcttttactgacaagaatttcaattgggatgccttgtttgagatgcatggtatagctgcagatcataatcatcataatcatcatggtggtgcagaagaagaagttggtagctttcaagtttgtgatgttaatgaagacatgatttttcctacttcaatttggaacttctgagataatcagctgattttggatcaaagactctttcatgggaatgggaaaaaaaaattctaagctacatgacatatatataatatatatacatatatatatatataaagagtgaaagagagagagtgagagtgagagagagat

SEQ ID NO: 272294 - DNA, 1553 bp, Cannabis indica
ggtatcggtagttagtataacccccactgctaggctactgccatctacaactttcaccttcaactcagggtatcttttcacgtaaatctcaccatatgcattcaaatcttctttctgcatccacgtacatgactatttattaatttaattaatagaaagtgataagttagaggtaacatatatatatatatatatatatacatgcctgattcaagagacctagactcaatacttttacacccttttcctcagcgtcaagtatggctttctcaatcaaattgttaacggatgatttttgccattgtagaaaatactgaaacaaaaaaagaaaacatgtgctgattcaatataagttatagacagtagcatatataatgtgatatttgctcaatattaatataagttatagactgtagtatactatgcaattcttgcatacttgtatcttgtacttgggtatagcccaagtttgcaatgtgagtttatggaaacggtggctctcaaccaggaaaggacgagcatagagcccagccattagggttgacaaggcagtgagaggccacatcaaccaaaggtaccatttcgatgaagagtgaggcctagaggccaatgcaggaaaccctatctccatatggtatatggactcgggtgtggtcatatgtgttaaatacaccacattaggtaattcctcctttcttttcagtgacatctcatataagttttctgaagattcgtctacggttccatagatgtaatcatacattggcatgaacaagcaataattggttcggaactgagtgtggtgcaacgaatgaaacctatacaatatataaaaattaatttcactacataacaagatatttggcacataatttttaaaatgtttatgtttataaccaacaactaccaaatgattgtttttagggggaaaagtattcaaaatcaataaaaaaaattgtaattatataaaagtttcatcctccaaaattaattgtaatgcgtcccttaaagtttcattttgaaatatttgtgagttaaactaatcgcgaattcacacttattagttttgttaagttatatgagacataattacacaaatagaacagtaagacaacgattaagatactaagcacctatactactctttagcaattctcctaaaaaaaaaatctttacgctaccgtagcttataattaatgacaggatcaatcgattaaaattatatctaatatttcacaactcatagcttgtcaaactacatatatatttacttaaagttatgctctcatatatttatttaaatttaaatgcacacacttatatccatccatgaataatgatgattttgtcaaatttaatttcaagtagtacgagtgggacctaaacatataaaagtaggtgtaatatatattttgtaggcaggtaacttatatttctaaaaaagtagcaccaatatatggtgccctaacactcataggtaccataattagttgaataatattagatatgttaaagtgccaaaatatcaataataaagagagagagagagagag

SEQ ID NO: 272295 - DNA, 1994 bp, Cannabis indica
aaattctatttttttacacatgcaatcggcctccatcgggcccaccatcgggtccatcggacccatcgagccatatcaaattctatttttttacacatgcatcgggcccactatcgggcctttgtcttcctcaattttttgtgttaccatcggaccggcatcgggcctgcatcgggctgcatcgggcctgacgaaatcaaaccccaaacccagattttgcccaaatcacatccgacgaaaaaaaaaagagggttggtgagggtgagatggtgagagaacaaccgagagagatagaggaagagagagagttgaggtttgaaaatgagaggggtatttttgggtttattgtaaagtggtcatattttttaaattttaaaatgtattagattagggaaaaatttttaaggtattttatgcatattttttcaaatttcccctccaataactacagctaaaataatctaatctaattataaagaaccgaccttatttgaacccatctaataaaattaaatatccaatcataattagatcggttacatgtaaattttgaaatccaatcggatcacttattaagtgcgacatccgatcaaatgagtaaccgaatgaaacctatcaaattatcattcaatagtcatttgattatttttatatatttttaaaatacatttatagttttatatatttaatatattttatttaaaatatattaattatttttattttgcacctgcacacttgagaattaaataaaaaatcttagatctaaaatattaattctaatcttcttaaacgctatcaatgcatattgaattaagttttgtttttttgacagttttattgcaggatcatgagaattatgttagaataaattaatatttattatgtatgttttttttatatatattttctttttaatgaagtaagcttaaatagtagctaaaaaagattaaatagatccaatttaatttaatagaaaaccaactaatacatccaagctgaatctatagtgcatgctctcattacatgcccatttgcacactcatgttggatcaagttgggttcaacacttttgtttctacgtacaacactgtcaacatttggcaattagtttgataatctttttactactcttgattatgagcgggtttattgtgtttccatgttgcatgtgggcattatagaaggcccgaaattaatgcgacggtttggaagaaaaaattctcctcgataagtgaggttcttgcatcggctgattaatgtaagtcttaattattggcttaaggctcaggataatactaattcgtcatctatgttttttgaaataaaggaaatggagcggagttttggactataaaccagaattgaaccacatcaaaataaatattgatgctgccttattttcacgggataattcttaatagtttcaaaattgtagcttgtgatagttttggctaccttattgaggctaaaacttgttatcgaggttatgtttttgatgctacagttatatattgaagaagtaagcaattacaacttgtagaaattgagactgatagcatgatctcaattcaaggcattcatagtaatcaattgatcttctattatttgactattcacgattgtttactttaactctcatctttacccaatgttaggttaggttttattagacatgatcaacaaattaagttgttcatgttgtggcaagacattctcaatttatttctggtcgcaatatttttgagtataatgtttgggttgatttagaagttcttctatactctaaattaatgctaatatttcaataaaattgctattcattttttttaaaaaaagattaatttatattatttttttttgtttttatacttaattgaaaataatttttaatggcttctgatttggctactcttaccactacaagaaatatataaaaatatttatagtacactataagaatataggatattggcggctaaaccacctgaact

SEQ ID NO: 272296 - DNA, 2255 bp, Cannabis indica
agaccaacatcggacaaacacaaaaacatagagttggatacccatgagaccactatcggacctacatcgagcttatatcagacctacgtcttcaatccgaatccttttcaaccacagaataccatcggacatgcatcggacctagcttaaaaaccagtttcttgcccaaaacacaaattcagccaaatccaactctaaatttaacccagactcacagagaaacacatatattttaaccttaaatcaataaacttatcaataatctcatacattttaaccataaatcatgcaaaaatacaatagatataaatgaaaaagggagggaacaaaatctcttaccttcgacattgcaaactcgatcgtggcctcaggtgcgagatgtcgtgatagttcgtgatgggcagtggtcgtgggttggagagacaaatccggtggttgtggccgtggtggtgggttgtcgttcgtccgagaagttgttacaatgatggtgaaaaattgggtttgtttagaagagtgtaagagagaggtaggtgtgttgacaaatgggaggaatagttttgactttaatgaaaaaataacttattctacaaataatttttatatactaaaatttagtgtatcaatttgtccaataaacacataataaatcaattttcctttttacaataatccatccatatataacgtaatatacatgtgtgtacagtgtagtagtagtaagtaatggcgtgtttagttgagaaaaaggtttcacgtgggtggttagtgcagtgaattgcattggcgtagagattggcgatgaattgaattaataaagaggtacgtagggccgcacgtgggtaggacacaacataacacaacacaactgtcaaataaaattatgttatcccaacccccaaacaaacatacagatctaaattctaataatatatctaaacctgcattgcatgcatatacgccaaatcacacacctaatcaaaaccaaaccaattattatcacctcccctagttctctattcttttcttccttttacacatattatatcattacattattacattcaaaactatctctttgggtcctttctcattattccaaatccttaagataaggagagtcagaatatattcatcattttcttattagttaagaattaacaacattctgatcttattttccaaaattatatattattgagtcttgtttttagcaataaaataaacaagagaagattcgacctatataactcttttattttgtaacgaaaaaacaaaaggttgaaattacaaaaagagtgatcattttgttatcagatcatataaaatgtacggatgtaaacttttcacagaagtatcaactattattaataaataaatattagcttaccttaaccggaaaccttatttgattgattactaattatttgcataatataaattatattatatatataatagcataatcagacaatggttgggacccatgacccatgtagatggcatgtggatttggtttaatgacccaattaagtaaaacacagtgcaattaagcttcaatgattcaccaatattttatttataatgttccacattatcaaaacattgtttggtattataatatttttatatatttaattgctatcggctatatggggtcggctattaaaatataaaaacacatttatattaaagactaagaaagaaagaaaaggttaaatgtgctgagacagagcttaaccaagtagaattggagattgttatacagaccaacaaagtacaaaccatatgagggcttggaagaccataaaatcccttgaagatgcattttctcatatcatgatgtgaccaattttacttgccaaaattaagaagagaatgcaataataataatacaaaaaatctaaattcttgtaaggtgaattatatagtgatgttaatattagcattttaagtttttattgtaatcatattgagtgttatgtcttttgataattatattatatgacattttatatgttggtaattttaataattattttagtacgaatgataaaaatagtttaaatccttcttagtactcgcattatattgttaacttttaaaattttattactaaattcaccatggctcctgtggattatgttggatgtaagtaatacatggaagcatcattacacttttgaaagacttattgagctttttttaatcaagattggaaagatataattattctatagggcctctctctttcactt

SEQ ID NO: 272297 - DNA, 698 bp, Cannabis indica
ggttatccgtttacttgggagaatgggtgtggtactaatcattggatagaagtgcgtttggatagggagctagctaaccttttttggttgaacatgttcacttctgctaagctccataatcttgaaatttcaacttcagaccatgctctgattcttatggtcatggttcctgctgcatgccacaattctgttaagcggttttggtttgaaaatgtgtggttgagggaacctctttattgtcagattgtaaaggatagctgggagatttgtgagtctaatgatgttatgcataaaattcagttttgtggggacaagctggctgtttggggtaaggaggttactgggaattttaaagaaaggttaaaaatgtaaaaatgaagtgcagaagtcgaaattgtgtcgggatgaagtctctgtagccaattacaaacaagcaaagaagcactttgccgaatgttatgtgcaatgggaagttttctggcgtgaaagatcgaagcaattgtggctgcaagagggagataataatagaaagtattttcatgcttctgcaactacaagacgaaggaataattttgttgcaaaacttaaagatcattcgggtgcatgtgttgactgggatagtggtttggatgatcttatggtttcttatttccacaagcttttttcctcttcccaaaccgattggagagaagtcacaa

SEQ ID NO: 272298 - DNA, 803 bp, Cannabis indica
tcaaacagatcatcattatcatacttcatcagatttggtagatgatgcatcttcatccccttcatcatctggttacttcatctcatgatcataatggacctttgtatgaattgtcagtaactcatgtcccaactacccatcaagtaagtttttcacatctgagatttgtccaagtacatttttgtactaatccttttttgaagattgcaactttcttatgattgaattctatgctaaagttcttttcttgttcaaattttcaggagaggtctttccaagttttcccaaggcaaatcacagtcattcacatctctatcaaaagtgttgagtatagaagatcttgctaagaaggaaaatccttacaatatcagaagaaaaaatgaaggcatgtaagagttatgctggtggtttagataccaccaaattatatactcttcccaagcccaccatttctaagaaggtctcgagaggttcttcatcattatctttttctttcacaaatagaagatctgcctagttttcatgtaacaaacaatagcctcccctccatttcatgtacaaaagtacttctgatgtatctttatttttttaattgacattattcatgcaaaccttcgtcttttgatatgtacaaatctacgactataaatgccaattagaaaaatttgtttgccaagattcaaatgtcttctgtttcaatcatgttggtgataatagattgatcaatgttgacatttttatccaattttgtgatctttcatagttcaaaattgcaaccttaaaagaaaattttaacatttttc

SEQ ID NO: 272299 - DNA, 622 bp, Cannabis indica
aaaaatatgagatttgggacgatgcggaaaatatatctttaagcacgacacagcacgagaagcacgaatagactagtccaaaatgcatagtacacgacaagtccgaaaaacacggcacatattacaaaaccttataatttattattaataataataaaatataaatttattaattataaataagttaaattaaataataataaaatttaaatataatactaaatattataattctataattaaaactattaaaatatataaaaaaaaaattatattaatttatttataggcagtgatataaaaatttgagtatttataagtaaatatttaaatgttaataatgttaataattttcttatatgattatctgtaaaatattgttcaaaaattatataactatacataaagttttgaaatatacataatttagtatttgtaaaaaaatataaaaaaagtaaagcacaaatttaagtccggatatgaaaatagactggtctgtttaagaaatatacgagctgacacgaacaaaacacaacaagaattcgagcatggcacgaaaatattgagtctacgagttgtgctgggtctaccctttaaaaaatattgacatataacacggcac

SEQ ID NO: 272300 - DNA, 701 bp, Cannabis indica
gcagtaagattggcggcctccatgtttcaaattagctcttctaaagttaaatttgaagaaaagtagtggcaaaaacatgaaaaggggttaaagttaaattgttatgttattcctttccttttaggcctaagcatattttaatttttataagaaatattggctgttaaattatttgaactacactgttaggagtgtttagtaatgtctttgtttttttgattttttaattacaaaaagaaaataaaatttgtgtttttaatttttgttttaaaaacaaatgtattctataaacacttgagacggtggtccgggtccagaactagaactggggcaaggtttggatcaaagtctaaaatattgattaagaaaaaaaattatttaaaaaaagttgaagttaatatttttttcaaaattttaaaattttgattctcaattataaaataaaaagtaaaaataattttgtaaaacatatttttagaaaatattttccttttttaataaaaaaaaaaaaaacttattaaagtgttattaaacacacccttaatgaaacttaaccccacaaactatttttatagtagtaaaatcttccaaactcacatatggtctttaccttaatgttaaatttgcaaaggtaagtgctaagctgccaggtctatcattacacaatggtacacattctatgttttgatttgtccacataa

SEQ ID NO: 272301 - DNA, 860 bp, Cannabis indica
agagttgcgatttttttatctttttttcaaaagatgagttatcttttcttttagtgagatatttcctaatactactataaatagaatcctaattctaataggattcatctaactttcccattactataaataagacctcttagactacaaatagaaataatctaaaaactacaaattaaatattataatttttattaatgtctatttctgagtagttttcttttagttaagggttatttcaaaatccaaaatatgaattcttaattttattattgaatgttaatttttagtttccattatatatcaaattgcttctatttttctatgttcaatgttatgattattgttttaatcttgtttagacggccgctaaattaggttttactttaatctactgtcatcttaggattactattcacctaatagtctaggattctaagtgtttgtgacaaattgcaatttttatttgtgatgaagaatagaacttaggttaaatgaattatatgcttcattgatttgttgcctagattagtctatctccataaatctcaatgctttatctaagttaaataaattgcatgcttcatggatttactgctttaggtaaaagagttaattattgagcgcttcgccttgattacatacaatagggagattgggataattgactgcttcagcgttatctgcgggattaatagtttgattggaaactgaaaattacattctttaataggaattaggaatgattgttgagggtggcgaataacctttaactagtttctcatatcgtattctttatttaaacttgttttctttttaatttttattattgctattctgatcatcaaaactcccctttt

SEQ ID NO: 272302 - DNA, 860 bp, Cannabis indica
cgccgactctacggattggcgatttgagtgatttcatagctccgctcaggctttgatttgctctctcaaggggttcaaatcttccgcgcgaattaagcttctgatatatctgaggtatttaaaggttctctctttatcaaattcttttagtaataatatctccacttactacatctacatgggttggaatggcttttgggaattagattgatgtgctattttgtttactttattttgttgtaattatacacatttattggaatgaaggtttcgacttccaaaacccaattgaaaacagacccggtaaaaatttcgttgaaggattgcttagcatgcaggtgattaatctcattctcagttttctctttcaaaagtctttctttaagtttaattttttgagttatgaatagctaaatgaaagattatggatggttaattagttatatgaaagtttggttttttttttttttaagaaaaagtgaattatcacattttgttatttttgtagtacttaggttattaaggaattttgtacgttgcagatacaagtcccatgatcgagcttcagtaaattgtttgaaatttgtacctatagtttccctgtactgatggtttcatgttcttggttttttgatttgctatgcagtggttgtgtcacatcagcagagacaattatgttagagaaacaaagtttggatgagtttctttctaatattgataaagggaaggttattattatttccatatctccccagtcaagagcttcacttgcagttcattttggtatttcaccaattcaggtgagggcaatttttccttttctcgagttcggttagcaaactttcattctttgttttgct

SEQ ID NO: 272303 - DNA, 783 bp, Cannabis indica
aaaaatctaataagtacaataattcataataaaatataaattaatatgtatacatcaatgtatatttaaataagtatataatcaagtaactcatattaaaataaatgagtaatttgcggtataaatatctaagtttaactttcgattgcagataaattccctaacttatatgacctatataaccgagcttccaataagcagatctagaatttatcaagtaaattccctaacttataaatttcttattgcaccactatagatttagaattgcactctcaattatatagaacgctctatatgttccacgatatagatacgctatgaaaatttaaccatcgttttaatctcaataattaaagatcctctatagatgatttacatcgagtagggataaatttaccgttttacccctcaatgtattttatccttaaaacacttagcttcctataaatgatatttcagtaaactaatataatcactgaaataagaggtcttctatttatctctattaagctaagctcgaaggaaatcatcatttcacttctatgtccagatagaagctatagattccatatctatgactagcgctcccactcaattgtactatcatgttcccaagctgtacgtgtgacccgaaccaaatagtaggctttgactaacaactttaagaacacaaataacactcttgagatcgaacctaaccatgtcaggattatgatcttttgatctgagatcaaccagtgatattgacttacaaagatacaacggtaagattataatatc

SEQ ID NO: 272304 - DNA, 1603 bp, Cannabis indica
tggatggacattggatgatattaaattggattggatcggttatctattggattgaatgtctcattcaacattcaatccgattcaattggatttttaaaatttgcatctgatctgatccaattatgattgtatatccaattctattaaatgggattggatcgatcggttggaattggattgaatgactttctctacaccctaataataatcatataatcttgtatattatctcatatgcttgaatcttttgctatgcatttccaaattttgcccctttaactcccaatttttgaagaagaaatagtaaagctaaaactccatattgttaaaggattaaacacactttgattttaaactgttttttgcaatgaaaatgcttaagctatacaaaatgtgaacttgaatttttttcttccaaaggcaaaattgtttgttaagaaggcctcttcctttcatgctcattgctcacccaaaaccctaaagccgcgatcaccggaatcccgaataccgcaatacacatccttgaacaatgcctaactaagcaacaaaaagtgggtaagaggagattttattcaccaaaagggcacaccattttactttgcttagtataaacttccctctctttgttgaaaacataggctaaagcgtttcgggttttatgccttgaaagagagctaagtaaaatcgttgcgggttttgggtgagaaagagaactgaattttctaatagttcagttctctaatttagttctttccctatttataaatatatatatatatatatatatatatatttggacattctattctatctttttatcttagtgatatattagttttcaaaatttggtcttttaaaatcccaattaaaaatataaagaaaaaattgtgtagtagcctttatttagtaaaacatgatatattatattaaccaattgtttaaagataaacacttgttacaaaattgacaattgagtaattaacaactttcaaaaccatttcagtacaaataattttaccaaaatataaggccaaagcttagtagagattactattgtcatgctcactcaatacattatcttctaatgatcttttcttgaaaactctttctcttgccaattttgcctgaaaattaaaaaaaaaaaagacaattaaacaaaattgttagaaagattaatttgatctaaactaatatggatttaataataagttaatattattttggattttgtgttttgcaaaatttaccgaatgagtcttctattttattaaatgagattataaaccttgtattttccaaaacggtgacaaaaaactcagtggcagattaaacaaggaggagtcaaataaagtgtattttcacctaattcttttagtatgtagtatttataaattaattagttttatacaactgtatataaaataacgaaaatgctaagggtcaccttatagtgtcaagtactataaaatgtggcataatattattagtgtaaaataatattaggtctcaaattattttaatttaataaataatataaaaaagcgctaaccaattgtatggtgctacttcgatatggagttggacactataaaaacacatatat

SEQ ID NO: 272305 - DNA, 1766 bp, Cannabis indica
aggtttcacatttggaatgtataaattgataaaatattgagaaaatgatctataaaatagagaaaaatttacaagaaaatacaacgaaaacttcaagcctgaattcgattatgttctgatcagattttagaaaaaagtcgaaatatagaagttctagatctctttttatctttacaacgcatcctgaattagctcttttagagtttgtatgtaaaagttatgtatattttactgagagaggtcgaagcaggaaattgaattctggtcgcgacaagcccgttttcaattgtgactaattgtggtcgcgaaccgtgggtttttagctatacactatggttgcgactagccttttatggtcacgacgagatgtttcgtacgtgaatacgggtctttcttaatttgaccattctgaagtgtaaaattgatttctataaacgggtttccaatttttatacaatttattgagaaatagaaccctagaaacaaattataaggaggttgaggaagtgagcgtggcgatctggatcaagttcatcatctaattctttctttttcctttttaatttcttacgttaatttgtgtttctagtttgaacatggatttgaattttgaagttatgaactaatttctcaatttagagatacgatgaatgttgattgatttttactccaattaattaatataaaatatagacattgatatcaatcagcattttagattgagaaatatttgacattgtatctttctgaattttactccaattaattaatgtgattttaactccaattagtaaatgtgatttgaacaaatatttgtgaatacatgtgatttgtgaatacatgttcaaactagaaagatacaatgtcaaatattttatagtaggataaaatcatatttgtgatttttactccatttagttaatgtgatttgttcatatttgtgttaatacatgttttagattggccacctctaacatgattcatgatcctactataaaatctgaaaagtaaatattaggaatgctctaattgaacaaacatagatttttatttaaaacgagaatattcatatagcttgtgtgaccattaaattattacttaatgcaaactgtatgttaatctaattaagagatacaatagataatatatgatttatgactttaatgatctgaaaagagttaaagttattttataatctgtcatcaaaagaagaagattaataaattacataataattggataattaaaacaacaagatttatattcctaatctctcatttgtatttgaacaattttattcgatttcttttaattttctattaatttttattattttttaagattgtttcgataaccaaatagaaatataaatctaatttaatagtattcaattttaaattcttgtaattcgacttcatatgtgtgagtactacttgatacgtgcacttgcgtagctttacaattttttttgtaacagttgaatttatctcaacaaaaatgactcattgtattgttgagcaaaactcacaaaataatcctaatgtagtattttctatgtaccttgcaaatcaagataatcgttgtgttaaattattaccccacttcctcaacttgcgtatggaatcaccagagatgaggcctgcagagcttttcttccaaatgcatttgcttgcaaaagaatccaagaggtggaccagactcttctttggagcactgtcaaactccactgagatgggttctaactaagggctgttcatactaatccc

SEQ ID NO: 272306 - DNA, 1532 bp, Cannabis indica
cttctccttctcttactctctcagtcgttctttccaaattgaaaaaaaaaaatggtctcttaatcctcctctctcatatcatctttcacactcttaggcaaccttctatgtgaaataaagctaagtcaaaggtggtgaagtaatctatcttttataatatctcggagtcgatcaatgtagtctttttctttttcttcttgagtagtttttgctttacccagatgattttcttgagaaatcccattgatgaagttggagaaaaataaaaatgcttatatagttacttaatctgagaaaatattgtatttttctttacatattgcatttatgtagtcttaatgtttgttgtttctcaagtttagtctcttttttatacatttatgaaatagaacaatgtaatgatcccacaagcttgttgaaagtaattttgatatttcctttttttattgttattttcattagataagaaaatcagattaaatagagtaaattgttttctcctttttattatattgagttaaacgagtatgtggtttgtagtctaatatttgtaaataaatttagtgatactgtttatgttattttagaaaataattagattatttctattgtttatattatttttttcaaaaagtttcagattatttttcttatttatattttttatgctgtttattaacatgagatatatttatttgtgatattgtttttgctattttttcagattggtcacatagattgaaagttagaactaccaaaattatagttagtttttttcagcaaaaaaaaaaacgtttgtttgcttgattgggcgaaagagaggtactttatccactttttgatctgataaacatatattatttgtatttttgtatgttatttactttattatgcttaattatttataataatttgactaattttgtttttttttttataattgtagaaaaataaaagtaaggtcaagggatcatcaccattcatcaaaaataaagacttgaagttgttatggtccattttaaatttacaatatataattttaatggatgactgtaatatttgatccttaatattttgtaaataagttaatgtttgaagttttatttaaatttgatttttttttttattatgaaataagggttatgacccaacccgacccaacccaacccaacccaacccaacccatgaagtaaaaaatgggttgggttggacaaaatatagtacgtgattgggttataaatctccaacccgatgttattgggttgggttattgaaatacctttaacccggccaacccaacccatgcacagccctaatatggcctaggaaaactaccttctctaaccaaaactcttatttcttaaatttggcatatagatgggtttccttaagtcagttcaatgtcaacctcaggtgttcctcaggttcctccaaagttttggagtagatcagaatgtcgtctatgaacacgacaacaaacttgtctaggtactccttaaacaccctattcatcatatccataaatgttgttg

SEQ ID NO: 272307 - DNA, 965 bp, Cannabis indica
attttaccgaatagaatcataagtagttaattttagttggtacttttaatccaattccctgtgggatcgacctcacctgtgtgagatttactacttgattgcgtatacttgcgtagtgtttaaaattatagcaacaatagtatgtttatatacgagtgcttgattgttttataatgtgcttattgtataatatagcttaaatgactttcaactatcctttacttaagtcatttcattacaaccttgaaaaatcttttgattcgagcaagaattgttaacattagtggaaagagataagtcatgcaagtatattgatctttggactgtggaaagattggttagagtagaatgattatgatgcttttcaaatactgaagttaatttgcatctatacattatttttcaaaggaagcattcaaattaattgttagaattttaggattgaaatgctggtgtaattaattgattgaagtttcataggtggcagcatcaatttgattatttgaaggcttagttaattgtatgtgtgtttgtatttttgtcttagtttttaatcttactcgagggcgagtaaggatttagtttgaggaaatttggtaggttatttttagcctaagtttcaagtcattttttagagttgttgttttttttctttgttattactcttgggacggttttacgcttatttctttttatttcaagttttggagtattaaagtaaatattttgtcaaatactaaagggacgggacgagttgaaaataacaaacatttgaagtgaaatttttgaagctcgtcgcaacgagtgtaagtctagccacgaccaattatcgtcgcagcgagatgaagagtggtcacgacaagcttaattggaagaaccgtgatttttgactatgtacattgtcgctgcgactagacctttcatggtcgcggcgagatgttttgtacgaaacttacatgcgattt

SEQ ID NO: 272308 - DNA, 798 bp, Cannabis indica
cttgaatgcttgtcccttttgataaaaatatcattttgaagaagctcttagtcccatcttagcgaaagacaattctcgaagcaaaattactagaataggcgtaagggtatcaaaattaccagtggtactagcagcttcatacatgtcaatatcgttatcgatctaactaaatatcaagttttatataatttaatgtaataacttttaaagagtattgttaactaattacaagacgatatatctcaaacaatattaggcactactgatgtccaataataatagtcaaataaataataaaaaaaaaaaccaaacttggtttaacttttcattagctgatttaattcattccttctataaagaattttataccaattaactagcttgaatgatggaaatgataaataaattaagttaaagggttaaaatgcttttaaagtttaatctaacataagaataaaagagcaaagtgtatgaatttgtgatatactacttctcctcaaagcaataaaaccaactcaaattataaagtcattccatatacacttgtcaaaatttgcggctcttggatttgtgttctacactgaaagtgaaaatcggtctccaacacttttgttattattagtataattttatattcttgcctttcaatttattatatcaattttgttttcactaaaataacagtgtaaaagataagagatcatgaattttcttccttttttttcttgcacttgtcttatcttattaatataatgcataccataaccatatgaatattatataattataattattctt

SEQ ID NO: 272309 - DNA, 4667 bp, Cannabis indica
gacttcaaacgctatcataacattgaccgtgattaatcggccaggaataaaagcactttggttcaaggacaccacttaatcaaggagatgcttcataagattagtcataacggtcgtaatgatcttagagagaacattacaaagagatatagaccttaaatcactcgtgcggtcaggatatttcttcttggggattaacaccacattagtatcattaaggtccattggcatcacctgagtgcgaaagaattgttgtaccatgaacactacatcatgaccaacaatatgctaatatttttgatagaaatctaaattcataccatcaggacctgggaatttatcaggatacatttgaaaaagcgccaccttaacttcactttcagtaaccggccttagaagctcttcattttgactattcgaaacagacgtaaccacacaatctaatacatcttcccaatccgacaaacccaccataaaaagctcctcaaaatactttatcataacattagcaagaccagtgtcccaagagaccatattaccgttatcatcacgcaaactagtaatttgattatttcttcttcgcttactagaagtggcatggaagtacttactgtaaaaactcactcattgaataaaaatttacaattttaatattctagttgttctaatttctttgctccatttgtcattttgctaagcaaagaaaattaccttttgtgttcaatcataatattgtcaaatcctattttgatatggttcatatagacatttggggtccctattatgttctaactgttgagagttttagatattttattactattgtggatgattattctagatatacttggattcatctttttaaagataaatctaattcttagaatgttataccaacttttatccaacttatcaaaacccaatacaatgataatattaaaagaattcaatttgataatggcaaagaactataattccctaaattgtgcacttctcttggcatcatacatcaccatatgtgtgcaaacacctcaataaaactgtattgttgagaggaaacatcaacacttgttgaatgtggctagatcacttcttttttagtctcacattcctttatcttactagtgagagtgtgtgaatactgcaatttatctcattaacaggacacctactccaaatctcaaacacaagtctcattttgaaattcttaattctaaagctcccaattatgatcatcttagagcatttagttgtttggcctatgtctctaccttaggggttgctagaactaagtttgctccttgtgctgttgcttgtgttttcttagggtaccccatggagatgaatgcttataaattacttgacttgaatactaataggattttttgttctagggatgttgtgtttcatgaacatattttcccttttgtttttgctggaaccatatcaccaaaatcttttgatttttttcctatttctacaccacatcatcatgcagatacctccatgtctgctccccctattgctacttcatttgaatctaaaacccatgacaatcatgagttacaattccttctactcatagacttgttagaaatactaaaaagccatcttatctaaatgactatcattattttttgtccactaacagtgtgtattttcaggtttctacccctattactaagtaccccttatctgaagttcttgattacatcaagttgtcttctaagttttgagctactgtgttagcaatatcaagcatatatgagcctaagttttacagtcaagctaagggtattctggtctgggataatgctatggcttttgaaattctttctctagaggctaacaagacttggatcattgttactctacctcctcatcaacatgttattggatgtatgtgggtttataaagaaatataatacagatggcactattgaaagatacaaactcaaacttgtggctaaaggatacaatcaataagaaggagttgattacatagacacctttgctctagttgctaagttagtttctatcaaatttattttggctcttgctgctatacaaggttggttcttacaccaattagatgtgaataattcattccttcatgatgatttacatgaagacgtgtttatgactatacctcaagggtatagtcctaagggggagctaccacctcgagttgtttctaaactttaaaaatctttatatggcctcaaacaatcttcaaggtaatggtttgaaaaattctcaacagctctcattgaggaaggtttcaaacattctgcctcagatcattccttgttcattagacaaaatggatcgagtttaatattgttgctagtctatgtggataatgatattttggctagcaataatatcaaggacttagaagctttgaaagtaaagctaaatgataggtttaaattgaagaaccccagagaactcagatacttcctcgggcttaaaattgcaaggtccaacaaagcatttttgtttcacaaatatcttatgccttgcaattgttagaagacctaggattcttgggatgcaagtctgcaaatatacttatggagatcaatttaaaactgagccaagatggtgatgacaagcttgttgaccctactctctacaggaagatcattggtaaattgcaatacttaatcataacaagatcagacctagcttattccattaataaactcagtcagttcctagcttcacctaggaccattaatcacttaaatgcagtccaaagagttctccaatatgtaaagggagtcttagacaggtgttgttctactctgttaactctaagattaagctcgaagcttacacagatgcagactaggcatcttatattgagactagaagatccactactggtttttgtgtatttcttggcaattctctcgtgtcttggaagagcaagaagcaacatattgtgtctcgatcctttgctaaggcagagtatagagccatggttaataccacatgcgaattagtttggttgctgtcattacttgatgaactgggaattgagcaccgtgaaccagctattttgcattgtgataacaaggcgactcaacaaatagctacaaattcggtcttccacgaacggactaaacacataaaaattgcatgccaccttgttagacaaaaggctcaagaagggacaattaaaacatttcacatttctagcaaggagcagaatgcagacatctacactaaagctctactgcgaactcagtttcaagctctcaaagacaaaataagattatataatatatacactctactttaagggtattagattaatgtaaggtgttatgtatgtgtttttgttagttagtgagttgagtgatagggttaggtatcctatttgttgttctaactaattcttttttaactagttctttttttaactcctcttgatattgagtgtgtatataaacacatatgacacttttcaatctaacaagaattcaacacagtttttattcacttctagacatcaaaattatcggatgtcatataatttagaaaataatatcgttaatcaattataagagtgttacttataaagagtgttgaatactactgatacctaataataatactcttatattattggggttttaacaccacatactgatattttaatttttttacatttttaatggagaaaaaatttttttttcagaaatattgtgtaagttttatattgtatattgtgttaagttttcacggttttccacagttatttttaagttgtttcagtattgttttaattattttgttttgttattttacagttattatataaaaaaaataatatttttgtaaaaaatttcatataatagtaaaaatacaaacttttgtccaaaatctttttataaaaacctctatattattatgctcctatgtatgtgatcctactcctgagatgagactgactccatctccatctacgtacaactgaacaataaaacaatttcagttataagaaaaaagaataaaacaatttctttgtcgtttatggtaaaagacacaattcttcctcaacaagtctaacggtaaagcctgcatatgaaaattaataattaagtaagtaaaggataataacaatggcaattggtaagtaactaagaaaaatgagtatgactaatagtactagtgttagtttaattagtgagtacacaaagcaaaagattcaattcaataatatcatcctaacagtgatagtacattccaatttcacgtgggttttgagattttgattttggggaatattttgaaagatatttttctttttatatttcattattcatcagaaccttcaacaaaattacaagaaaaagaacataaaaatgtgtgaaatagttagttccaagtttcaacattatttttaaaaaataaaaaatataaaaataggtaataaatgacaaatatgacaaatgtttatataattgatcatcatctatattattaagcttttggaaatgattagccaaaagacaaattacagagcaattttcaaaggagtaaatttatttaaaaaaaatatatatattgttaatatatatataattatatatacatgttagttttttttttggttttttttttaaaaaaaaaatgccaacccagtgtgatccaat

SEQ ID NO: 272310 - DNA, 1592 bp, Cannabis indica
ttttctaaaagttattttcttaagttatatagaatctgatacttaattatatacaccaatattcatgtttagtacttttattaaagacggttgttggtgaagaatttagagcattgttattgagtaccagtggtgcctagcacttttttataggtgtggcaccccactattgattagaggtattccttaacgtctattttttaagttatataagacctgatatttaattacactaataacggtattacactgaggaggatactaggtaccagtagtgtcttttaacaattctcaagaatttaatagggccttagataaaattaaatttgagatataaaatagagcattgttattaggtagacttgttaccttataattggttagcgatactccttaaaagttattatattaattaattatataaaaacttgatacttaattacaccaatagtgatattcacacgtagaaaagtgttaaccattgatgctttttagcatttcacatataaaatgtagacaaaaaaataaaagaaatattaaaaagtaccagtggttactagtacccttctcaatgtcatatcgttattggtggtacaattaagcataagattccatataacttaagataataagttttaaaaattattactaactaattgtaaaacgtcacctctaacattactgatacaatactttgaaaaaaaaatttatatatgcggcacacttgactattactattaattactacttaatattgtagtttgtaataaatgattttctaccaatatttaaagttgtataattattactatttattaccctcttaatttactcgaccccacaattaggactatattcaagcttttgaagtacttgaatatggagccacacagcttccattcattaaaccaaaaataatatttatatatacatataaataaaagatgaaattaataaaggaaaataagaaaaagtagtttgttgtatgcatcttaatttatttttaactcatttatagaaattatttagcttaattatctgtttttctacgtatatttaattttctttcactaaataattaaatattgtatttggtgccaaaaaaaaaaatcactataatttcttttactaaataattaagtggattttctccatcatcaataaaaataattaagtgtttttggtgcaaattattacctagtttaaagaaataaaatgagtgattaaactaagctctcttaaactcaagtaacataaaatgtattatatatatttatatatatatattacttcatctaaatataatataatgagcaaaatcatgaagcattatacaaagagagatatatatatactaaccaacaacatcaacagtggtttttccattggagaatcgaccagaaggatcattaggaaaatcaataccataaggcaaataatcagccctagccaatgattgaagttgattattattcccattatcaactaatgaatctccaaatatgaagtaacatggtacttgtggtgcaccttcactcactactactacactcattattattaatcctattactatcataacattattatta

SEQ ID NO: 272311 - DNA, 501 bp, Cannabis indica
ataaaattgatcaagacaaattgtagccttaaaactctaaacaaaaccaaacgaaatgctaaaatgcaaaacctagaatagcacaaaccagtaacacaaaatcgagaaaatgaaaaatacaataaaatctgaaaaaaagggggaaaccaaaaagaaacggtaaacaaaccccagttcgaagaccaccaccaacattatcgttttttcagtaacatcttgagccattttttcttgagcacccaccttcgatttcttcttaggaggagctcgcccacgcttagataatggaggagcaaaatcagaatcatcctcctcaataatagcacgtttacccttgttcttattagctaatgatttcaaacccattttagagcttttcttttgaacaggggaaggagatgatgaagaacgggtcacaaccatatttatatacggattgagaaacaaaaagaaaagaggaaaaatagttatgggattgggttactgggagttgaaaaaaaa

SEQ ID NO: 272312 - DNA, 923 bp, Cannabis indica
cactttttgttatatattagtgcaagtgggagtttgttgggttctgtgccctaaataaaatctatttcaatataatcagatttactaattaataaagatcagaaatcgcattttatgttgcacggttcacatgatttatttcatgattgtttaatggataaattctattaagtccagaacatatgttgaaaagaccgtttcgtttaaatttggaaattagctgataattagggtttaattatgaaaattacttattgatatttaaataattatttatgttgatttatttgaattcagaatgcattttatgtcatatagtgaaatttcataattttgtattttcggtggccggcgacatggaacgcggtgtatggcttagtagaatcacaatctaatattttagtatagcagggcggtattattagacattgggaatgtcgggattcgtcaggaatttagagttttcccaaaataccctttagtgctttttaatccttttagtgtgggaggggcaaaatggtcagtttgccccataagcttttgtcctttagtggacttagtattatgtgattatttgatttattttgaattaagttggctaaaataagtggattagtatgatagttgtttattttattgaaaaatcaaaagaaaggcaaaatttcatttttttctctagctctctctctttcgaccacccctagaaccagctagggttcttgattcttcttcttcaattcagtgctttgcatcaattcttagtacaatccaagctaaggtaacccttgtgtaactttcttttagtttcttgaagtataaggaagtaaatatttgcgtgcttgatgattttgatgattgtagctggtgtgtatgtttgttgttattttctgaagtttagatatgtttatttgagtggattcaag

SEQ ID NO: 272313 - DNA, 983 bp, Cannabis indica
aaatgctatttccttcatggttttcctccgggatatggcgataaaaagaagtctgaaaaaggaaagagtgctgccaataatgctactgtcaacacatccgaaaccaacaacaactccattgacctttccactcaatgccaacaactcatatctctccttagccaacaattaagccaaggacagacccgtgaggaccctaatacagctgctgccgcttctaacagggctggtaaaaagtcttttctttatactcactcttggataattgatagtggtgctactcaccatatgtgttttacaagatctttctttctatctttttctaacaaagattttccctcatatgtgactcttcctaatggcaataaaatacctgttaaagggattggaaccgttcaaataaactcacatctcactctttatgatgtattatttgttccaacctttaacatcaatctattgtctattcccacatttctccttagtgatatgactaataaggtctattttcaccctgatttttgcactctacaggctctttccccgaatgtggtgattgggactgctaaaagacttggaaagctctatgttcttctccaagatttcatacctattgcaagttctacttgttttttattttcttcaaataatggagaccaatggcacaaatgccttggtcatccctcaatgtatctttcaaatacaaccaataaaaagtttctttctagttcaaatgcttccaaaaatcagcattgtcatatatgtcacattgcaaaacaaaaaaggttgccattcatatcaaaccataactttgctaatgatatatttgatcttgtccatatggatatttggggacctttcaatgtcataagcattgaaggatataagtattttctcaccattgttgatgacaaatctcgttttacatggacctttatgcttaaaaataaatccgatgtccaatctatcattcccacatttta

SEQ ID NO: 272314 - DNA, 613 bp, Cannabis indica
gaatatatttatttataaacacaataagaatagcaaattcgaattaatatacagccagttatgtatgagtatgtttattattttttttttttgagtaatgattaatctttattaaatcaaatcatccacaaccaaggatgcaattacactaggtaaagaatccctactaaaatggcagtcagcctcaaaaagagaagtttacgctaaagtatgcgcaaccttattagcagaccgcttaacaaacttaaaagaaatattatcaaaatcagaaatcaaagtcctacaatcataaagaatatggccataaggagagaccatatattttggcttatgtaaatcactaatgacttttaaacaatcagactcaactataacacttgtccatccattcgccttactctaggacaatgcctcttggataccaatggcttcgactatatgaggttgcaactcgccccccttgcacaaagttcttgccgccatcactataccagcaacagttctagcaaccaaacccactccataactcccatggctagaaaacaacgctccatccacattaactttgacgaatggaaagtctggtgccatccatttatcaacaccacccaca

SEQ ID NO: 272315 - DNA, 1538 bp, Cannabis indica
tttttttttttaaaaaaagacacgtgttttagttttaaaaaaaaagcaaatttaaataaataaagtgcaaggagtgcacgtgttttttttattttcaaaataaagaagtttgaatatatatatacactgtacttatttactgatgtggaacgttagtattaagtaattatttgtgtaaggttatttttgtaaatagtttaacaataatgtatattattgaaaaaatccctaatataaataacagatttttacacaaatatttgaaattgcacttttcttttttaaatatttttatggatttttatttttaatagtttttacttttatttttagaaaattctgttatcattaaaatgaagaatccataacaataacataatagattggagaaggaattttccccaactaagaataatcttcatccaatcgaagagtaaatttaactaaaccatcgacgactttatttgcatcttttttgacatgagatacttttgctctaggaaaatagaataaaagataagatatatcatctactaaatcatggaaatgagttacaaatctagtagaaaataaactgttaactgtattggcaactaaaagagagtctgtctcaatgatttgaattggcaattggtgtgctagggcccattgcatattgtagaacatagcaacaacctctatctcctttggggaatagcagccacgaattggtttggaaaaaccagcaacaacttcactagaatggttgcgaataatagctcctatccctataattgcgctaacaacatccaaagcaacatcaaaattcattttaaacaaaccatcatcagattgcgtccaacaaataggagcctaaggagtcgtgtgcgatgtagtatggggatcaggtggttttgaagtgttgctattttgaattacagtagataaagtggccttatgatattgatcaagatgagaagcagagaagatacatatgatatctgctggtttcagtttagtaccatggagctccttgtttctttcatgccaaatacaccatataagacaaactatcttctctaaatcaacatcattattggtggcagcaatatgagagaagatatcatagccattcagattactaatattagggatgaacatttggaactggaccttattccacacagctttagctctatcactaaatgaaagatggggacctttcttgggcattagagtgaaactgaatgtcacaaagccattaaagagaggcagaaatatacacttgcaacaaattaaagataaattctaggttgaatttcgcgaaagacttccagaatagtgtatggaatgtggtaggcttagccatccatttcagaagtgcttaacctttttagaactagttgacaatggcactgaacccgaacttgcttatggaccagaaatcataggatatgttctacccacttctggttatgatcaatattgaacagatttttttgaaggaaaatgcttggccattacttatacattcaacaagaaacacctttaataatacc

SEQ ID NO: 272316 - DNA, 525 bp, Cannabis indica
tttaaattctaggtccgccaatgtatttatataaaaataattggtgataagtggagtagcccatgttcttatatatggctcaatacttttacatttaatccatgtgagacaatgttctccaatatccctcctcaagatggtggctatttttactcaccaatgttgaatcaccttatcacaagccatgtcatttgctcgctttttttgttcgaatctcaagcgtctttggaccatctggatctcgtgcggttggctaactttctggatagttgtgtatcgaaagcccgctagagatatagctctgataccacgatgagaatcatggggttccatctcaaaaccaattggtgatgagtagagtagctcatgttcttatatatggctcaatacttttacattaatctacgtggacaatgttctccaataatatgtaataaatatatacaatttaagtgcatattccatattattcgagtcataaaatgtgcgttataataggaacttttatgatgtattgtcttaaaa

SEQ ID NO: 272317 - DNA, 678 bp, Cannabis indica
gggatctttaagaatgctgtcactaaggttcagaatggtatgtctttttacccaattgggtttttttttgtggtttgggaaatggagaagggaaaagggtaaattggggattttattcttttggggtggaaatgtgaggatggaaaaggctcaatttttgtactttgtttagtggttggtttgggtgttttgtttggtgagcagagattttgaagtgattttttgtttcttgtttggttgttgtgaaaattgggtgtttaaggttctttgggtggaaatttgaggaaggaaaaggctcaatttttgtgttttgtgatgtgattgtttaggtgtgtaactttgtttagtggtttttgtttggtgagctgagattttgaaagtgattttctgtctcttgtttggttgttgggaaaattgagagtttaaggtacaatgttatgttcactttgctttttattttcattaactgaaatctaacatttcaagtagagattttgggaaagttgaaagcgttatttaaagtttaatgttttgtgaggaaagcatagactttcttgtttggttgctgagaaaattgggagttagagatagtatgttatttctattctggtattgctcaattattatgttattataatatgtatttgacattaaaattttgatttgctggtttaattt

SEQ ID NO: 272318 - DNA, 706 bp, Cannabis indica
gtgaaacaaaatgaggcgactgagagggaattaggtttagttgggatatataagtagggttttttaaagacgggccaaagcccataatttttttttaatgcatttttgtatcggatgcgcaccgacgctaatagtacatataatgactttttgcatcggtgtagactgacgccaatagtgtatacatatttttttttttatatatatttcatcttttgctttggttttttttagtgtttgatagataaccgacactaagtaataattatttgcgtcggtagataactgaagcaaaaaagtataggttgactttggggtcgatcaacaagtttgaccagatgtgttgattgacgcaaaaatttctttttatagtagtgattattggctggaatccttttatgtttacaatctcaattgtctatactagccaattaatgcatctaattgttaaaccatttgataatagagctgggttctatgtcacgtttgtttatggaatgaatgatgatgaaggaagagcgattttgtggaaggatttaataggttgcaagactcagatacattggttggtgttaagaaattttaatgatatccttaacaaataagatagaataggagtaaaagtgtaatatggaaattcggtggcttttcgaaattgtgtagaatcatgtgctctagaaagtatacatgaattttttttacacgg

SEQ ID NO: 272319 - DNA, 616 bp, Cannabis indica
aataattctaaaaaaggaatgtagaaaatagttaattataattaattaaatctaaaaaaagaaagtctacctattagtaacctgctattacaggttaaaaaaaaatgtaaccgtatggttacaataaaaatgtaacgaatagtcaccctatatatatatatttaaaaagtgtatattatataattatatatatgtagtaatacaatttattaatataggcagtatatataatgaggattgcagacttaatggcaagaatcagtactacctagcgtacgtattgctaccacattttataattaaatggttttaactgttttttttgtttcatatgagatgttgcaaagaaaattgttctttatcatacgcaatatttaatgcaatgtatttaattgtagccgatcttacctaaagaagaggtatttgtcagaatgaaaagaaatgttgtgtatggctcattcataatgcctattctcatttttttttttaaaaaaaataaagcatctatatacggtagaacctctatttaagaataccttattcaagaataacttctaatttgttataaaaaaatcaagtcccaatttaggtctattatagataagaataacctcta

SEQ ID NO: 272320 - DNA, 3656 bp, Cannabis indica
  modified_base (68)..(68): a, c, t, g, unknown or other
attaatggagaatcatcatcatgtcctatatattacaaatatatgtaaaattaaggtgcatgatacanaattaaggaatttaaagttgtaaagagttgggaggggacaagaaatagagacgtggcagttatatatatgtgtacgacatggtttttcttacggattttattttatttttcattaatatatttagtctagcctaaataattaattcattatatatgctagctcttgagtcatgagtatccaataaccggcaaacaacttagtatagttcttattatatatgtaactgttcattggatcggttaggaattaacctatattataattgttgttaatatagtatatatatatatatatatattataagtactcgctcgtaatacaaatgtccatttattatgcatctcaaattaaagaaatattttgtcaatatgtaataacaatgttattaataaaatgtttagattaagtgtgactagataagactcatcacagaaaaaaaaaaaaaaaaaagaattaaacaaatgctcttttattgaatatgcactcccaatcaaatagtattccgtatgtaactaaaagatattgtaatttctctccctatattaaatatatatatattataatgagtagtctatatcctcaccatatatagactgatctatccaaagcacaatgaatatgattataaaattagtgttttatatgctaagtcaaattaaattcccttttaaataagagggtagtgttaagacttcttcaatttcctaacaaacattcttctctaatgataaccggcatgcatgtctcattatattattatataagcctaaagctcaattatattataatactagctatatatattgtatatttgtttatatatatttataccactaatttcattcatactacttaaaattggaggccttacataattaattggaatgtcaactagccagcaattcgtgcagtcacgttttgtggagccccaaaaatctcaccaaaacacataatattatataaaattcatcaaacaatcacattaatcgtgttccccactttgtataattgttgatcacctatatatataatttacaaaattatctaaacatcaaattaaatctttcctaataattgtccatccttaatacacatgaacattatggctaatatttctctatcatctattctaatcctaatttcattcattattctatctcacattgcattatcaattcaagccaatgactactacaacaccccaaaacccatttcaaacaaagtccccaaaattagtactaaaatccccttgaacttaatcgactcatgctggcgcgccaagtcgaattgggctactaaccgccgagccttggcggattgcgccgttggctttggccgaaacgccataggaggaaaatacgggaaaacatacacagtcacaagctcatccgacgattccacaaatccgaaacctggaacacttcgttatggggtgattcaagaggaaccgctgtggatagtttttgctaaggacatggttatcaagctaaagagtgagctgattatgaataattacaagaccatagatgggagaggggctaaggtggagatagcgtacggaccatgcattacgatacaaggagttagccatgttattattcatgggattagtatccatgactgtaaggctgggacatatggccttgttaggagcactcccacccacgttgggtaccgtctaggagccgatggagacgccattagtgtgtttcaagctaaggatatatggattgaccattgttttttctcacgtagtagtgatggcctcattgatgtcatctacggttcaaatgctatcactatctccaacaactactttactcagcatgataaagtgagttttctaactatatattttataagagttacaaaaataatataaattaatgttacttaattataactgattaaacaacataattaaagatgttacacatgttaactttaccagatatagttatttaaatctagaaaacatgtacaaactattaattaataatttgctttggatcttacttttaactaattaagttttgaccattattgacaacaggtgatgctgcttggacataatgacgcattcacagcggataaagccatgaaagtcacaattgttttcaaccattttgggcctggacttatcgaaagaatgccaaggtatatatacataatattactccatattaaattgtaccaagacctaataagaatgctatgcagtatgagtagagtctcctctaacatttctcaattaattattatatatacatgatttaactaacttcatattatgtagggtgagatttggttatgcacacgtggcgaacaatagatacgatcaatggaaaatgtacgcaattggtggtagtgctaatcccaccatcttcagcgaaggaaattactatgtggcttctactacaaacccttactcccatcaggtcacaaagagagagccccaaagtggttggaaaaattggaaatggaggtcctcaaaggatgtgttcaagaatggtgcttattttgtccaatcaggttggggaagctgtaatccttattacactccaactcagtcatttaaagttgctcaaggggccatggtccctgttttgactgcctatgctggtcctctgcgttgtgttgttggtaaaccatgctaatattttaatttcaatatatatatacacacaagttggctatatatatatatatatgtcaatttactatatagtcagtaattaatggatatatagtaaatatatatgccacaatatatgtatttataaatttgaagcatatttatatatatatatgtaatgtatttagctgtaactataaaccatgcatgaattggtaagtggagaggattttgtagttcatgtataaatcatggaaaacatgagtttggaatgaactttttccctactaattatcgaaaccctgaaaaaatgtgtatatagtcttaacaaaattaagactgcaatactggaatataacttttgattttctattaatagtgattctctttttctcttttcttgtcggataatttggttgtatatattaatgatgttattagtattttttttattattattttattttggaatttaataaaaagtagttcgtatattatgaatacatggccgaccaaataaaagtaagaacatcgttaaacgaaggcaaaatcaaatccatcaagatttggagtactattacaggttgatgaattaaaaaacaaaattaattaattaataaaaatattaattaatcaaaccgtgtaagaacaagtgtattaattgttgagtactgatgatgtttactctttagaaaagcctgttgtcattggattgtaccccacatgtgactggcgcttttgctctcactttcttcaaataccaaacaccagctccaattcctaacactccagccactgatgctgcacttgctgtccctgcccatccaatatattaataaatatcttaaataatacactattactaacttaatccaaacttcatatataattaattaacttatacctgctaatgactctacttcctatgctgtgtaaggctgtgatctgcaac

SEQ ID NO: 272321 - DNA, 1288 bp, Cannabis indica
aattatcataaaaataagtaacccatttgagatacgcacatacaagggaaataaaagcattcaacaaaaacaagagaaaaaaacaatgaatttcaactcatacctgaatgtacttcattgtatccttctcaaatgtctcgtaggtttgagcctctagattatccataagaggctgcatttgcaataaccagctagtaatttagtaagagtgacagaaatttgtgaaaattatgaaaatgaaattgtataatttagtgtttgaataaaattaaaagtgaaagatggcctagaaaaatactagtaaaaggaaaatttatgaataaaaaatcaggtaaaaaagtgcacctgtaagggtgattgcaaaaaatccctgtatcccagctgacataagaaaatacaagagttaaaagaaagaaaatagcaggaaagggtacattatgtgagcaatcatatgcaatccataaataacaactaacctacctcaaatcgttcttgctctggaatgggatccaacttttggtagagataaccaatgtaatccaaatacgacctcaatggatgcctcttatcacctgaacaaggcgagggagttcagaacaatgcaaaactagaccagctttaaaacatctgaacataaatctatatttgattaagaaagcaagggatatttacatctccacggtaaaccaaggccaaaattgccattaaactttaagaaaatttcagtgattacagtagttccacaatcatattgagcataagaaataaaataaacttaccatcaacattattaatactttgactggcagtcaaatttgtatttccgctaggaagattgtgtactggttttccagatattacaacctaaagagattccacaaacatagctaagtagagcttacaggatggtcataatgatatctataaatgccaagtgtaatgtttataaaactactatgagaaagagaacttaacattctaattatggcacaatgacacagagcaaagatgaactagattgttaagtttcatggaagtaataacaaaagagccttgaaatcttctagaccatcttcgtgtaacttctctattctatttataacactgttccctcttatatgtattaaaaaaaacaacaaaaactcatctgcctcacctggaagtaataacaaaagtgccttgaaactctagaagataccaaccatctacgtgtaagttctctattctatttataacactgctctgttacatgaaagggtatagggagtaattgttagtattgtctagt

SEQ ID NO: 272322 - DNA, 2222 bp, Cannabis indica
caaggctcatttgcgttttttttaaacattggtaaatcataagaacattccacagatgctaaaaaaaatgttacttgattgttcagttgtactgaatcttccgcaatcaaccaaaggtttttcatgaaatttagctttatttacatactgaaagttagattaagtaaaccatggatacactgacagatataaataattttttgaaaagaaataaaatttgaaatgcatatatgaaaaaggataagatatcttcaataacgaaaatgcaaaacaaaacagctatactgatcatattactaatagagccataaactgtagagagtgatctagtatacaagggaggaacattcatcttaacgttagaaaggaaacactattgctgtcacattaggcgtttcaggccacaacagatcaaacaactaaccttctccattcttttgataactttttcgcgggttttcgcttgtttctctgttagttgtcctttgtaagtctgccaagttacctcatcactatcatcctaaatgtaccaaatgaactaattagtatggccatcaagaaattaaaagcaaataatagccatagtaactcaatgagctatgatatgtaaaatcatattctaaagcttataaacctcagcctcttcaatagcatcctctcccatgccccatgagacgccatcagcaagagatgcttcacgccttgctcgttgaagtgaagcttcccgatctagaacctgttctcgaatcttaatatttcttagtctctccaagtcagcttcctacaataggatcacagtgttaatataagataaaaaaaatggtactgcagtaatcttgaaagtagacaagatggcaaataaagcagaacctggtagataaagtttttattgatattcactttgaatttaaaaaataaaataaacaagaaacataaaaataaaaataaaaataattcaacaagacattgaaaaggaaactatacaacataaaaatagtcttactggtggcatcaaatctgttggtccttggaaaatgtacaaacgagatgacctgtacacaataaacagtgagattaactttaacaagtgtccagcaacaagcatcaggtcaaagaagcatgatataaatgtaacttaaaacttctacattaactcttcaattaaatgtttaagatgggtcattgatataacaatgcattgcatacattggtcagcttgaaaaattaagaaataaaattcataaatatgaagataattaatccaatatctcttccaagattgactatccaaaaattagactagcaatctaacctgaatattagccttctaatacttgtcaaaataattatatatggcagagcctccggtgaagatgttcctatggagagcttaactaataggacattgatgatagcactttaaaaaggaactaacggacaatatctgccaacattttagtacccaatgcatttcagaaacataacacaactctacatgatcacacaacagtttaacaccatgttttaggaaggacggaggaggttgagggtcagatagatgggctgagctcatactagtcatcttagcataaacaaattaagagagaaaagaagaaattaaaacataaatcagtgtctaaaatttaaggaaaacatagtttaatgacaatccaaataaccaaattgagagttttgtgtagggaaaggggaagataacatactgtccaaatcgaacgacatcaccaacatgtaaatccacatagctctttttcttcacctgaactcaaagcaatagaagagaaaatttgtattacacactacagggcttccgtaacaaaaatagactgcaaaaaagacattaaataaaactataataagcaattttttttatgtacatacagaataaactcgaagaacatatgatggtaatgaatggtgatatagcttccttcttttgattgataaaataaaacctaaaccacaaaatataacttccttcctctaattgaaatgtatatcacatttcttagtcacaatcaaataacacgacacttcaaattttaccctcgaaaaaagatcttttctgaaagaaacaatattaagatatctaacttgatgcagtgtaacaatgcatcagtaagaggaattggttgtcagcatacctgattcttgttgatgaaagttccatgtgtactacctagatcataaatataagcttctcc

SEQ ID NO: 272323 - DNA, 520 bp, Cannabis indica
gctcgaggcgtggactgcatgttagggggctggcgcagtatttgattttaatgtttttaaatgtaaacattgtggatccgttattttgatttaactagttcttatttaagtttacggtactaaaaatattttgttttaaacagtgagatctcatgcttagatatttttcaataaagaagtattttattgtctttatcttattaaattgttttatacagactatcatgtgtaacatctcgggaaatcggggtgttacaggttccatgtcatccatttccaaatttgttagaagtgcataagccagttcttcactccatatgttgtagttgtacttctgatttggcttcaaagtcctcttagtcctatccattgtcaactgatagtttgtaaggtcctctttggtgtcttcatccctgatctcttgttaagcatcagttcctccccttgaccattgttatcggactgctggttttggtttggttccacctgaaccattcccagcgtgtctccattttgttcc

SEQ ID NO: 272324 - DNA, 817 bp, Cannabis indica
ctatgttgagtccgatgtaaataattattcaggcgtatggagggagtacatgaagattcgagtaacaattgacatcactaaacctctcaaacgtcggatgaagattgttcggagtgcgaatgactggttctgggcaattttcaaatatgagcacgctcccacattctgttttgtctgtggcattatcggacactcagaacgcttttgtgagaaggcgattgatatcccttacgatcaacttgtcaagccatacggtatatggatgaaagcaactccgcaacggaaagcacatatgattggatcgcaatggcttcggacggggaaggctaatagtaacacttcggaggttaatggagggcagttttccggtggggatggagagggaggaagccgaaattcattgaatcaaaactccattaatgagggaactaatcaagccaaagaaaggggaggagatcgtggcaatgatattgcatatgaggagtttgatactggcaagattggtggagaagttaatgggaaggatacacacgaaattcatgggatatatatggaaagattggatgatagtcaatgctatgtggaggggaatgatatgttggctttaactgatccaaaacgtagaagagtttttattggggaaaaggcttcaaaagggcccattactgaaatggtaattgatggtcatatggtgcatagtgggccgaatatgaatatggttggtgatgtgggtactgtggaagttagtgataatgtcatcccaaaaaacttaagtggggcgggttctggtgtccaggcccgccgagaattatgacca

SEQ ID NO: 272325 - DNA, 695 bp, Cannabis indica
agagtaatgactaaataggacacccaaatattttattaagagtttggaatcaaatgtacttgccagtgataaaactcttgtgagctcttataatcccagtcttcactattccagggtgtactgcattgatggttactcttgcatttcttgtctataaaatttacaagaaacatatctcaaattaataataacttataaaagatgtaatgtacaataaccgagctttatattaccttaagctgtcttgctatttccttggcatgtaatatggaagctaactttgattgtgaatatgcacgagttccattgtaactgcataagttcacaatataattgttaggcatggttgtaagaagaagaagaagaagaagaagaagaagaaaaatggtgactactttagtttgtacctttttggagtaagcaagtcattgaaacgaaaatgctctttcttaacccagctgtggattacagatgagacatttattattcttccttgaacaccagtttgagctgctgtttccaccatcttttctagtaacatttctgttaatagataatgtcctacaacaaatataaatgtttaattagaaacaatgattgcacttaaatttctatatttaatatatcatcagataatagataataaaggttggaccttgaattttacaaaaattatcaattggattttctgtttt

SEQ ID NO: 272326 - DNA, 529 bp, Cannabis indica
ccttgtgcggtcatcgatggctgcttgttgggccttcaatgtttccatctccttctccctccactcaatgaactggcaccattggtcatcaaatgcaaggtttatagcagcacagagatcctctaatcatggttactggcattagtatggccttgcatgagtccgaggatattacaaaggttttggatctcagtgtaatctcccattgtcctctgagcattagtagtcgatgggactttagtgttgggaatggatatcggcagcgaaactggtatttccagcctcttgcatgcctggtgtgatcccaactagaggggaagtcgcaccgtcgtccacaataggtggctgtgtgttgggcttctcgcgattagttcctggtgggacccttgtattcctaagggtttgtacagcagggtctgtcaccattgggtcactctgatcaaccaagcctctgcgagtttgcaccaccattctgtatgcctgttgaaacttaaaacaaagaacaaacttggatttttgctctcaatga

SEQ ID NO: 272327 - DNA, 784 bp, Cannabis indica
ttattttatatctctatgagtacttttttttttactcaaatcggtatctttattaactaatcaaatcgttaaaaacaatagaacgtgcttcagaggaacaatcctccaactgaagcacacgacctgaagagaaacaagaatctctggctaagcagtgagccaacttgtttgcagatcgtttgacaaaacgcaattcaacattgtctaaagataaaagcaacgcacgaacatcatgcactaaaagaccaaaagaaaatgacatagagattttactttgaatagcttgtatgcataccaagttgtctgattctacaattacttgtccataattgtgacgatcaatccaacttaatgcttccttgatgccaaccatctcagcaacttcaggttgaaccctccctaaatgactccgattgaaagcctccacgatattaccttagcagttgcgagccacacaaccccacacaacccaaacctgccttcatgctcaaataaggcgccatcaacattaaccttgatctttcctgaagaagtgcactctaatgctcaaccaaacggcctccgtcgaacaacgaagacaaagaaagaccctttttttagcatctttcaactgatcaagtagcattcttgctgatgtaaccatatttgcagcaatccaacttttgtactgccaaataaagtcaaaactggcatgccaaatggcccagctgaccatagccgcctcctccaactcgccttttcttcctcgtcattgcaacacctgcagccaattgctgaaatcatc

SEQ ID NO: 272328 - DNA, 559 bp, Cannabis indica
cacgtcattgtagtaacatcctgtgttaaggacaccatgtcccaccacaccagagcgtcttcttgaaattggaatgtggcacaggccactctatcattaccggtgatgcccattaaattcaagattctggtaatcactattagccactgctcagctttcatgacatcgggacctcccaggaaaactggaggtgcctgcttgcggaacctttcatacaggggttccattcagttcactgcaactataggtactgcctacacagcaggggcaagagctattggtatttctagagcagggattgcaggagcaccctgttgtctcaaacgccggatctcttcatcttgttcattaatcctggctgcatttctgcaaacctgttttcgcgctcttgggcagcctgagtagcttgggcagcctatggcgggttagcatcaccccgaccgcgtgccctgcctctaagacctctacctcagccacgaatattaaggaggatctgaactccctgaccatcactggatccaaacgaattaccctgacttctgtgttgggttttatgccc

SEQ ID NO: 272329 - DNA, 863 bp, Cannabis indica
gagagagagaaagtgttatgaatatttttttatttgttttaggggtaaaattgtaagggaaaaatgttttaagtatagtttccataatgtaaaaaatgctagcatagttttagtgtattatttatttttaagcatatattgtcaaatttcccttttaatttcacttattaatttactattattagtttaaatccaattagtgtttttatggggttagaattataaggagttcattccttaattaattttaatgttgtgatcgtgtttatgtgttgaaactaatttagtttttcccattagtcttgtctttttgacatggttctttagtcttttcttttatttttttctggttcgattcttgttggttcttgttttccttttttgtgttcgggattctgctagttgtggtacgattatggaagacgggtacaagggtgcatatggtagaagtattcaagaaggggaagattggttgtgttcaatccaaaattgctgagataataaacattaaagaaactttgagttggattgcaactcattagtgggatagagtcatgttggaaacagatagcttggtgtgtgtccaagcgattcatagcggtatttttatgccttcacaatttggtcttattgttcaagatgttcgaaaattccttttggctttatcttttgttgatttgcgttttctaaaacgatctgcaaataagtatacattgcttggcaagagactcttgtttctctacaggtcgtctgcttcagctgaaggactgttcctctgaagtgcgttattattttgaacgaattaattaattaataaatttttgatttttaattcaaaaaaaaaatatgtttatatataaaat

SEQ ID NO: 272330 - DNA, 747 bp, Cannabis indica
ttttattttttttgtttttttattttttttaatttttttttttttttttatttttacttttttttcttttcttcttcttcttctttcttcttcttctgtttttgtaaaaatggagaaaatcacaagattagctctactaataaccacaaccaagtctaagggccccgatgatgattacgattctggtgctttgggcctcaagtctaagcgactatgcagaaacgtagtcgaagttctcggcaaccgaatcctgagcagaagactggagggcgtcggcagtaaagccgtacttgtcggcacactccttcaaaactttctccattgcgatgtcgtttccaaaggcgctgagcaattgagacgacaggtaagacgacgtggcagtggagttggccatcccgattccaatcatgatcgttgcgagtcgcttaacgtccgtatttttgctcgtgggatccaatttgagagaggagacacacagaccgtagtactttgtggttttgcaggttttgtcgatggaattgttggactggattccggtgatggagacgatgaggatgagaataaaaattgaagaagcgaccattacttgaatgaagttgtgggagtagtctaagcatgttaagagtgttgaccaagattctgatgatgctccggccaagtttaagggccccgatgatgatgacgattctggtgctttgggcctcaagtctaagcgactatgcagaaatagaagaagaagaagaaaga

SEQ ID NO: 272331 - DNA, 507 bp, Cannabis indica
cacacggttggttgtagtacatatcaatccttttttttttaacacatcttcattgcaatgcaacaacaatacatattttaatatcttataatttttactctatacatatatctataaattttgtagggaagaaaaatatgacttaacttgtgaacgatggagggctatatatagtacttgttgatttgatgtgtggcgttttcgatatggtcaaattaatattaaatatttacatttaaaacctgatttgactagactgtacaacctatcattgaagatgactttgtcaatgcattgaaaaaaggcatttggataaacccaaccaaatgggcgaattattcaaatttcaaatgaaaaattaaaaacaaaacatgttcatttccatggtattactaattacttgatagttatatgtaattattttaataatattttaccatcaatccgtataaggtcacatcagtaggctgtacgatctacttttaaaaccctagctcataccatatc

SEQ ID NO: 272332 - DNA, 720 bp, Cannabis indica
aatattgaaatcccaccagaaagattttattattatccaagatttacacaaaatagctcttggagaggctttctctcctattctaaccttttcaagagggctagatctctcccaaggaatttctctcaattctaaactttcttcaacatatctcaaactgagttcgacttctctatgtatagagaataaagcttgccacatcagcaacctaattaaaagttgctaaccaatacaaaaagaacacctcagccaaaaacaattaaccagctagtacaaattacataaaataaaactctcaaagactaatcgtttggtaaacaaactgaataggagtcttatcatggctgttcaaagttaaagagttcaaagacattttctttgctgatcttgctcggaattagcagagtattttgtaacttttgcttttctgaactttctactaaacgttttgcctttctatcagttttgttagcaggaaaatggtatttctttttcatgtgtattttaatttttgaggtgcaagtttcctgcacccttcttcaatacttgtagctttgttttgattaaaatacataagtaaattccactcgccaacctattggtatcaaggtcacacaatatcaaagtgaaaaagttaaatacagagtggttttattgctttggatagcaaagaatttaaagatgtcatattctcatacttatgcagatattggccttttt

SEQ ID NO: 272333 - DNA, 1523 bp, Cannabis indica
cttggtcagggacatgcattttttatctggttatatccagagtatgcatccatgaatgacataagctcgtgtccagcagttgcatccactaattggtcaatccttggtagtggaaagcaatcctttggacatgccttattcaaatttgaaaatttgatacaagttctccaagttccatttggttttgggacgagaataggattagatatccacgagggataaaaggcctcgcctataaagttgttaactaacaacttatccgcttcctgcttgagtgtcctttgtctctcagaatccaagggtcgtctcttctgtctcttggctgggtaatttgggtcgacattcaagtggtggcaaattatcttagggtcgatccctatcatatctccgtggctccaagaaaactgatcctggttcgccctcaaaaaacttattagttactatttcaattgttcatccaggttcttcctaatgaacacacactttgaaggatttcctgggtctagaacaacttcttccaattcctcaaagagtttcaataaattcctttcatcttgaatctgaggatcaagatccttatcctgcttctcgccttcctcagtcatgactaccattagctggtgaccgacctttctattctgcagctctatgtggtatcatttgtgagccagcatttggtcacctcgcagcactcccacactagtcggtgtttaaaactttagggataagtgcttaatcgaactaattttccctattccaattaaggctggtcgacccagtaatatgttgtaggctgatgtcaagttgacaacaagaaagtcttgcatgatagtggtggataaaggtgcttcacccacggttaatagaagcttgattattccttcaccggcgacactatcgcctgtaaatctgcatagatttaccatgcaaggttttaatttggcattttcaagtcccattttcttcagtgtgtccttataaaggatgttcaccaaacttccgttgtccaccatcaccctttttatcctcttattggcaagctggatggtaattaccagtgggtcaacgtgaggatatctcacgtgtttttcatattaatccgagaatacaattagaggtttggttgagtttccttgacttgaggtgatttaatttagaaaatttccccatgaagcgtgtgagtcagagcaaagcacgttggaaacacttggattggtccgtgggggccaatcgtcagtccggaaagcagctagagtgatgcactcgtgtatgagagccatcattccatgggaataagggcccaatggaggcttgaagcggggatgttaccgaggtaacgtataaaagaacgtcaaggagaatagtggtatcactaaggtaaagaagattacctaaattacttaaggtgacaagataatgatggagagtactttataattgactggatattcgatgtggtttataaggagagcattgaaattctaggaaaggattactttattaagcaattatggaaaggcata

SEQ ID NO: 272334 - DNA, 587 bp, Cannabis indica
cttacttcatgtttggttagattgacataaattttaaaaatgtagtgaatgttgggtaggaaaaaaaaaatatagagcaaatataaaaataaaaataaagaatggaattgaatgaaataaaataaaatttaaaatgcatgaaaaattattatttttttctcgtcttattttaagatttaatagtcgttctactaaattgtcatagtttgaaatataattatttttcatttataaacttttaagagcatatatttttcatttttaattaataaataaaaatattagtaaagataacacataaatattttggagaatttttccgtttattttatctcaaattgcaacatttaataaacaaatgaataaaaattaataccatataattgattatcatcttcttttaagtaaacatgtgattatagtgatacctatatttgtaataagttagaggtagcatctacccatgcacatgagaattgctaaaaagtattattgaatttttgaataaagtattcttagattatgtaattagaaaaggctaattaggattttcgcctactgaatttttacatgtatcaaatcatgtt

SEQ ID NO: 272335 - DNA, 898 bp, Cannabis indica
actagggttcccaaatttgcccccaaccagtagaccggttcctcaatcagaattccggttctgggaggaaatcctggaagccaatcggaatttcggttcctacaggcctctctgatccagaatttcggttcagtgcaggaaacactaaaaattccatatctcaaacaattcaaccccaatccactccaaactttccagacctgttctaaacatcctaaaggtcaataacaaagaaataaaacacagcttcatgcaccattacaaaaatcaccattgatgagtcaagcttgagttcaaaaactcaaagcttgctcatcccacaaactagctatcaaaacctgctcaattcaccatatataacaataatataacaccagaaaacaaacccaaacacaaacaacaaccacagcagctaaatcatcatattaccataaaaatccaaagttttgagtttaaagctttacacatagttaaatccaactaactaacaacaaaactagcttgaattcactcaattaaacatatttaagcttcagaaacaacaacaactaaacacaccaatcataacaagtaaaatctcaaagcatgcaaaaatccattttcttaaaactgaaggaattaaaaaacaaattgcaagaggcttaccaagagcttaagatcactagaatcttgataaaatcagcttgagaaaaacacaaagaatccccaaccctagctgctctaggccgaaagagagaaagagagagttttagagtgaaaatgagatttttcttccttttctaatttttttttttggataaaatgaaatataaaattgattttttgattcagccaaaccaagttaaaaaaaatcagattactaacataattaaaagtccataaaagacaaattacaaat

SEQ ID NO: 272336 - DNA, 674 bp, Cannabis indica
atgtcagtctaaatccaatgtacagaaaaatcatgagacttaaacttttgaaaatataataataattatataccactgtactgacgacactataattaggaataaatatatatgttatctacttaatacaatttatacattaaatatataatcataaaataaatcatgtgaaccatgcaacataaactgatttctgatcttttattaattagtaaatctgattatattgaaatggttttatttaggacacaaaagccaacagtatatacatgtatcaaacataagtatgattatgccttgtgtcctatattagagttagttccacattgttaatgtgtggaaataaattgtcatatataagatgaatgagctactcctctcattgctaattgattttgagatggaaccctatgcatcttattctctaacatggtattagagcctcttgtaattcgttgtgagcccaaagtgtcgttggtccaaaaaggcgagtcataaaagagtcgtttgtgatttgttgtgagcccaaagtgctgctagtccaaaaagacgagccaaacttagaaacttacgttgtctcacctttaacttctatttgggacctttcgaccaatgtgtgtaagtttttagtgttaggacctttgacctgtgtaacaccctaactatcttaggcg

SEQ ID NO: 272337 - DNA, 587 bp, Cannabis indica
gcagatgttgcattaacgcatggtaatcatgtgatttcagacacattagtttcaattcagtctcatttaccaagtttttgatgttagacgagtaaccatcaggtacttcatatttacaaactatttgtttttccttttttggacaaagtgaaacaagcaggaggcaaatataatcgttcacctttcttctcaggtgccagagattgtcgtatacccatttcaacgagatctaaatgactatttagaccgtcattactgtttgtgtaattagccaacgacagtgagtctaatttagttagcgacaagtagtttataacgattggaatataattaagcaatataaagacacaggaattttatagaggttcagcctcgagcagttcggtaatagcttaatcctcgttatttgtattgacttaagaataaggagaaagattccttttcttatagctcttacaataatatctctgaatatgaattcttagataatctctctcaactggaatgttttcgaccctttgctcagtgagtatgcatcactatttatagggttatgagctttgagaggaagtatttcccttctcgtt

SEQ ID NO: 272338 - DNA, 2447 bp, Cannabis indica
aaagattagttcaaatcgaaagaatagaacctacttttttaaacaaaagaacaatctcataacagaaaataccaatggtggaggcaaaactcgagcattaatcaatgtcatgtcgtttgcaacattaattccaaaatcgcgaacaagattttgatcattgtaattgttttgtcgaaaaatttgcctaatggtttcctccctttcgtacggtcgttgacaagtttcccttaatagattggttacttgcctttggttgagtttcttgtagcatctttgcccctcaacaattctacaaacctataacagcactaacatgttagaaatacaataacattaacataacactaaaaaatgtgttatggaaacaatgatatggaaacctctatgggcaagtaaatcggctttgttgcacttcctacttgcagagcaggccatgtcacatattcgagctgaatttcgtacttgtcttgaaaataagtaacaaccgaaatcgtgttaccatcaagatcaaacctaacaaagaaacatgttagtaaaaacaatttgaaacagcattatgtcactttgtacaacattatgttacttacattaaattgttcaatggctctgtcgataccccaaaaactttgaacaacattgtatcatccaaatgtctacatgttactttaacccctcttaaatttttccttagctgaatccattaaaaggtgtataaatacacaatcatgttgaaatatgtaatatatgacaaaaaaaaggcaaaacaagtacctgaacccgaacatgatcatccaatggcgtcgaattgtatctcacattaaagtttttgaagataaaatcagttacctcaataggttcataaaaagcctttgctgacacatctacaacgatcataagaaaacaatggtgaaaacaaacaaaccacctaagactaaaaaacacacaacaacatattttatataccaatgttaagagaaagccccaattgagttggcctcaaactttgatagaaacctttccaatacattacaccatctccaagctcaccagctctactcattgtgtcatgataaaaagacctccccacaacactatacctaaacaaaagtcaacaaaagttaagttgaccactttcaacaacataacagaacataacatataatcaaaatcattacatttctgatggagctgatctgagagcaacgttaagtggttgaatggtgtgtaaaaagctttgtggattacataagtctatccttgaaacgaacctgatgctaaccttaaactcacattcactacatcaaaacacaatcagaacagaacagaacagaacatagtacatgaaaatcaaaaaatagttaatatgatgttatgttattaacctggtggttgttgttgtttttgttgtgggaaacttaagaataaattcatttgaagaaaatggtaactccccaacagagtagatagtatttctaccatcataggcaactctcacattacctaaatagttcaaagttcccaactctttaacgatatctctgtttaatttcatggatgttacttgaggacttatccatacctgtaaaaaaaaccaacattattaaaaaggtatggaaacatgaaaagatacaatgaaacaagaaaagatgttatttttatgaactcacatggtaatgatagagacccttatagttatggatggtggtaacaagttggagtgtgaagtgattagctttgatcaaacactttctaccaacaataccataaccgggtcttgccggaaacatcacacatttcgatgaataatccaccggagaagaagacattatagaagaattttggaaagtgagagagaaatgaaaagactgaataaattgatgatataatagtaacaataaataagaatagaaagagatgtattgttttgtaaaattccaaatgtgtccctacctaagtacacctattagtagctagtataatactagtaacatacatagctttgcttcttcagcaagattttgtttttggacataaatcttggaaatcttgtgatgtcccttctaattctgacaaattataggccttttattggtcagttagtcttcttcttatttattatatttttctttttcaaaacaaatatgctaaaaaagaatagctaaaaaatattattcgatgtatgctgttctactgttgttggtataattaagtattgaattttatataatttaagaaaataacttttataaaatatccataactaattgacatgttaccatcacaaagtctattaattgattaagatcaaatcttataaattttaatttaatttaataattttagtaaaatgtgtttatttagaaaaaaaaatcattatatatgtttggtagtgaaagataatggaggaagaggattttttaactatacaaaatacaaaaaaaaaaaaa

SEQ ID NO: 272339 - DNA, 889 bp, Cannabis indica
caaatgccccacaatcactagaatcaacaaaaataaacagcaatataagacatgttaaaataacaataaaattacaaaataaaacataacagaaacaataaaaattcatacttatccacttgttcaggaagtgcttcagcattgacaatagtgaaatgtgtagtaggattcacaaatgctggtaaggtaaggaagctcatcataaacacctaacagagagaaaaacaatggcaacatgacagaataaggttccaaagaaagcaaagaagcagcctcatacttcggggtccttagagaattatacaaatatataattctagacttacccaatgactaatagtctttatgtgcaccaataacaacacatggttagcctgactccaacgtataccacatcgaagacgtttaccctttatgaaatgagtaatttggtgctttggatgaacaagggacatttgttcattcatacttacatacttttcatgcaaatacctgatgctactattgaaatagcaatatgtagttgtaatcttcatgtttgttgcagtagaatacttagctttctttttctaataataaaaaatcacatccatatgctgaaaatattaaaaagatgatttaacaaaaaccaacaaaaaaaaaacaacaaaaaacctcacagaatcactaagaaactgatcacaatgaagcaacgagtgaaaccacatcttccgctgaacatattcacaaccaaaattaaaacctggctcaagcttattattagcagggacaaaatacaagaatgaccattcatatccttcctataaacacaaaacaaacaaaaatattaatagaaaattaaatatctaaaaaaaataaatgctatacacaaataacatagacaaaaaca

SEQ ID NO: 272340 - DNA, 1732 bp, Cannabis indica
tatgtgttgggtgctaatccacctttgtctgtgttggatggatttgttagaagagtatggaaaggagaggtaaacagagttagtatgctcacatatggtgtgtttctagtcaggtttgattcaattcagactagggacaaaattctcaatgggggttatgtgttctttaacaaaaggcatgtgataatgaaggtgtggaatccatataccaaatttccagaaagaagacattacctcgattccaatttggatccaggtcaaggatttggagctaaaatactggggtaaaaaatcccttttcaagattgttggacagttgggaaatcctctccaagtggatactgccacaaaggaacggaataaaatcaattttcctagagttctcattgaggtctcaatccatcaagaattcctagccaacataccctttgaagatgaatatggtgtaaatgttaatctgtcgattacttatgagtggaaaccattgatatgtgcacattgcaaggggctgggacacgcaactgatgaatgcaggaagaaggaaggaaaaactcagcaatgggttgtgaaagaaaagagtaagataatcaggaacaaagggaagcagtagctcctatagtggatgcagatggctttcaacaagttataaaaggtagaaaggagagaaggaaagaggtggtcactgaagttgctatcagcaacccttttcaatctcttttgaagcaagcagggacttcttactgtgatggggagaagacagagattcaaccacaagtaatcacagttggaggccacgaaatactcacaaaagaacatactaaaggagggaggagatcctcctcttcaaaatggatagaatcctaagttgcaatgttcaaggaatcaaccaacagaggcaaaatgtagtgaaaaatttgattctttgccagaaaattggtctggttggtttgctcgagacaaagggttaaagcccgaaaattctcccgccgagccagagcatgtgccttcattggttaccctcccaacatgaaggcctacactctattagaccttcaaaccaagaaaatatttcattcaaaagatattctcttctatgaaaacatttatccctttggcaatgtctctcaaacacatcacatagacaattttttcttcaacatatataactgagactcatccatcttaggcatatcaaaatccacccatcaacactgaggccagtccatctcagataaacaatcgagacaaacaagtctctcagacaaatgtctctgaggcaagttcaccatcccaatatactgaactccatcaaccttagaacacagattcaattaataaaaatgaaaaatcatgcactaccagatcaggccgtgcacaacaaaccccaacttatctaaatgactattagtgtgacttagtgacaacaaccactagtacagaccatcctctcatcaactacttattttaccacaaattttcaccagaatttcaagcagccattctatcactaagcttaatacctgaacccacatcctacaaacaagcttccaaatataaagtttggaacaatgctatggatgccaaaatagataccataaaaaaaaaatcatacttggattgttgttccattaccaccaaaccaacatgtgattggcaataaatgggtatataaaaagaaactcaaccccgatggctctgtccaacgttgtaaagcacgtttagtcgccaaagg

SEQ ID NO: 272341 - DNA, 600 bp, Cannabis indica
ttgtcttgtctttcattggaaattatcaaataccaccaataaaatttatacaaacttatattaactaacttacacaggttgagatgagcatgacaccaatgatgccagccaaagagactgcaaaagcaattgttaacagagcatgtgagggagcttactatttgacagtaccaacttggataaggtctttgtattattggcatgcctttattcctgaggtgttggaatggtctaaccggttgctgataatgcctagaccaggctccacagatagagatactattagtaagaaaatagtggaagtattatatggattcaggccattgcagcctgggatagttgagtatcctgatattggtgataatggccacatgtcttattcacactactaaatattcaactcgttttcttgtgtcaaatactctatttttgtaaaacttttgataatagaaaatgtaatatctatgatacaataagctagctttatacaagacttgcctagctaaatttgagtagaaacaaaaatccacaaaatccatttacaacacatataagtgcagctcaggtagatctgttgttgttttgaaccatgtaattggt

SEQ ID NO: 272342 - DNA, 620 bp, Cannabis indica
agagttcctacctaaaaaaaataatcagaaatctgaataagattgacttgtggactatgcagaattttaactacaaaaccacgtaaaaaaatctgtgttcatatctttatttctatagcttttatttttctgtgcaaaattactactgtgagactcaaatttagttaacaaaaatctgcgttaacatggaggtttacatcgatgatatgttggtaaaattgataaaaagtaaagatcatacctcagacatggtagaatgctttaagatattaaagaagtataacatgaagctaaacccgaaaaaatgttcctttagaatttcctcaggaaattttttgggattcatagttaacgcgaggggtattgaagcaaatcctgaaaaaatcaggcattaatagagatgctgtcaccgacaaaaatggtaatgtggtgatgtttaaggcatgtcttgtagcaaaaggctatactcagaaagaaggcattgattataaagagactttctctccagtttcatcgaaagactcttttaggataataatggcacttgttgctcactttgatcttgagttacatcagatggatgttaaaacagcgtttctcaatggcgacattgatgagac

SEQ ID NO: 272343 - DNA, 627 bp, Cannabis indica
cttgccaaaaaaaaaactttacagttgttgttgaaggaatttataaaagaggaagtgaaacatgcgttatttgtaattcatggatgtaaagtcccaaaactgtacttgttggttttgggagctattttttttaagataattgggatttagtagggaatgaagtttgtaaagttattttaaatgtcttgcacacagtgaatttattaaagaagtgtaattcaattactcttattcaaaagagtaaatgtccagtgactatcggccaatatcatgttgcaatgttctttatgaaatagcgactaagctaatttgctctaagttaagattggtgattccagagtatatattgaagcaaatgcatacaatttgtaggtctcattggaaagggattgcaaaatttagtggctcgagacccatattaattttgtttgattattttattggttaaaataatttaaattaaattaattaaagatatttaaattaatgaattaaatatattattggataatttatttaattaaaaagataataataaaataaaagaatttaactgatttctgtttatcgattattagatatttatatttgaatttgaactctaaattcaaatcaaattatatattt

SEQ ID NO: 272344 - DNA, 539 bp, Cannabis indica
atcattagaactcaaagtgcattaaactaattttacaataaattattcacattttaaataacgaaacaaattacattgcttatcgcttttaaatacgaacatagtgttattttacaggttagaacagtttcaagggagcaagtttgtgcactaaggaatgcagtccatgatgtaagcttttgtgaaattgagaatacatccttatagtctaaattcggttgaatgtactttgaattttaacgaaataatctaattattgatctgacaaaatcttattaaaagaataatgttaggtcttctgactaaaatgagactttcaatccacatggtacgtgatgaaacttgcaaaattgctattcacgtagtgccatgtggattgaaaactctatttttcttggacttaagtttttttgtattaaaaaacatttaaatttgttagactattgtgattttattttttaagcacaagtcaaataattaaaatgggtttttgttgattttcttttattctagggttttgaagtaaatgcaaggccaac

SEQ ID NO: 272345 - DNA, 773 bp, Cannabis indica
tctaatctattacaaaaaattattaaacatagaaaaatcatcagaaacaccaacaaaaggaactatacattaagaaaaaaattcaaaatcaaacaatagatcaaaaaaaaatcaaaaacctacaaagtatccttaacataaacctagcaccatttaagaccaatttcctcaatctgatcgtaaaaatcataggtaaaggatccaatcgcaaattaaacacggaaagcgtgtacagctcataacaattaaaatcccaccaataaatcgaactataatacaaaagtaaacgaaaactttttttttattcccgttaacgaatagtaaaccatcatcaccgcctaaagaaaatcaaacctcaacactgaaatctaattcttagcaacaccaaactgaatttttccaaaaaaaaaaaaaaatctacgaactctgaacaacaaaatctcaccaaaacaaaacacatccaaaccaaaaaaaaaaataacagaatctagagagatggagagaacaacaaaaaaaacaaaacaaagacgtaccgattccaaggtgacgatttcggaagccggtggcggaggcgaagaagacaattcaacgagttcttgcgcaggaacacgaagatggtacttatcgagcaccgggatactgctgctctgagggcatatgatctccgcctggaccaccatcttttgcctcacgatcatctccaaactcgcaaagaatcaaaattagggtttctgagattcaaacaagggaaaaccaaatattagggttttctt

SEQ ID NO: 272346 - DNA, 807 bp, Cannabis indica
aacaaaccattcagtaaagagttattcaactcacacaaaacaaaaattaagtctttaaattgactaaccaagaagagtgcctgagcaacggttgcctgaacaagctgttgaagcaaaacacctttgaccacagaagagagaggcactgatttgctctgttgttcctcctcttttcttgtatgcaatcgataattatccaaaggtggcatcaactgataaaacccagcatataaccaataaaccacaatcggagcaaatgtacccatcgactcatcactcacataatcttcccaaaaaccattttttttttcgatcccaattttcactaccagacaaagtttctacctttactaataattcttcaattcccaacaaaacacaaaatttccccaatttttttaaaccctggaagagaaaaaagaatggaaaaatcgaatcaaatgagttgaaaaagacagaaggtggttcgagtattcaaatttttgatttttttttattttctcgggaaccaaacagaaaatgaagaagaaaaacactgaatttgattttgacttacagtgaagaaggtaggaaatgggtttgggtattggagagtgaattctcagatctaaggctgtgtttggattggagaatgtgttattatgaaaagtgagtgcaaacagtgtaaaatacatttaaattttaaacttcactcattcaaaaatcaattgttgatatttttgttctttcttctttgtttttcttttcactttttaaataaataaactaaatgaaatgtctcaaccaattattgattgccacttgttt

SEQ ID NO: 272347 - DNA, 806 bp, Cannabis indica
gttcaacatataattcccaattttttcactatggtttgtactcaattctcattgtctattaaagtaattcgctccgacaatgcaaaagaattgaacttacaatccttttttgcctcaaagggcattattcattaccactcttgtgtggaaagaccacaacaaaattcagttgtggaacggaaacatcaacacatactcaacatagcccgagcactaggattccaatcaaacttaccctagtttattggtcttacctagtccaaacggctacatacctcatgaatagaacaccctccaaattatttaaagggttaacatcataccaagttcttaacaataaacctcctaactatgatcacttaagaagttttgggtgcttagcctatggctccactctcccttccaagagacacaaattcacacctaggagtagggcctctatttttattggttaccctcatggcatgaaagcctatattctattggatattgaaaccaaacaaatttatatttcacgtgatgttgtcttttatgaaacttcctttggtttcaccaacatccccatctaaaataaaccatttatttgctaatgttgtccttcccacctttcaaccaatacatcaagaggtcaatccaactaaagaatataactttctgatttcacaccagcaaatgaattttcccattcatctggtgtcacaccagaccctactgctgtcaatatacagcctacacctctcaaacatggcactgatcatctggtttccacaccaaaaaattacccagccataacctcacctgctggt

SEQ ID NO: 272348 - DNA, 1805 bp, Cannabis indica
aagtccacccccaagcaaggcaggtcggggtacttctatttctctcaaccagacttcaagtggttgatgggcacctatcactcggccatcagcaaaattaggcattttgttgatgagtacttcttggtggatggcgcgggcatcacccgtactcggttctagcagattccaacatatcaccgtcctcccctcactcttgctcttagggatagagctcaaaagcttgctcgactgctgggggaagaccggaatatcattcggttgacctccgaggataatcttgtgaggtacgggctctatccaaaggatttcattcccaagcaagtgagggagaggaagaggaaatctaatgctggacgggctgaacgagctcatcaggagaatgaactcattcaacttaagcgcgaagctaagttgaagggagatgcaagggccaagcaatatgcttaggagcccttgaatcctgaagatgaggttgaggaagagcaggtgactccgctcaaaaggaggaaaaaacttccaacccagcccatgcctatcgaacatgcaattcgcatcagggagcccatctctcctgctcggccacttcctcctgtgctcaaaaaagagaaagctattatgtccaaaatcagaggcatgtcaggtgcgatggactttcgagacctgctcgagcaatcatcttgcatattactccatcctgcttttaagcttcttgactattaagcttcatgtttctgatgtctgtttcttctaaccatgttgttttttttattctgtgcagacatgtctcagaagatgcttgatgctctgaagaagagaattggcagaggctccaacgcatctcctccagccaagaagtctaaaggcgatgagggaacctcttccaaggaaaagacgcctgccgggaggtcatcgatctttctcaggagctaacagtttcaaacccctccactccaaaagttgcccagtcgaaggagtctcgaggagggagttcgaacaagtctgaccaaccgagaggcgggtctgagctggtgcggacctctactcaacctttgtcggtgcttccggaggccaagaaaggcaaggagatgcttgctcactatatgaaccggttggttccttaggttagtgagcagctggccggtgcagacaatgactcttttctagagctgctggtgggaggagtcttgaaggagttcacaagggtaagtctttcttgacgattttctttaatcctctttacttggttcaaatactcaagtttttcctctgcacaggccagtctgaagttggcctacacctactctcgggctaagtctgcttcttccaagaacacagctttgtccaacaccatgagggcggaggtggacttggccaggaaggatgctgaagacgccagggcagaactcggagctgttcggatggagttgggtgaagccaacaagaagctttttaccgcccagaagaaaataattgagctgactaaggatcttgaggtttctgaccgacttgaggagaccatcgagactttttctgctgaagtgaacagtcttcaggatgagaggacatctcttcgagccgtcctttgtcgggtggagaaggagaagaaagctaaggaagaggagcttacggccgaggtgacgaagcttaaagagaaagttcatgccttggagacagccagtcttgagctcttctatgacttttggaaggctaatcctcaggcaaactttgactacttgggagaagctaaggacatgtaccttgagttctgcgcttcccaactagcttatggtgaaaccgaggcg

SEQ ID NO: 272349 - DNA, 1614 bp, Cannabis indica
caacagtagagactcaaagaattgataaaaatgtcacggtagtataatataaaattttagaggtaccgtgaattaagtacgaaaggtagaaattatgtgtttatttggtctaatatggagatgaccttaatgcccttgattttttttatttgttgtagtgtagtttaaggtacaaagtggtagtttgatatgtatatacgttggatagctattacttaactttatatttagtttataatactttaaaattaagaaatagaaattagaattttgagataaatcactctttccttcatctctcttggctgaccataccccaagataaaattcaccgcaatttcttcaattaattttcaaactttgaagttttgaaatttgttgaagtgagtttgatttggcatatagaatagttaattgaagcttcctaagctgaatctatcttattttctttatatttttcattgaatagaaaatagatttattttggagggaagttaagaaaatatatttcactcaaatgtaaattttgctccaagaattctctctaagatagttaaaaataggataggagacctcgtcctcaagttcaagagccttagaagcatcaaaacgacgtcctgaaagcttcgaaaagagcacacagtgcccaggttgacatatgacttggtgcgttaggttttgcttatccgattccgattctatctcggtcgttcatttaattttttataataagtgagacccatgaatttagaagagtcaacaaaacttcatattttcacttttctagaaaagcgacttactcaaaaattgagtagttttgagtctcctgttttcgccaaacagtaagatctttgaaaactggtgaccaacttcaccagaacacaaaaactggctaagtgatttccaaatatcacttaggcatcaaaaaatacatcactgacacgttttcttactcacccagcgtccaggttgacgtcacatgttaacctgggcgttgggcccaaaatatcgtttagtaaaatgaccataactcactcaatattgatttgattgatgtcattaaacttgagtttcaaagctatttcaatgctttatcaagtcatgtctcacactccaatcacaattctgaaattattaactccaaatttactctcaagtgagttacgaatttaagctacaattaactcggagtgggcccagcatgcgcaactcaagcttcgaaaattggcgatcaacctcccgagtcaatttcattgttagatcgtcatctattgtcaaaaatagcctaaatgcatttttttacatattttttagaatattttattattatttaataggacctccttccctataaaaggagagctccactagttatttttcatattcagaaaagtacccataaggtcaaagcatctctctctagaaattagagctttcacacttagccaattttcttgtaattctcatcagaaataaaaactcgaagtagacgtaacgccattaccatcgcgacatgagcagtgaactactataaaatttgtgtgtctctctaaattatttacttacattcattatttatctcaccaatctagcgagctggtgttggctactttt

SEQ ID NO: 272350 - DNA, 1298 bp, Cannabis indica
caacacctccagttttggcgaaaccaataactggagagacgttatttctctatttagccatctcgaaagatgcgattagtgcagctatagtgcgagaagagggcaagcactaacaacctatttactatgtaagtaaaaggttactaggggtagaatccagatatccccctctatagtccatgtgtctcgtaagctacgaccatacttctaggctcaccccataaaagtgttaaccaatcaacccttgagataagttttatcaaaactagatgcttctggaagattgataaaatggtcaattgaactggggcagttcgacataacataccatccttgaacatctatcaagggccaagctttggctgacttcttgatagaaggtataactccagaagaaattacacctgatcagcatggcaaggaaacctagaggttatacgtggatggcgcatccaacgagcaaggttcgggtgcaggggtaatattatatcgccagaaggctttaagtttcattatgctctgagattccaatttgacgcatctaataacgaggctgagtatgaagccttgatcgccggcttaaagatagcaaatgcattaaaagtcaaaaatctcatttgtcatagtgattcccagctgatcttgaaccaggtccttggggaataccaggccaaaggcttgaaaatggcaaggtatttagagaaagttcggaagaacttggaaagattcaattactttaaaattgaacaaattccgagagaacaaaactccaacaccgacgccttagcaaaactggcctcagagaacgacctagatgaactgaatctagttccggtagagatgctgagcgagccaagtatatgtgaaacagaagacggcgagatgatagatagctctccaacatggatgatacctattattaactatttactcgacgaacaacttccaaatgacaaaaacgaggtgcgaaaactattgtattcagtgcctcgctacacaatgatcgaaggcaaactatatagaagagggtattcaatgcctttactacgatgtgttcttcctacaaaagcaaacaaaatcattagagaaattcatgaaggcttctgtggggatcattcgggttggcaaagtttgtctaaaaaaatcattagacaaggatattactggccaacgatcaataaggacacacacgagtttgtcaagaaatgtgataagtgtcaaaggttttcacatatatctcgtgatagagactcaaatttgtacattttaagtctttaattgtgtatataaaattaatt

SEQ ID NO: 272351 - DNA, 542 bp, Cannabis indica
agatcacaacatcacacaatggactgcccttcactacatgtcagccctggctcttttgggtgttgttatggcaattgggttgggactggtggccgcagcaagagccaccatggtgacgtgtatcaccgtgttagtacttctcaccgtcgccggtaaccgccgtcgggttctggtcaaaagtgggaggaagatcaccaatgacgtggcaatgttcttggttggagttttagtgaaagataagggctttgttgctgtggcttgtgcaactcttttcagcataatggctcttgttggcatcatcatttgatcttgtttcttaataagtttccaaatttaatgttaatatagcttcattttcttttctctttttctttttttcaatcttaattttctagtttttggagatgattattgatacagttcatttgaattttgctttagtaaatatactaaatatataaatatcaaatagcattgtcttttatattatgtttattcagaatgtttaaacaattatcaattacagctaaagcaataagttg

SEQ ID NO: 272352 - DNA, 1687 bp, Cannabis indica
gttatttgatccgatattgcatggagaggcatcatgaatatatataataatttaataattaaatgatgacaaaaaattagtagctggcccaaacttttttgacaaggattgataatccaatgaaactattcaactccataaatgtttcatataactaatcaactttatcttttcatttctttattaatctaaaatatgaataagaacacatgcatgtaacttatgttgaagaagtagtcatcaatcaaaatcagactcttcagtgcattttaccttttggcgcggtcttaatagaaattattagtaatattaggtgagctgccaggccgaactaactattgctcatattattataagcccggcccatttaactaaatctatctataaataatccttgcatgcaccactcattcgatcaagctctaattattattacttgatcaaaatattcagagagagatttagcagcttataagaattagataaacattattaattatgggtttatcttcttcttttaagattatagtgaccttagctatagtttttgtggtattcacaagaacttcttttgctgatgatgatgatgatctttcaagtgggttctattctaagagttgtcctaaagtctttagtactgtaaaatctgctgtccactctgctatttctaatgaacgacgtattggtgcttctctactgcgccttcattttcatgattgcttcgttaatgtgagttttcatttgttttttttttctctttaaatttatgttttttcttttgaattgttttgtttgtgctatatattgagctagtggttccaaattcgaataactttatggtaaaaaatttgcatgaaatgagtggcccacttcacatggataggtatacatcatatataaaggtgaaagttctcttttgctttatatttgttggtttaaattaaaactaaatacatgactttctgattttatttatttatttaatttagctatggttacatgatattatttgttctttcatgagccatatcttaatcaaggaactaattactaataaaacattaattgctaatatatgtattctattaagaactaagtatatatcaccgacaagtttcatgtcatgtcattttatataacagtaaattgattggtttagcttaattattagtttgtgtataaaaataattggtctattttcccttttaaaaaataggacttggtctaatttcctctggccgatatatatagctatatatattaatataaattgtacatgtacttatttttcaactaacaacctttgaggccagcattatattttttaaccaaagaaaaatactatagtctcaccaataataatatcatcatataactaatacttcggtaccaatataagatatggtaataaaataaaatagtaatttaatttgttttgcaatgaaattggatcaatataatgttgaaaaaaaaatatgaccttctcacttaaaaatatataagagaaatactaaagggtaccagtggtgcctagcactccgtgtcaatatcaagtatcgggtcccataatatagcaggttttaaaaaatatgattccccctcaagatgatggctattttttgctcatcaatcttatgatcacttgcccccgcaagagatatggctctgataccatgttgagaatcat

SEQ ID NO: 272353 - DNA, 1844 bp, Cannabis indica
aataacctttcttctaccctaaaccaaagaaccaaaaaagatagatctttctcctttatatacatgaaatgaaactctcatgtagactatgacaagtgacttctgttgaaatttgttgcttccaatttatttatgctcttttgattaccgaagtcaaactcttaacataaggaacaaaatattgaccacccctaaaatgagtgcaacaataagaggaattgataccaaatttgtacacaaaaattatgtcatcttctgaactcatatacaacacttgatctttccaaagtgtcaatggccttctaataccttcaaaaggtcccaatgttataaatttggtccaacaataataattatgatcaccatttctctttctcatcagaacccacatatcaatgattgttggattcgatttagcaaagaaaaacaaagcaatctcttcattccaagttacaattcttgtccattctccaatgtctctatcttcacaatgtttgagccaattgtcatggttttcaggcacccttatgatttcaatttcttcattttcaatttgagtagaaataatgaggagcccacataacttcttacaccaacaataacaataacaaaatttctttaagttcacaacttggaaaccaaattgagggagaacttgatcaattctggaatcttgaattagtttccaagaattactattcaagctatatatttcgagagaatcaaagcccttgatcgcgatgattttataatcattagctcgggaatcatatccaaaccctaatactttcacattaataaattcgtcgcggtagagtggaacaaacttcaattccctcaaagcaagattgcataaagcaatagagtaaattgtattgatacagattatgccgttatagtatgacactccgtaataatgtgtaaaagggtgaaaattcggaatacaaccatcatcatgatgatcatgatcattattggccaatattgtgaaaatataagaggtgatgggaccatagggagaaagggctgaaatgttccttagatatatttctttagaggaccatagcttggtgtccatattggcatagtgcttgagtacaaaaaatgagttattcattagagaatgaatggaatagtaccaattcttacaaacaagtttgaatctttgcagagactccacaggcaaccatgacatgatttcaattgctacatcctcattcaaatcaaagaaattggtcatttttgttgtacacttgacttaatttcttgaatcttggttctctgttttgggatttgtttttttaaatgaaagaaaaacaaagaaagagagaaattgagaagtgaatgaagtgatgggattgttttattgaaacttgttatttaaagtaaaccttatgagaatatggggatgggatgagggaaccaattagttagttggtttgttttagggggtgaagactactatcgagtgtgctagcctatagagtactattcttacattaatctttttttttcgtcattttaaagttaaaaagaataaattattaagaggtgaatggaaataaatagcactcttagtagaatctgtattttattttttaaaatacattattaaaactccactttattaatttattgaaaatcacatttttacaatatatcatacaataatctatttatttttattttataccatttaaatataatgttggatattgattttctgcagcttcttattagggtgctattttgttattactagcgggaggataatacttttggctagttttttttagaaattttggttggttttttagtattttagtattgttgagctagtgata

SEQ ID NO: 272354 - DNA, 507 bp, Cannabis indica
gtgactcttttggctctacttttggatcagttttatagatttttggtggctctttttggctcactatatccctgaatcacaagtggctctttttggcttttggctctacttttttgatcaattttttgatttggtggctcttttttagctatacttcgatcaatttttttaggttgaatagtcattagagattttatgtttattttgttctgataccatatgagaatgtgaaagtgtatggttaatgaagtaggaatagatgaatgtatactaaggtgcatgaagttctatctcaaaagtaattaataatggaaatagtagctcataaatattatatatgggctaatctttccacatgttagtaatatgagattctttaacatatggtatcgatctttttttagaaatatttgaactaattgcaaaattgtattttttgtttccctcttcgctttccttcgtgcaagtaaaaatgtgataagagttagttttcttttttactttatt

SEQ ID NO: 272355 - DNA, 1449 bp, Cannabis indica
gtggcacaggtcacccgatcattcccagtaacactcataaagttcaagatcctctcaattactgttaaccactgttctgccttcatcacatctagacctcccaaaaacactggaggtgcctgcttgtaaaatatttcatacaaaggttccatatgattgttagttggcacttgcggtggaggcactacaggaggaccctgctgtcttagccacttaatttctttatcttgtttgttaatcttggcttgtatttttgcaaacctttgctcccaatcccaagcaacttctggtggattttcttgaccacccctctaaaaccttacacagcctcggttgcatcggggaatcgaaagattaagatctccctaatcgcctctggtcccgaccatgttaacatgacttcttgtgtttcgttggacgtccatattataggacttagcctgcgaacccataagtcaaatagattaaacagtgatcatatatactctaggtaccgcacttatggatttaaacgcaatgcattcaaataaataacatatggctatcatgtttcctaacatgcttttctaatctcataacttaccaaacaagtaaaggctaactgaacagtgagtcgagcttgtctccgatgatgattgtacgtgtcttgacagtcttcaatttacaacctggcagctctgatacaaaaattgtaataccctaatgcttaggcacgttccaatgactttttaattaaagtgcacacctttgctaatcaaagggatttattacgaaattgagataaatttaaacttttgattaacaataaacttatctaatcataaatatatatacttatacaaaaaggtcgagatcccatctgtaaacttatttatacaaccaatatgagctttataaacatgtcgcataacaactacaaaatgaaccccaagtcgtcccgagaccaaactctgcaggtcgtgccatcttgacatgtataatcatccttgagctatggactcattgttcctcaaccttagcctttcctttacctacacatgcaatcaataattatgagtcaacagtctcagtaagaaaagcatataacataaaatatattaccgacttgaatttaggcacccatataccattgcacaaggcttaacagatgattaagaacgttcttaacaaaggtacgacctttgtactacatgcactatgtaccgctactgtactagtgttgatagggtttgaatcataccccgagtaccactaagtgttgtacaacatgcactatgtactcaatggtactagtgttctaacactagattgtactcttaaacatcatatgatgtaccacatgcactttgcaccgctaccgtactagtgttggtagtatatgaattatataaaagcatgcatataaaggtatttacacattctgactggatatgaccaaatccctcacac

SEQ ID NO: 272356 - DNA, 1153 bp, Cannabis indica
ggccccactagttataatttttgcctattttttcaaccatttatcttttatttcacaaatgccattgtttttttaattttaatccaataaatgtcaatactatttatttaataattataattaatcatcaaataaaattctcatttatattatttattaattagactccacaaagtctcttcattaataaataaaccctaagatctcgtttctccacaattaagtcattacttagtgaaaattcataaataagacatagtctaattctagaattataattgattaactaaaatcaattaactgagtcttacaagcagtattatctcagctagtatggggaccatgggcctatataatcaagcttcaaaaaaatagctctagaatttaccaagtaaattctctaacttattaattcctccttgtaccactatagattttgaattgcactcttaattatacagatcgctctccatgttccatgatatagatacactatgaaattatccattgttataatcctaataagcaatgatcctctatagatgatatacatcgaaaagggacaattttaccgttacacccttcaatgtattttatccttaaaacacttagctacctataaatgacattccattaaactaatataattactgaaatgagtactcaaccatttatctatattaagctaagcttgaaggaaatcatcatttcatctctatgtccagatagaagctatagattctgtatctatgattagcgctctcactcaattgaactaccatgtccttaaactatatgtcaagagaagatccattggtcgactttgacaaacatattgaagaacataaataatacaactgaactagaacctaaccatatcaggattgagatcatttgatctaagatcaactaggtggtattgaattagatagatattatggtaagtttattataccttattcaagttcaatattggtccctatcgatgcatactttatacatccaacccaagcttactttaaccaatgccctagaaaggacataacacttatccaagatgcaagtaaactacattgtagattatcctatgagttaaaccctatttactgataagtcatagaaatacatttaatcacataatcttgattacttt

SEQ ID NO: 272357 - DNA, 16455 bp, Cannabis indica
tttctgtcagagggaatctgaaggggttaggccttgcattacctctttcagttttttgattgcagctgtttgttcttgtccccaaggcaaatattcttttttgagcatttttgataatgggcttgtgatcttggataagtggggtacaaaatcccttaggtgatttacgattttgagtaattgttggatttgggtttttgtgaggccttcatttagaaattttaacagctcttgagttatgtgttcttgggcctcatactttccattgttaagttttattccaaggaattcaatttttggccaaccaataaccatcttcttttcagagagcatgatctcatatttttcagtgatatctgcgaattgggccaggaggattgtatgggccttgttattgggtgagaacaacagtatatcattgatgtagattagggcttggtttagtagtgaactataaattttactctcttgaacatggatggcataattttgagtccaaagtgcattattgtccattgaaaatgatgatttcggatgcacaatgtcgtattgagtctgtcttctttttagatgcccagttgccaaaaacccacttttagatcaaactttaaaaatatctttgctttagagatgttagagataagagaattcctgtttggtggaggaaatttatcatctgccaaaaaatggtttagtggttgataattgattacctacctttgttttcctctagtttgctctgccctgttgttgacataaaaggtgtgacacgcccatggcgattcagtgtcttcaattagcccttgtgattgaagttgctgacaatcttcgctcgacattcgttgatgttccaaattcattatggggtggcttgctttggttggattaacatcctcatttggtttgaatggtagagagatgtagaattctttattttttcataatgagagattgcactttgttgagaattctaaacgagaatttgtacatgacctctgaattagcttttctttgattagtgaaaataagtcttgcgccatgtgaaagtaattcaggatttgctctcattgggtgaagaaattcttataggccaacccttgtggcagtattctaagccctttcttttttgtgtaaaggtcgaatcccactatgaggtcctttcctagaagttttgatccaatgactttgtgaacaacggaacatccagggaagaatcgtagctttattggcttactgattaattcggtgtggagtacttggttatttgtgacttggaaatactacttccttttcttctacagttctggggataagatgttggggttcatgattgagtatgatgctcacgtataaaataatacagctacttttattggccttgagtattttgttaggatgacatgcatttttttgctatcaggatcggttgaccagtggtgattgtatccatgttgaaaagtctggcatagatttcatcgtcggaattggaactcagctgtaatacgcacatagtagtggggatatttcgtcttcgattgaaaagactgactcaacatcatcatcggggagtgatacccccgcgtcatcctctatgtgtgttatcattttggcggttttaccttttgggcattgttttgcaaagtggccctttttccacacaagaaacatcgatttgaggattttctaggatttttatttttttcaaaggaatttccaaggagtcctattctttggagatctatacttgaagatttttctcttcttgcccttctgttttgagcatgatcatgtgtctttggttgaacatttgattgtaagacctttttggctgcatgctttgtcgagttgttttgtttacttcatgtattcttgtaaatatttgttttgagagcacatcttttctaaggctctcatcaccatttggaataattctccaaaaaatgtgttctgcatcgtcttgttgtttgcagaaaagagtctgaatgtttcttctcctagtagttttggtgttgacgccaagaatgcctgtttgaggtttggatcattgacaccactaatttgataaaaccgcttagtcattctttgaaagtgtaattctaaatcctcttttttcattgaacaacattttattttgaaaagttcaaccctgaaacattcgacaacttgagagtcttgaccacaaaatttgacgtacaagttatttagtgctacttcaatggattctgcttatagaaattgaagctgtctgtattctccaaggctttgccatcaatcttgtaagattctgatgaatcttgatacaaactatagcaagatgtctcgtatttttaccctcagttttgtgcttctaaaagggtccatgctttggattcttagaaatgagatctccattgatttgggggaagatcgccaagtatgaatgtgttgagtttgccactaaattggtgtttagtggatgtaaacaactcttctgaagacaattcttctatgattagttctgttacgtcagaattttgttccctttctactctcgagactgctattgtatgattagttgtcatgaattgagacggaattgcttcatcatcactgttgctttagtcattagtttcccagtcatcagattggctggacgatgatgacagatcgtcgtcgtctgagttttctaattcttcattgagattgatctgtgggagattattcagacggtgctgatggatgatgtttgtaatgtcattttctcttttttgaccatgagttgagtactgccattggccttgattttctgtttcttgtttcttttttcttttaagttgatcttcttcatctagggttctttttagacgaagaatttaatctctcatttttggtagatactaatggttgcgcaaattttggtaatgttaaaactatccatggtgtagagcctaagttaggagtgagatgtgatcttttttttagattgagtttgagtttgcatagacgtactggctcttcagaccctttagctctacttcctttgcaagaaaaatcttttgggaagcttgcctagatttgaccacctgtagtagttcttcgtgtacatgcaaaattttgtagacgagtttggtcataatggtgtcgacttttaaaaattcttcgttgatctttgtaactttgtgagtgaccatagaaagtttctcgtctatctattggtgggtcttattttgggctagcatattctctgttgagtggcctttgggtcttttcataattggtgatccatgaagttggaagcatttgttcgagttcgtccgttaagatctggcaaggaatgtgaatgcatgtcagtacgtaatttgtatcgacagttatcattagcatatctaaacttcctagtaccaagatgtcaataagaatggaatatatatttgaattttgaaatatatttatatcatatatattagatttttaaattactatttcttacattgaaatattaattgtatatataattttttagaaatatatataaatatgtatggatcgaattaaatctgttacttttacatgttaatcaacaagtgcggattttaaattttccaatctaatccaatccacataaatacggatatccgcaatttatggattggattaggttaaatcgtacagatttaattaaattagttattttaagaacacccctaaaagtaacaattcttctatattctaagataagaagatagagtaccaaataattatttactcttgtttattactacagatagttgacagtgacctagtacagaaaggattattgtcaaattttacaagcaaatgtgcacgatatagatggacagagaaggttcaactggaaactttctggccaattgccggaattcggggatactgttacagcctagaatgtagtctattccctaaaaaaatgttttatggggaaagatgaggcttcataaagcacaaataaatggctgctggaaaatcagagataattcttccaaccttgttagttcctaatcaaccatacgatataagttttgccgaaccatttgcactcatgtcaagtacaaggctaacattttcgccaaaaatgagacaatgaacaatcaacagcctaatattgatcagtcttgtgaagcatgaatattagccaattcatatgtagtagaaagagagaatttctgagggagtgtcaacagtggttcattgctactacgcttttgaatggccaaacctaaggcatatcctaaggctcgcgtgacattaacaggcaccgcatttccaatctggcgatacctgcacaaatgacaatcaacaatccacaaataagttaaagcatgctctcaaataagtttctatattttaaatcgtctaaacattcccaaactttgacaattctacaaaaataattcttcatactgcaattaatttagttttgaatatagtctctcacattatgtgtatttatacacataatatctcgcaagtaatcacaagaccttcagaaatatacttaaaaaaaaatcaaagaaagaaagaaagtaataagaggcaaaggaaatgaaatggaaatactttactgatgaaggccacaaacaaaaatttataatcagtatgtctcactcaaatcatggaagaacataccttgctttaacagtcccacagaatctgtaataatcaggaaagccttgcaaccttgcatattctcgtactgtgaggattctatcttgttcaggatgtaatgctacctacagatgttcaaaaagctcatcataatatcctagagaaattcatcccacagtaaattgaacaagaaagcagaagcagacctggttatgacaagtggggaaagtcactacagttggcacagtctcatcccaccataatcttgcaaagggtctatacacgactagagtcaggtagagaaaaacagaagacgtgaatatgaataaagaaatgaaggaagggagcttacctttttgacttgccttgttcaaatgtaaaagcataatcaggtacctaattgcaaatggaaaaagaaaagaactagaacaagtcagttgaatccattaggacataggaaagcatatgaaatcagattaagctagagcaggattcagcagtatatctcccaaaaaaagatgcaacagcaaggatctaaatataggatatatgatatacacaaggtattataaaagtattaaaaggagaacatattcacactaaaagaaccccaaaaaagaaaagaaaagagaaaggtcgcagctgttacatctaggcaggctcaaggaaataatctttcctccaatactagtcatccaactagctaagtctttcaatataggacaggtcttatgcgaagcaagaaaaaaagacaaggaaatggaaattatagagtgaataaaattctgataatttcaaagtaatgaatttatgacttgccaaggtatttgcatagacaatcgtaaatctacctgtaaaagagctttaataaccgtagagtcgtgtttggaatgtaatattggattggattaagaaacataaagcaaatataaatataaatatatttcatgtttatatatatgagtgattaatcattttccaacaataaattatgagaaaagaagttgggtataaagttataattttttgttcttatcactaacatacgtgataaagagtatatatgggctatacaagctaacgagtgataaaactcaagcaataatgagatttgtagaagtccgtagaagggaatactattttcatatgaaaaatttcgagtttggtggagttcaaagggggaaatggtaggaatacaaggttttgggaaaatgtttgggtttggtttaaagtctttggtggtggactgtaatctgagatttcatgaaagatctggtgagcatttcagctgaaactttcactttttcaggactttaaatggcaggaagatggatgaggttaatttgttattacaaagggggtagtagatgtagaagcttgtctaatttgatactctcttcgaataattgttagagatggaacatcacagtgagcttattctcataggagaatcctttgacctcccaaagtcagtatttttatggcaggtcttaagtaaggtaaggtgaacgttcacgaggtgttacaaaggggcagactatacataaccttttgtctctattttgttgtgcgcttggttagaggtaatgaaaaataatttttattctatttctttgttaggttgtattttaaagtattgaaatgagttttctattattttaatagaatgatctttccattttgaaatggaagaaaatactattctgcaagatgaaaaaaaatttaataattctttactattttttcttatacattttaaattttatttcattgaattcttattcctgttcgcatgctcaatcctattcttatgttttcattcttcccaaccaaacacaacttaatgaaagagataatgagtctgtcaatcatctttgtctgtattgttccatctttgcggcagatttagtataagcttctgaaggagtcaaagtttctatggtgcattccagttccctgtgaggaaggaagctatgccatttaaagtcgaaggagctcagaacaaacagaagctttggcaaattacagtagctgctgttttgtaggtcttactgtcttgcagcaggaaaggaacaaaataatttttgaggtgaggtggagagactgggattaacaggatgttaaaagttgctttatgctgcataatgaatcaatgttaagaattttatagatgttcgtttctctgtttggttgcaaaattggacctttctgttataatttctgtgatttaaaatgttttatattatttttatgtgttataacatccactcaatatggtggctattttcttaccaatcttgaacattttaatcccaagtagctattttagcttactagatcacaagtgactttttaaaattatttttctcctttctaatatgagtttgattgaatacttggaggaatggaagtttagaaaggaatcatggaaagtatgaatggagtgtatgataagaaacctaaggttttacctcgaaatcaattaccaatgagtggaccaattcatactgttacagagtcgaccccgtttgactttacaagaatatgcattttaaatagtaaaatgttgtggatactcttggcacattgtactaatactactttacatgacctaacaatatagagattaactcttgaaagaggggttttgtcgtaggatacaaaccatcagaaatttagcagatacttttagatgtccatacatctttcaatgatttttattgtattgtacctcataaacttacccaatagaaaaatgacagtagctggttaactcatatcaggtggactagttcctcatacaatgtcaactttttattcccattttaagtgtaatatgtatccacagatatctcatttattgtatattactttttagaaggtcagcaaaacttgctgattatgagagaaagggatattttcgattgcattttgattttgatacctagaatatttcaatggctttcgttttctgatttggttaggtcatgaagcttttttttgtggtaattttttctagttttaccgtgtgtttttggtgtgatttactggcactttcgttgtattacttcctttataacacaaagtatcttctaaaacttgtattttaaagtgagacttgactagagcaacagaattcgaatatccattttggagaaaaatgtgacaaacactaaccaatggctttccagatggcagcaataaaatcttttcctttggatcacgtcgagcaacattgttccctccaacaactacacctggaaggtctcgaaaatttgccccctgataatttatacaaattgggagcaaacaaaaaggtaaaaagcttagaactgatgaagaataaatccatccatacaagtgcgtattcagcccacctttttctttggaatcttacaaactcgaatgtaatcatcttcagataaggggtaaggtcgatgatcataaagcgaacattttgtttctctggtggcatctaatgcagagccatccatctctataggaagaaaggcaagacatgaaaacagaaatcatctgaacaaatgtgcatgtgtaggctcaaaaagtttagatgctcattatcatatataacactcaaaaaatttaaaataatcaaattcagatgcttctacaaaataatgtaaatgtacaaaacaagcatgtaaatcagatctatgacatcaaaataatttgaactctcgtttgtatttgcattattcactgctgacaaaacaaacatataaactacattaacaaagaaatggttagaatttcaagaaaaccatgcttgtcatggtattgtccagaggagtgcttgccaaaatataatatataaagagtagataaaatccaaaaagatttatgtctccagaaaatacattacattctcaatcaggtctatcactagtatttaaaatcctagaaattagcaagtaaaaaaagccacgccagaaacaaagtatctccacactgaacagtaaaaaaaaaaatgctgacattacctagttttgtcgatcttatgtatctttggaattctgtttcaggaggcatatgatattcaattttttcacgagtttcatcgttcgtaacctacaacatttaaatttgttaagagttgagttatgattgtgataaagagcccagtcaaaccaaggtataagattttacaggaggaaggtcagagatggcatcttgaagaacaagagccttttgtagctcacgaggttggtcttcatcgtaagcaacagtattacgctgcacataaaggttgaagatatgttaaaaaagtgaaatgacaataccaagggaaagtaaatattccatgggaactcataatcagtacctcaaactcagacggaggccaatatctgatgatgacatcatgtgttggaagtggaaactgaggtaggttctgtaagaataaaagagaaataaataagagaagagaaacacataatcatatttcttgtcactccctgccctggagatgaaattactcatacagctaagaaggatttgatggagcttaatttctatgacatggacttacagctgacttttaatttataatatgcaaaatcttattctttaatgatctgtaactaggatttaccatacaaatcttttaacttttaccaataaatcaatacaataaaagagaaaattaacttttaaaattattacataaacagctactatatttcccaagtccagagatataattgaatggaaataattaacctcatgaggaagagcaccccacaggaagacacgcagccgaaattgtggaagaccataacagcctgcagcaattattccaagccttgcttggtaattcatgtgtaccaaacgactcaatgcatatcttccaagagaagccttgtcaaatctcaaaatgtctacaacattttccatcagcacatattttggttttaagaattttacaatgtccatgaatactattatttggcggtttctttcatcatccaaaggggaatcaacatttctaaagcgattataaccactaattccctggcaaggtgggccaccacaaataacatcaacaccagcctgaagtagttgatagtcaggattagtatgaaggaacaaaaaagcaatatatattgtacaatcccagcttgtcaaatcagtcaggaaaaaaataccggaagtggcaagatcttccttttcatcccatcttttacaaattcctctaagctttcttggcagttactgaaaatatacacaagataataatgatgcgtttaagttaaacacaaatctttaatcatagcaggacatatagtgacactaccttaagtcttcagctggttcccatgtatcttcactggtactataccccttccaatgcacctaaaagaaacagctatcagtagaaagaattcgcaatgacaatatttaattaatataatttgagaatttagcatcgcgattacttagcagggaaaaaatctggaacaagcctatttacctctctcacaccaagcccaacaatggctttgctgaaagttttgtgagtcaatttatgaaagatgataagttgcataaagaattctaaattatttaaatgtcacatggtaagggtttcatatccagattgaggagagtctatcaccaatttaatacaggttactgcactgcgtgcggagaaacttagtggcatgagatgaagtaagccatcacatctttatataaataaaagatgataggatatcatcttattacagcctagatagccatagtggttgctcattttaaggcatcatataaagcatgaagcataaaacataagcaccaacacataaactaatacaaccaccaatctctaagaagcatagggatagagtattgcacatgcagtacaaaagcttgtgttatctagtttagttgcttttaaagcgtagtacaactatttactgaactgggtatttattttgcaagcaaagactacttattaaagtgaaagaatagccacatgcagtagtgttttttattttattattattactaagactacaacacatagatttatatcagagatatcatgcacaataccattccaaatgaaagataaaaagtttattctttaccttaaagttcagaccacgcttgcctgttttattgggatcaccataacaaatatcaacaaaatttgaaacttcaaattcctcagttgaactctcatgatcatcctcaacttctgttgaggcctttgaccttgatgaatgtgttcttccaacattatgggacctatatcgtttgcacaacttgtcccattccctcaataagtcaaggaaatcctccgcagcttcatttctgacctacaattttttttttctagaggtgcttagtagaatcttcaaagttttggaacttcacgattgatcaaattggaaataaggtatacacacatttgtctccggatggtttaactctatgctttcacatgcaggcttatgacagtcgacagcccacctctgttacaaattatagaaagaaaaaaatcaaaggtataatatttgaggcagtgaatgtgtagaaaagtctaagttaaaaaaaaatagatttttgttcaacaatgaaatcttatatctagttcatcatccagaacaattcacatcctggatatgatgaaatatgatgaattgagacggtattgtgtaaatacataattattgaaataccgtcacaatgttaacattagaagctttggcaccaaggcacaatccagtcgacattccaccacaaccactataaagatctaaaagagtcaactccgcttggtaagtttttgttgctactgtagggactgattcgcttccacaaggtgatgcaaagtgatggttttttaccgagttatctgaagcaaaataaacaattccgaatatcaattaccttgagcattcagcagaaaaaggaaaatcgtcagttgcattttattggagctttgacatccacatagaactcaaccaaaaaatatggcacccgtctcagtctcagaatgcgattttttagtagcattccgccattttatttatttcttttcttaaagaataaagattgactaacaaaaattacaataaagataaggacataaggtttcctcaagaatagccaatacaagctgaagctaagaaatacaatttactctcctgcttagtttttagttaaattcaaatcatcactaattgttttgtttcatgttaagtgtgtagaaatgttaaaagaatactcttgagttatcttttattactattggaaaagcctttaaatagcctgagtacaatcttagacattaattacatctcaactataagctactaacacctcaactaatctaataaatactaattatttctacaccctccctcaagcaggtgcatacatttataatccttttgtcaacaaatgagcagcttcttgttggcttggcacaaaaacaacacagttctgacggtccaccttcacatgtttagttctatcatgataaactggaatgtgtgctatattaatagctgatttattgtcgcacttttaaagttgtagttcttcaagaactcgtttgatccaaattagttcacacactccttgagcaagagctctaagctcaacttcagcactacttcttgcgacaacagattgtttcttacttctccaagtaacaaggtttccccataccttaatgtcgatcttttgtcctcaatcgaacttacccagtctgtatttgtgaatgctttcatttttcctgaataacaaacctttccctggggtcttctttaggtatcgtgatatcctgtaaattgcctataggtattcttctaaagggttgagcatatatcgactagccaagctaactacaaaagcaatgtcaggtctggtgtgagacaaatagatcaatcttcccactagtcattgatacatccctttgtctacaagtttctccttttctttcttcttgtactttcctttaaatttcacctgtgttgctgctagtttacatctgtgcataccagtccctttgagcagatcaataacatacttatgttgagagactgaaataccctgttttgttcttgcaactccatgcccataaggtattttatcagaccaagaacttttatctcaaattttttggcaagaaacctttttagctcttccattccattaaggtcattccagtgagaatcatatcatcaatatagataataagaattacaatcttacctgagtgcgtgaagaatagagtaaacctatcaaaccaagctcgtggtaattgcttcaagccatagagagatttcatttagtgacactttttctttaccaaattttccttcgaagccaagaggaatcttcatatagacctcctcctctagggtttcgtttaggaaggcgttcttgatatcaaattgttgcaatggcaaaacaatattagcaactattgataggagaattcttactacgtttagttccgccactgctgcaaacatctctctgaagtccaccccataagtttaagtgaaacctttggcaaccaatcttgccttgtatctttcttgtcacaagagattcatagcttagagagagaaagcacatgaaaactaaaatttgaatttagtgagagagaatccaattatttaaccaaccccattacttattgttttcacactccttatagtagagctctgcagaaggcgggaagatcaatgaacttgctaaatgtagctaactaagaattaatttgaattttgggtcctgatctttccgcttacgccctagcttatttgggtgcgtagatcgatgacgttagcaacatacgcttcccgttttagaaggtcgatgacatcaactgaaatatgttcatgcttccatcaagacaaggagaatctcagtgtgtgcgatgcgaactctttcgcagcttacacagtcggattgggctattccttatttgggacttgggccttatttagtaagaaaaatgggtcgaaatctttgggctcaatactttttttctttgaaaaaaagaagatgccacttgtctttttttcttcgaaatctttggtcaaaatatttgggacttgtccaaaacttgatcttatcccatgactgtgcttctgaattttcagagccttcgaataccctcgaatttctttctaaccacataacccaaagtgtagccagaatcgcagtcctccaaagtattctcctccgcctgcaaccgctcaactaactatcatatttggaacagtaacctgagaaaacccaaaccagctcaaattcctctaacagtttacaccataatttgcgagtaaaccaacaatcttcctcacttctcttgcagcaaacaccccaggagatatggaaagaaaaagacgtctcttttgcatcctatcatgaacactcacttctcccaatgccactaaccaacccaatactaatactttaaagggacactactttccataggatcttagtcctaatactttaaagggacactactttccataggatcttagtcctatttgggctcaacactgattttttaatgaatagaatatcaagtttaatcaccatcaatgaataaaacaattgttttatcaccttataatacgttttttttttttttgtgaaaaaagagaaggaggccatatggcaggtctccccctatattattaaagccacacttgtggcggaggaaaccttggtacataaattgtaaaaaaattcaatgaattatcacagtgaaaacaaaaaagagagaaaacccgagttttacaacaaaacactcaaatccctgctttaagtctaggaaagaaaaagcctcaaagtgtttgggttttaaaaatccatgtggctgtccaaaattttattctctcccagcaaagtttgctaatctctcttgcccttcgaaaattctgctattgctctcattccacacagcccataacagtgctaacgttgtagttctccaaagcttaacttttcttttgcttcccaccggtttacttattagggcctgtgcaccaaacaaggcataacccagtccagactaaattcattataaagtaatgacctgatttttttagtgtatgtgcattggaggaacagatgctcggtcgtttcattaactggacttgcaacagatacaccatcctggagatatggccatgtttggtcttcttctcttttgtattacctcgtgcacatttactttccttagagccaccagatttttttctcttagaagaatcaccttctaatactttaactttgaagggacactactttccataggatcttagtcctatttgggctctaacactgattatcttaatgaaataaatgtcaagttttatcaccatcaattgcttcagtattttcctatattctttatggtatcggagccataaggctcgatcttctccggttggttatactttgttttctccgtttctttctacaattgttcgccccagtcctcaattagtgttcaaggtgttccaacaactgcacatcttttctgtctttctatctagtcgctcatttgatacaccacctattggaacatattcaaggagaactaagaaaattaataggagttctaatactgttgttgaggtgtcagccaaagttgatgtgacaggaaaagaatagatgaagcgacagtcaaaattgaagaacgaaaagacttacatcagaattaatgagtttatatagagaattgtttcttgttttcaggatatgggaagtaaattatgaacggagtagtgctactctaggagtgattagcaactcgaactgctagaaaattgtcattgtgattctttgattatttcaataaaaattcctctttttctctgcattcccttggggatttttggtttgtaacaaattggccaccccgagatcttatgtctccggtatgtcacattctttgaaggtactgcatacttatctcccacttcgcttcaaggggagaacaacactcttcacaatgaagttcaatgggtcatgggattagagcttcctctcgattcctctatacaatctacatactctctcgattcttccatacagtctccaaactcaactcaaacttcaacagctccaaaatctcaagctcctgctccatcttcagagtcaaatgaaacacatctacatccaccaaatcaacagttttgtgtttattctagatgacctaaaaataaccaaatcatgaatcctcaccatagtcaagagatcgattcagtggtagatcttctctcaaacactaattccaatctagatttttcctagttcattgagaaaaggaactagatcttgcactaaatatcctatctccaagtttatttcctattcaaatttgtcatcttagttaaaaccttttacttctagcttgtagacattgttactcctatgaatattgaagaggagcttaggattcctgaatggagaacaagtattaatgacgagatgagagctattaaaaaaactgaaacttgggaattagcaactcacaaaagagtagcaaaatgcaaatgggtgttcacaattaagtataatacgaatggatctatcaaaagatagaaagcttggttagttgcaaagggatttacacaaacctatggaattgactacagcgaaacttttactctgatgagcaccataggcctaaggtaaagttcacttaagtatggagaggtaagcacacttaagttctcgcaaattggttgtaaccacggtattccttcaccaccagtgagggtttttatccatatcgggtttggggctagtctaagacaatggcctcattct

SEQ ID NO: 272358 - DNA, 1485 bp, Cannabis indica
attttttaatttttttttatgataacataagttgtagttatttaggattattttgtaaatttttagaaaattttaataatagtttataatgtcgaaaataagatttatatattttattctacgtgcgagcagctatttttcttatacgcttggtataagtaattatttaaaccttatttttagtacggtaagctatttaattttttttgaaaatttactgttgatcttacatagttacaatatatgtgatcatgaaaaattagagtaaaaaaagaatttcctagatgccaaaacaaataagtaatctaccaaaacaactgctacagaaatttccatttgttttatcatattattattatatatacttatttaaaataaaataagatttgcagatgatactaataaattttaacaataatatagaataattaattattgaatctcgatctgcccttgtttttggtgctctataaatagtttacacataacaacttagtttatataagctcacccaattattactataaattaatttaaacatattatttataagtaataatatttataatgtcatcatctacatctacaatatctagtggatggccaaggtttgcggttgtgaaatcagatttcaagaaaacctacttgagacatataactaaggaagagagcacagcaaagggagtgccaccaacgtctctcctttccgatgggaacgacattacgagccctaatgtgaaattcgaattaataagcgccaagaaaaatccaaaatgggtgcacataaggtgctcccacaacaacaaattcttgaccatgcaagtggacaagaataatgttgataacccgtgggtcatccttgcgtcctctggcgaacccatagaaaaagattcgccagaacaaccaggtacttggttccaagtaactaaggatggtgatactagtttcaaatttacacatgttgcgtctcagcgttgcgctgcattctaccgtgaaagcttgtacgcagttttgggcattccagtagatggtgatgctaaaatgacgaagtttgatatcttggattggcaatcgcttgttctatttcccaaaaccccaactgtcgccttccttggtcccaacaacaaatatctcaccccctatggtgacgatagtgttatgttgttcaactcggttgacattacagatgtgggtgtagcgcatcagatctttgtcgtcggtgatggttatatctgtgtgaagaacgtttccactggaacgttctggacgcttagctacaaaaactggatatatgctattgtccatgacctcaaggatgctacacttttttggcccgtcaaagtcgctgacaacaccgtggcccttctctataaagatcctgtaagtaccaaggatagtgaaaaaccgtgtttttgcaaatgtcagttatatataagaaaatataaaaactgtaagcgtttgcagcagcagaaagtaattctgcta

SEQ ID NO: 272359 - DNA, 1165 bp, Cannabis indica
gaattataaacacaagttaatacttaatttcacgacagctataaataaattataacataataaaaatatactttataattataatacaattataaataaattataaaataataaaatgaacaatttattatttttactaaaaagataaaataattcaaatcgtacaaataattttttttccatgttgatgtatttttgtaatttttttaatttttttgatctattaactaaattttcatatatttaaacataataacaagtacaatttgactttaaatagtcactatagacaccaaacaaaattgaataatttgataagctagtattattttgttacttgtaggattacttcactgcaggcacagacacaacagcaattacaaccgaatgggctttggccgagcttatcaacaatccaaaggtgctcggaaaagcccgacaagagatcgatcgagtggtcggaaagacgcgtcttgtaagcgaatcggacagtccaaatctcccatacattcaagctattataaaggaaaccctaaggctacatccaccattgcctttgcttgaaaggaaatgtgttaaacaatgccaaataggagagtacattattcctgaaaatgccatgctttttgtgaacaattgggccatggcaagagacccaaagacatgggaaagcccaatggactttaggcccgaaagattcttagtggagtccaacgagggtggtggactaaaaatgggcccaatagatgtgaaaggtaataactttcaacttttgccatttggagctgggaggaggatgtgccctggagtgaatttggccacacagatgttgcctgctttactagccaatataatccaatgttttgatctgacggttcctgattctcaaggtggagatccaagggctgtgaatgatctaggtgttcttaatatggaagaggcgccaggtttcactggcccaaggctccatgagctaatatgcctcccagttcctagattgggctcaccacttataagtactattgaagcttaattaattagatcatttgtgtgcacaactatatataaatagtaattatataaatatattaatggccatttaattgtttttcgagcttgttttgtttccgattggtacttgtttttctcctctttttaggagttt

SEQ ID NO: 272360 - DNA, 721 bp, Cannabis indica
cttgtaaatccatttgcatctcaaagtacttgagatgggaaagaggatcttcttttccagtatacatcttccatgttggcatttcgaatttgtgaggcagtggcaggagattgatctctggtgagaagggagttccgcgagcgcggtctaactcaagatcattgttacgctgtccgaccatgccatgaaacatgtttttcaactcctcaagctgggcctgtacggctgggctgacttgctcggcattttggtcaacttggattaggtcaacgtctttctgagcggggatttgagtatgggttccgggctgcacgatcgttgtaatattctgctcgtctgttccccttcttttgtttagatcgttccttaagtcatgggttgttcccaacctatcgaacagggaagagcctggttgccttagcgattgattcgcttggttgacaggtggaataacaccattattctggttgaatccgtcaggtatggctcctcctgatgaattcccggacaaggtctgcccgcctacctcttggcccatgagcgaaactcgtgaatggggattgggcggctgaccattagttgtctgagaagtattcatccttcgtctctcccaggggaatgacgttcggcgtttgctgacctacagtttggtaggctcttcgtatcagcacaatagcttgccgctacgatcttcgatctctgcatggtgagccattaatgc

SEQ ID NO: 272361 - DNA, 933 bp, Cannabis indica
caatacaatcaatcctaaactatcaacaacaaattataagttgcttacttgcagccagaaaaagagtgtttaagtaacacataaattaaaggtaaaaatcacctgcttgtaagtgcggatgggtttgtttctttttggagttgagtgcaatactttgggagcttgatctgcaccagcaaccgggtcttgtccatatattcgaaataaaggacggcaacccccattcccgaaatcgggaatgaacctcagcatgatgcagtccaacctcagagacctatcctgtggaggccattctgaggctacaatattccttcgcgagacatactgcagataccgaagctgagaagggaacggtgtcaatgatgtcagtaaatgtaacagttcattgggagccatcttgtagaccatgtccaacgtcttttgttccccactatactgcttcctgtaaatcaacaatgcagccaacataaaagcaagaacaggccaaccacctcgctcacaatgcattaacaacacattctgttgcccaagtgaaagccaactctcacttgatctcagaaaatgatgaactaactccattttgagaactgggcaaccctcaaactgcctagggtagtccattatggtcatatcatactcagacaaaaccttagccatctcactttgtgtctctccctcacgaaaattaaacaccaagaacgaagcatcaggcaaaaaatctcgaaactgattaaatatattcccagtataagccttgtagctctcttcatccaaagcctcagtactgaaacaacaatcgaaaactgcacatacagagacaaaacgttcaattcctccattttccttaacgagtcatttccacaaacacctaacattcaaactcaaaatcaatcaaaccgaatcccattaattcattaaaccaaaaaaaaaaaa

SEQ ID NO: 272362 - DNA, 520 bp, Cannabis indica
tatataggttaaaccaaccgctaaatattttatttgatgtaagaagaatgaaagaatcgttgacactaataatcttacctctctttgaaagtgtgaaatctagaagaacaaaaaaaaaaaaaaaaaaaaaaaaaaagggtagaagttggctaggaaaagaaacaacataaccaatgctgcaaaatagggggagctgggcacaagaagagaacatataggagaagacattaaaaataaaaagaagcagaacaaactaaaaaataaaacaatagaggaaaaactgaatatatattggagcatagaatactgaagaaaatatataaatttaattgttactattaagaataaaacagtacaataatatttagaaaaatgtgacaaagaaatgaaagaaaacaatattaaaacaaccttaaaataataataaaacaataacagaagaaaccagtaacagaagagggtaagttggagaaaggtggtggacttaaaagtgcagaagagatggagccaacactttgag

SEQ ID NO: 272363 - DNA, 1597 bp, Cannabis indica
actcataagtgacccgaacctgaaacccggttatagcccttttcgggttgaacctgacccgactatacaggttttcagtcggtcggtttttttggcagcgggttggggcaggtgttcgggttttttgggttagcgggacaatgatgcacaaccttcacccgtggacagcaagccaagttgcgagttgggccttgacaacccattaagatgctacgaaaatatctacttttaaggggaaattgggtcatttgtatttattaatttaatttgtaaatatctgtaatttatttgctaattagggtttatagttatactctcctatataaagggccttaactcaaccttaaaaacctaagtcaccctaagtctcatttaagcctctaagtccaaagccctagtctctctccttctctctatcttatacacgtccaagtggctctctcttcctctctctcacacgcctccaaggcttcatctctctttcatttaagatctacctactgattcattcactgtaatttaaagagagctatatcagatcccacctatagtgatctgaataatattatctctcagtatcaatacaacaaaaaggagagtaagtcattacccgctaataaggggggccgaacctctataaatcctgtgttcttttactttattgtcttactgtgtaacacgtgacaaacatcaaattaatacgaccccactgtcggttggccactttttaaggtcaaaaaaatgcatattgcaccatccactaggcccttagctcttaataccaattatagaaaatgacaatgttctaaactgtgtagtcgcaaatccccaaaatattgaggcttagattcaattcacttcctgtatagattctaggtcttacacctacatgtgagtgcacatctgatttacttatatgatgacactgagactaggtcgtgaaacaacaatatgcataagacatgataaatatggctctcatcaataaaactaactacaagcctcaagaatggaactagtacatattcctttattttaaaaaattaggtagtataaatgttttgggacacttagtgccccaaaacagttcagaaaaaatatgcagattaagtttttaatttttcaaacattttataaaccataaaaattggaatctatctaatgccattcaacacatataaaaacaagtccaataattaagttaagtctgtacctttcccaagtcattaaactttgttcaataaaagacgatcctacgttcttaagttccgagctccaattatttagtctaatcttatcactactacaaaagccaaaatttgtgacggtcccaaaaatactttttttttttcatggaccatcgcttaaaaaattgagtattttaaaccgtcgggaaaaattgagtattcgcgacgatttagaacactagtgagggaaatagacaacgattttcaatttaaacgtgattatttagtgtgggttataattgacagttttaggttataaacatcgggtataacccacactaaacaaaaccctctctcgcctatctcatattagggtgcacatttagacccgctaacccaaaaaacccgaa

SEQ ID NO: 272364 - DNA, 1431 bp, Cannabis indica
taatgtggcgcagatactgatggagtatctcacctataaatatagggtctcggtccgcgagctccttacacattctgattattcagcaaattccatctaaagagagttgagagagcaaggaagcccaaactctaataccgaagctatcgtagggattgaagctcaaagatcaatcgctggaggtatatcgatctttcattgcatatattatcgatatggttatagtttatttttcgcatttcatatcgtatatatatgttgtatttcatatactatattatggtctaacattgcgcacaaattttagccttgaaatcttcaaatttgcaatatgggtgtgagatataacttgaaagagctttaaaacgtaagttgaattgtgtcaatcgaatcaatattgaggatgttatgggtgttttactgaaggttgttcagcacccaggttgacatcctaacgtgaacgtggacgctaggtaagtgaaaaaacgttccagatttttattgtttgatgtctaagtaatatgttgacatcacttagccaatctcttagttttggtgaggttcttatgggctgaagtccatttagaagttaacaacccctttaaaggcagttattttgaaataaccgaataatcgcctctaaaggggtttcaagatatattattttttttttccttcttagctatggaaatgattttgttttctttttcagtgattgaaaaaaaaaactgcttttaaaagtcctttttgtattagtgtggatcgtttggattgaattgattattttatgaacatccttatcgtcatcttcatttttttttttttttggatttcaaatttttctatctaattcaatctgcacaagtgtgaatatccacaatttgcggattggactggattggattgaattatacatattcgattggatattttatgaacactcctatcgtcatcttgtttctacttatttttgtgttttttttttccttttggatgttttaataggttttagttttgcatattttaaatttttttgagtttatttaatatgattcacttgtgtataaaaatgagtacttatcaataattgtttgatttattttatgtacagatcaaacctatttaaaaaaatattaatgatgattacaagttagatatgattatgacatcaactttaaaatgtagctacaagtgaaatatgatgatatcaactataaatgtagtggtgactacaagtgtgttacggtgataaaaattattttaaaattatataatgggtattctatagatttattatcttctttttgttttagatttctattttgtataaaaattgtttaatttttaatttttttttactattatgtacatttaaaaatatgtttttgtgtgcttttttttttaatacaagaaattgtaagatgatttttt

SEQ ID NO: 272365 - DNA, 1247 bp, Cannabis indica
tatattaacttaaaaagtataatacaaatatcatctataaaagtaggtatatcttaaaaaatttaaaaataaaagtaaaaaattaaaataaatatagttgttgaccgaggttttcggcaaccaatttaataatatgtaagaaagtcgtaggaagattagtgcacgagatttttacgtggttggggcattaatgagccttagtccacgagtcttttgtatttatgagagtatttattacagagaatgttcttggtagcttttctctcttcggttcttatgaaatccagaattctcgacccctgtcttaatgtgtttggggggtatttatagtgtttttactgggtgatccctagaaccgagctacatgtctttccgtatttttttaatagggacacacattcccaacaggcgtaaaatagtaaatgaggcttgtttaggtgcctccggttgccttattaactacctgacacgtgctttgggcgcatggggtgcatttatgaccatcatcattgcagtttttactttttgcaggcaacgatttgttttctatccattaatgatccggcgtatttaatgggtgtcagtcgagtactcaagcgtttccaaccgccttgatgaacgcttatcccaaccgttagatctgtagaatgtgaatcgattgctattctcaccgtacgatgatgcctgatcactgctgcttcacacccgttctggcttataaaagccaaccttcttatttcattaggttactttcgctagcttgccaaattttctcagagctttcacagagagaaaaaatttcagacaccatagatcatttgattctcttcattcgccgttgccagtcctcactgtaccgacgatcaacaccaaccctcatctctcaaactttatgtaagttctcaggatactttatactcatctactgtttatttgtattgcatgtttagagtaaatgggttgaatgttgaatttctgggaaataatcttgcttgaatttgctgtgtaatgcgtagagtatctcttatttgcgccctcgctgtttctctttactctttttcttttggaatcgtctcttctgtcgcaataacatttttagggcataaggtgattcttgtttccttgtcatttttcttcctttttcttttttttttttctttttctccactgtcgctgcctttgggaatttttgcactcgatgcttgtcaaggaaagtctttggggtttcctgttggaaattattttac

SEQ ID NO: 272366 - DNA, 2062 bp, Cannabis indica
acatgagcatacccatgacctatctaggatttctgtaaaaaaagcccattattgtagtaaaatacattagatatttgactattaggctcccaagatggttctttcttgtgtggcaaattgtccgtatagtggggaccatttcttgtgcaaggcacgtgttggggaaaggcttgcacttggtggacaaaatgctcacaggagccgtcgaacaaagtagagtattcagagagtggtgcgcacactaccatagtccgacacaaggaacaagatttgattctatgtcagacaagaataactatcataaagcctcgactctcgcctcgcatgtggcttttagttctccttgcacagttggcatccgtcttagactcttcacataactctccgacatctgcctgcacttatagataaattggtcttctccgggtcccggagcaataaagcttttgggccctgaatggtcattttctttgcaataaatctctatgccttttccgggtcagacctttcctgggctagcctaatctctctgtgaccttctgtcattaagaagacttagtcagtgatcattggtttgttcttttttatttcttgccacgtgtccttcattcaaaaacacggataacaattattattattatttgcttaaccacgatatgagaaaagttaatttacaatttctctatataccgaaaataagaaatgtgtatacgaccgaagcaaaagtgatgctctcaccaaagaaatttcctatatatatgtcagcaatttgtacattacattattccacttggaccaatggtgtaaattcagagtatcctacttatcatttaacggtaagaaatcaatagatccaacaaaaaattgacgaaagagacttttgctgctatatcttttttacattagggtcatatgtataataattacataaattaaataatttcactgtaaatatcccaaaaatatattaggagggtatgtgatagtttaggcacttaaaataattacaattatagtttatttttatgatcattacaattatgatagattcctcaacaaatttttgagaaaatttagatactttataatgtcaaaatcagagtttaataagagtttagaagtggggtttccactaatatagaaaaagaataaaaatgatttttattactaaactatgattttgtagagttttgtcccttaattttatattttgtttcataaatttcgcctaaattaaaaaaaatcgttaccattattctccttcagttatattgagttaatttttcataataatttgtttatgtggccatgagtcacatgtataattatagtacggtagtctatttaacattaaactactcgaaatctaatttattagcattaaacatacaaatattatctctaagctagaatatgcatttacatattctcataattcatcaaaattagactattatttatgaatttattttctgtcagactcttgaattgcgttagagtaacattatgttagtgctatatcaacatttttttttttaaaaaaatgagtagaatgtaaacgatttttatagtgcaggaaattttctgcaacaaacaaaaaaagaaattacagggcaaaactttaaaaaatgtcatagcggggggagtgtgtgtggcaaatcctatttattctagaagaaataggtgtgcaacataatttttgaacaccatcatcgtaaattatttaaagagatttttacacaaagtgcctaaaatgatatatataattttttttttaaaaaaatatttttacagattaaattttacctttttatgaatttatatttttcaattacatttttatagaattttatgaaaacaacatgaatacaatgtataaacaatacaatacaaaaatataaagaaacatgaaatcaacttaattagtataatgttgttgtgaaatcaacgtaaaaataactatttttaattttcttgaaaagaaaaattaaaatctgtaaaaatattaaaaaattgtagaatctatgtttttgtaaattttgagtatttataaaaatatacc

SEQ ID NO: 272367 - DNA, 3918 bp, Cannabis indica
tttgcctggtgcactgcagttatgcccagtgatctgtactacatgttaccagcactaattttatcagtgatcctataatcatgtactttggtgaatacctgctgtccgtgtgccctgttttctgtttattagtctcacattttacatgtcttactactgcagctccagcagatactggattcctttataatttttgctgcacagcaatctgacattggaaatgttgaaccttcttatatccatccctttggggaatcttcatcccttaaagggccattgatgcaatttaccccttctaatataagaatagctccctttcccacccgggaatacactgatgatgagttccagtcaatcgtcaagaaggtcatgggtgtattgtatgtatcttgttgagctcaatatgcataaagtgtccgttcttaaatagtatttttgtagtcttcataggtataattttacaagcacaagctatacttgattaatctgtattttgaatgtgcaggtatcttctgggatttctatacccaatctctcgtctaatcagctatacggtatttgagaaggtttgttagtgattaaaatcagcttaagtgtactaaacaatggtttttttttggtgtactaaacaatgtttactatagctatcaatcataaaaagtaaaagaaaaaaattcactatgtgcacttcattttctttcctgaagttattgaacttgttatatttcaggagcagaagataaaagaaggtctctacatgatgggactaaaagatgaaatattctacctttcttggtttattgtgtattctttgcaggtagatctgtcatattgattactgttttattttggtattctctctcttgctatatatgtgtgtgtgtgtgtgtgtgtgtcagtgtataggaaacaaagattaatactattcaaaatgaataacacaaaaagggaacggagtgtccccctcactttctttctctttatccagatgtttttctatgatttgatagtttgatttcctctgcagtttgcagtttcgtctgcgattattgtggtttgcacaatggacagccttttcaaatatagcgacaaaacagttgttttcacatacttctttctgtttggactaagtgcaataacactatcatttttgatctctacatttttttcacgagccaaaaccgccgttgccgttggaaccctttcttttttgggtggcttttttccatattattctgttgatgaccaagctgtttcaatgtaagtactctgctctgagctagtttgcgattcactactcttttcccctttcgagttgcagtttatagggtgcaatggggctctaacatttgtttctcaggatattaaaggttgtatcttctctgctttcacctacggcctttgctcttggttcggttaacattgctgattatgagcgtgctcatgtgggacttcgttggagcaacatgtggcgagtatgctccaaaactaaaacgttttctattataattaattaattattgttgcacctaattttttattggtgtctgtagccatcttctggagtcaacttttcagtctgccttttgatgatgctggtcgacacattgctgtacggtgcaatcggtctttacttggataaggtatatcgtatgatgcttgactcttttctattatagtgctgagttttgtgctgaaatttctgtcagaaaatgttatttagttattgaattatttttgttgattatgcttgatatttatatctagatttggcacgcatgccagaatatatttgtcttgaaagagtacagatactataaatgagtaatattggatcaaaggttactgtgtttcgagtctttcagaatagatacttgcttctagagtatagatactataaatgagtaatattggatcaaaggttactgtgtttcgagactttcagaatagatacttgcttctagtgtcttttacttttttctttcttgattctaggattccttctctctcatgtgttatgtacctcattttttgaacattgaacttttcttttcttgtatacacatatttttatataattgtgctattcaaagaaatgtggttttgttctcctttaaaatagagcttggtatatatgatggttaacccaattgatattagccgcaaactgaagttcataaggtaaattttaatttcatttatatttctgatatcaatttgtatctacttgtgtttgtttgatcaggtccttcccagagagaatggaattcgttacccatggaacttcattttcaagaagactttttggaagaagacaaatatgagcattgattacgcttccattcttgacgctagtataaatggaaaagcttcagggaatttccatggtaaagataatttaactccatctgtggaagcaattagcttggacatgaaacaacaagagcttgatggcaggtatatgcttaactatttgaatgccgtgctggtaaactctgaccaaagaatggttttcttcctcacatcttttatttacccctagatgcatccaaataaggaatctgcgcaagtatatgacactaaaaaagggaaatgttgtgctgttaactcattacaactcaacttgtatgaaaatcagattcttgctcttctaggtgagtgtattctcatttggcagtcaacagtattatgttaattatgtattaatttgttagtttggtacaaaagaagaaaatgctataagctacaagaaacttgaagaatgaagtttttttctccctttcccatttttaataaaacttatactttcctataagaataattgtatcttgatgcttttccaacaaaaaaaataataattgtatcttgatgtattacttttttccgatttagtgattttgaattatgggggtgattttgaattatttattatgaaggacacaatggggctggtaaaagtacaacaatttcgatgcttgttggtcttattccacctacttcaggggatgctttggtgtttgggaagaatataatatcagaaatggtaagctatgcttttcttgctctattttttttcgagtgatgtttctgtatagtctgtgattatgataatttctcattagttcctttccccccataatatgtttagttagtatgcatgtgtgcaatcttgcctcttcttcttcttcttcttcttctttttttctcttcaggggagaaatatccaaagtacttaccatattaaatgacatactttagtggcgtaacagcttctataagattgattctacagggcaggatatcttatatttgcttgcttctttgtggagtgttgacattgataagttggttgtattgagaatttttatactatgataggcttttaaaggtttaggattcaaaatatatgttgacagagtctattttgtcatatcttccctacttttttattctatttggttaaatgtattataattttttgttataataaacttaaaaatctgttgtgcaggacgagataaggaaggtattgggtgtgtgtcctcaaaatgatatccttttcccagaattaactgtaagttagaagtgtgattcatttgatagaacttgcttttgactataaggtgacctctcaatatagtttggatgattccgttcacaggtgagggaacatttagaaatatttgccaaattgaaaggtgttgaggaggattctacagaaagagttgttactgatatggttgatcaagtaagctactctcaaattattctgtacttactttaatataaaaaaaataaagaaataaaaagtaaaaagaacgtcctcctcctagtgtcgttgtccgtaccacttttacttttcgtcgtcgttacgttaacgttttaggtttttgggtttcggttaaactttaaagttta

SEQ ID NO: 272368 - DNA, 1676 bp, Cannabis indica
tttatctagggcacaaaacccaacacttctcgacaaggaaattcaagtctttaactctctccatcgacctgaacagaggcaatccaagatacatggaatctttattcatccttttcatccctaaaatgttcatgatctcatcagccttcttgttagggaaaccctgggtgaagtgaacggttgatttttgatagttgaccgcttgtcccgaccacacacagtaatcttcaaagcaatttaggtagcttttcgcttccttaactgatgcttttccaaacaatattatgtcatcggcgaacatgaaatgtgtaatggctggtccgcctcttttaaacttgaaaccagctatcttccctgcctcattttttgccatgataagttgagagagaacgtcagctgcaataatgaagagagctggagataacgggtctccttgccgcaggccacacatcggggaaatcactccttgcacagtatcgttaagaagaagccccattctcttgacttcaatacatttcttcacccaacttatatatcttttgtcaaactttaggcttccaaggacttccccaataaatttccagctcattttatcatacgctttctccatgtctaatttaatcatcatgtatccattttccccccgtttctttcccattgaatggactatctcctttgcaacaacagtattttctgctattagtcgtcccttaacgaaggctgtttgggctggggagatgatacagggtaagatgttccttaacctaactgctaagacttttgagatgcagttataggcgacattgcacagagcaattggcctatagtcattaactccgcttgggcactctttctttggtattagcacgatgttggtgttgtttatacactggggaagttcagtactgctgaagaagtggttgaccatatctaaaacatctcttttgactgttgcccaatgttgcatatagaaccccgtggacattccatcaggtccagaggctctttcttgtcccatagagcggatacacctttcaatttccaattctgttgggaaagctttcagatgctcattgtctagagtcgaaatactgcattcctccaggcagtttagtgacggaagatcagccgattttttgtctatgtatgtgttgctgaatcttgcaatgaacaaattatgttattaagatttctctcccaccctccatcttccaaacgaacctgttggatgtaatttcgtctccgttggatcacagtggtagccatgaagaatttagtgcagctatctccctattacagccacttgactcgtgatttttgtctccaaaatatctcttcccttgcgagggcttcgttcaaattatctctagcttttgttaggtcctccccatttacattgtcccgaccttcaagttgttggagtgatgatttcgcctcatttacttggtgtccgatttgtttaaaatggactttgttccacttcactaaaatgttcctttgtctttttgagcttccggtaaaagttaatcattggatgttgatgaagcttttccttccaagcattcttgacaacccagtggcatttaggatctcttccccacattagttcatacttgaattgtgatttactacaattgactccccccttcgtgtcgagaagaatcggtctatggtct

SEQ ID NO: 272369 - DNA, 2003 bp, Cannabis indica
cactgccctttctcttcggaatgcttacaacagatcaagaactggctgggatggaagacaccagcatcatccttatgggacttggtgcatgtaatagaaaaaaggtcatactctgctttccgaaagcaggtttttgctgctgcttgtgctgctcttttgtaccaaatatggaggaataggaatgctcggctttggcagcaagcccaagaagatccgaagacaattgtacagttgattaaacatacatgtaagattagaatacaaagtatatggcccaaaaaagtgtccataggtgatacaaattggtatagtgagttgtaatagttgtaagttttttttgtaatcaggttggggtaatttttatcagtccttgttttataaaaggatctgatcaagttgtaaatgttatttggagtaatgaaaatcactgctgatttcccaaaaaaaaaaaaaaattgtggttacataaaaaattccaaatgttatctctttccactgacacatggacatccatacaaaatgttttcttagtgaataggctatgcagaaaaaaattttaaacttttttcaagtacctaattataagggtgaaacaattggacaagctattggtcaatgcttgcaagaacggggcattgagaaagtgtttactgtcacagttgataatacaagttcaaatgatgtggctattaagcacatgaagaaaatgctacaaatttggaaaactagctttatgatgcagaatttttacatgttaatgttgtgctcatattctcaatttgattgtaacagaagaaatgaaagacgttcatgcttcaattattgcagtgtgtaacgcaacaattatgttagaagtttctctcctagacttttaagttttaataaatgtgtttctcaagtgaataaagaagtaaaggaaaatgtatgcttaattgttcatacagtatactgtatgaatcatactagatggaattctatatacttatcttatactagagcatgctttgaaatttgttgatgcttttaatcttatggaggatgatgatggtctttatatgagatattttctagaagatggtaataggagaaaaaatgggtattgggagaatatagtaatgtttacaaagttcctcaaaaatgttttatgatgctactttgaaatttagtgcttctttgtacaactaacacatattttcttgagatttataacatacatggcaagctactcaagtgaagttctagtgaagataattttactttgaaagatatggcaatgggtatggtatgaagtctaaatttgataattattgggaaaatttagagaatacaaattaaatattgtatgttgcatttgtgcttgatccaagatataaattgagttatgctacatttatttttgaagagtatttgatgatgaaatgtttactacaatgaaaatttggtgaaaaattctttgttgaagttgtatgaaaataatttgataattgaatcaaagtcacaagaaggggcaacaagtatttatacagagagtaaaaatgaagtggagaataatgatggtgatgatgatgcaactaaatttctgagaaagagtatgacagagagtattctcaagtaaatcttatactaagatcaatgaagttgataaatatttgatagatgattgtgaggatcgaaaaattaaagagctaaatgtactggcctagtggaaattaaatgcttacaagtatccagtactatcaaaagttgctcgagatatgttagttgttccaatttcaactgtagctttctgcatttagtacgggaggacgagtacgtgatagcttttgttctgccatcccactagatcttcatccagaaatagatgaacatgaaggatatatattattggaactatggtaagtatactaaaacactactcatttcatttttcttttttgtcaattcatcactttaatttgttagttcatttgttctgccatttactcatatctgtcttttttttt

SEQ ID NO: 272370 - DNA, 1037 bp, Cannabis indica
acaaaaaacaaaagaagtgcaaagcttgacttgtcggatcgccgcgctcagcagatttgtttcaaaattaacagataagtgtgtcccattcttcaacagcttacgaggaaacaagcagttcgagtggacggaggaatgtgaaaaagctttccaagagataaaagcacaactcgcaaaacctccgtactctcaaaacctctagacggagaagaacttggaatatacttagctgtcacggaacatgccgtaagcgccgtgctaatcagagaggagaacagcgtacaacacccaatctattacatcagtaaaagacttattgaggccgagggccggtatccattaatagaaaagctcgcatactgccttattctagcaacaagaaagttaaggccttatttccaagctcatcttgttcgggtatacaccgaccagccattacgccaaatattgcaaaagccagatgcttctggacggctactcaagtgggcggtagagttgggccagtatgaaatcactttccaaccccaaacagtaatcaaaggccaagctttagcatactttgtggtagaatgcacgggcaagaaagaaagcataccagaaagcaaccccgagccggtacaaacacctcagccaagtaacagtgaagataagctgacctggaaactacatgtagatgggtcagctacagatcagttatctggtgcaggaattgcccttgtcacacttgggggcaacacctgcacgctgtagtcaagtttggattcaaaacatctaacaacgaagccgagtatgaagctctaattgctgagctaaagctagcccgggagatgaaagccgaacacattgaaatctgtagtgattcacagctggtggtgaatcatgtatccggagaatacgaagctcggggagaaaagataagagcgtatctgagcaaaatacatactatatccaaatattaaaagtttgtatttagattaaatcattatttaattcttccctataaaactattattcaaatacatactatatacaaatac

SEQ ID NO: 272371 - DNA, 624 bp, Cannabis indica
ttttatagaaataacacgaaaattatataaaagtggaaaataatatccaaataatatcaaaacaacatcaaaaattaacaataaattaataagagtacaatataaaaaatcctattttgtaaataaaatcgtaaatatatttaaaattctgttcaattgtatttttgtaatttttttgttatttttgtgtatgtttgatataatatcttaaaataatagtatacaatctaatcagaatatcttcttcttgaagatacaaccagaattagaattagaattagaaaatttaccaaattaaccatttgaaatattaaaatttgcaaaataatttcacttaatttattatatgtaaccatgatagtcgcacagtgtaaattcatagtcattttgcgaccataatagtcgtttatggttgtaactcatggtcgtttttgcgactataagaggttattttgctaataaaaatttttgtaaagttattttgttaataaaattttttgtaaagttatcttgctaataaaaaatttcataaaaactatttttacaaaacattcatagaggattagggcagggtatccatggttgcaagaaagaaagaagcagaaatagagagagagagagaga

SEQ ID NO: 272372 - DNA, 516 bp, Cannabis indica
tacactaattttctcttagttttctcactctttttccttctttaatgagaatgattaaactaagcttttgtttaagtagctcgatacatgtttatttatatagattaattggaattattaccatagatttgtaacaattataccaaactatatactagaaagaacaatatatgtaacaaaaatattacaaaattatatctttttttgtaacttcattgattctttcctaaaagtagctctttcatttaattgatatgtgtgtgattatgtgaataaataagtgcttttactttcttaatttcaaactaaagaagaatatgtaaatactttataattgatgtatcatagtaaatatatatatattattattttttcacatgaattcacggattaatttggtttgaaattatagtttatatttcataattattcttttctttttaaagtttataattaagattattccctaatattaatatcaaatatgtatatatatatataaatttagtaatttgg

SEQ ID NO: 272373 - DNA, 1031 bp, Cannabis indica
acttgttgtgtctattatggggataggattgaccacatctgcaatgttcataggaattctagttgtggttggaatctgagcatccggatctacagtctaagggtcttgcagaagacttgaagatgcagacggtgcgacctggcttcttctcgtgttaaccatggcattagatcagatatgatatcaacaattgtcaatgaaagcaccaaactgttgacctcaaaaattgatcaaccaacaacaagattatataaatctgatgtttgccacattctacacaattagaatgagaaagtaaagcacacagagaattgttatagaggtttggcccctttagatagcgggtaatgacctactccccttttagttgtattgatgccaaaggttaatactatccagatcactataggtgggatctgatataacaccttatgaatacaaagtagaaattgaggttggcaattctaaagtgatgagaaagcttatgtgggtgtgtgagagagagcgaggaagagagttatcagacctagaatttgtcacttgaaggctagtacaggcttagagagttaggttttctaggttagagttcacgcctttatataggaagcctaaaccctaatttacaacttaaaacactaaatatttgtatattgaattagttaattacaaaataccagaatacccttgaacatatatattattcagctattctattgggcttttagggcccaatttgcatcccatttatgcagtccacgtatagaattgcaaaagaaatcctgcatgccttctctttgccggccagacacctttagggagcaggctggccggccatggtgttgtccagaggctggtcggccaggggtggctggctagcttctgtgaggaagctgctctgtcatttaatacccttttgagtgtcgaggtccccatttgctgagtactgatttggccttcttgttggtgaattgtactgccacatggcactaattttgtccatataagcactgccacgtcaggtgggcaaaaat

SEQ ID NO: 272374 - DNA, 703 bp, Cannabis indica
gttacctgtgatgctgaatcccttgtaaactttatgaatttttttggcgtattcaattcgttgggagatgattcagtttttggcttttggataaaaattttctgttaattcgttattactctttgcattgttgttaaagagtatatgatgtgattttctccaaaaaaaattattatcccaaattataattgcttgttaatatctccttcccaccataataagctattgcatggctttcctgaccatgagcttttcttgtagacgcctaatccataaacattatctaccactggtgctgtcatcactgagcaggataaaagatgctgacagtcgtctacaatcgaaagctgagtaagtgttcttgtaaattataatatgaagacttaagattctctaaagcttattaccgttaagatgattgagtgacaatactaccatcatccaatcaaatttgacatgtactgtgtatattggcatgttgttattcatctctggcagctaaattttgttaagtcataagaagttctcatgggatataatatctgtcaacaatattctcataataaacgtttcttgggaaaatggagcaagtgagcagtataacttggtgatatctttgatcctttgatagctaatcatttattttctccttgattttcaattttattgttttgcttattgatggttttttgtgttccattat

SEQ ID NO: 272375 - DNA, 2224 bp, Cannabis indica
acaataaaattaacgttcaatgacatgtgttccaaggatgatataatcaatattagcaaacctcgatcaaatctttgagaattggttgtttcaactttcattttcattttcttggaacttcaacaatgcatgacgcatctcaagttttctttctttcatttcctccaaaaccagccttgcctcatccttccttttcaacttaagcaaacgaaaagccaaacacccgaaactctcattatctagccacgcgtccttcccgcagtaggttctaacaaacttaatagcctggtcgtaatagcctaagctcaacaacgcgtcaatcacatacaagcgagttgataatagcataggaactccatcatcctccatcctcctaagaatcaccaaagccccttccaccttccctgccctacatgcgcctaacactagggcatcataagtccgtccatttgccttcatcttttgttcctccatccttgttagcacaaccgctgaagcactcaaatctccattggcacagtgtgtcatcaagatgtaattataaatcattgaatccggtacaactctaagacatctcatcaaatccaccacacgccatgcctcctcaattttgttactccttgcaagcactttgactataggataaaaactacacgcattcaagttgcaatctacacgggccatggaatcaatcacacgcaaagactcctcgatctttcccaacttgcataaacgtgatatgagtgcattaaaggcactgtttcgagtttggctcttgtcgagattaattaaggtcaaaattagattatcgagcataaggagggaggcctcattgtcagtgatgaaattgaaggtgttggtggtgttgtagcagacatctttcatgcgcttattaaggagttgtcgaactgtattaaaatccccagagctaccagcatcattaactagatcatcataataggccgcagttggcttttcaagaaattggcaattgaaaactgacagtgtggagaagcaattggtaattcttaaggcacgttgaaaatgaatggccttaattgaggcttcgtggaccaaagagttgatcattgggaaagagatttaaagattaatgtggcttaagctgcaaaaaagatgagccaaatttgatcgatgatatactttctaattacataatatcgatgatttcttatctaagtaacccaacacatgtagaagtgagagagaaattaagaaatggaaatgaaatcaaatgcaaaaaacaataaatagataaataaacaagaatgaaaacaaatgtctgaacttaatttaattctaaaaaataaaataccctaaaccgtcaagatctaattgcctagccagaagccagctgaatatccaacaaaatagcgagtaaattaaacctcaaaacagtcattcttcttcctcttcttcagttaaaatctattgaaactaaggtacccgggaacagacataggcacagaaatatcctatatagaaaagtcgtaatatttgaacaaaatcacccctatttttaaagaattattgaatcaagaaagtctccatggatagtctcctctattgataagctaaggtctgtaatagcgctagctttattggaatataaaagctaaatagcttgttgattgctacttaaagaataaaattaaataaaaatacctggaagaggaagaaaacccagatagcttgatggaaatgtaattagctacagcgatgaatgatgatgaaggttgtagattgagctcttgttgttccaataggcaattgcagtaaaggtctgcacttcttctatacactaatgctgtttttttagtttttccatttttacacaccgggccctatcctaaacatgctacccattttttttcttttctttttttaaagggaaaatctaaacttcagctactccaagatacttttccaaattcaaaatttgagcaaaaaccaaaccatactcaaacgaacattttttttttcttttaatcttttggtatatttaatatatgagtaatttgcagtataaatacttaagtttaactcctaattgcagataaaaatctaagtttaatttttaatggtaataatacttaagttatattttggtaactttcgtagttatttaaaataaatttaaataatacaataagaaatagacacgtggataatgacttgacacttaacgactaggtaccaacaaaag

SEQ ID NO: 272376 - DNA, 718 bp, Cannabis indica
ttaactcatggctcccttggtcaagtaaataatttgtaacaggtatatttatattcttctttcatctgtgtatgacctagcaacattattgagttgcaactactacaaaaatgaagaataatgtaaaaaagttaataaaactaaagaaacaaataaacagatcaaaaataataatgataacaacactaaaacaaccataaaataatacaaaaataatggacacataccttcttcaatagacgattaaatatgatatggttaatacaggtaaatggcggcataaatacctaatgttttaacttttatacacttaaatacattatctttattattggaggtaaaaatacccaatgttacagttctcttacactgttactactaattccgttaaatcataattattgaaacatgtaaggcttagatgcattccatttatttattttttattttaaaacttaatatttttaatattataaattaaatttgaaaaagttatcagtattgataacaaaagctaattaataaatttgaatattaataataaatttaaataatataaattatggaaagaaaaaattatgttctatattcatacccaacattttttctcttgaaaaacccaaaagaattttgaaggactattccacaaagacgaagcatcacccttcgggtgaaacctgctccagttgaagtccgacgaagcttccctccagctgct

SEQ ID NO: 272377 - DNA, 1848 bp, Cannabis indica
cttcaaaatccatcacacatgcacgcaacatatcttcaagtatctaaaatgtcctctcgatctgccaatcagcctgaggatggaaagttggactaaatttcagcttggtacccatggcttgctagagactttgccaaaattttaaggaaaactccgaaccccaaccaaatatgatagaccccagaaccccatataacctcagtattaatttcgcgtataataatccactgtaaaggttgttttcactgttagaaaatgtgcggacttagtaaaccgatctaccacaacccaaatagaatcaaacatccttgtggttctaggtaacccaactataaaatccttggtgacatcttcccatttccactcaggaagagtcaaaggctgcaacaaccctgtaggtctctagtgttcagccttaatctgctaacaggtcaagcactgggatacaaattctacccacatccttcttcatcccgcaccatcagtagaagggttttaaatcatgatatattttggtagtgccaggatgcagtgaataagaagtggtatgagcttcctcaagaatctcatttttaagttccacactgcttggaacacaaactctggttctatacaacaccatcctattacctaacactgtaaaaattttagcttgaccagctaaaacctcctctcggatcttcaccaattctggatcaattaattgagctaccttaattctatctaacagattagattgcaatgtcaaattattaagtttgcctacaacaaactcaatacatgatctgaccatatcatctgctagctgaggtgaaatcttaatcatattagttacttccccaagaccttttttgctcaaggcatctgccaccacattggtcttttctgggatggtaaaaaaatttatagtcgtagtccttaaccaatttcaaccaatgcctctgtctcatattcaaatctttctagataaataaatatttgaggctcttatgatcagtataaatctcacacttctctctgtagagataatgccaccaaatcttcaaagcaaaaactaccgcgacaagttctatatcgtgagttggcaattattgttcgtactcctttaacggacgagaggcataagcgatgactcaatcagcttgcatgaaaacacaccccagaccctatctggatgcattatagtaaaccacaaacttatctttatttgatggtaaggccaataccagagctgtaatcaacctctattttaattcctagaagcttgcttcacacttgtctgtactacagaaaccactgattctttttagggagctcggttaaacggtgtggaaaatcttagaaaatctctcaacaaaccaacaataatagccagctaaacccataaaacttctgacttcagtactgtcttcggtctcggccaatccctgacagattcaatcttccctggatcgaccttgatcccatcctttaccgacaatgtgtcctaagaaaagacacctaagatagccaaaattcatactttttgatagccaaaattcatactttttaaacttggtatacaatttatgttctcataatcgctgcaaaaccatccggtggtgttgctcatgctctacttctgattgagagtatacaaggatgtcagcaataaatactataacacatatattgaggaaatccttcaatactctatttatcaggtccataaaagttgttagggcatttattagtccaaaagacataaccagaaatttatagtgcccacctagtacagaaagcagtctttggaatgtcttcctctcgaattctcaactgatgatagcctgatcgaaaattaatcttaga

SEQ ID NO: 272378 - DNA, 1198 bp, Cannabis indica
gtgataaaaaattttcaactctattttcactttttagtatcataaattatattaatttttgtagcaaaataactataatataactacaatataaaacatgatatataaaaaaaaaaaaattataataacttcaaatgctaaagaaattttttctaaccgttaaaataattgaaaataacatccctattacagttgctctcatatctatttaaatatataattattagtatttttttccatagattgtggcatctctcaaattaacatctaaatttgaaattatgatattattatattataattagacaatctaccaaattcaaatcttgaaataaaatcagatgtgaaaatgacccttttatcaattatttaattttctactaactatattaattattgtaattattaatagtactattattatagttataattattaattatttaattttcaagaattgaaaaatagaatggagtttggttcatttgacagtgagagatatcctttgaaaaacccaaaaaaaaaaaaaaaaattaaaatacaaacaaaaacacgtttacagttggagagcatgaaataatggataggttggtgaagcaaatgatggttttgtttctttttaccccccaaaacaagcaaacaccaaacaaagtcttaattatataaactaaatcctcaaaaagcctcttaggtgaaaggaaaatagtacacaaaatgagaaaatatgagttagagaatagtgatagttagctagggcaccaagcattactattaagtattattattggcttaattttaaataaataattaataatattttataacaagtattgttatgagacaataacatacctagcacttctataaaatgtcgtcttataattagttagcggttttataatctttattaaattaaaataaataggactcgatattaaattacaccaataaaaatataacaccttaaataataatttttaacatttttcattttccccaaccattcctatcctacctattaaaactcattataatacccttaaaaactaccatattgtccctttaagtctctccaaacattcttgctaggtaagatctcaatttttctagtcctttattaggaccctccatatgggatattagtagtaccttcttcatatcccaacaaaatgaaaataaaacataaaaaataaaaaaa

SEQ ID NO: 272379 - DNA, 561 bp, Cannabis indica
tagttgaaacactataaaaggaacatgattctctcatctcatcctcttgcttgtcaacttaactaatgtcaattaaatattgccgtcaacctagatgagagagttccttccttagtgatttcagcctccttaattgttcttccatattcgaacctatagtgaatgagttccatgcctacacatagcaagtcaagtactcaatcatagtgagtaagacagtttaaccaaacttgaaagagagaaagagatccaggttcagattttgataatgctctgcgatagaaaggaatcaagggctagagatcttgaacagaaggagtcattatattccgctgcaatcaatgtaaggttttcttaaatccctatgtgtttattttcattgttttagagaattcatatttaggatgttaattcaacatatttgttagtaaatctaaatcctggtaaaatattcctaacaatagatacgctatgagctatccatttgttataatcctaataatcaatgatcctctatagatgatttacattgagtaaagacaaaattatcgttacaccttt

SEQ ID NO: 272380 - DNA, 656 bp, Cannabis indica
tgttggaatatttggtaacggaacagagtcatgccacactctgcctcgctcatctgcaagagcaggtttgctcgttaggattaacacccttctccaaggctactcaggtattagatttgagatcttggaagccatggccaagctcatcaacaacaacgttaccccatgcttgccattgcgtggaacaatcactgcatccggtgaccttgtgcctctgtcttacattgccggtttgctcacgggaaggcctaactccaaggccgtcggacccaatggtgaatccctcactgcaaaggaagccttcaaagttgctggaattgattctgacttcttcgagttgcagccaaaagaaggccttgctcttgttaatggcactgctgttggttcagctgtagcttctactgttctttttgagaccaacattcttgttgtgttggccgaagttttgtcggcaatttttgcagaagtgatgaatggtaagcctgagttcactgatcacttgactcacaagttgaagcaccaccctggtcagattgaggctgctgccattatggaacatattttggatggaagctcttatattaaagatgctcagaaacttcacgagatggatcctctccagaaaccaaaacaggatcgctatgcacttaggactt

SEQ ID NO: 272381 - DNA, 526 bp, Cannabis indica
aattcttctgaatgccgaaacaaatagagagtacaccattacatctcttttaagagaatggtacagtatagaaacactcaaaattatattaaatatacaaataaaatgtaaagagaggttagaccatctccaatgattgcactattttgatgtatattttttactaatttagtataaaatctagtaacaactcgaataatttaacataaaatatcacatcaaatatagcttaattaaaatatttatctcactttttttttattatttctattaatagccaataataattaatttatgatataattatcatattgttaataattaatttatgacttctttaaataaattaaaaaatattaaaatgaaaataaaagttatgtaataatttggtgtagattcaaaatctaataccattaataatgtaaaatttagtgcacactaattcggtgtctccttagagtgaaatagtgtgaaaattctataccaatatagtgaaatggtgcaccattagaaatgctcttaatga

SEQ ID NO: 272382 - DNA, 855 bp, Cannabis indica
ttttgtactgtgaacagtaacaagggacaaacgacgcctccttcctcatcgggaacggacagagcaacaacacaacacctcctgtaatccccaatatcacttccacaacaacaccatatcaagataatgtggcaatgcttgaaaacaacacagcaacaacagaatcatacacactcgaacaccaattagaagaaggaggagagtcagaaataagaaaatttgagaacgtcaaattcgacataattgactatacaaatctggttgttgaagaaatagtagaaaaacttgaaaacaacagtaaaatactagatccagaaatcgatatcaacaacgcgaaactaataatagacaaacaccacccagaagttgaaaaaggtcatgcatacaaagacaaggaaacatttgaagaatgtccttagctactacgcaatcaaaaaacaacttccaatacagtttttgaaaacatatctaattaggttttagtaagaatttttttaatatcttcaacaatagagtaataaccagaagttataactctagaacggtagtattccgatcgggtgtacttggattcccaatcctatgaaaaacataagaaaacaaaactaaaacaacaccgaaaaaaataaagaacataaaaaacaagcataaaaaaaacattagaactgaaataatgaaatcacacacctcaacaatctttttcccaattatgtcctcgaacagatcagttgattgaacaatcttcactggaacaaaaccaaaacaacaacaagacacaaagtcaaacaaacagaaaaccataaaataggaggactaacaaaaaaaaaaacatgcaaaaaaaaaaaagaaaaaata

SEQ ID NO: 272383 - DNA, 524 bp, Cannabis indica
aattaaaataaaaataaaacaaatttcattaatatttgaaaggatatttgaacgatataggtatactgatattgagtattatttcgcctcttgattgtaacaattttactcgattttgatcgcaatcattttctcgacaaaaggaaaaatctacgaagaagaaaaaggaaaaaaagttttattaatgaatcggcaagtcgtatagcaatcgccgcagaagaattgccaaaaagactaccgatttgagcatcgattccacgagagaagcttcaaattggcgagttagcgggaggtacgatggctgagtgtgcggcagtttgttgctgttttccatgtgcgttgatgagacattggtacaatatataatgttaaggggtatggcacattggtacaatatattggtaatttggttacaaaatagattttcagccgtaatggtaagagtcgtatctcaaaactattcttttctagggtttttgttcttgcgaatgagggttggtgaccgcttcaaatcaccacatgtt

SEQ ID NO: 272384 - DNA, 1700 bp, Cannabis indica
cagtttcaagatctacctccaccggtaagggcttaccagcttctctcctttttttttcgaggttagcgtttgctgcaaccccacgaccctttctgaccggaggtggaactatatttattcgagagaaaaataattttattagtaaatcatacattcactatttatattcagaacaatgttagatttgaaaaaatatgaaaacctgattcgcaggacgacggtaccctagaaggatcagggggatccctgccatcaccatccccaccgtggtatgtcgctaacgtagctgacattttactttactttgaagacggaaaaaaatgtaagaattcacaaaatgtgaaacacataattgaaagttcacacaaatgttaatgcgaaagaaattaaaaagtcatttaattgtaaaaagttttagtaacaaatgtttacaaaataaaagttacactgacgaatcactatcatttccatcattcactaagtttacattttcatcctccacatgttcaactagtaaatcatctacttcttcagcaacataattttcatcaagttcattattctctatctcagaatccactaactgatcggacgattcaacaattactggaggttcattcgattgcataatcaactctccaagatcaaccgtcaacacaaaattggcagagttagaatcactaacaacatcaacatcagtctcatcttcattgtcattaatgtcccaaatttgtcgatggctaatatcttcaacaaccttccaatcgcgacctctgagtggatcttcaagatagaaaacttgcttcgcctggttagcaaggatgtacggttcatcttgataccaatatccacgagtatttatactggttatattattttcagtgattgtcttctttcttaatggattagtgttataccatttacattcaaacaatgtcactgtatatgcaccagtataagatatagtgattacatcttcaagtgtgccgtagtaattaaacccttcagttccagcaacagtaacaccactattttgtgtcttccgcttttggtctcgctttgatgcaataaaccgaacaccattcactacacaaccttcgtaaaatgttgctaagtaatcggacccggaagcgagagcgagtaactcatcaccattttgtaaagttccaagcttgtgcaactcatatatctaaatacataaaatgtattaatatgagaggaatataaatggttgaattaaaactttacaattttgtcattataccttcttatgaaaccacggacggaaagtttgcctatgcaagacatcgtgattaccattaggatattcatgcctgatcttgtccaaatgttcactgtgaagtatgataatgtcaagatacgatagagggagatagaaaataaaaactaaaaatttaataaaataatttataaaaatgtaacaaacttactctaagtaagcttggatttcaggagaattttgaagaatgtaccactcagctttttcacgaccgatatgatcaagaggcttgataattccgctagttaaaggacgagattgagaattaaaaactgagagatagcgacacacagaaggcgcatcttcatttcgatcaagccgattaaatcttgtttcacaccctttaaagtacattgaacaaaaggttactgcctcatcagcaacataaccttctgcaatt

SEQ ID NO: 272385 - DNA, 1235 bp, Cannabis indica
tattacataaactagaaagaaagaaaaacacaacaaaaaaaaaatccatattcatagcttaaaaattcattcttaaagtgaagtttttttgaacatgttttgtatctaattcacttctcttcagtaaattagtataacaaactctccaatcccatcaaattctcaaattcccagtaaccaatcaacctaaataaaatttatataaaaaatcagaaaaaattcatattcatatcttaaaaattcattctttcagtgaagtttttttgaacaagttcagtacccagttcacttttcttcactaaattattataaaaaagtctccaatgggcatattcacaattaaatctcaaatcccatcaaccaatcaacaaacaaaaaattttaaaatatataaaagaagaaaaaattcatattcatatcttaaaaattcaatctttaggttttttgaacatgttctgcattttcttcagtaaattattttgacaaactcaccaatcccatcaaattctcaattagttctcaaaatcccagcaaccaatcaaccaaaataaaatttaaaaaaaatcagaaaaaaattgataggaagaattaccagcaaagtcagtgactttatcaattttgagaagagcagtgactatgaagaagagcaactgatatcccaccttttgaaaacacaaaaccccaaaaaaacaaaattaataataaataaataatcaaaagaaaagaatttaaagaaaaaaaaaaaaagaaaaaaagaagaagaagaagagttaactgtaacaatggctgtaaggcctaagaaatgggagtcaattacagtgcccattatgaaagaaagaaacttttaggatttttggtatagaatggaatagaaaattaactgaatttttttgtgtgtgattgggttttgaaacttctttggctatatatatgggaaatagagaattgtgtggttgatatttgaacaccattttatatatatatatatgctttgcttcttctttcatcaaattttgtattgttgaagagaaccacttgcttattattattgttcaaactttgcaaatattatttagtcaaaagaaaagaaaaaaagaaaagcttttaaaagggataaactcctttgaaatgtatacactaatgtaccatatttgacattaaaaaaaaatagtatgattttcttctagatattttataaaagtaggagaaatacgaaataatttataatataaaaa

SEQ ID NO: 272386 - DNA, 566 bp, Cannabis indica
cacaacgaagctcaaaatcaaatcttttttgtcaaaaaatcacacattatacatcgtacgactatcatgcagatcaaaataccaaaaagattacaatctaacgtgggaatcaaaaaacattcaaagcgaagaaaagcttcatgtaatcatggaaaaatcaagtaaatcaagtaaataacgagaaaactcttgggtgaagagagtgggaagcttagatggttgaaatagtgcaaaaatcctgggagttaaagcaatgtggggcgtcagcctctagagagaaggaggagcttttaaaagttgatttttctagagaggaaatgaaaaatggaaagtgaagaatggtttccctccataagcttatatagcttctgtgggaccacctttttacttatcatgcaagtgttcaactaatgagcaatgctgttaacttattgcaacaagtgagatcagacagtcaagagtagttatttcaaagactaaatgtgtagaaagatttaaccagttaaggctacatcaatcccatccaagctagaaagatcctatccgcaaagacgtctgcacatgga

SEQ ID NO: 272387 - DNA, 1214 bp, Cannabis indica
ttactattgtcgaaggttttaaactatcgataaatttttccccaactgttttaaattgtcgcctattctacccaattttgcgacgatcgaataggtgaaagtaatagataccaacaataatacattagctaactgttttaaaaaaaagggaaaacctaatttttagtaatgttaattagtttcctcgcaaatattattatcaataacgcctatgagagttgctttttttttttggaaaacaaagagtagagagaataatctttacttttgctcaataagtaattgatgaaaataatgaagataaaatagagaaaataattttgatttgatacatttgtctcacatgcatatctcttctcctctcctctccttgtattgaacatccagaattgtactatccatattataaactcaatcccaacctgaatcctggatccaacctaggctttggatggggttcagagttcgggattcaagatcagggtcgaattcgtggtttgggtcgtgtttggggccggggtctgggtctgggtccagaattcaagttcagtgctgagttcaggttcaagatggggtctggggttcgcggccaaagctagggtcctaggtctagggttggggctggggttcgggtccaagttcgggtctagggtcggggtcagaactggggtcgggtctaggacggggtacaagatcaagggttcaggtttggggtgtgggtctagggtctggatccagggtcggggtcggaactggggttgggtctagggcagggtacaagatcagggtccgggtttggggttcgggatcggctctgggtttgggatttggatttaggtctgagtccagtgttcagggctaaggttaggtttgggactggggtttgggtttggttataagttatagcagccggagtttgggaccgggttcaaggtctgggtttggggtccggagtgaatccccaaccacaaactctttctaaatattataatacaagctaatacaaataatttattatgtatgaaataatacaattcacattatattaaaatttaaagttataataattaatacattacaaaattttataaaaaatataatattctttattattcaatacaatataatttatatactatccaaaagagcccataacattgattgtagtagttgttgcagtacattggtgttcatccgatccaatccgcactttt

SEQ ID NO: 272388 - DNA, 508 bp, Cannabis indica
acttgcatttggatttttttttttaattgctaactaacaatataaacacaacacacaaacaacattaatacatgcttgaataactaaataacaacaaacaaataaaacgataacaactcccatcaaaatatagtgtcaaacttaaaataaaaatttaaaagaacaaaaaaaaatatttcttaaatatattggcacaaatcaaattaatttaaaatattatcttttggatacataaataaataatgtgggattaaaattgaacaacacacaaacaatcttaatgtacatgcttgaacaactatatgacaataaacaaacaacatgataacaactcctctttaatatgtaactttagacatcatcttccattagaaagtttccactaacaattatttcacccactcttttgcttcatataatctcctctccataatcaaacataagatgaagtctctatagtcaagagtccttggagctaccccaagctttctctctttttttttaaaaa

SEQ ID NO: 272389 - DNA, 1707 bp, Cannabis indica
tacagtgtgattttttaattacagtgctatctttgctagtcaaagaacttactcgaaaatcgtgtaaaataagaacttttacattaaataataaactttagaactttataaaatcatttacaagtaccgagatcccgtttttaaactttcatgcaaaatacacaaaatacataaccaggtcgcacaacaactacaaaataataacccgagatgtcccgagaccgaacactccaggtcgcaccgccatgacatgtacaacctcatcttagcttaggctcactcctattcagcttttgcctttcctttacctacacatgatatcatgttatttcgacttgtatctaggcgctcatacacctatttacaaggcttcacagatgagtaagaacattctaagtaagatacgtctacgtaccaatgtaccacatgcacttagtactaccatcgtactagtgtagttagggtatgaatcacaccttaagtactgttaagtgttgtaccacatacaccttgtaccttcccgtactagtgctaataacaccctaatgtactcttcagacatcatacactttatcaatgcactctataccgctaccgtacaagtgttggtagcgtataaatcacaaaaaagcatgcatatacattaacacatacatacattcgcatacccatattacacattatatatagttcttacttcgtttccatattcaagtgagttggccgacctgcacggaaagtctcgtgctggatggatgccctaatcacatattaaaactaggtaaatcacatgttcgaaaccctaatctaggaaactcgagtctacaactcaaggctctgttatactctttagggattacactatcccaggaaataggaaaacactcaactaaggcattgaaatggacgagaattgagaaaactggtttttcaaagaccctaccaaaatcggttaatcggttttacaggtactggtaaaatggttaaccagtttctaccagtcctcccaaagaaaacttccaatttgctcaaaatttgtccaattgcctccaaactttcgagagtacctaaataggatatacacaatataatccaactagaaacacccaaaaaaactcatcgaaaccaaacatgcctttgaagacctaaacttgactttcaaagctcaagcttgctaaattttattaccttacaccaaaactagtatccagagcttaaaattaaaataaataaagctcataattcgaatcaaacacaaaccaaaccctaacaacccctaattttcaaaattacacactcaaactaactgaaagcttaaaaatacacataatcatgggttctagggtttaccttagcttgatcctccttgaattctttgttgaaaatacaaaattcaaaaaagaaatccctggtttctagttggttcgaagagagagataaggaaagaagagagttcttcacgtttggtttgctttctaattttttttccttaaatgaaattaaggttaatttaattaaccttgactcaatatagagactaggtgtcaacacctaaggcagccaccacttacccccttgaaaaattactaaaatgcccccataacctataacttaggcatttttaagacaaggggtaaaatgatcaaaaaccacaatcctgcttaacctcgttattttatttttttcaaatatatatcccactaagaa

SEQ ID NO: 272390 - DNA, 559 bp, Cannabis indica
ttttttctttcatttaaaaatgaaataatcattctactaaaatgatagaaaggtcattccgatggaatggtattccaatgatattttttgaataagaaatgaaaagaaaattgtttcctttccattctatttcattgcattacctttaaccaaacgcgacctaagtgttggaaatgattaatatttaaaaagtagactatatttaaaaacacaaactcttgattattaaaatttaatttaatttgatattctcattcacgtcaagtctaaacctcataccaaacaccatagtattactcactaaaatagaataactctcgaattgttatgaaagtattttagaatataattaaatatttcatctcatatattttaatttaataattatataaaaataatatgtggacataaacaaaaatcacttcctattccctatcatcaaaaaataaatcactccctatccccacctacaaaccacttattatttttcatcttatttttaagtgttaaatactaaaataataatatggagtctttttgggagtggtttagccacatt

SEQ ID NO: 272391 - DNA, 1637 bp, Cannabis indica
tggtgggggaagttctccctttcttttctcacttatttaatcaacttctctctttcctaattttaataatacaagtaaacaaatgtaagggaatgattaccttactattgattcccattacttattagtaaacatgcaggtcgtacatctcattagtttcctctaattctatttgactgcaccaacttttgctacatattagttttaaggtagaaaagtatttgtatgctcattatgtaacagtaaaggctgtacatttcattagtcttctgtaattctgtttgaccacaccaacttttgctgcatgttcgtttaaaggttgaaactatttgctatatatatgctcactgattatgtaatattaaaggtgtttataaaaattttaaattatatatatgaaaattaattaaaaaataaaactatatcaaataattttttaatataaaattatatcaagtaatttaaaatatatatttttttataatatattaaaaaaattattttaaaaaataaataaatagatacataaatatttaaaattgattatatttgataaatagaaaatttctttgactttgacgtacatgcgaagagcctactccaaatcctagtatgatttgattttgatgtgagtttccttatataatcgactagtcgtgtcatatttttaatacgtaatgtaaattaggtgctataggttttgagttcttcatattggtggtttaaggtttttgagttttggcctattattttcgtctaaattggttgtgtgtgttggggttcgatcagctgggttatgatcgagtcttagtaggggtgtctcatccaattggttgtgtggtggtcgactgagttgtgattggggcggatgaggaggagaaaacttttgatataatgtggtgtttagtgggggaggttgcttacatgaagggttttaaactttaacgtctttcagaatgtgatggtgtcattgtggcagttagggcaatgtatgtttatcaagaaattaggccataatttattcatctttcaattttatcattaagcgaatattgctagtgctattgaggggtgtccctagacatttgatcataaacatcttattctgtaacgtctcaaagagggagagaagtcaagttaaattggttggatttatagattcaagtgcatgatttacaactgagatcacgatctgatagggtcttgaaagtcgcggcaaactattttggttcctatgttgcatttaatccaaagaattttaatggggtgtggagagacttttttcaggttagagtgtccattgatgtataaacctctgaaacgaataatgaggttgaagaaggagagtgctgaaattttttgggcaaattttaaatatgaaagggtccttactttttattttatttgcgacatcatgggtcatgtggaaaagaagtgccctcgtgtattgtaacgcccgtacttttataaaaatattaattttgtttacaagtgttaaacgcggaaaatcataatgtcgcatttttatttaatacttgaaaatattcacaactggccagttttcgtacaaaagacataataaataataactaaaataattgcgacataagtttaatagcgtaaataaataaacagag

SEQ ID NO: 272392 - DNA, 784 bp, Cannabis indica
ttttttaattttttttaataattaaaattagtttagatattagttagctttaaattttgaaaatttgatttctcacaaaaatagccttatggtttattttaaatttgtagattattttattcattttaattataagagcagatattatattttttattaaatttgaatgatcttcttttggtattaaaatattattttttaaaaataatcttgttaaaattttaaaatttcctaaccatgtcatatttttcaaatttattatttttgaaatatattttattaattaaaattatatgattaggaatatgttagttttaacattttatcttattagaaattttttattaaaattatatttttgcaaaaataacatgaaatttgaaaaattggttagtttatgtttgaatagaaattttagggtttcaaaccataaatttttcaaacttattttattttattatttttaataaaattagaaatattctaaccataaaatatttttttttcaaatagtttattttgtcatatttaaatttattaaattataagagtaagaatataatattaggaatatataattttaaaaattcgagatattatattatattatcttattagaaatttaaataatttaattttttgaataaacttgaaatttcaaaaattggttagatatttgaatttaagttagaatttagggaatttgggagtttgttaagtttttgaattttttcaaatattctctaacaacctaaatttaaattctagttaagatatattttaa

SEQ ID NO: 272393 - DNA, 809 bp, Cannabis indica
tctaagaccctggtaaaataattccaacaactggcctcagagccatagaatttaccaagtaaatttctagacttattaatttctcctttcaccactatagatttggaattatactctcaattaaatagaacactctatatgttccatgatatagatacgctatgagttatccatttgttataatcttaataatcaataatcctctatacatgatttacattgagtagggacaaatttactgttacacccttcaatgtattttatccttaaaatacttagctacctacaaatgatattttagtgaactaatataatcactaaaatgagtgctctatcatttatctctattaagccaagctctaaagaaatcattgtttcagttctaatgtccggatagaagctatagatttcgtatctatgattagctctcccactcaattgaattaccatgttcttaatctctatgtcacaagaagatccattggtcgaatttaacgaacagattgaagaatacaaataatacaattgaactagaactagccatcttaggattgagatcatttgatctaagataaactaattgatattgaattgaataaatattacaataagtttattatatctaatccaagttcaatatcagtcccttccgatgtatactccatacatccaacctaagctttactttaacaaatgccctggaaaggatatagtacttatccaaggtgcaagtaaactacattgtagattatcctataagttaaaccctgtatactgataaatcattggaatacatttaatcacacaat

SEQ ID NO: 272394 - DNA, 1290 bp, Cannabis indica
acagttaattacaaagttgattggaattgtttgcaataatacatccctaaaatcatgggatttgattacatatcacgtagtgtaaatacagtttaggattggaaaatcatatagctatgattttcccacttttactggtcaaaatagtcgtgtattaaacaagactttagttgttgtatctggggatgtctcgacagaaacttgattccagtgatctcaatagcgagctgggaccattattccttctgaggtcgacgatgtatgtctagtgtcgatcgcggttcttatcctccaagaattcttcgaggctcatttgaatgctatcttctggctcgccaggattgtaagtctcactgacgctaacaggatgaagttatatgaagtcttcccataacgagacggtcaccttgcttacttgttcttgagccgatccaacttttacacttagtttgttcattgtacgctaaggactttcacaattaatacgtgtcgctttctttggtgcctcgctattaacatttaacgacatatggtttctcgctaatatactaagtgccaatttgtacattgattctttgcctaagaccttacagtcagcaggttataaatatactctgatacttacgtaattaatgagttattccataagaagcaattgcatcgattttcattccctttatcttgacacgtgtcctccagccaaattttaggtataattattgccccttaaaaagttcttttttagtaaaaagagctttttaataattacagagggcattttcatcaagatttcttcttggaaaaaacgcatcctttgattctagcagttgtacagtttcgagggtcattatgaattgtcttttcatattctacccttctcccaaccgttggatttctcaatacttagcttttttgtcactagactttgtgtataaaagggcggctcaagcttgtcaattttaataaacctctggctttttagtgagatccatttttagaatggatcatctctttcctgtcaaaatgtcccttctgagtttagaagttcatcctcctaaactcataatacccaaatgcaccaaccaatttccatttgttcccaaggacttcaaaccttaatcagagccggaaatgatggattcctaggttgaggagcttccgaccaatccaaaccagaggaacctcgtagcccgccatggctgataaagaattccaatgggaagttggcttggtttcaaatatattcgggaaggaggttagcatggtttctattagagaacccagccaacc

SEQ ID NO: 272395 - DNA, 622 bp, Cannabis indica
tttctattaatattatatatatgacataattcgaaatccaatatattataaaaaatacattttcgaaattgtctaaaaaaataaaataaaataaaacttgaaaaattattctaatttatgttggtctaaaattaaataaattaattttaacacaaatataattttcctatttaattaaatctcttaagaaaaatatcaaatatttaagtgccttgaataaaatcaacttaaatattaattttcttatttaattaaatatatctagaaaataaagctaaaaagctcctctgatctcgtttctctctctcctccatggcgaggaagaaaaaaccaggtcgaaggccgggcttgaaggtggcgattggttctccaaagaaactggatctggagaaggaaagctctgatggctcactcgacagtcatgaacacttgctggttcaagttccagaacagcacgcagtggagaatcatgatgaaagatgaaatcccctattatcagctaggagaagttgggccgaggaagtggaaaaaccctgcaattggcggctcagaatcattggcaacacttctaggagtaagatctaaatactgatgctaaatgacatatactgaaccagtgatt

SEQ ID NO: 272396 - DNA, 1781 bp, Cannabis indica
acgagtaaacacatcttgtaaggaggagacaacagaaccagagagaacttgtgacgtttcagagtcaaattcagataagagtactgcaagaaaactcataatagccatctactctcgttggcgctgttgaactttcacattaggattaaagggcaataatacattaagctcttcatatgttttcttaaatgccataaagtaactcataagagacttgataactctatggtatagtagtttttttttttttttgtgcctttaacttgaaattatcatgaaaagagtaatgaaagtgtgtttgttatttagctttaattagtttttagcttcattttctaattaccaagctagctttgaagtcttataaatatagttatttttagttgtgtttatttaattaaattgtttgttggttgttgagaaagaagaattaaattgctagggaaaaggaaaggaggcaaggacaaagttggaacaaaagctaaaatctgggaggaaatgctggcagaatgttgggcagtttgagcagtgacgtggaagaagttaaaaaaacgaatttcacttatccacatcaacaattatgtattagtcactaaaagtacgccagctggctgttatagaaggaggagacaatacctagtgggccaagattgaaaataatttgggcttttatttttagggtattacattgtaccctaaggagggagcaaaagaaactaagtacactcttcttcttcaacatgatggcagctgccatttttggaagaaattaactgcaaaaagaaaaagtacaaaagaggaaggagaaaagggggactgaagtacaagaaaaagagaaggacaaaagcctatttgtttgaatttctttttccttttctttctatatttttttttcttttctttcttgtctttaaatactagaaacttgagaatttgtaaacaaggcggcagcagccatggatgacaaacttttagtttggattttattttttaatttgaacatgagctaaagttcttgaggcttgaatggctatgaactcctatgttgggtatgattaatttttaagcatattttagcattcttgcctttgttcattcaagtaagcttgtcattttatttgattgttatttcttggccatgagtaacaatttgttaagctagatcttgttccggaagggctgaatttagtagttaaacttggatggagcaagagaaatcctagatttaggtttttcttagtaagtggaataggaatatttcatttaccttgtataacttaagaattgatgtttaattagtgttctgcaatctggtttgatataggaatatgtgaatctagatgatagaacttaaattgtgagttttggaaaattctcataaacacataaaaaattatgttatctctatgtgaaaatgctgaagtaatgctataacaactgagaaaaacctgactaggggaattagttattcaagccactttttaccatattacatttcttgcaagcaatttttctagtaataatagcattattttacgcaaattaattacaattattttaattttgaatcagtgctcaagcattctcatatttttccttctactttaagttgtaactatagttggttttacaacatattttgtttgcaatccctgtgaagacgatcttacttattacttgtgtgactgcgtatatttgtctacataattttcacaacatcttgtttctccgcatgataaaaggctttgaaaacatcatatatgcgagatatgttgtctttg

SEQ ID NO: 272397 - DNA, 518 bp, Cannabis indica
ttttttaaatcttaaatttttttttttgtattttcttttattaacaagttttttcattaagcaaaaaaattcctttttttttaatcggaaactttttttagtatttcttttattataaaaaaaaacataaatttcttacttttttatttaaatctgaaacttttttttagtattttctataattaagtaaaaaaaaatacaaaaaattctttttttttcttcttgttataccctttaagtgtcggtttataaccgagaccaaatgatcttttagtctcggttatgaaccgacacttatactcaactgcatgtatattatacttttagtgacatttaaagtcattatttgtgtgagttataaactgagaccaaagagttagaatagtttttagtgtcagtttttttaaaaaaaaacatcactcaaaccgacactaaaagtctattttgtagtagtgtatggctggatctgtttctgggacaaaactcccaacaacacttcttggggggacagttggcgg

SEQ ID NO: 272398 - DNA, 1980 bp, Cannabis indica
aattcaatattaaaaagtaacttatccaaaataatcgatctaatttgtacttttgctgattaaattgaattatatccaaaatataaaatcacacttgatgcactatgaataaaataatatatatatataagcagattggatcggatattgtgactaattataaattatcaattctacgtcgtgacgtgattaaaaatattagccacaaaatcacaattttttgtgactaaatgtatttttagtcacaatatttgttgtgactaaaactaaattagtgacaatttgtttctaaatactatatttagtcacaagtaacttttttgttgtgactaaaattcacatttaatcacaaatttttttttgttgtaactaaaaaattatcagtaaaagtgacattttttttttgtagtgatatgaaaaccccaatgtacatcatgtttttgtgtgaatttacatacctagctacatgtatcattaatcttaaaatacataatgtaatcactaccccttattttctcctatatcatcattttggagcttttcatttagaaaggggcattatcattgatattgttagacaacggctacttaataataataataattaaattgaaaagactatatatagttaggcagttcggtaatcattgtatatatataaaaatagttattttcttgtgttgtgatcatcatgtaccatataataaacttattaattaatacagagagttttgaaggggtcaaccaaccaacgtagctttagtaacgcacttcatcacaaaaataaaaaagagtgaaataatagtacaaatggagctttttgacttaaattccatttaagagattcgaaaaattcataacactgtcataaagtttcaacacggctaaaccctattttccgagccaacctaactccgtttgtgaccgttattatatacttatttgacttgtacgtttcatacttcaattaatgaaatttgtttgccttataaatttacagccaaaaatgtcgtatacaaaagaaattaattcgtaaagaagatatgagaaaatacatgcatatatataggaaaacaaaaagaaataaagagaactttttcttgaagaaatggaccactatagctactaatctagtcaagaggacgatggaattggtccatattcttgtttcccttctttttgaatgtttccttataaacttcaaataaattggtcttaatttttgggaacgtcggaaaagtctcctcacattgtctagggttttaactatacaaattgtagccattaatattagaaagaggtattaagatcaaaaaatcattttcacattatcaaattttcgtagaatgtttgtgttcccattttattatgtaccctaattaattagaccatctttccaatagatgatttaacaagaaaaaatattaaatttgccaaactcagaaaataatataaataccacatttagtataatatttgaaaaaaaaataatagttaagagtatatctaatagtgctaaatttgtgatgtattatgttttgatatttttgtgaaaaaagcttctccatatgttaaaagttgtggtaaatttagtgcatatcaaaaattatggatacaccgatacacgcttattattatagaaagtttataccgtttctttaaatcaagattgagcaaaaatataatttagtcaattaatcaagtttattattgaggttatagttgttgaataacaaaaatgaatgaaaagagaactaatgtaattcttattgatttgatgaaagagtacaagacatacatacaacttgacttgagcaaagaaagggaaaaacataaaatagtagaaaatgtaattaacactctaataaaatgaaagttagttaaaaccgataactagctgttacaaagttacactactacaaaaacaccctttagaggcggtttttaagccctttaggcgtcggttttcgcgaaattcgc

SEQ ID NO: 272399 - DNA, 1125 bp, Cannabis indica
ttgcaataagttatatcttctgaaaatgtagtatagttagatttttaaacttgtaacgcatctgaaacttgacaatgaatgagtattgtaacaaaaaggtatcttaattcctttcatgttgcccatagtgcagcttcagtcaagcagtcaattcattccttatcatcatctaataatcctaaagcatagcacgcgactttaaaagtaggatatttgatcccatttactgttctaatattttcgtacgaagtgcaccctttgacaaaattaagcaacattctcatatagaagcgtttaccagttgaaggatgtgcgaagtaaattcttccaatagccacaccattttttctcttagtccatattttttcttttgaattccaaacctagtatgaaggaaaatcaaagtaacttagttctcgtgcatcatcttttttcttatttgtctccaaccattcagtgaactttgtttgtcttattccaagcttggaaagaacatcatcaacataatctttttctctgaatattactgtatgctctctaggcaaatggaatgttaatctttcaactgatggttgtctataatgtatgtcaaattgaaagattttccagcaaacttcagttgctgatatatacctacagtctaaatatgttttgatttcatctacttcttcggaagtatcaatagattctattcttgcagttgctctatcagaacctttatgaacatatttaaatagatatttgactgatctagagaaattacaaatctcgatattgatatgtgcatcaaacttgacaatcaaatttttattataagggacaacatatcgattatctaaaatgacacctttctttttaatgtgtatatttcttcttttgtagattggaaagccatctgcgtctattgtcgtcagattattaaaattttttgggaaatgttttgtgcacctaccttgcatcatacatggagagtttgaattgagttttccacaaggttcatgaatcataaatttgttaacagcattataaccatcaggatcaatatttgagtctggaatttcttcacttattattttgtctatatgttctgctgaaggatttttcaatgtcgaatgcaagaaaagt

SEQ ID NO: 272400 - DNA, 1112 bp, Cannabis indica
tcacacatttacgttacaccatacatcgatttttttatatttctctatatcatttcaatattatatcatcacatatattttattaataataataaaaaaagaataaaaagaagaataaaaaattaattaaagaaacaaaaaagagaaagaaaaaatataaaagtttcttaacgaaccccacattgacctgggggatgatactgagaggccgtacgacaagtttcgggttatactaacctcctacatcatgaccaacaagaaacatgcgctgctatgggtgatgctttcgctcatcagagaggcaaatttcaagagtggatggatcgacaaaccacaatcctccaagctcaacaggtagagctgaactgtcgaaatagggaagctaacaacctgatcaggtcgttcaacgagagagttggatctcaagtagaagagtccttcctcgttagggatccccgtcagggaaaaggtccctgtgttctagagggaactcagcgcccaagggagcatgggtaggcctcaaagccaagagggccaactgtatccagacaaggccatcctatcaatccaatgatgaccagatcatgcctgaacaatcatatagcagggttgaccaatttcaaagcctgcccaaagaccactactacgaaatgctcaatttgtgtcagtcaacgcgtctcaccaaaatagttgattgaaacaaaaatttatgtgaccttatattaacttataacaatagagtataatacagtttatgatggcgtaaggtgtatatacgttacacttgatgggaatgagaatgtcaaacttaaacaaaatatttgatgaattaaattttaatgaccaacacttgggtttcatgataatccatcaatttaaactctctccatttcttctccttccaatttaaactcacttaaccaacaccctatataacccatataagtactatttactattagtccctattttaatgaatgcttccctaataaattatttttggtacaataattggagaaatgacacaatacaaataaatacaacattggacactgtttgggttgattgaaagtgattggagtccaaagcttaagttatttttttttcttttt

SEQ ID NO: 272401 - DNA, 899 bp, Cannabis indica
gaaaaaactactaagaaactaaaattcaaccagaaacctaatttaatttgcataaaactaatatcctgactttaattttcagatccatgaaatgcagatctcaaaaagttgaattggcgttcccaaacaatccaactcaagtataataaataaaaaattacgtcaatactataataaaatatttatcctaatgtatttttgttgttttccaaatatttaatggtgaatttgttcatattaaatcatgaagagacatgtagatagagttacgtacgtagaaacactattctaattttaatgtttcataacagttgcatgaacattaattttgctaacagttatttcgtctgattgaaacatttgtctcatgcatccttcggctagctaaccacccaacaacattcgtctgattgaaactttcgtctgatgcaaccttcgaccaaccacccaacaaccttcgtctgatagaaaccttcatttgatgcaaccttcagccaaccacccaacaatcatcgtctgattctgtaagtgataatgtaagaggtattttgataattagaaacacataaaatgtataaatgttgttcacaccttatggaggtatttttataaataaggtattaatttgtatttttaagtagtaattcttctatattacttattttatttatgcattaatttacttatataaaaatatgtatatcaattttttttagatatatataatatatatgtaaaatttacttattttatttaagtattttttagatatacataatataaaattaattaagaatattatgctaaataattttatattctgttaagaaaataaaaagataacgttaaataaaaaattatattaataaatataaatttttaagttgtattttgaataa

SEQ ID NO: 272402 - DNA, 546 bp, Cannabis indica
tagattatattttgaatattgaatgatcgttaaagttaaaataattttcttagaggcgttcttcgtgtttaaactgactaaatataatgataaatttaagtgtgagatttgctactaaaatttttagaaagattaattatgtattttgtaatatggttaaatatgttcaagcttctaaggtgattagaatgatgagactatttatataagaaataaactttttttttttaagaaaaatggtttctgacaattaaaaattattgtacataccaattcttaattttttttctatttaatttatttttttaagaaaatgtacatcaaaagtgtatatatcaatatcaaattggacattagtttacttttccaaaagtgtagattatgattttgtggacatctccaatcttttagccttaacaaagatacaatgctccactctacaaaatatgacaatatatgctatgtatatataattatatgatatgttgtagtatatatatagatattttatttttcacattataagaatgtatatataattaaatt

SEQ ID NO: 272403 - DNA, 1299 bp, Cannabis indica
accgccaaacgccgtcgtaatagagtggtgcgttctgtacactcgccttttctcagatttgttaaacgctatgccgagagtttctgagatttttttagtatgtggcttatttctcagcttcttttcaggtgaggcaaattttcccggtaaacaaacataattgtgctgatttgttgtttatgatttgattttgaattggaaaattgtgtgagttaggattggcgttatcggcagtggtgactttggattcgattgagatatacagaacccatgagttgttgaaatctgtgaagccagatgtgtattttcaatgcaaaggggagaacagaacccatttgccggatgtgaagaaggcgaatgaattgtatgaattcagaggcgaagagtcttggcaggtttgacaattcgtaactcgtcgtacagaagaagatacattagattaattatattcagattttagaacttttttttttagattggttttctttttgtgaaaccctaactatcttaattacatgaatcaaacaaacatgaactacaaattatattgattttattgttaatgagcattgactgagattgccattgtttgatttcatatgttggaacttgggacaacagttcccaattgggactgccctctatttagggtttttggggttcaaatatggggatttcactttggggaatgatataacccaaagccaaatccaatgtggtaactccgtcatttttggaattgttctttgttggttaatactttcaaagcttagatctttgtatagttttccaattttttgggatgcttggctggcttcattgtatgaaaatttgcagctaattttaaagtatggaatcgtaaatccgatcttcgaatatgtgtttgcacttgcagcctctaacagaactttctgagaaaaaatgcaagcgctgtggattgtatgagaaggatgtattcaagtcggatgatatatttgaggagtgggagttttgtccttctgatttcaattctgatggaaaatacttcaaattcaaggacaaggaagtgaatgctactttctcttgtccacagtgtataccatttgctactggtgagtggtgagagtttgaatactgaataaattcttcgttgagtctgtcattgtcggtttatcagaagatctttttcttaatgaagatatgatattcctttctcattatcagacatagggctaatagcatctgtttgcaatctgatggtaaacctttctcactaagtccatttctcttaagggacattttagtgataggttctatagg

SEQ ID NO: 272404 - DNA, 836 bp, Cannabis indica
tgcctaaaaaggtgagcccgtgacaccatgcgatgagacaatgagtatcgctgtcttgaggctttgttcttgtcctctatgtctggaacgatgtccatggcgtcatccacattccgtggtctctgaattcgcaattcagcttgtaaagatgacaacaaaccattcaagaaagtgcttaattgtatggctggatcaactgtcttcaaaggtgccaataaccttataaatttcttcttataatctgacacagaaccctcttgtttaacagttaaaaactaatcgtacaacgagccttcttgactgtcacgaaaatggtggagcaataatctattcaactcctcccaactatagatgtcacgcttgttgctctcatatttataccaaagcaaagcgtcgccagaaaaggaaatgaaagctgcctcaatcttctcttcttcgtcataatcatggcaaataaaacctttctgcttgcattatccacccatcggggttgtcaccatcaaacgttggcatcttcaacttcttaaggcgattttcatgacgaaaacgagtctcttgttgtcctcggtcaaaggatcccccatctgaatgtcgagttcccttgaatcctactatgggagatgtgccattagatctctctctaaagcctgattgtgttccactctgttggggctcaaatggtactgccaattttttttttgttcatgcctttgggtgccagcagctccattgacctcttcccttggttcttggagggttcttgttctttcttgattattcaagagaatcttgaactgctgttgcaatgtttactgaagccgttgttcaatcttggt

SEQ ID NO: 272405 - DNA, 1718 bp, Cannabis indica
acaatgatgttgatgtaaatccttctgttacaggttattgtaatattgtgtttgtataacacagtcctatcgaccttattatatacatgcacacatattatttcattgccagtatagttgacattatacacatattaagaagacatattagaaattttaatattgtccaataaaagagactaattaataaattgaatttaatataatatttctactacatatattatatatatagttttttataacacgtactgttcgtaaaactgaaaaactacttttccaaaataatattgttctatgatgaattccacatcacatatccttactcatatgtatatatagtgccacacaaaaaataaaaaattgtaaaaatatatataatacatatatatatataagtcggcttcataaaatccttgtctactgaatttggaacataacattgcaaaattgctataataagacgaatcacaaatttgtaatatgctcttacaaactaaacaagagaaagcttttaaaaaaaaaaaactaaaagatgagaaagaaacaacagaaaaaatacactaattgcattataattaagtcggtcattatcaaatttataacaaaaataattaaaacaaaacaaactaaagtaagggaaaaaagctcactaaggttaagcttcaaaaatattagtggactacctaaacccactttaaacatgttcttgcttatcatggcaaaacgtataacgaacaaaaagaaaaacagcaaggattgcatagtactgtttcttttgctattaaaggattaaaacgttacaattagattaaaaaagaaaaaatcagagatcacatactcaagactatatgttttttgttcaaaagaataggctaaggggaagttgaaacgcatgcaggcgggttttgaataccggaaacggtgggctggacattcttacactcagagctgattgggccttcggcaccactgtacttcaaatcaatgtcttgcatctccacattctggcatggcagcccactactacaaactagtttcaccgccatagctgtggacgaagaccctctaatattcttgaaactcactccactgatctgaacacgtgagggtaattttgaatcacattgattccatgggcaatactcttgatcaattagcaccggattccccaccccatccattataatgtcctcgaaatgcaaatcagtggcctttccctcgtgagaatgaggccacgtcttgatcctcacgccgttttgggtgttcttaagcacgcagttcttcacggtcactccactgaccggctcctcgttcggatattttccaaggcttccaatgctgatgccgtggccgggtccgcaggtgaccttggagattgttatttggttgcttccttcgcccaccgagacacagtcgtcgcccgtctcaatatgtgagtccaacactttaacgtcactcgaacgacctatgtggattccatctgtgttgggactgtcttcagcggcaatgattttcacgtgttgaaacgttagattttggcatcctaatacgttcacgtggaattgcttactgtctagggatgttacttcttggactaaggagtttgttacgaagttgaatcttacattctgttttaaaataaaaatttgttaagccattgattaacatgtaaaaaactaacacattaattattattagagatgataaattaatta

SEQ ID NO: 272406 - DNA, 2840 bp, Cannabis indica
ttttaattttaccctctttttaatatttcattttttctactcacttttatagttaatgttcctataataccctttcttcaacccaaaacagaaagacttaattttcaatctttaatgttaatgtggggatatattaggtaatctctttataaaagtgggtataatttaaatgaatataatttgctggtagttttaattgactaacacaaaaaataggtatatcctttataattaattgattttattttgtattgtgttatataattagcacatgacatgacaccactccaatcgaagtcatattactaatacaaattcacttaaaaatatatattgtcattctagtgatatatattttacttttattatttgagcttatattaagtttgattaattttaataaaatataagttgattacatcaatttttatcgtgttagtcaatattataagtgattaatagttaatgagcttaatatgtgtgtgtataaagtctaattaaagcaaaagtatgaacttttctcattagttgaaatttttgaagaacagacccagtccaactaagattatttataactctataaatacatatacataaataaaattgctttcgatttataaatatagcggagaagacttaattaatagtattactattaaattacagtaattactgcagaacaatcaaatatatatacataattgttatcgattattattatattctatattatatacaaattttgtatcttgattatttaattttttaacaactactacaataggaatatatttgtttatttattgataataggtatattaatttataatcactaaatataaattctaatgattaacattaaatatctaaaaaaaatacactacaattaattaatataaatttttatttataattaattttgtaccatatatattattacttagaagaactaaaaaatttgacgcctaatttttatatcacttattgtatttataaaactataaaagaaagtacaacttatatattatcataggtcaattttgatatgaaagagccatattacaacaaattaagaatataccacttttaattaccaggtaataatttttatatgatgtagtaattgtatatatataaaaatattctatacacaggaaagggtttatctttgtacatattactatgccaacaactatactaactatatgttagtttgaatattaataatcaaaaactgtatatattagttcagattttattacatgaaactaattataaaccccatttggatttggaaggacccactaatatagatgaatataactataattatatataagctaggtgtatatagtattaattggtgagtggaagacgatgacatatataataataatgacaatgaaataaggaacaaacagatatctttgtttatatatataaatatatatctatcataatctaaattaatgtgtctaataaataaagcaaataaaaatatttccatggctccatgtgttctgaaaaagtacgtaataatcaaaacgtacgtggtcatatatagtatatatataggcgatagagacagtaatgatcaatataattttccatgctattaatcatatcttggcatttttctaaattataataatgtttgtaacggttcataaactataaaacgtctttgttgaaacttaattaaagccattatttaattaagacatgaagaatagacaacattattggaagtgcatgcaatgcaatgcaaaacaacaataaatttttttagactttagtgagtgtcggtgcttaattatttagcccctgaattattgatgaaaacccattttcattaatcaaacagacaagtcaaaaaatatatatattttttataaattatttaaaaatacaaatgacattttcataaaatgaaatggctacaaattattaagatcagatatatacacaccaaagatattatatggtcgtgcatataatttaagaagggttcgaaaatcaaataatattgttcggttgttattttctatttatttatttattttggtaagaatattttttatttatttaatattcccattttggtataatatttgtttagtactagtagtatgatgagacagtctttgctgtcctgagttcatcattatctaaaaaggggtattttagtaaaaatacctacttttattaatccaattaattcaaatttacttttacttttatatttaattgaaatataactccttttatatgtattgtacccaaaataccctgatataagagagtcacatggagagtaccttaaagtgacaggggtaaaattggtacaatgtttaaaaaaagaggtaaaaatgatagactttaaaaaataggataaaaataaaagaagacaatataaaaatgatatagagtgtaatttactctatcgtggtatctaaaatttgataaaatatacttaattttagaataatgatcatttatttttttcttttgaattttatatttttttcactattttttaaaatatttataatttctatatacagtttactgataagtagcttaaagaaaatctatttggttaagatttagtttcaaaagaaaattatatagctgaataaaaatactaatcaaatagaaaactatagaacttataaacattatttttgtacattatttgttcaatgtgtgatattaacttaatttttgtgtatacttggtgagttggtgtgcatacttcactattctaatgtttttttttttttaccaaaagtcataaaagaataaaattatttcgttaaaatattaatgcatatacatgt

SEQ ID NO: 272407 - DNA, 1551 bp, Cannabis indica
ctcgactgaacctcttcgacgaaagtggagtcgaaccgttataacaacctgaccaaacctttttgacgagaaaggggtcaaatcgttatatcaccttgatcaaacctttttgacgaagaagggatcaaacaactataatttttgatttataacccatccgacgggattagaagatcaaaagttataactcgcgtacaaaactcaatactaatggttctcgcgagctaggaaagtactaaacaaggcatcacaacaccttgataaagtacttaaacctagaaaacggatagataatataactattcatgcgagtaaattaaaaatataaaaacataaacttaaagtatatttaagtttgctaaggtagattataactacaactgcgaggcaggatggaaaactgcttgaaaatcataaagtttggtagattattaactacttaaacaagaagtatatgagcaatggaaaaaccaaaaagtgttgtacattcgatcaaaatataattgtttacattgtgaataataacacaagcaaatacaattgtattaagtttgaataaaaacagtacaaggaatttaagataagaaaaacctaagactggttacaaacttgtctttacaaaaatgccacaacgggcaaaccattaagtcattctcctaagcttatgatgagaggggaaaccgatgaacttgagaaataccgtcttcatatagcttggaaaagaccgtttacacgtagctcgaaaaaagaccaactacacatagcttgagaaagaccagctacacgtagagagccttggtctctgcacatgcctcattcccctcatcatcagaggatcccatttcctgaagccgagatctatttcccagcctcaagaaatctctcaacactgaagagagactgacgtaaagatctcttggcacaagataggatattaagttggatggttactctaatagaaaccacgccaacatcctccccaaatatacctgaaaccatgtagatcttcctttgaaattcttcatcagcctgaggaggatctttgagatcgctcacaagatcaataccctctgggatcacttgtgaggatcggccatggcaggtcacagggttcccctggtttggattggtcggaagctcctcagccttggaatccatcgttttcggctctagtcgaggcttgaagtctgtaggaacaaatggaaattggttggtgcatctgggtattatgatcctaaaaagataaacttctgaactcagaagggacattttgacaggaaggaagtattccattctgaaaatggatttccgtaaagagccagaaggttagtgaaaaatgagaagcacgagccgcccttttatacacgaagcacattaacaagaaagccaaagattaagaaatctaacggctggaaatcgtgcagaatatgaataggcaattcataatgatcttcgaaaccatacaaccactagaatcaaaggaggcgtcctttccaagaaaggattttgatgaaaaaaactttttaaggggaaattgttatacccgaaatt

SEQ ID NO: 272408 - DNA, 691 bp, Cannabis indica
cttatcatctaaccatgctccctaccttacttggagttcacaaattgtatttaaaatgttttagaagtatgaggtagatacgatttatatacggagttatgaaaatatagaatttcaaatagatatgtcatatgaggaacagtcgaataaggtttttgaacaagtaaagagaaagtatgtaaagactacttagctttaatttggaaattagcagataattagggcttaattatgaaaattgtttattaatgttgaattatttaattatgatgatttatttgaattcagaatgcattttatatggcatatatagaaatttcataatttgcatgttttgtgtccggcaacattggaacgcgatgtttggctattagaatcacatcatagtattttttagtatagcggaacaacatagttagacattgggaatgtcaggaatagccgagattttagaatttcccaaaatacccctaggtttcttttatgcccttttagtgtgggaggataaaaatggtcattttcccccataagctttttgtccgtatgtgcatttaattaaataagtacaatcagattttatttagtgtttttggctgaaagtgatttaataaaactattttatttcattccttttacaagagaataagaaaaatttgaaaaagccactgtctttcaaactctctctctctct

SEQ ID NO: 272409 - DNA, 1950 bp, Cannabis indica
caacctctgatcaaaaagatatatcttggtttcgtttcatctcttcaacaagtttagtattattaccttcttatttctcctaggagaagcgatttcaattgttgggggagaatgaagagcttcaaccggggccgaccttggacgaggacggaaaggagacgggactcgaatctcaataacatccacatcccacaaaatccaatcctgcgttgaggttctatgaggaatgtcatgagtgatggagttgcgccacggcggcaaaccagtgttggcgcggaggaattggccgtatcgggtcttgagacgaacttgaaatccttctcttatgggttcccattcaagggatgaatccaaccttttgggaagattttgaataactttcttaccagtcattccaagaaggaaaggcatgtttgaggccattaagtatttaccataacagctctttaggcgtaaaacattggcctcttccaatagctcgacgctccacgtggcattccttaccaaaccattacgatcttgtacgacagattcttcatcttcatcggctaataggtacttgtcgtgatggctcctcagccgtaccatcctagcttttttgaaaagttccattataatgattaatacttaagctttgatttgataataatattaatgatttgcatgcatgcatgtatagaacaggacaatatcagaaacaaacaaaccttaattagtacatttaaatataatttgtgatacgaaatgaatggaaataaagagaaggtgtttattaattatggtaaattttttctctacatttatcattaatatttatcttaaaaatatgctggtggtaggagtaacacgaagaggttttgataacaaattaagttagataaaacgttatatggaagctattttggttaattaattattattaatctataatttatttgatcgaattaactgaaatattatgatattatctgtataataattctgaaaaaatataaaaaacgagagacgtttatatagtcctttttcgttttctatctcaccttcaattaaacatattcgtttgcatagaattaagagtaaatatcaaaattaccatatgttttgtaaaaattagtggttagactctctagttttattaaagtaatttttctaaaattataaaaaataaaattttgaattcaatttttgataatattttttttaatgtaagcaattggaaaacaattcttaacacaaacaggtgtaaagaaatataaatagttttattataacatttttaatcggactattattattatttttgtaaaaaaatataaccatttttttatcataatacttttagatcgaattattattaagttttattttgataaaaaaattagtttaaagttttatttgtatcattttagaaaatacagaatctattttgtcatttaataaaattaaagttgcaatcggttattttttcaatgcatagaattcaaaaataatatttaccattggaaaaattatatatttttcactgtttttttttttctaaatatattatattattatatctttatatattaaaagtgcctatctaacgacatttcttggtttaacagaataaaagaatattctgttaaatttaacgattaggtttgatctcccgttaacaaataaacccaaaaaaaatcaaacaatcttttaaatattaataatctctttttaaattaaaaaaatcatcttagccacatatctctctaacaaacctatcttaaaaaagaatattaataatttttttatttattttttaaaaaagaaaaatatagataaaatgtctagaaaagataatataaatgtgagacagtatatgggttgcccctttgtaattacctagaaaagataaaatggcttaaaaaaataaaaagaagatgaaatgggctgtaattagtatttaccttatat

SEQ ID NO: 272410 - DNA, 1246 bp, Cannabis indica
atcatcaaaagtttcttcgcagtggcacgtcctcaagtgaatggtcaagttgaagcagtaaacaagaccttgaaggatacactgaataaaaaactcgaagatgccaaaggaaattggctggaagaacttcctgaagttctgtagtcatatcgaacaactgagaaaaccgcaactggacagactccatttcctatggcatatggatatgaagcaatcctgcctggagaacttgagccaccatcccacagaagactgatgtacaaccaagataccaatcacgtactcctagccaaatcacctgatgaaatcaaagaaaagcgaaccacagcaaagttaaagttgatggcccatcaacaaaaagtagctcggtattttaacaaacaagtgaagactcagaaattcttcattggagatattgtcctaagaagggtatttttaagcagcaaagatagtacggcaggtgtactcggacctaactgggacggaccatatcaagtggtcaaagttttcgaatccggagtatacaaattaggtaagtatgatgaaaaatgcaactcgttctagtaccactgtattagaatggggaacatttaagaaaatactaccaataaagtaccaggtcggacgaccacactagtactgaatgaacatttacttttaagtgaatggcctgctggacggactacgctcaaaggttttgacaaaagaaaaaaaaagttactcaggttggatgaccaccatttaaagtataatttcttatttctgcaatttgttttatttcatgttaagctaaaagattagattagatcaaataactctgatgtaagttactacagtaacaaacacattttcgatcattaaatgaataaagatatttatttcaaaattaaaatcgagtcgaaattattaacatgttgctaatttaccatccagtgcgtacaaaaggtttggtcaaacccaaaatcctgaacatataaaaaagtatacttgtaagaaacaagtgaccaagattcataagtctgctcggtcactttggggcacctatacctgtacaaagcatttggtaaagataaaatagccacaatttcacgatgattataaacagagaatgaaattcattaaagataacaaaagcacgtaataccaagtttaaagatcgctgggccggtcgtgatgtcttaaaaaaggccttatggccaaataaaatatataaaaaaaagaaggataaaagaagaagtatttaaac

SEQ ID NO: 272411 - DNA, 1486 bp, Cannabis indica
agtgtattcaacctcaatcccacgatccttgcattcatcattgatcacacgatctttctgtttatgcgcattataacgagagaggaaactcttcctcctaaagtttcccagccctataaatagtgaggaatgttcactggtcaaaggaccaaaaaattataagccgatacgcagttaagctaaggctatattattatctaagaattatatattcagagatactgttgtaagagctataagaaaaggaaacttcttctttgttcttaagtcaatacaaataacgaggattaggctattaccgaactgcttggggctcaacctctataaaattcatgtgtcttattattgctttcatatatatattctcattacgacatatcgtttatcgcttatcaaaaagactcattgtcgttggctaaaagcgaagtcaacattttgctgctttcattgagaggagaatcgcagatcgctcttttcgacattcgacacgatggtgcaaactcatagatgcttgtctgaccaagcaaactcatagacgctggatccgacattacaggaccctaagagttcaagggttccgcccgctgtcaatcctggatagacgggaaacacggtgaatggtgtgacaactcctgttactgaaactgcgcgtggtgtgcaagagactgggaataacagttccgcacacagccagtgcgttcataacacgattattctaccaggcatcaacgcccaaacgaccatcgaagacgcaaccaaattgcaaaatctccatgctgcgctcggactcatgcagggtcatagcaatactctgcatcatgattaggaggaactgtgtgccgcagtaaatttcgtgtttgacaaacagaggcgtatgttcgctgaatggagaggcaaagagatggaggcattaaggcctcaccatgcagagatcgaagatcgtagtcagcaagctactgtgctgatacgaaaaacctaccagactgtaggccaccaaatgctgagggtcattcccctgggagaaacggaggatgacccgacgatgaatgcctcccagacaactaacggtcagccgtccaatccccgatcacgagttccactcgtgggccaagaggtaggcgggcagaccttgtctggcaattcatcaggaggagccatacccgacggatccaatcagaataatggagccattctgcctgtcaaccaagcgaaccaatcgctaaggcagccaggctcttcagtgttcgataggctggtagcgacccatgacctaagggacgatctaaacggtagaacggggacagacgagcagaatactacaacgatcgtgcatcctgaagcccatacttaaatccccattcagaaatacgttgacgtaatccaacccaaccaaaacgccaatcaagtcagcccagacgtacaggcccagctcgaagaattgaagaatatgtttcatggcatggctggacatcgtaacaatgatctt

SEQ ID NO: 272412 - DNA, 587 bp, Cannabis indica
ttcagcttttattcaaaaaaataaataaataaataaataaacccctaaataatatttttagaggtaatattaagttttttcctttttcttttaaattaataaaagagatgatgaaatatacataattatgtggccccacagatttataaggactggtagagggaattacattctccttattttgtcaagatttttatgtggccccacaattttatgtatgtattttgttaaattattattttccaacaaatgagtatctttcttatttactaataatatatacatgatattgttttgccttagtttttgaagctttcattgatttggtattatgtcctgtctgtttattattgtatttacgatgaataattaatacttcaaaggcttttttaaaaaaataataataataagaaaaagaacttaggaagataaatataattatctcaaaaaaaagtatcacacaatttaatttattaattattatagtatattatatattaattatttgttagatattaagtctcatgcctactaatgacaattactttagttagaatgagaataacaatcacatgttgatgatgtgt

SEQ ID NO: 272413 - DNA, 809 bp, Cannabis indica
gtgtcaacacctaaggcagcgaccaactccctcccttggaaaaagactaaaatgcccttgtagcctaaacttaggctaatttaagcttaggggtaaaatagttaaaaactataatcccgctcaaactcggtattctattttttccaatatacatcccattaagaaataaggttctaaacttacccatgtgattaaactagccatccatcgcattttccgttgtcgctgagcaaaaattgtaaaaattgtataattcacatataatttaaataatattcctagagtttaataaaatctccagaactgagaaattataactctagagcccaattctaacaatgggacccacaaataattaaagccactaataattataaaaatgccaataattagtgctaattgcctttactaattcaaattactaatgagatcattacaatttttccccattattaaaaaggatttcgtcctcgaaatctaacctgaatagctctggatatggagtcctcatgtcagactctaactctcaggtggcttactccaccttgttgttcctccagagcactttgaccaaagcaatggtcttgtttcgaagaactttctcctttctatcaaggatttgaactagttattcttcgtaggataagtctgattgtagttcaagggctttgtaactcaagacatgagtcggttctgaaatatatttcctcaacattgaaatatgaaatacattatggacagtcgataacgctggtggtaaggctagccgatacgctacctacccgaccttctcgagtatctgaaatggc

SEQ ID NO: 272414 - DNA, 549 bp, Cannabis indica
aatatgatgatcaacttaaagaagtgtggaactcgacttgtatgggcaataagatgtttcaggtggtctctaaaatgaaacaattcaaggctagacttcggctactgaacaaagagaggtactgcaatttattgcagcaggttgaaagtcaaaagctggtttggaggctgtccagaaccaaattaaacttcaacctctggatcatttactacacattcaggaaaaagaaattcgagaaagacttgtgaaagttcaaaaggattacaattccttcttgtcgcaaaaggacaagattgattggattcatcatggggatgcgaatactgccttatttcatgcttgcatcaagcagagattaaggcataatcgtattctctccattgaaaatcaggagggtaccagaattactgactcgaagttaatatccgaggcttttctggatttttataaaaacttactgggttctacacttgagcacaagttgcatgttgagcaaaattttcttgctacaggttccatggtgacaccagaccaagctgactacttact

SEQ ID NO: 272415 - DNA, 782 bp, Cannabis indica
atactaacatgtgtggtcatctcacttagctgccaatactgtagtaacagatgcaacaaaatgataacatttgataaaaagtaaaaaaaaatagataaagtgtataaaatcaaaaatatttatttatatcgtaaatgttcctctatactagtaggggttttcaaatcttcacctctaaacccaaccaataaaaatcaagacagatctttaagctcggatgtaatgcaagttccaaagcaacctaggagagctcaatgctaatcataacacttacaattaaaaccaagagtcctatgtttgtatacccagttaaccaacattttcccactaaccaaaaatcagaaaaattgatgcaatcccattggctccaactccatgcacaaaataatggactctgcaatgttgaaattggctttgctgttttgacatttcatttattcaattctatagtttattataattttggttttagtgagagtgattatttattttgactttcttgttgaaagtaatgtttatcattgcgttcggagtcaacttcccactataacatacctaatgtgcttatctgagttatctcatgttaattttgagtttgtggacaaaacaatatagttttgttgctacaactttcccctcttcttttagcattgtttcatttttgggacttagctttatggttcatgcccacttaagatcccaactatttgagcctaactaatcactttaacgagtaccttgagaaaagtaatcaagtgtggaagtttttggacttgtcaaaa

SEQ ID NO: 272416 - DNA, 2395 bp, Cannabis indica
acggatcattcaaaatgctgacagtttgcccagacccgattgactttcttgctccttgcttaaccacatcttgtgcttcgaatatacttctccacttttaatttagaataattaaacattattgcaaatgattcctttggttacattatgtttcaaaatgatttgttaatgtatcactaatgtgatactaatttaggaaagttttagtattcgtaaagttataaatttatattattatatatcatcattgtattcataaagttatcaagtgataatagcttttatttgggccttcagaatatcttggggtgtaacaagacaatgctactgaaatttttgaaggacaaaatgagaaaaagaatttctatctaaagcgggtaaagagctgttaatttaaatcgtggcacaatcattatcgagttatatcatgagtgtctttctcttaccggtagatacttgtcaggagatagagcaattattgtgtaaattttggtggcaagcttccactaaaaataataaaagaatacactggaagagctgggagaggttaccaatacataaattcaaggggggatgggctttagaaatctcagagattttaacataaacttactcagtaagcaaggctggcatctcttatgttaaccagagtctttggtaggaagaatttttagagctcgatattatagaaatggtaattttctatcggcggaattggggggtaattcgagttttgtttggcgtagtattctcgaagcacaaaaagtggtccgtgaaggagtaaggtgtcacattggtgatggttctacagtcagtattctttcggacccttgactgccagattccgaaaatccgaaggtatccattactcatcctgctctattgaatcaaactgtatgtgctttaatggttactggaaatttagcctgggatgtcgacttggtatataacctgtttaatgaccgggatgttagtttaattcttaatatttccttatcttcaagtcgagtaaaggattcctggtactggtgtttggaaaatacaggccatttttcagttaagtcaacatacaaattcttacagttgcaaaaggagtcagagctcagctgactaattctggtttttggaattgtatttgaaaactacgtgttcttcccaaagtaaaagatctactgtggcgtgctgcaacagattgtctgcctacaaagactcgattgagatctcgacatgtgcagattaataacatttgtcctaggtgcactgcccatcttgaaactccatatcattgcttggtggagtgtccttttgctagtgtttgctgggagcaaactgtgatcaggaaggatatccaagtggtgtcttcttttgtagggtggctggagacgatgtttaaaagagaagtcatagtagtgacttgttgggcgttatggaaaaccaggaatgagcttgtttggtctgataaacattcgactgctactggtgtctctatcctggcccaaacaaccctctctagttggtctcacgctcaagacaaagtgctggttcctacagcaacatttttaatagatatggatggattggagacatggcaaaagccagctgatatgaagctgaaagtaaacatagatgatgtaacttttgacagcagtggtatctataactttaagtgtgtggctagagatgctaatggagatttggtggaggcaattatcgtctgtcgagcagggaacatgtcacctgaactggccgaggcaatgggggttagggaggctttaagttgggtaaaaaaccgtgtcactgagacaagactaataacctgagctggcatattgtcagcctgagctgtttctgatgaagattcaagcaaattcagagagaaaaccacaatcccgagtccttggaaacaggcccagcaccaggttgacctaggactgggcttagcgcccaagttgacaatcaacttgagacgctcccttcaattgctcaaatgccaaatttgatgcgcccattgaattcagaatggtcaaaaaaaagggaggagaccttatcctcaagttcaaaagccttggaagtatcaaaaacaaaatctcgggagctcgggaataagtatccagcgcccaagttgacaaaaagtctaatgcgctgggttctgcttatccaaatctgatgctgtttcgaccgtccgtctagtttttcacaacgacaaagatatatgaagtcaaaaagtcaaattaacaactttgcatttctcatttctagctcacctgaaaaatgaagagttttgagtctttcatttccagagaataacaatattttcgaaaactggtgactagcttcgctagaacacagaaactaagtgatgtcaaaatatcacttaggcatcttaaagtacatt

SEQ ID NO: 272417 - DNA, 625 bp, Cannabis indica
tacaaaggctaattagaattttttgactcttaaactttaatatgtaccaaattatacccccctgaacttttttggctgttaaaaatctctcaagaactattgagattgttagattttaaggcttttgtctaattttattcaattttactatttcaatgattgtttatgtactaaaccatgctccccagactttgatatctaccaaatcatgtctcttgaactttaacatgtactaaatcatgccccatgaactttcaaccatgttagacttttttctttactaaaattggacaaaagtccttaaatccaacaatctcaatagttcaaggagcatttttaacgaccttaaaagttcagggggtatgatgtggtacatgtcaaagttcgtgaagcaaaaattttaattaacctaataaaaataagagctgttgctttttcattaaagcaccatgtaggaacatactagccttttcattagagttcacaaattgataggaacatactaaccgagtttgaaaactgatataatggatgaggttttttatcaagaaaatggatgaggatttttattaagagtattaagaaattaagaatattagagcactcatattagttctttcaaaat

SEQ ID NO: 272418 - DNA, 792 bp, Cannabis indica
ctgctacttttagtgacaacttgatcttagtcataatataatctaaatgtgacttttagtcacaacaaaatattacttgtgactaaaacatagtatttagttacaagttgtcactaatttagttttagtcacaacaagtattgtgactaaaaatacatttagtcataataaattgtaatttttgtgactaataatacctttagccacggatcttttagtcacaacataagaataataatttataattagtcacaacgttttcacttttagtcacaagttttgttgtgactaaaagtaagattttttgtagtgtaatcttaactttaatcaaatacggtttataaaaaatgcataaataattaaatagggttaaaaatacggtaattaaagaaaatctagaaccttatttttttttttgatttaatgggattcattttatttttattttattatatataaataaaaagtgacccatgaatttctcataaaccattttatcttttaatataaataaaaagacacccatgaatttctcataaaccaagaattctgttatatatgcacactttatatagaatagatatatatatatattgatattgatatgtaatattttatgttattaaaaataaaaaatactaattgttttttttttcaacaaattttagtagttttttttttccatattgtatcatttttaaattattttatttcatatttatatatatatttatatatatatatatatataaagaaacaatgaagacaaaaaataaactaatataattatgc

SEQ ID NO: 272419 - DNA, 858 bp, Cannabis indica
agtttttcaatcaccgggtatcgcgtctccgctcctatcatccgcttgttgacatagtacacaggatgctgagtcttttcctcctcccatactagggccgcgctaaccgcattctcagagacaaccaagtacaggaacaaatcctctccgagaacgtgcttcgataggattggtggcttagccatgtgctctttcagttttttgaatgcctcctcgcactcgtcggaccattcgaatttctgacatttcttcaagatgttgaagaagggaatgcatttgtctgtggaccgggagataaaacggctcagggcagcaacctttccggttaaactctggacatctttgtgcttcttgggggaaggcatgctcaggagagctgggattttttctgaatttgcctcaattccccgctgactgacaatgaagcccagaaactttcccgacttaaccccaaaaatgcacttcttcgggttgagtttcattccgtatctctggaccacttcgaagcattcttctaggtcgtccgcgtggctatcgcacgcctttgatttgaccagcatgtcgtccacgtatacctccatatttcgccccagaaggcccttgaacatccgattcaccattctttggtaagttgcaccagcattctttagtccgaaaggcatgaccaggtagcagtatacccccttatcggtcctgaagctagtgcactcctaatccgaaatgtgcatcttaatctagctgtaaccggcgtatgcgtccatgaaatgcaatagcttgaatccgaaggtggcgtccaccatctggtcgattcttggcaaggggaaacaatctttgggcaggctttgtttagatcggtaa

SEQ ID NO: 272420 - DNA, 1119 bp, Cannabis indica
tcatagtatgtaagactgtgaagaatccaatcaattgaaggagaattgggctcagatcttggtgatactctgctacagaaagaatacaagggttagaaatctgagcggaataagtcatttaattccgctgcaacccatgtaaggtttcttaaactttatatgtgtttacattacattgttttagaaattcatatttaggatgttaaataacatatatagtagtaaatctagatcttggtaaataatccccaacaatggactcaatagctaggtagctagtacgagggtcctttcccatatttattattgtataaattttgttattatttaacgaataactgaaaagttgaaaataactaaacacaaatcacaaaattctaaaaaaggaataaaaaattattttcatgttgttattaagtttctctcgtgtaattattgtaacaatttatgttcaactttaaaatacttgataaaccaaagttattaatttctatgttgttgtacagtttactacgagttgcttacactatactgttttatcaacttgtaaaaaatatagagttttatgattcaaaataaaaactcatatcatcccttaatcttaatacataatttggagaaataagatgacaatatgcattatattgataggaagagattccgaatatgaataaaattaaaaatattagatcaacaactacattataaatctaaactttatgttcaatttataaatttaggatctaataacatgatgatgcttaattactgatattggaataaccaaaattgtttttatatttttgtagagttatttttaagttgtttagtttgtttactgtaattattttctttattcattatagttgttttccttgattcatatatattagctagtagaatttttttcatataattttagtgtattataataatttttgaaaaaactagaataaaaacaactcaagtgaatttttgggatactataataaatatagggattatttcacaaatacacaaaaataacaaaaatacggttttacggaattttaaacatttttacgattttttttattttatttacagaaaatacattcattttatgttgtactcttgtta

SEQ ID NO: 272421 - DNA, 1722 bp, Cannabis indica
tttttaaaatgatacaaatagaccctaaactaatttttgtcaaataaaacttaataataatccgatctagagatgttatgacaaaatttattacattttttgtatctgtttgagttagaaattatctttaagttggttatatcaaaaaaaaatgtcaaaaattgagctcatgatcttatttttaccaatttagaaaatataaggtctattttgtcatttaataaaacagagagtcaagtcggtaatttttataaaacacagggtctataatagtagttaccctaaaatataaacacatatataagcaaaggcagagctttattgaacttcacaggggccatggcccccctcatctttctatatatctatatttatacaattaactaatgtatccttgaaaaaaaagctaacgtaattttaaatttttttagtgttcactatttaaagtttttcttttcagatcaataatatatatgtatatttactgtataatatataaattaccaaaaaaaaaaaacaaaataatatatgtggagatcaatttctatatgaaataaaagtacacctaataaaataaatgtgaagaaataatataaaaaatttagtgaacaatatattctttatttattgtattcctattaataaattttatttggataaaactttaaattcgacaccaaaaatttatttgttgtactcgtattgaatttaaaaaatgttaaaatttgtaaattttgtagtttattagtaatatttaggtaatttaaaattttatttgaactcaaaaattttctaacatgatccattaatttctttagttgataattttgatatacactatataaaaaattatattgttattacaatttattatttgatatatttaaatgatgttgtacttgaccaatgtaaaattattttttctcaaaatttaaaattttattattatcacattatatattattggattttaaattatattgatgataatgatttttatgttatacaaaagttatcgattaaactatttgttttgttaaataataaattgaaccttttattttttaaaatgatacaaaatagtttttaaaatgatacaaaatagtaacctaaacaaattttttttgtcaaaataaaagttaataataacatgaggtagaattgttatcataaaaccgtatatattttctgtatcaaatcctgctaaaaattatattcaagttagttatatagaaaaatttattgaaaattaagtgcaaggcactagtattttgtactatttagaaattataggatttaatttgttattttacaaaataaaaaattcattcaatcacttttacaaaatattaaatttaaaatagtattaatcctattttatatgggaccaaataatttaagatgtgaaagagtatattggtccctttgacataaatagggggaatctcatgtgctcatctcatctctatttgtatgcatgtatgtatgtttataaccaaatggagaggagaggaagtggttgaaattgatactgtacttgaaattttacctaactagtagtaagtactatcgatcattaaatattgtaaaaaatttgaaatgtgtgtggaatatatgatttgtgattgggttagaaatagaatagatgggagtaattttggcagtcacagaatgttactaattcattaattaatggtcagtgttttcttgaaccgcattgtg

SEQ ID NO: 272422 - DNA, 2174 bp, Cannabis indica
cgtgctatgaatgaaatgaatggtcaatattgttcttcccggcctatgcgaatagggcctgctgctactaagaaacccattggtggaggtggacaacaatacccgaaaggtatgtggcttttatgattttgttgaactcttttacctgattgctgtttgttgagtgttgttgcttactttttgttaagttgtactcgtctttatttatatttctacctttgattgattttttttttcgtagttgtaagctctaagctatatacttggtttacaatcttagttgaaattttaagcctctttagaagttgatgaccttttagttattcccttggaagttggcagagttaagagtcctttccttccaatatttacctatgtaaacttgggcgcatttaattctgttagaacagtcaaaaacttatatactcatgttgtcttaaagcaggacaccgagaggctctcattttggggggcctggaactgatttcagctgaaatgattccactttagtgcgtggcctcattttaggtcagttattttgtttatgtcataagcttcgtacttcatttactcgtggcatctattatgctactttcacgaattacatttccagttccttacatttgaggagtttacggggtcaagttttaattatttccattttcctatataaatatctttttcttttgtcctgaagaacattcaaggatccattactctactttcttggcagataataggatagatgttcttccctagtgtgtggctggtgtgtagtaaattaagtttccaattcactgtacttcattctactttggagtatagacctctgaattatcttgctttgattatgtatcgctgaaccatggattagagaaagcacattgtgtgctgtgttactttatccaaatgtttttttttgataaatttcaatcacacacatagctacgattgtaatgtgtgctgtcccacaaatcactcacacatgaacaatgtgagataaaacacacaaaggtttcttttttttttaatagatttcaataaaaaaaaagaaattcgtgtgttttgtccctcattgctcgtgttggttgtcaatgatatgcttgtattttttaatttacttggatctgtaaattatcaagttatatcgatgtagtaagctcatctctatctgaatggttttcatgctcaattgcttctctttatctgaagctcatttatgctgtgttgctatacttgttaatagttgatgaaggagttttttccttttttacatcctgatttgactttctgctaatcaatcttgtataaattgtgcctgtacatccttatggctaaccagttttatataatctagttctcatttatttatcatttgcagctacctactcaaacactcaaggatcccagggcgagaatgatccaactaacacaacagtgggtagtttgtttcgttgttaatattatttttaccctttttgtttggttgtgactatatatatatatatattcctgagtgcagatatttgttgggggtttagattctagtatcaatgatgatatgttaagacaagtgtttagccaatttggtgagctagttcatgttaaaattccagtaggcaagcgttgtggttttgttcaatttgttaacaggtaaattggtagtgtagattacgcagttatttaccagcccttgctttatcacgtgccttatgtgttgtcactgctttatttcagagctaatgcagaacaagcaatatcgatgttgaatggatcccagctaggaggacagagtattcgactttcatggggtcgtagtcctacgagcaaacaggtaggtagttgggctcaaaacctcttctatattttgggtttctctttaacatgaaaaataaagtcttgtatgtctttgtccaagactcagcaagatcagacacagtggaacggatattacggatatccacagggatatgacgcatatacatatgcccctcctgcccaggaccctagcatgtactatgggggttatgctgctgctggatatggaaattatcagcaacctggtgcttaccaacagccacagcaggtactgttatgggtttagatactttattttttgtaaacacgttttttcataaaccttagtggcatcttgtcaatggagaagtgagcta

SEQ ID NO: 272423 - DNA, 863 bp, Cannabis indica
tatatataaaaaattatatttttttacaatgatattaaaaaaaaaaaactgttaaattattctctacacccctttacattatctcttcacgtacaaaaaaaatttaaaatttaaaaattagcaaaattattttaatattataattcaatcaaaaccatatacatacattattttatacttattatcgtatatttattttcagaaaaagaaaaattataacatataatatatgcaatacatatgatacccaaatgtatatatgtacctataatcaaaattactatcggctggtgtccataatttgtttatcaattaccctttttttttatcacgatcagtagatttaatcctatttatatatatttggtactactatacttactatatatggaaagaaaattgaagagaaagaaaatataatggaaaccaaaataattagaatgaaagaaatgaaaagtattattacgtacatggacttttaccctatctttatgcttagtaaagaggaaagaaattaaggggaagaattgaagcgattgagcaagggaaaaagatccgattattttaaaattataattctaacattttatgtatgattattataaaattaaattagtaggtggtatattattaattttattttatagtagttttttttttttcaaaaaaaaaaagaaaaagttttttttaatttttagaaaaatttaaaaaaaaaaaaaaaaaaacgttaaaatttagacgagagaaaaggttttttttttagttaggagttcactactttttttccatcttcttttctagggtggcaaaacgggtttcgacacggcacacgaacacgaacacaacatgcattgtatgggtta

SEQ ID NO: 272424 - DNA, 1236 bp, Cannabis indica
cattcaccaagactttgatagagaatgcattagaaaagcacagagagaatctaggattagttgaaatgtattgattagtttatgttagtgcaagtgggagtttgttaggttttgtggcctaactaaaactttatttcaatgtaatcttgaatgttcatttatgaataaagaaacagaattatatcattacttattcaatgtattgcttggttcacatgtttgtttcatgatcatttctttgatttaaaaaatcatttaaacccttatctcattgttatcatgattactgtgttgtctgcacagtgaaaagtaatccagattatgtgattaaatataataccataatttatcagtacacaagatttccgctgatatgataatcaccaatgtagtttacttacaccttggataagtgttatgtcctttctagggtattggtaaagtaaacttagattggatgtattgttatacatcagactggaccgatattgaacttggataagatatcataaacttaccgtaatatctatctaagtcaatataacttagttgatctttaattaatgatcccaatcctaagatggttaggttctagttcagttgtaatatttgtgttctttcatttattcgttaaagttgactgattggatcttccctagttctcataaaaattttatcgtatctctaatgattatttaatcttaagcaagtattgtacattaaagtaaatactagaatgctatgttaatgacttagtctagaaggaactttaagtttcagactaagataatatgtcacaacaagatatccctgaaaaataatagtaagaggttaaatgtacttctatgtatgaatttaaccagactcctactgttaagtgggagccatctaagatgtaaccaaacaaggaacattaggagacaatcaagaaaattctctaaaagtgacctatatgttagatgataggagtgtatgttagaatccttatgtctacaccaactcataaccaattagagactgtggttactctgggaatggaggaattattctagaagagtgtaaatactcatctataattagagacaagtcttctgtatattcagatgaatattaataagcattaaggaattcagtatccctagatgagtaatgcatatagaaaatgatgttgcataatattttatgaacacaaaggaagtaatggtggagaaagcagttgcttaccacagacttaca

SEQ ID NO: 272425 - DNA, 2982 bp, Cannabis indica
atcaataagctcactcgagataagttcgtgatgttactaataacttctgacaacacctatttaactaagctgtgagccatgacattaattgatctaaaacaatgagattgactagaaaaataaaaagcaaaaaagctatgtctaaaatcaattaaaataggaggccatgaaaagttgattattgaatttcaacaccatattcatgcaatcagattcgaatgatacgtttcaaaaccctgtaatcgacactggattgtagctatggtatagttcttccaaatgtataagtctccaaaatttgttcttgttatggaaagttggaagtcatccggaacggcgttcccaaaagtctatcttgtccactctgaaaggagtttccagggaaagctagacttcttccggaaaggagtttcgaatagctagttattccctcctgaaagggagttccgaatggtcgactccagctgtcactttttctatctgagaagttccttcagcgtacgctctagtctttcctctaggaaagtttacatctcatccaaaagcactccatcttaagcgggtgtggaaatatttttatgaggagtttgttaaatttgttaagtcgtaactaacttaacaacttagcatttgtagccactaactttgggatcgatattccttactataaataccactaacacttatcatttatagtaagtgattaacaaaccagtttctagaggtgattttggagagagagattgagaggaagagaaagagaggtacagataaaaaagagagaaattgagttttgattttgtatgaaaattctgaagatgaagaagattcatgggtaagagtgtgagagatgaacactttgataggatccaacagagaattgatcttgactgtaacgtaccttgttcttactcaatcaagaaagaatatttcggtggtgttccaaaactagagtagagtcatagatcacatatagatctataactagtatatatcttggtgttggtttactgtttattgatttatttgcttttcgtttgattattcattttaggtttctagcttatttgtactatacggattctttgacttgtttgctaccagattacccataggactagcccatacttacatcttgggaattcagtagtacaattgagtgggagcattaattatagatataaattctatagcttctatagctatttagatgtgaaatgactatttcctaattagaacttggctaaacaacacaaataaaagagctcttattttggtaattatattagtttactaaaatacatttataagtagctaagtattttaaggataaaatacatcgaagggtaaaacgataaattttctctacttaatgtaaaccatccatagaggatcaatgattgtttagattgaaagaatggataattcagagtgtatatgtatttggtatatagatcgatctatgtaatcaagagtgcaattttgaatcgataataaagtaaggaggaattaatgagttgggaaatttacttagtgaatttcaagtctacttatttggagcttggttacataggcctatattcccagcattgtctcagataatatcgtcttgtagactcaattaattgatttaataagtcaattagaattcaaaaaatagagtatgtcttatttaagaattttcaccaattttgggccattttaagaagagaatagaaacaagggtttaattgttaattaagactctttatagatctaattaataaatatatcattgtattttattttataattattaaattaaaattaataatatttaaataattagatgtgattagtagtaaaattagaaaagacacattgtttcactaatttgaaattgagtggcaaaaatctaactctatggcccattagtgtattttggctacaggatagattttaggcccaatcgtattttgatttttgtccatctcttctaacctgaccctagtgtgaaggctataaatagaaacaggtgagagctttgtcaattaatgattctaaatgattcaaccctaggtcagacaaagaaaaactctcttcctcttctctttcaatttcgaaatttgatagcctatttctcaatctcaaaatgtgttccaaaagttaattgagtaccagcccacactaatcaagatggtactcaaacctttatagaagatcgtgaagaattattatctagtttaaggaaagctatcctggttcaatacttggtgatactctgctacagaaaggatttgagggataaagtactaaacggaaggagtccttaaatttttctgccattaatctatgtaatcctaaactctaaggtatttatttatcgtaataggtatttcatatgttaggatgttagattatatattgtataatcaacatatatcttagtaaataaagagcctagtaaaataagtttcaacaccatccaaatcacaccaaatgaattacaaatcgttttaaaaaccatattttcatgaaatgaaatgaattaccatggctctgaggattgttaatggaacttattttacttggatctcaatttactagcatgtatgttagattatcacataataatctaacatacctaaaatataaaattcataaaatgatcaaataacaagagattagaaatctttacattggttgtagcaaaaattagtgactctttctgttcagtcactctatcccttaattccctttctgtagcagggttattgccaagtgatgaacctagataacttccttaaactcaaaaagtgacaaatttttatagtcttctgcaaagatccgagtatcaccttaaatagtgtgggttgataactcaactcactattggaataatttgagagagaaaatttttatagaattttgaattcacttaaggaagataaaatgaagagcttttcttgacaaatttaggttaagtcactctaattaggttat

SEQ ID NO: 272426 - DNA, 699 bp, Cannabis indica
cagagagaagaagaagcactaactagtgttcatatcagcgtccatgactcgttgtccctaactctgacattgttctccaatagtcagcgcacctagaaagggaaaggaataacgaaatggagatgccatatgtgagatgtgagtgagagagataactaacaggaggtgggagagaaactgagaaaagaagagagaatgagagaggcatacctgtagaaaaggcttccatggctgcctttcgatttgccgaagaagaagcctccagaaatgtgaaaagggtgaatataatttagggttattaaggaaaccctttcatcccggtttttattaaaaccgggatgaaagggtttccctaataaccctttacgcttgtttggttcatggaatatacaaagcattcaaaaaacgttttttctgtgattagccaaacacggcccttggtccaaaaacgtgataaaagacctagaaagaggtgtttggctggtcactaaaaaacctatcttcaatctctttttccagtttaaaatgttattttttcaatttagaaccaaacgtagcccttgttcccaaaaagtttgagacacattttgaagcgccaaaaataaaagtggggtaaaatatttcagcacatcttttatcccattttttattttctcatgtataaaaagtgggataaaaagttccctttcttgtagtgtt

SEQ ID NO: 272427 - DNA, 732 bp, Cannabis indica
tttaagatgactcttgcatccacacattttttcgtgtgtgaaagattactggagatatgatacgtcttcaaccctccttcccagtagagaaggactgcttgcagtctatcacgtgcctagtgatatttcaccctttggtcttttaaagcatagtcatcgcttgaattttactgcaactttagcctttcctcgtgcaagccaaaatctgccacatgaaaattcaacaagactctcacttgcatgtagtttttttgtgtgtgaaagatcagtggtgatataatacgtcttcaaccctcgttctctgaagagaaggactacttggagtctttcacacgcccagtcttgtttcaccctttggtcatttaaagtgaagtcatcgcttgaatttttattcagctttagccattcctcacggaagccgaagtctaccacataataattcaacatgactcttgcatgcatgtagttttttttagcgtgaaagatcactagggttatgatacgtcttcaacactccttcccaaaagaactactagaagtctgtcacacgcccagtgatgtttcaccctttggttttttaaagcaaactcatcgcttgaatttttctacaactttagccttttttcgcggaacccaaagtctgccacataaaaattcaacatgactctcgtgcgtgaaagttcactagggatatgatacgtcttcaaacctccttcccggaagagaaggact

SEQ ID NO: 272428 - DNA, 8702 bp, Cannabis indica
gagagagagagagagagagagagagagagagagattgatagagcgagagaaaggggagattgagagagatgaacaaacgaaagaaaaagaaaaagaaacagaaagaaaggaaaaaaagaaagaaaaaacaagaaaaaatatttttttatttataatttttgtttaattttaaattaattttttaatttttttttaaaaaaaatttacgtggaccaataaaattgtgctatgtgtacactgtgtccagtccaacatgacacttaacacctaaaatagacagaaatattaaattgctaacagaacacgagtattgggggttttaccgcccaactttgagttttgggggttaagtgaaaccaaaatgaaagttttggaggttttgccgccatttaccctttttttatataatttttttatcaatttttttaatacattttaaatttaatttcattctattcttattcctgttcccattgtcattctatttcataaatgagtcggccaatacaaattgctttctctgccctgttggagtttctagtatttgagagtttaggattccttcatttctctatttctcttggtagtgttctctttcatatttcttttctatgaatgctttttcctctgcgctgcctcctttaggtttctttgatccttcccaatgtattgaagtggttgaagtcaaggtgggagaagaagttaactctaaaaaattgctattgggaaagttcatgggtcataagttcttttctaaaggtcttctaaaaaatattctggtggaggtatggcaaatgctcgattcctaggacgtaaaagaactccaaaatggtattttataattcgatttcaattctgaacaggacggtgctaaggtcttgcatttcaggccctggattgtgaatcgtcagcttctcaatattcgtgaatagccagaggatggtatctgggatctggaagagtttgactttggtcttttttggtttaggctcatggcttaccacccccttgtcttaatcattctaactttcctcttgtggcaggtgggggtgctgcgtgatacagacccaacttctaatgaggagatgcaaaggaaaggttacatgaaatttactgttgaaataatgatgatatctaaacctatcattattgggttttttcttgccaggaaggacaagccaaagagatggattccgtttaaatttgtaaagcttcctttagtgtgtttcaagtgtggtgctgttggtcacatgtccagtagatgcacggctgtcattgccatggtctaccctctggtgggcaatactgtcaaaatttatgaagactggataaatgttgagagtccgatttccttatgcttctcgtattttgctcaacatttgacttaattactaggggataccactgctcggcataaagccttcatcttctctcactggaacaaaaataggaagtgtctcctaagaaacaaaggtagccttatggattccgataattctagatctttgaagggtaaggcccctgcttcgtcgaatttaagaaatatttctgctcctggccccgtgcatttgctggggacggtgcctgctatcggtggctaggtctagagtgggaatagtactaccaaggacaatatagtggagcacgattctttgacgaatcaagtatagaatggaaaaatgcaagaaagtgggaattctactaacctatacaatgtccttggcactcaagaaattgataataatcaagaaatataaattattccaaatactgggcccccattagctcaaatggtggacctaccccacaaagatctttgtttatccactaagccccaatctctcccttagatggttgatctttcgattcatgttactacttttgctagaactgagttggaaacattcataggcccaattgattgggccaatctctacggcccaaatgaagtccctatttattgacccaaccacactctaatttacaacccaacctctctatcggataagatctcttatcaatttggttccaaaaaaaggaaagcccttacctattttggattcaggccccttattggtaggagtgaattgtacctatgtcccctttcttctcaaatcaacttgacagtagttcctgaaggagtttcagaggagataagtgaacattctttctctccaagtgcaatggaggctaatgctaatgaattaacagttaaagatggatgggtactcgtaaaggctcttcatctactagtcaaaggaaatgatcaagtttgactttacttggaaagtttaaagacttagtggaagtcaatgtggaataccagccaatattagctagggtgaggatgcagcccccaacatgcccccgccgtcctcatgaaaatattggcgtggaattaccgaggcttggcttagtctcgtgcaatcaatgctattattttcactttgagaaagagagatcgtgatattttctttctaatggacactaaaattcagttttatcagatgctttctaaagtcaagagatttggtttggttgactcagttattgttccaaataattgtttggtcggaggcctctgtttgtgtgggaaggctggcctccaaataaaggttctttaggttgattcttcagtcattgaagcaattatttttggagaacaaggttctaaggattggagtctcttcttggctcatgactctccctatagtagtcacaaaaagtctttttggaactctcttcaatctagaatcattatatgtcttccttcttaggttcttattggtgatcttaatgaaaccatcaatgacaacgataagatagggagcaggaagaagggtcacttgatccttaaattttttatgttcaaagtaggtggtgtggaattaaagagtgttaggggtctctttacgttggaaaataaccgccaaaataacaatttggtgtgggaaaaaatttatcgggctatttgcttgtcggcttggtgtactgactttcccaaggcgggtgtctctaatcttcctattctgggctttgatcacggccctattattctagatacgcatctggacaaagataaaaggggttctccctattgctttttgttttctagactgggaactcagagtgtgggaagatcattacagattcttgggggcaaaggggcttatgataatcaggggaaacaactcaattcttatttgaaattcattaaagatagagagaccatctgcattttagaagattgtcttttagcgattcaaagtccttctagtttgttggactttgactttgagaaatttgtgatcaaagagaaactgtaggagctgtgggaaactcaagaaaaaatgtggagacagaaatctcgtgattcttggctcagacttggtaatcaaaatacgaagttcttccatgcctttagacacaagaaaaatcatatttgggggatcaaaaaaaatgacgggtcttggatttccaatcgagtggacatatgggaatacttcaatcttaaacttttatatctttttacttcctcctgtcctattattcttgataattttgagactctttcttggaaattgtttcaagtgctgagaatgagaagttaatggtgatgcctactgaggagattaagaaggtcgtatgggctttgaatatgtctagatcctcgaggccagacaatatgaatggttattttcatagatctcaatgggaagttgtgggtggttccttaattactttcattaaggaggctttttaaagtggcgagtttcacaaggatttaaatcattcctttatatgccttattcctaagaagcataatgctaaagttttaatcactatcgtctcataactctatgtaactttgctttataaggtcctggtaaaaaatatctctaaccatcttagaggcattacgtatcgtcttataagtcattttaggctgcctttatctctgcctgatggattggagagtgtttggtccttgcccaagaagtgattcattgccttaagaggaaaaagttttgggtggtctgatggcaatcaaaatagatatgagtaaggcctatgactacattgaatggtcatttcttgctcatgtgcttaagggcaatggtttctctgaggagtttatgaaattgattatgttttgtgttagcttagttagtgtattagtccttcttaatagatctgtgctaaaaagattatttctttaaagggggtttcgtcaagatgatcctttattcccatttctttttcttttatgtagtgaagttctgtctaaacttttgcataaagagaaagttaatgggaacatccacgacatccaaatctctcgccataacttgcttgtgtctttgtagacgacagtcttctctttttttgtgcaaatagaggtgaagccttggttcttaaagattgcatcttgagatatcaacagtggtcaggccatggctaatttccaaaaatctagggctcttttctcttccaacaatactctttacaattagcgttcagtgcctagacctcttcaaatgaatatcttaccttttgatgagatttaccttggcaaccctttgttgaggtctacaccaagatgtaaggatttcaagtttcttttggacaagctaaatgtcagatcgattatcaggctggaaggtgaagttacttactaaagatggaagatctactctcattaaggcagtcgcccagagcttgccgtcttatgttatggcttcaaacttaattcctaagaaaaaatgtagatagatggatgcttcaattgtaaagttttggtggacgggtggcaatgagcaatcgagatttatgtgtttttaaagtctgggattccatttgccagcctaaagcttatggtggtttagactttgaagatttaaagacattaatcgagcctttattgctaaatttgcttctaaaattattttataatgaaagttggtgaaaaattatgcaagtttgctttttacaaaactcaatttagatcaaaattgagcaagttatgaaagtttgaagttttgatggcatgactgccattgtcacacaggtgacaccgaatgacgctcgcagaagcaaggctgggaaagtgatgcaaatttcaccattgaacgttctttagttactttatcagccataaatggttttctaattgtgcttactaagacaattagacaattattcccctaataatgcaatcccaaatcatacaatctaatttaaagaggaatgattttactaaccttaaggcatttagatctgaataccaaggctgagttatgactagtttgcaatcaaattgcactactccatgctcagagagatgtatgaaataccctcaaattccattgatctatgtttgtccccttaattgggacaagttgtttacctctgttccgcacattggtaatgaaagatataaaataggtgatcaatttactgggatcgctaactgtttcaaccaacaaattattggcactaacttcaattatgaatactgaaatcatcaaatattaaacaaatttttgaattaaattgttaaatgaataatgatatttgcagacaaattgtgtaattaaatttttacacaataacatgtcataagatttttgacatattaggtcttaagccatgttgtagaatgttagggcataatttagtggtcacataccaccatcacaaaatttacaacttgaattgttcaataaaaatgagtccaagatatgtaaagtttgaagaaattactacaagaaaattttttaaaatgaaagttttacacgacaaaacaatgaattataaaactatattccatcttcaaagaataactccagttcaaatcagaagaacaaataaattgacaaagaatatgtttcaactaccgcttttgtaccaacaatcctaccaatagtaagattgattaaagattgtgcgtctcaactgtacatagaatatacatgtgtaagttattccccctggcttatcaggaagataaatgattcaaatcagtattttcacagattttagatttacccttttagggtatgaatcaactgaaaaggaaaagaaaaaaaataaataaaatactagtgtacgcaactggatccagattctactttcacttcaaagttgtttgtcgtggctcaaaatagtaaccatgtctacctgccattcggtgtagctgatcgtatcctgcaagaactccagcaccagcaacaccaagaagcatatttgctgtaactcctcgatacagtgccatgtaaccttcaaggcgaacaatctcacgaaaagcatgcactgcattgcgatacttagaggattgaccagaggtcaacatcattcttctacgaagagtgtcaaaaggatatgcacacaccccagagactgttgtaatagtccaacctagaaaaaactagctaggaaattcccctgcagataatttacaagataaaattacttgagatttgaaattattgacaagggttctaaatcgttagaacatatttgaatgaccataataaaaacaggctacacacatgtggttaatttacaaatacacacaaattgcgacataagaatgaactcaaaaaatgaaagtgtccaagatagttgtgatcagaacatgatagaaatgaaaaactaatgtataacctcaagaagatgctcaaaatcaattgaataacacagtataaatagaattataacccagtgttcacaacttcacatagggagccagtaaagatgtgtgctagagaggttgtgtccaacaatttatgtaccagagtcaaattcacattagttgattagattttaaagtttcaaaataaaaccttcttgaatttataatagatctttaaaaagaaaaaaataaatacaaagaagaaatgattacctctaaagggccaaccaaaatgataggcttcatggtgtcatatattccaaagtacatgcctcggtacagtgtaatccccattattgaagctccaaatcctcgatatagacctactattccgtcacttgacaaagttttacggtaaacatcaattaaccctttgaactgacgctgaccattaacagaatgctcccttgcatcagtccctagtcttgttcgtgcataatctaaatgatacagaaataaagaagtggttgctcctgcagcacttcctgaagccaaatttccagcgaaccacagtaagtatccgtctttttctttggagcacccaaatttgcttttgaagtaacctttgaatgcaaagttgaaagcctacgtataatcaagattctagtgataaaagctggtagcattgtaatgcgccagatcaaaagcataacaaagaaaaacacatatgaagatgcagaacaatggtgtacactatttatttttatagaaattcgttacagctaagaaatatcctgaaagcatgttgaatctatagtgaagctcttaaactcaaattaatgttgcattagtatgataatggtttggaaaataagagataagaaggctacaaagtatagaatggaagaaataataagcactaattagagtggggtaaatcatagtcaaggtcttataagtgagttaacatctcacatgtcctgttatgtgaaagatgtcatcaatgtgaaacaagttcatgttatgtgataccaagtagtgatttttaagcataaaaattcaagttaacgacttactaacaattcataatcaatgaataaaaaacatattaaagaagagaaactatataaataaaacagcagaacaaaaaaaagtacctgagtagggaaatatcgtatgacattagcctggtttcctctccagaaagagaaaaaaccttcttctctgaaaaccctttgaaagcaatcaccaactcccatgtacggtgtccttagctgtcctcttttgaccatctccccttgattttgcaacaaaagcttcaccctttcaatgggggccgctgcactctttgatattacagcggcaactcctccaatggcgaaatctactgaaaacttatcagatttctttgtctttgccattgccataactaaccctgccaattatttataattattataaaaatcttttcgtctataaacgcaaacacattgtaaatcatggaacacagaatgcgcccagacaataaaattccattgaaacgaattaaatttaaaaattaacatgaccaatgccaatcaaagaaagaactgtaacgaatgatagagtgttcaattacctgatatttaatttattgaatagccgagaatggaaccgagtgtctaatttagccagaagaatatttggtaatcactcttccaccacctcaattggtgacgacacttcgacaagcattaattgattatggttcacgaagaaaataataataataataatcatacataaatagaataaatgaataaataaaatggagcgaggagcgaaaaaccacgcctgatgatttagagtaaaaaggtaagtcttcaatggcgaagattgttaagggaagcaaagattgggaccttcaagagagctcatccatgtcttccagacagttgaggacacccaaaagagacgtcttaaaacgccgccacaaacatgatgaataaatagattcagatttcataaaaaggatttcatggctttctcccaatttaataaaatagagttacacttaaaaaaaaaaaaa

SEQ ID NO: 272429 - DNA, 869 bp, Cannabis indica
tagtatgttgatactctcacaacattaaaaattaatgaaactaaatgtagatatttaataacgaaacacacatatatatgactaactatggtagggttttttttttcgtgtgtataacaatgaaagaattggaatagtaacttattacacaacatatatttagtgatgtttcattatctctttatgcatagctgcaaagaccaaaagcacaaaagcctccattgctacacttgttgttgcagccaccgcaatgccttttattaaaagagtggttgacacatttgccattgcaacatatctgattgtatttgcatttcttcccacatttgccgcagttatggcggtctctcacaaaatcaacgcacttcttcttgcaacaactcggccctgggctgcccttggccagacaaatccttgggatgttcttgcatgttggccgcctattcgccctcttccttatcggccagaagaatcgctcctcttcatgtttttgattccaaaaagaagaagaggacaattctttattataaactatttctccgttgtttttatgatgatgatcatcatcgtggtcttgttgatgtattgatgctgcactagcaatattaggggacattgccatattggacaagcccattatgagaatgaagaataattttgtaattatgaacttcatcttcattcgatatttaactaatatataaatatctctggagtttcaattatatgtgtatcgaatgaaccaaagtagtaatatgttctatggctttgattgaagaggtggtgatgaaaatagagtttttgtatgtatttatagcgaattaatttgggattggcattggcattgaccattgacacgtacgtgtaag

SEQ ID NO: 272430 - DNA, 959 bp, Cannabis indica
caactgtgaagcttctcaaaccaagccctgggggcttgtttaagtccatataaagctttgtgaagcttgcaaaccaaatgaggagcatcttgaagttcaaaccccaggggttgagtcatatagacctcctccttgagatctccatttaaaaaagcgttattcacatccagttgttgtagagaccagttgtgtgtcaaggcaagagataacaccactcgaatagtaactggttttacaacaggactgaatgtctctgtaaaatcgaaaccagcttgttgatggaaacctttggccacgagccttgctttgtttctgttgacactaccatcagggttaagcttctctttatacacccatttacacccaatgggtgttctcccaggtggtaatggtacatatgtccatgttttattctttttgagtgcaaccatctcatcagacatggcattgcacctaaagtcaagcttgtgcttattgtagggtcggatattgggataacacaaacacccaaagactttaagactagaatattctggtttaatctgaaacagtatgtctattggtgattgttgattcaagacaggtgtagggagtcgattatgaaaaaacacagcacacctaaaggcctcatcccaaaatttcaatggcattgaagcttgggcaagtaagcttaagccatgttcaacaatttgtctatgtttcctctccactaagccattttgttcatgagtggtaggacaaggatgcctatgtattatgctagcttgttttaaaggttcagtgaagttcctaaactcaccccccagtcagattgaaaaactttaattttctttcccaattgaagttcagtttctgccttaaaagtttgaaaggttttaagagcttcatacttgtttttcagcaagtaaatccatgtaaaacgactatatgcatcaacaaaactcatgtaatatctatag

SEQ ID NO: 272431 - DNA, 961 bp, Cannabis indica
taagtatgtaggtcctctttattgttagaggaattattagtttgtacaaattatattttggagtaatgatatacttttgattctttaaaaaaaaaaaaataactttgtttcctttggtagataggactacatatggctcattaaatttccaattacatagattcatgtaccgtacatacaatagttactatttttaataatattctctaactagatctttattttctcgccaacttttaataaaaataggtatatatccgatagagattttattattattattattaataatataataataaaaattattccttaagtgatcccatatatatatattcatcatgtccctttgactatatgcataaacttttctatagtattatatcaacaaaaaaatatataatattattctcagaccgtacgttattcatttcagagaacaaaatctataatgtaatgatataattaattatatatattagcatatataaaatctatataatcattatatatatgacatgatagtgaattaggtttttggacattgttgaagcaacatcatagaaaaaatgggtagtttttatatgcttttcttctaatatatcgaccgtttctaaaagtgatactaactaattaattaaaatatcaatagtcggcgcattcatgcttattttaacttaaatatattttaatatgtatgggattttcctagtacaatgtttaatgcatatatatatagtcaatgacaagaataaatgtatgtaatatgtacaattataatcaacatatatatatatatattatcataaaaattaatatgttgtatatatgtataatcatatacctcgatggagtagggtcaaaaaggtgtattattttataaaaagcacacaaattactactcatatgaacttttgactcaaggaccgtccaatatgaatatgattctaagtataatacg

SEQ ID NO: 272432 - DNA, 1003 bp, Cannabis indica
tagacggtaagctaccaatccaaacttttagaggatctcaaaaggctctgtaaatctagggcaaaacttgcactttttcctgaaacttttaattccattcatcagagacactcgtaggaatacatgatctcctacttgaaattctacatttttgcgttttggatcagcataactcttttgcctactctaagaggcaaacattctggccttgatcttttctatagcttcattggtccgttgtactgattctgaatctaaatattttgtttttagtagatattttgggtatatcaaagttccactttgaaaaattagaagcaataattttattggtgttcttgttgtataaaaatgtgtgtgctcaaaatcctcaaaggacctctttggtacacaaaataacaagggagccaattggctccaataaaggagttgaatgcttctactactcaccaaaggagctaaaatgcactaaggggagctgaatggcaccaaaggagtcgaatggctccattagctcctcaaataaaagcaaaagagttgtttggtcaaaaaggacccaattagcatgattagttttcgaaaaaaaaaaaaaacaacttaatgtaatcaactgtatatatttttatttatataacatatgtattaaagggtttgttttacttttatttttattttatttcttaaatcttaaatagccacaaattttttccaaggtgcttaaaaatattggtagtcttctacatatttattctcggtagtaccaatatttgcgggtatggagtcccaaagtcgggaattatttttctacaagtctatcataatattataaaattatgataaacttgggtgcaaatattatccctataaaatccaagataattgcgcatgaatttttgttccagatatggaagtccaaccaaaggagcattttggcccattgcactccttccaatggagcactttggcacaaagggagcactttggcacatatggagcactttgg

SEQ ID NO: 272433 - DNA, 779 bp, Cannabis indica
tatattattatatcctatataatattatatatactatatatgttacgatatactctcatgtataactattatattatacatataaatttctatattatatatatatcatatatacatatatatacttttttatatatataatcttgcattatttttaggataaataccattagatcctgtgttttgtaaaagttaccaattagatcatctgttttgttaaatgacaaaatggaccttgtattttctaaaatggtacaaataggaccctaaattgattttttgtcaaaataaaatttaataataattcgatctaaaggtgttatgacaaaactgtttacattttatgtttctgttcgttttaggaattgtcttcaagttgattatattaaaaaaaaaattgtcaaaaattaaccacagggtcctattttcaccattttagaaaatacagggtccattttatcatttaacaaaatagatggttcaattagtaacttttacaaaacacatggtccaaaatagtatttacccttaatttaatatttatatatattttagagttttgagttgtaactctaatcttatactctctcttttaagtgtatttttgtgcttaaagttgtaatactttacttaatcttttagtccttataacatttttaatagaatcgtaattgtcttgattatatatttttttgtatcttacttattttcttccatcgatctctatattttttaacaatcaaaaaacttattttgttttcaatgaaaggagaaccaat

SEQ ID NO: 272434 - DNA, 4321 bp, Cannabis indica
ttttttgaagaaaagcgtacttaattaataaaaataaaagctagacctcatggtcattacataaaatgtttaacggaatggtgcatagtggaatatcaccaaacaacttgtgggtaaaagcctatttagccatgttatatgggcgacaaagttgcaagtcctactaatattaagaggatgttttgcttactattaatatacactaagtatatgattttcatactagtataattattgtaacactttttcaatcattaatattagataattactaacaagtattattggtatattgttataggtataattatgtatcgaatataacttaagaaaataattttaaaaaatatcactaattaatcgtaaaataccacctataaataataatgaataccacaaatacttaataacatgatactcttaatattattgtctaaaatatatggagatatatatatatatttgaataaagagagatatttaattatgtgggcgtatatagaagagataactttgaatttctttgtcttaataactttttgtgttggtcgacatattacaattctattattaatttatatggatatttattattattattatttattaatttgttagatatatattctaaaattttaaaaaatatagtaaatataaatatattagtaattgggttgatatttctatatctcaaggaatcttcttctatattaatctcatgggccggcggattaattagtacaattaataaaccatttaattagagataatgaaataaaaatctctacactctaattgttaattaactaattaagtaaacactttcacttgttcttatccacaaaacaaaaaatatacatcaaataattattgtaataattaattaattgttcccttaaacacctttctttttctgttttttggttttgtttttttaattttatttttccttaatacaagttggccctatggtaatcaatgatgtcaatttttctttgtcttttcctctacttgaccttaaatatatataaatatataagataagtctacagtactttttgaaagagtgtttggctatataagagaattttttaatcttattttgttattccgagtaatttacagtactgaaaataaaatttacatattttgctgtatacatgattatttttcttatactacacactgtttaaatcttatttttgacactgttattcgatatttttcgaaatttacaagtaattttaaataattacgaatatgaataaataaagaatataccacaataccctttagagatctactacaaaaatttctaaataaatatatattaatggacagaagaaacatcttcatttacgtgtaagtaacgcgtataagtttctacccaaaaaaaaattaacgcgtattctcaatatgaactttataattggtttaaaaaatatatatgaacttataattaataattattttatgccattcttaatattaaggtcataattatttcattgaaatcatgtaaaaaaaaataattttaattttaagttgataatattagtttttattattattttcaatatatataggtgcatgcatgagtgggatataatatgaatcacaaattaatagctgcaactttttttggagtcaaagactgcaacttgtttcttcaattcaatctaaagttgaaaagagatggagtcaaatgaaaatggtgtgctaattgggcttcctaggcccatttctaaaatgttgggccaaggaagtccactatatcgatgacactactaccattgtgagaattttatacaccaacttattttgaaagaaatttacattttcttatataaacacataaataaaataaataaataaataaataaacatctttctacgatcattaatacgtatgtgtattaccttatcttaatttataataacatagtatttcttctaaaaaaatacgtatgtgtatttggaaaaataaaaatcaaaatggtataaacaaaacttaatattattttagaaaaaaaaatatatttatttatttttttgctaaagaaaaagtatctatattgaaacctatgagatccaatatgttaattaattaacttctactaagtaaatccaagtccatcacacaaataattctttacttactaattataattgaatttaattaacacaaatcacttatgtctagttacacatacacattaccaaaagttattttgaataataccctttatctacataatttgttaattaaaggatatagaaacttattattttttttttattattatagaaacttaactttctcccttcttttctttaaatattgaaaatacacaaatcaaggttacgcaataatcaaacgaattaacattaacattatctaattaggcaataattttacaaaatcgtcatcgaagcactcaataaaatggattgatgtgtactaccttctttattgtcaagtcttctaattttgaaagattccaaattggagattttcttcggttatttttcatctttttaaattattagttgttataaaattatatgataatttatcgctttatttagtgttaggaagatagtatttactattccgtcgattattagtttattttattacttttttagttttaaaaaatcctaagtgcaattttatataagtgtaaattataatataactaactcaaaaaccaaaaatttccaaaaattattaaatggtaattaaactagttaattaattaataataataacaacaacaataaattgaattgtacaataaatccaaatgaataaatgaattttcaattagaaactacccaaaaaaaaattagaaaataaaattagaattaagaggagccatattcccaaacaagatcttcaaatcattctccaatggagtcaaattcaaatccaataagcaagaatcagctttaattctaatactattagatctcttcaacaccattaatggtggtgttgaattttttttttcttcttcttgttcttttgcagtagctgctttaatgagtaatgaagaaaacccatctgacccattatcattaatggaagctctatgtcttctcatatggccacccaaagcttgtcccatactaaaaacaactccgcatattgagcactcatgttttctcccaatagttttttgttgatcgtattggttttcttcttcgaatacttcattagtaacgagtttcggttttttgtgactcgctctgtgtccacctagtgcttgaaacgacgagaatcgcttgttacacgtcttacattcgaagacatggccaccagagagaccatttgagttaatcgggttggtcgggttagtcagattgatgggtttggtcatcatgaattggttgtgtgattgtaataacatcaaacatttggtgatgctattgttttgttgttgttgttgttcttcatgttcttctctaattctcttcttcatcatcatcaacataatttcttagtagtctttggttgttttgttatgttgtgttgtgttgtgttttgaggttgggtatggagattgagtatttataatatgagaaatgttatgtgttattgtttgttagtttcaaaggtttgactttgtttcattttttatttttcttttactttttcatgtgttggctgatatatttgacttggtgaccaacatgatatgaccaagttgtcctttaaaagtgcaggtttatttgtagtaagagtattacaactagggaaatgttaaatgggtaagttaactaccacaagtgccacaatcccattaacacattttaatatggagtctcacactagccaattataaattttcatattagtatttaaaatactaaataacaatactcttacagatatgtactataatattaaaatatttgttagctaattatgaataattacacagcttaaaaaaaagttgttattaagcactagttaacgtttatagttagtagttttttttttttaagaatcaataacagaacatcatttttttttggttactattatattttgagcattgttatttaccaagatgcttggcactatgcattctataaatgattagcggttctttgtaatttttattagagtattgttcataggcatcgatcagtagtgtctccattggttagcaatatttattaaaaggtattttctttagttgtatgatactcgatatttaattacatcaataaaggagggtattagtagtaccttttttctaattctctttttattaaagttaaaaataagtacaacctgatattaaattacact

SEQ ID NO: 272435 - DNA, 531 bp, Cannabis indica
atcagattgtaatgggttttatttagggcacaaaacccaacagaaggtagtgttgaaagatttaaagctaggttggttacgaaggggtacaaccaacaggaggggatagactatactgacacatttgcactagtaactaagttagttactgtgaaattggtccttgctttggctgctatgaaggattggcatttacatcagttggatgtaaataatgctttcttacatggagacctaaatgaagatgtgtacatgtctttacctcaaacatatagacctaagggtgagttgccacccaatcctgtttgcaagctacaaaagtcactttatggtctaaagcaagcttctaggaaatggtttgtcaagttttctagtgctttgggtgatgaaggttttcaccattctgcaatagatcactcataattcatcaaacactttaatggaaatttcatttttctattggtgtatgttgatgatgttattctagcaagtaataacctagatgaacttcaagccctgaaagtgagattg

SEQ ID NO: 272436 - DNA, 361 bp, Cannabis indica
tcaggggcaacatttaccccccaaggctcgtttggtgtgaagtgaatgaggcttgcttagataccttcgatttttgtattaactaacgggcacatgcctcaggcgcgtggggtgcatttatgactatcattattgcagtttttactttttgcaggcaacgattcgtttcctgtccgttaatgatccggcgcattcaatgggtgtcagtcgagtactataacgtttccgaccgccttaaagggcgcttatcccaaccgttagatctgcagaatgcgaatcgattgctattctcaccgtacgatgatgcctgatcatagctatttcacatccgttttggcctataaatgttgggttttatgcc

SEQ ID NO: 272437 - DNA, 999 bp, Cannabis indica
ctactcatacagttgagctatataatttataatggttgagctctacacattatagtcgagctatatgattaagtatggtcgagctttcatatttaatttagacaaaactatatatttcgtaaatattataatttctattgctatattctcttctaataaagaaaattaataataatctcgatgatttaatctatttaagaaaaaaattgtatttctaaaatattattgtaacatttcatatttactttagataaaattatatattttataaatgttataatgtctattgccacattctctactaataaataaaattaataataatctcgataatttaatctatttaagaaaaaaaaattgtgtttctaaaatactattgtgatatttcatatttactttagacaaaactatatattttataaatgttataatgtctattgccacattctctactaataaatataattaataataatctcgatgatttaatctatttaagaaaaaaattgtgtttctaaagtattattgtgatatttcatagttactttagacaacactttatatttcgtaaaagttataatttctattgtcacattctctactaataaataaaattaataataatctcgatgatttaatctatttaacgaaaaaattgtaaatgttattgtgacatttcatatttactttagacaaaactatatattttgtaaatgttataatttctattgctacattctttacaattcataataattttgataatttaatctatttataaaatggtataatatatattatcacttctaacctttacaaaatttaatcaatataaaaattaatttgattaataattatgaatcccaactatgatggtcgagctctactaattacagctgagtcatataattacattttttactaatctcaactacatatagtcgagctcaactgctctcagttgagctattttttgaaattttgattaataattataaa

SEQ ID NO: 272438 - DNA, 2207 bp, Cannabis indica
tttctgagagcagcaaacctggacatttttgcatggtcacatgaggacatggttggaatcaatccttctatgatttcaaacatcttgaatattgatcctaatttttggcttgttcaacaaaaaagaagattattggactaagaacaagccctagcactaaaagaagaggtagaaaagttgcgcaacaaaaaattcataagtgaagctttctacccgtcctaggttgctaatcccgtactagtacccaagacaaacaaaaaatggcgagtgtgtattgatttcaccgacctcaacaagtcgtgcccaaaagactacaacagcagatccagaatagatcaacttgtggatgcaacagctggacacgagatattaagcttcatggacgcctaatcggggtacaatcaaatcaagatgcatccaacagatcaagaacatacaagtttccgaacagatatgggtttgtattgttataaagtcatgccatttggtctcaagaatgtcaaagctacataccaaaggttggtaaacataatgttcaaagaccagatcggacgaaatatggaagtgtacgtggatgacatgctcctcaaatctaggaaggctgggggcatatagatgacctggacaaatgcttcaaagtcgtcaagaaatacaatataaaactgaatcctttaaagtgctcctttggagtcatctcgagcaaatttttaggatttatcatcaattcccgaggaattcaagctaatcgagagaaaattcaagccctccttgatatgaaattgccaacaaaaaccaaagaagttcaaagtttgactggtcggattgccccactcaggagatttgtttcaaagtcaacagataagtatgtcccattcttcaacatcctacgaggaaataaggaatttgaatggacggaggaatgtgaaaaagtctttcaagagctaaaaatgaaactagaaaaacctccagtgctctcaaaacctttagacggagaagaattaggattatacctggctttcaggaaacatgttgtaagtgctatactgatcaaagaagagaacaatatccaacacccggtctactacatcagcaaaagactcatcgaagctgaaggctggtacccattgatagaaagctcacttattgcgtaatcctaacaatgagaaagctaaggccctactttcaggctcatcctgttcgagtatacactgaccaaccattatgccaagtactgcaaaaaccgaacgcctctggacggttgctcaagtggacggtggagttgggccagtatgaaattatatttcaaccccgaacatcgattaaaggtcaagccttagtagattttgtagttgaatgtacgggtaaagaagggagcacttcagacaacaacccagagccagtacaagtacctcagccaagcaatagtgaagacaagccgacttggaagctacatgtggaaggctcagctacagattagttgtctagcgcaggaatcgcacttgtcacacctgggggcaacacctgcacactgcggtcaaatttgaatttaaggcatccaataatgaagctgaatatgaagctttgattgtcggcctaagacttactcaagaaatgaaagtcgaacacactgagatatgcagtgattcaccgtcagtggtaaatcatgtatccggagactacgagcctcagggagagaagattttagcacatctgagcaaaatacatgatttgctcgcagaattcaaaagctatgctctcaagcaaattctaagggaagaaaaaacaactgttattgcattagctcgacttgcgaggatcaacataaatgagaaaggaaatctggttcctatccagtttctcgaaaaacctagtatcaccggcacagaagaggttaaaagttactgatacgtccccaaactggatgacgccaatagcagcctacctcaatgctagggagctcccagataacagaaccaaagctcggaaaatgaggagaaaggctgcacggtacatcattatagagggagttatgtgtagaagaggattctctatgccactactcaggtgtgtaacacaagaagaagctgcacaacttttgtcagaagtacatgacggatattgtggcagccacagagtcgggcagtgtttatccaagaaaattctaaggcaaggttatttctggccaacaatgattgaggactccaagg

SEQ ID NO: 272439 - DNA, 2951 bp, Cannabis indica
tgtgttattatcactaatattgaattattgatcgttcggttgctgtattttctaaagaggaaattatactctatactttttttatgttgtcttcttttatttttattctctatactctccatgtgactctcttatgttaggatattttgagtacaatacatataaaaaagaattaatgtttcatttaaatataagattagaggtaaatttgatcaataaaagtagtacatttcaacttacctctttcttaaataagtgtccttttttattttcaaaaatacttattttttctctatttttacaaaaatcagcataacttgaagaggacaaaaaaagtaacctcatgtcaagagaacggccatcagcatttcacaatgaatacaaacgatttctcgccatacacttatggcaaaaataccagaacaaaatctataccatttaaaatatttttaagaaaattagagtagacatgtttggttgggatggggtaaacaaaaaaaattagaaattttattctcttggtttgtttcttacatgtttgtttggtttgttgattgtattcattatgaaaaaaaatctatttatataacattgtatactccattttcacttggacaaaaaaaaaacaaaacgaaattgtataccatttcattcatattatctttctgaagaaagtgaataaccacaggcaataggcaaagcctgcacatataaaaatctaatacaatacaatcatgattaaaatcaagaaaaaatgaaactgtttgtccagtaagaaaaagtaaatcgcattctctgttttacaagtcatgtaaatataataaagtttaagctggcagttttaaatccattaaaagtgatgccgagtcaaaatttgaaaaatacattaaaggaaaacaaaaagggtaagttgtctctacttgggtaaaacatatttggactgactaagctaccacccagcattatgagtttagagtccatcctaacaggatgtaaagaacgataataactgaaaactaactatgaccagacaccttaccaagcagaaagaatggctcacattatttctacttgattatacttcttgctagccaccatctttacataagatagtagtatccaagcaatagaagcaccacaactaccgctgcagcagcaggacctgcccatagccaatagttggccgattttttcctctttaggatggctttcgggatggactcgggtcctctccctcgaggtcttgatctgatacttgtctctcttggaaccctctcctttgctggagctggagcttcaacgttttcatctgccttttctggctctgcatcctctgcaactgtttccacaatttcttcagaagttccctcagacgtggctccagccttcttctttaatttcttttcacgttcctgtggtaaagccaaacaaattgcatcagatcgtaacttaaagctcgggctttgtaaccaagagcatgaaaaatgaaatactaatttaccttattcttcttttcagcctccttttgagctcttatagctgctttggctgcatttttctcagccaattttttcttccgttccatggccatcttagcttttgcgatttcctcttctctttttatctccttcaatttcgcagcatcaacttccttttcctttttaggagtttcgactggcaatttttcagacactgcgatctccttctccaccacatcagtatggtccacagcaggtttcaaatttgctggtttatttttttcctctttctgaaccttctgagtgggtacagcatctacttgaggaggtttcacatcttcttttgcacgtttcgaattagcttttgccactgtctccacttcaacgggtgcagattcttccaccactaccaatggtttttcatcagggtttctcatccttccatccttactcagttgccgactatcaagagatggcaataatcttttcaaataatcatccctaaatgatttgttactgttccagagggacataaatttctcagcctgaaataatttggaggtcggggtcgttaatgcacatacacaagtacaaaatttttaattaaaaattacagaataataaaacaaacctctgaatgacaatgctcctcgagacccttaacatctttcttagcagccagatctctggctctattcaagattgaacggctttggtagaagtgggtattctgaaaaggagaatttgttaattagtgccagatcaaagctacacattaataatttagataataacacaatcttttactcgagttcattgaagctcttaacaatcatctcaacgtataaatactaacaatcatctttcagtaacatgcaaccctactaatgaagctcttaacaattgcaattctgtagaatattaaacctaccagtattgagacctacaattatacaatatgcagaacaatgtcattaggccagaccatatatatcacaaatctagaaatgttggtattgctgaaagaaggcttcagtttattacccatctcaaaatgagcatggcttatttttctgaactctatgttgaaaccaagctaatgcacatgtaaagcgagggaaagaaagacaatgtgatgtgcattttttctagaatccagacacaaaagaggaaattacactgaaattagatcaacttacaaccctaaattatttagtaaaattatgagttttgaatcgaatgactacggcgttaaaactcccaatgcaagtttatggccatcagaaatttcatgccaccttaaatcatgtggtatcctatcaacacttctaaagaaaaggtgtttattattaatagcaatgttttgaaaggcagaaacgggcgttttgccatagtaccgcgaggcgtaagcctcgtgacgctccgaggcataagcctcaacaataagaataaaaaattcatacacatgatata

SEQ ID NO: 272440 - DNA, 772 bp, Cannabis indica
tactaacctcttgtagcgcagaacctccccggcaacggcgccaaaaattgatgtcgcccaattagttacactgcggtcgcggtagtaaacgggctatatgtcgtatccacagggaggaaaaatacactcaaaaggacagttagtaattttacgagaataaaatatgaaccttgaatgtgatgagaatattgagaaaatgatttttaaaaattaaacaagtaattaaaatgagaagtgatcagaaaatgattatggaagacacaagctttgtacatgcaattatattttcctaataaaattgattctttaacctcaactataattctacaccattaattatagttggaaaatgtgtatgattaagctcactagaaaaatatgttctctaattaaattaatactacttctaaaaatactatcatattatataatttaaatcgacaaaataccaccggcagaatgcagtaaaaatcatataatataataaacactctaataattaatagcctaacttacataagaaaagcatgactgaacttatataaaaggtactattaaatttaaagtgcaattaagaagaagagaaatttaatataacaaatgtgaaaatgaagaacaaagagaatcaatatattagaagaataaaaattgcatgaacttacacttgagtcttgccaaagaaattagcctagaaaaggcattgtctttacaccaaaattaataaagtaaaataaagaagaaggaaagaaaaagatacaattttggtataata

SEQ ID NO: 272441 - DNA, 1261 bp, Cannabis indica
cattaactaagaaaaaaacattaaataacaatcatcatcctccctaaatgggaaatttagttcataatcaaatccataaccattcctaaaataatattcagcataaagaaattaaaaaggaatagagaaagaaactgttggtggaatgactctggatcttcactttgctcttctttctgctcttcttgccgctttctattgtgttttaggtctccaaagcgcctcccctaattttcaatcgcacttttctatttataactaatttttagggttcgtcagacgaaattacccctggtcgtacgggcgctcgctgcggccacaaggttcctcgccgcagcgagatgggcttctgaaaaccgtgcctctgcccagactttatggccgcagcgatagtgatctggccgcggcgactgggactgcaaaaaatcctcacttctgtcttcgagttatggccgcggccaccatgatctagccgcagccagaagtgcgtcaagccgaaatttggcatttttcttggctccgcttgtcttttattgcacttttgcatcccgaggcctccattactccgaggaacctgaaaacatagaaaacaagcataattccgtcctaaaacaacgaaaagcgaacataaaattgatccaaaatataggctagaaatagcttaacaactacatgcatgtttttttccacagcgcaccattgtgccaaattggccctaaaactatgtttagaaattaaattttagtgggaaaagaaaagagtaaggaaaatgtaagaaaaataaagtatgaaaacacattatttttttcgtgttcgatatgatttttttttgagccaaatcaatttttgttatataccaaacatgataaattaattttttaattttatttctcacactttttatttttatttcttatctttcttttcctatcaaaatctaatttctaaacataggctagctaagataatttataaattgatttgagtattgacgtgtcactacaaaaaaaaatctttagtcacaataaaatttgtaacaaaaagtaaaaaaattatgactaattataaattattattcatacgttgtgactaattgatccgtaactaaaagtattagccacaaaaatcacaattaatttgttgtgattaaaagtaaattagcgacaacttatattaaaatactatattttaatcacaagtaattttttgttgtgactaaaagtcatattgaattagaaaatttttatgttgtaactaaaaa

SEQ ID NO: 272442 - DNA, 2856 bp, Cannabis indica
tatgaatgataacacaaaaacatgtcatactaatgttgactacaaaaacttttaacaagagggttgaagtactgtagtcattttcagctataaaaaataaataaataaataaaaatttaccttatgatagaccgctacttatctcaacattaattcttaatggtctagggtcaaaatagcccacaaattatcttaatctgattaaatttcacttcaaaattcaaatagaaaaatatcactaaacattacacatacattgtataaacacactagaccaaaacttaagttcaaaacataaacggtaattaataacataaaaaattaaaacccaattaggacttacacttcttttcaactttaggtcctcgtcttttgagactttcctgtgaataataatattaaaaacgtaaataaataaagagtttatttaaacttagagtaaaaacagaaatatttgagaatcacaattattattatttctttttatatattaaaaaaaattgaaacgagtaaaaaaaggaaaaaaaaaaactatatccaatatatagaaccctgtaaagaataatagatgccagaagcaaaattataaaactaataataataatttttttaaagccaaaaaaataaaaaagggtaaataattggccttaaaaaaaaagttaatcaacaatccaaaacacaaagaaaacattgtaaagaagatatatagatagttacgttgaattcacgcagcaaggtctgtgcctgggtagcttcttcatctttatcgttatcattatcttcttcaatgttcagtttactgcattcgttttaaactgttaacaaatctgcaattatgtatgaaaggaacttagaaaattgatataaagaaatgcagaatttgaacttaattacctttttggaggtatagatttgggcttcctgccagctcgggctttgggagcaaacctacgctgaagaaagagatagaggaaagagaactgagtcaaaaaaatggagatctaagctgaattgtcatgaaattgagagcacaaactaatttttttattacctttaccggggaagaatccgagctatctttcttcatgattttctagttgaagaagacggaaaaaaaattgagacggaaaatagaaagtcacggctcgaacctctgagctcctcgacaactgatgaaaataattccgctgttaccaaagttcttattattagggtttggagtttaaaatatttaaatccactttatcaaataagtaagcgaaatattccccaagagtttaaatgtttttttttttattattattaattttcgaatgtaagaaagagaagttggtttgaaaaacaatttgtagtgcatttttttttttatttgtttcaatatttactttagttttttagtttaatttttttcattttggttgtatttatttagcactactagtaaatttaaaaataattatgaatagtttacataagatattgttaatttttggttgacaaataattcaattagtagttagtgaggactattagttaaggaggttagttaaaaattggttttattgtaagaggtcaagttagaggtgcatatttgggcgggttttaaggtttcaggtatatttgggtctaggttttgggtgtgggaaatttaatactgaactcacctatttgtagacaagttttgaccgaattcgggttcatatttgtctgggttggtgagaccaagattttgatggttttgggtgagaattgggtttggaccttccaacaccttttttataaaaataagcctccaatccaaactagtgtactataaaaagaaaatagaaaaaccctaattcccattctattcccaacccatatagttcaaagaggctaagaaagagagaaaaagaaagaaagaaattggagagagggagatcagagttggaccaccatgggcgtcagagcgaggtcggaaggagggaggagtgatctgcttccattatcttcccaacccgaatcaaagagagatagagagagaaatagaaagtaaagagaaaaaaatagaagaaaggaggagtcgatctgctcacaatgtgagtgttcgtcgctgcctcaccaatcgtgcatggttggcgttgcctcaccaactgtgtgtggttcgtcgctggtgcctgttagtagtcttgtgtaggtggatatgggtgttaggtgttaggctatttttagcctaggtttcaggtattaattagaattgtttttagtcgtttttaatgattttaggacagaattacgcttattttctgtattttcaggcttgctatagttgtaaaagtccagagcttcaaaagtgtgataaaagactgaggcgagtgaagttaaattgagaaaataacattcggtgcattcctcgccacagctaatttattcgtggccgcgactaggatgtagcagaattgaagaaattagtgtgggtccagtggccgcgacgagggctatggtggacgcgaccaagtcttcctcatcgcggaggatttattcatggccgcagtgagatcttggcagagagtgtcaaagtttaaggtggtgatctcgccacggtgaagcatttcatggccgcggcgagaatgtccgtacttctcgagggcaaattcatatttttgcgatatttgaagtttaaacagactctatttaaagggacttctagtgaggaagtagatgctcaaaattttaaccctagaagcagttaaggaggacagtgagagcgaagtggtgttggaaatattttaccaggatctagatttactaccaagtatgtttgattaacatcctaatatgaattctaaaacaatgaaataaacacataagagttta

SEQ ID NO: 272443 - DNA, 778 bp, Cannabis indica
ctcagggtggtcgccctgtaaatccaccacaagctcctccggattgggagcagagatttgcggaaatgcaagatccaatccgccagcaggaagaagaaattcagaggttgagacagcagggtcctcctgccatgccacctcagcaagttgctcaggtcgttgttattccagcggtgccagcaaaacaacctgttgttggtaaccgtatggaaccgttgtacgaaaggtttcaaaagcaagcacctccagtgtttctgggaggtcctaatgttatgaaggctgagcagtggctcacagtaattgagcgtattctaaactttatgggtggggttggtaacgatcgggtgacctgcgccactttccagttctacgaggacgctctcgtgtggtgggagttgataaccctcacccgggacatcacagttatgacctggggagaattcaaggagttgtttaactctaaatactataatgaagctgtccgcagtgctaagcagaaagagtttcctaagttggtacaaaccgaggggatgtcggttactgagtatactaccaagtttgaccgtctggccaagctcgccgtgggaatcgtaccaactaatttcatcaagaaagaaaagtacttggccgacctgaatgtgaaaattaggcatgatctggtgatcactactagcgaagcaacatcttatgcggagatagttgagaaaaccctaagggccgagggcgcggtaaagtttcttcaggagccccgagtgactccgtgttgggttttatgccc

SEQ ID NO: 272444 - DNA, 785 bp, Cannabis indica
ggacttagatgcatataggaagctcatttacttctagttatttaaatagactaagttgctaaaataaaatatcactgataattttatttaggctcaattagtatttggcttattcaatgaataatcattatttaaataagggtttttttataaatatgaaatttttcaaatgcatttgaaaaatatgggcatttaatgaaaaacttaaaatctagaaaaaaataaaaaacttaaaaaatagaaaaaaaaataaaatacctataaaaggatatttccatatataaaattcacacccaaaatatcaaaactcagctattctccataatgggttgcgattctttgattcttatctgcgatttcctttattctccttagatttctctgttctccttcgatttctttgcttcttctctggtgtgattatcattcttcatcttatagttcattttcctactgccgataaagaaaatctgaattcaaaatagacaaaagtaagaaactattgaatttgattacattcttgacgtagttaacatgttatttaggaaaaatgataaggaattttaattttagatttttattttggttctcatagtaatgtgttgtgctgtgattgaaatttttaataaaaactcacatcttgaaaaagttcaccttgtagttcaatcttagagttttatattactattgaaagtaacttgataccttacatttgaatatggcctaataccttacatttgaatgtgtctgtgtttgttgtattgtgactgcaatttataacaaaa

SEQ ID NO: 272445 - DNA, 572 bp, Cannabis indica
tttgaggcttcagtcattaaataatagtcacctttttcttcagaagaaagaagaaaagaatgtcatcattgatgagatgaaataagggtgttgtttggccaaagaagtagtcatgttctcattttggcaaattttgtttcttttaataatactcatcttggttttaacaaaagaattagaaagaatatatttttaacagtcgctagtcggtgcagttgagttaatgactcgtatcattgattattttgaccatgtggacacaagtaaagatgacaaaaaaaaaattgaaaattgaaaatatatctactaaattcgagtgtaatgaaatatttttaccaaaggaataaaattattaattaaattttttattttgttaaatgataaaatagaccttatattttttaaaatggtaaaaataagaccctgaatttaatttttaacaattttattttttaatataaccaactttaagacagtttttaacacgaaaagatacataaaaacatctttaaattaaattttattttgataaaatatcagttcatggttctatttttataattttaaaaaat

SEQ ID NO: 272446 - DNA, 1677 bp, Cannabis indica
aaaaaaaaaaaaaaaccacttacaaaactagacatattgccttacaaaaccaaaaaatacattagccattaaaattaaaaagatatattagtcaataaatattaaaataaaaatattaaaataatgacattacaataataatataaaatgtatattatttataaatgaataaattatgaatttgtcaataaattttaataacggggaatccctaaaattgagtattcaaaagaataataaatatttaaaacctaaaaggaaggtgaagtgcttctaaatcataaaagctacaaaagagtaaagaatagatgagaaaaataaatatatgtaatatataaaatttaaaataaaacaaaatcacttaattttagagttaaaaatgaaaactttttaaaataaatagtagtaaaaacaataaatagtccacaaaattagagatagaaaatactgtaaaaatatttttttaagatatctgaaaattataataaatttaataagatttcataccttaaacaacggtaattaaagattacatatttcaccatcaagggctatctttacgcgtgaaacaatgccataattttggacccgtcgggatatctgattcttcattgcagtttgacggacttcgacgtcgtggagaaggggtggtggttagaacagaggcaccatcctcagccgtaatctatttctaaaagttcctcaatagaaaaattaaaaacgagtgcaaaaacactcaacaaaatagatactgattactgaagaaaaactaaacaatatcaaagaaattgcaaataaaaattgaaaacaaaattacattcttctattcaaaactaaataacgaatgagataaaaagctttaagtttgaaactgaaaatcctagatttggtgaaaaccgtggaggagttgaaatgataggcataggtgaccaacgcatagttgtattatgggcgcctgaatctagacgtcgcatacatccagattgaaacatctaacctcgaaaaacctgagattccgatctactcatcgcagatctcgtaaaaggtgaaaataaatctcttctcaacctccatggtcgccgacaggaaggaacagagaaagaaagaaggccagttaacttcattgttttgcaaaaaacaaggccggttacgtatctaatataacaacttacgggtcgaaggatgatgctaaattcttcctcttctccacctctcagaattcaaattacagctatttcattcggtttcttcataaaaactaaatgatcaaaggtgatacgctctctatttcgaaaatagaacaggagatttaattataagaatttgcagcaaaattttattatattttaacttttaaatactgaatcttttatttttttttgtgaaagaacctttaagtttacttattttcgcaagtttacttattaagtcggtgggtttgtctctgccgatctatgctatgcaaaccacaaaactctctaatcgcatggttaataggattgatggtttagtacggaatttttggtggggcttcgagaaaggaaaccatggcctccatcttaaagcttgggagaaactctgccttcctaagtctttgggtggtctaggttttcggaaaataaaagaaatgaacctcgcttttttggccaagtgggggtggaaaattttgaatgggtg

SEQ ID NO: 272447 - DNA, 537 bp, Cannabis indica
atggtgtatgttttagagccaaaatataagttttatttttgtgtatttataccgcatgattcggtaaaaaaccctagattgtcttatgtgaatattaagtcgtgttttgggataaacacttattggtttaccgttgttatgacatagggctgagatcatcgggaatagttctctacttggattggtcgacatgtatgaacatggattaaaggtaagaaaaatatatttaattgcataatacgttgtatgtaatataattagtattgttatgaattgattgatattaaaaaatatagttaatattgttacataatgaaaagattgattggttgaatattgataatgtgacgttattatgcatgtgatatatgggctcacttgattaggtgatatgattttcctggcgacgtactgggcgtaagtacaggcgtcagtgacatatgatgagtaccaagcgtaggtacgagctcacatgattaggtgatacaattttattggcgacatactgagcgtaagtgttgaaatatattttactag

SEQ ID NO: 272448 - DNA, 2590 bp, Cannabis indica
tttaatttttttaattttttttataaatatgtgtggattggatcagaccggttatttttacatgtcaattaacatccgatccgcataagtgcgaattttgaaattttcaatccaatccaatccgcataagtgcagatattcgcactttgcgaattggattggattggaatgcgaattagattagatggattattttataaacacccctaattgcaagtacaataagttagaattaataccatttccaaactagctcctttctgttcctattgttatcctagctagattatgagcataatacattcagagttcaggatataaagacaaggaggaattaattttactaattacattggaaagagaagatcgatcgatctctcgattctctccacttatgtttaattttctccattaaaactttgcaatcaaattcaactaaggcaattggcattttaatggcagcacactctgcctggaagagtagtaaccaactaactatcacttgttccaaactcaatcctctttctatattgatctatagaggcattcacattcaacttgaaagcacttggtttgggcaaaacaggttacaataccagttatgaaagttttatatgagacttctttattagcttgaacccaaccaccaacaccctttgggatggcatcccaataatcctgcagataagaggagaaacaatcttctacaagatcaagattaaacctatattattgtgttattaaacaattacaaaaagtctttaatgtcatgatacttattcttattgtaaaaatgataaaacttagtgcatttccaaattgctttggctctagaacacttaaggagagcatgagtaactatttcggctcttttatggcgaaaaagaacacaaacctttttataaaagaggtttaaagcaactgtaactatatgaaagaagacattccaaatgaaatgcttaattttggagggtattctaagagaccacataactttccaccaagattgaatatagttgggattagaagaagagggaggggaagaaagaagaatttgctaagtggtaagccgagttaaatgtaaaacaacatgaggaatgatgctccaaatgaaacaattctcaagggggctattactactacttctatcatttaaggaaaggtaatcattgaagtcacccactgtaatccatggcagcaaaagggcaaacattatgcaaacaatcaagcaaaatccaagaatccattttactagtataataaggggaaccataataaagggaaacatggcaatttatattatcactaaaagttacaaagctatccacatgattaaagaagtaagatgaaatatgaacattaacatattcaagataaaatatgaacattaacgatatcattctataataataaaagacctcttctagggatttcaaaaacatgatctaagcacaaacgacacttaaacttatgacccaaaccactaaacaacttgttttccatatcaaaaataagacgaggtcgaagttgttttactaaaagggagaggttttagaatgctcgaggacttcccaacccacgagcattcctactttttatattgtaaatttttttcggaatttttaaaactttggagaatatcttatataatttcaatatacactatatatataattaaaatttaaaatgtttagatatcgaaaagagtactattattggatactagtggtgtctaacactttctataagtaatactttatgattggttaataatatttcctaaacattattattttaaattacatgtgatttaatacttaattatactaataataatataataccatgaaatgtgctaataatgttttttaacatttgtgattgggaaactacaaaagagtacatttatacacttatttgtaagagggtaccataaaagcaccctatacaaagtataaacataaaggtttaattaattaatattgaaatatgtggaatcattgatatgtgtaattaatgcatcatttatttaatttttatataagaaagttattggctcaaattaagggtgagataataagggagttaagtcgagttgttaataaatagtcctcaagccagaaagaaacggttgttgagcacttaaacagtgcgtatgtgcattaaattaataatttaatgatatagaaaataatattaaatgcatttttttttctctcattttattgtatttgttttttatttaaaacatttatttaagaataatttattcaacaataacttctaatttattataaaaaatttaagtcccaatttggatcagttaaattgtaattagttatacatttcctaaatcccatactaacaaaatatacttctatgtaagaataattatattttaataaaatataggaaaattcttaagtgagagcatcacttttgctctcactcatgagggtattttttaaacctttgatttttaatctaatgttaataattggttgtagtttatttgattatcacgaggtattacacataggatttttattatttatttttaattctcgtataatctaagcatgatctaatt

SEQ ID NO: 272449 - DNA, 704 bp, Cannabis indica
acaaccttagcattgtgcttctcactgccaatcctgtcttacatgctcgaataaaacatattgaacttgacttttattttgttcgtgaaaaggttcttcgccaacaagttcaagtcaagcatgttcctaccacggatcagctagcagatggtctcaccaaatctgtctcaagccatagctttcgtattttttgatccaaactcacaattgcaagtccttccaattatgagtttttggggaggtattagggtctccttgtttagagttagttaaagtggttagaaggttgttgtaagttagttagtgtgtgactttctaactattaattctttctctctattttgagcagatacaaatagaccatttcttgtactctaacattgtaactagtataataatacaattaatttctttctctttcttttcctccattgttacatctaatgttcttgcagctatgagtagaaatattaacaatcttaatatggatatataaaaatgaatttaaaaggctataataatataagtacttaaacccaattttacccccttcattttcaaactgactctctctctctcttcctcccttttctctctagcgtttgaaatcgcaccacccacgaatccccactcgaacgatgaacccaccgaacccaccaccccacggagggaacccaatccactgagcacgcgacgagcaaggt

SEQ ID NO: 272450 - DNA, 687 bp, Cannabis indica
ttatgctatgagtgtgtttttgctgcccattgaaacttgtaaagagttggaaactcttatggctaagttttggtggaattcaaataagccacaaaataagggagtgagttggatgagctggagaagattgtgtaagcataagaatgtaggaggtcttggatttcgaagtctccgtgatttcaatttggcactctttggtaaacaaggttggcggttattaactcatccttcgtctttggctacacgaatcctgaaggctcgttattttcctactggttcttttcttacagcggagattggttcaaatccgagtttcgtctggcgtagtattttcgaagctagagacttggtggcggcaggggtgcgtaagagtgttggtgctggtctctcagttagcattttgacagatccttggcttgttgagatggatcatccttatattgagtctacacacccggggttaatcggtaaaaaagtttctagccttatgaggatcgatgagcgtgcttgggatgttgagattcttgaagatctttttaagactcgtgataggatggctattctctctattcctctcagttcttccattcaagaagactcatggtattggagttttgaaaagtcggggctgtaaactatcaagagtgcctatcggtacttggatgatttaaagaatggcttttctac

SEQ ID NO: 272451 - DNA, 1192 bp, Cannabis indica
aaccttactacatccaacaaaaaccactctacagaaaacaaacccaagcacccctaactcgtacaacaactcaaacctcaaaaatatacacaaaaccctaacctttcttaagaaataaacaaagagagagaacaaggttcatacctctgtttggaacaatcactaactacttgaaatcctcttaaacttggtctgaaatgaggagaaaacccctagttttctaggttcttcttgggccgacaaagagcaagagagggagagagagatgtacacttggttcttgtttttggttttaatgatttgaataagcttgatttagtttcagctctaataacaacaaatacaatttaagaagatttataataattcccacttaattaaactaaagccaacataataataacctcattactttatcaaaaagtaacataattaactaatggtaaaatagtcataaaccataatctcgaaaattcttaacattctaaatatctaactatattacaccgctaaaatcaggatgtattatacttatctaagtaactctataggtcaaatatcacattctattattaccaaacataaaaatatgaaaaatataaaattttacatatatcataattaatacacttaaaatttaaatatatctccacaatcataaaaataataattaaaggcatacttctgacaataagccctaattatctgttaatttaaaaataaaacaatcattacatttaacgtctaatttaaatttaaattaagatttttataaaaataattatctcattaagttgatacttctaaataattgtctaagttgtagttcaaaaaataaattatatttatatatttaaaaatatttttaaaaaaacataattaattgattgattaacaatgttagttttaactgttaattttaatagaaaaataagaaaaaaattttaaacaataattttcgttagatagccacatttaatataaaagagatatatggagatcctagggtggtacaatgataatcactaaaatacttctggtatgtacctgatttagtaccacaaaattaacatattctccatataaataaggaacgaggatctttttttctccatgaatgaaacgacacagggagaaagataacacttcccacactaacaggaagtgtacccatttaatatttaattatttt

SEQ ID NO: 272452 - DNA, 577 bp, Cannabis indica
gggccggcccattaaacatttatacagcccacatacaaatatttataaaaataccaactgctctaaaccttcagccgcacggaatgaacgatgaagatgaacataccttgatcgtttcaaatcagcaaaacaaccaaaatgacaccaaaaagagggaaatacaaccattaatttcgacaaaatcaactaaaaaagaagacctgcaatgatttaaacaaaaatttatgaaaaaaaaatcagaaaaaatgggaagaaactgaaattacacaattatttttgattttattcgatcaaaacaactccccctaatatcgaaatctaaattcatgaaaagtagatctgtaacaaacagatctggagctccccccgaatccaaaacaaggtataatgtgaaaattttaaaaaaaaaccttatgaataatagatctacgttatatacaggtgcattttggttgattattggtttccaatgtggaatatattttttaaaaaacacaacaagaaaagcaaattcgaattaagggacaacaagttacgtataagtttgtttattttttgttttggttgccttatagtt

SEQ ID NO: 272453 - DNA, 857 bp, Cannabis indica
tataattcaagatctatctgatttgtgcacaacattctagttccagaattaacacttaaagggttccaatactcgatccgttaggaaagtcaggattccatagttgtacatcatgttcccaaccatccatattattagattcccaaaatagattttgtaagaatcatcttttttgagaaactttaacgagtgaatcaaagaaactaataacatgaacatgagttcatgataactcaagatttaggtcgatctactattgatcatcgttacgatatgattaggtctttatgatgaacgacatgttaataaaggcagttttattcatatcagtccgtgtcatatataatctctattatatacaacatcttcactttgatgtctcactacatcagtaatccgaaccaagattacttgcatcgaagaacaggcattagtaaaccgtactagtaacggttgattaaagattccataactttaatatgttgcttactgttttattcatagctaaatggtcttagttctctgtacagctacaagccacaatctcatatataaataaaagatttttcgatatttaatataaattattcaataataaatattaacattttaacatttatcaaatatttactctttatttaacaattaaaaatgtcttcacgtacttttcatgacataaactctaacatttctgtttgaacttatatttttttattgtaaattattcttaatttctcaaaattttaggtatctttgtttagtatcttgcattggttcacccccaaaaagtagatgcacccgaaaaattatgggaaatttcactttttggccttaataatacaagccatatcaaattt

SEQ ID NO: 272454 - DNA, 472 bp, Cannabis indica
aataatttcataattaatcacaaccaactgataatttccaaattaactaagcgggctttacaacggctccttttgtaactgtcatattacattcacctttgtggaaaaaatattataacaacaccacaaaacaaaatataaaaactttaataaaaaatagttaaactatttatttttattaagcaaaaaaagtttagatatatagttttttaaaaataactacatcatcagatacaatatcagtttattaaatttagaaatggttaactttttcatttattttattataaaagtaaatggaatttctttgttaattttacaatctttaatatttgtcataaaatcactatctttctatatattttaaaaatagtaaattatatttataatttcaatactattactttgtttatataataacacacagtaaaatattatattttagattatatcactcagtataattacaata

SEQ ID NO: 272455 - DNA, 694 bp, Cannabis indica
acatgcatcttaatttggttatatctggagtaggcatccatgaagctgagcaacttgtacccaaacatggtgtcaaccatttgatctatctatggaagcagaaaacaatctcttgggtaggccttgtttaggtcagtaaagtcgatgcacatcctccagtgccattgggtttaggaactaagacagagttcacaagcaagacagggtacaatgctttccagaggaagtcattggtggttaactaatcaactttcactttcatcgcttctgcccttgctggatccaagggtcttcttttttgtcggactgacattgcatcctctcaaatgttcaaagcatggaaaatggtgttatggccaatttcactcaagtcagaatggctccatgccataacatcctagttctttttgactgtgttcataatgttttcttttatggatggagctaggtttcttcacactcggatggtcttcgtgtggtcttcatcgctgatacttacttcctctacctcctccattggctctaaatttcttttcgtcccaactttgggatctaacttgtcttgaaaatcctcccagatgacctcagtttccatctgatcctccattttgggagcaatgggtgtctcttcctggaccatgaacatagcctgtgttgagatattgtaacaatttctcgcacttttctaatcacc

SEQ ID NO: 272456 - DNA, 1058 bp, Cannabis indica
tagaccttcacacaaaacaagaatcaccaaggaaaaataaaatgaggaatccaatatttggtgtatcagaaaaataaataaccctttaagttcagaattgaccactgaatataggtcaatctgtaccaatccaatttactctacttatttcaaggaaaatattgagaaaaacaagaaacaattcatcatcaaattgttttcagatgagtccagtacaatattcaaataaagggataaaaaaatctcaccccaacactctcaagtacatttacaatatcgtagatccgtctcctttcaacacctacaacataatccaaagtcattacatttttttcaacaacgcccagaattgaaaaccccatcaagagtaaagtgaataatataaaacctaatcgtgaagcagcatcatcgaggccaatagatgttatcccatcgcgattgtacaagcagagaaaactgggagagaaaagaaaacccacaatttaagaattcgaattcaaagttcagaaaaaccaataataaaaaagcaccaaagctaagtaaaatcaggagagttggcatgaagtacttggagcataataagcctaaagacttctgctttcggctataggcgtggtgtttagaggagtcccctccggtgacagtgggcggtggcgccgccattgaactatgttcagatcccgcctgagcccgcttaaatagatacgaaagtgaaatatatgactctaaatttgagttttttttatttgttttggtttagtggttatatatataatggatctggaaatttgttttcaagtactctctctattcattttgaaattttgaaagagccaaatttgaaagagcggcatcagcacgcgctctcaattttccccatttcccattctaaccctccttattttctttaacagtttccttagttttattggttttaccattctgcccctacgcacttccctcttttttatggtcattcataaaatttgacttatgaaatatacgacgtgtcgtttatgatgaattaaacaatccgcgattttttttttttttttttt

SEQ ID NO: 272457 - DNA, 638 bp, Cannabis indica
gatagtgacatattcagcttgtgtttaacgagtggtaaacaggtactttataaagtaccagagttgtgtctgtaatattgtgtaaatgtgtacgcaaattaatttgagattgaattgatgaacattaccggttattattttattaactattcttgttgagtctctgtgactcactggtgctttatggtgtaggtaaggggaaagcaaaggttgagcagccatgagttcgaggtcgtagcagcaatgtacatatcatccgctgtggcacggaccagtgaacaggatgctctattttgaatgtattttgggaatacaaagtttatattgtaaaaacactattaaaccagtttgtaaatgttttgaaaacagggggaccccatagttaatattacttatcttttatcataaagcaattttttatgtttgtttttaattataaaaaaaaaactaaattaatccacacttttggtataattatatagtatataaataagaattttataaaaaaaaacacatgtggcgtccctgttggacagggcgttacactaattattccccgacaattatatattgttgggtatacttactattcccaacagtttaaaatcgatgagattcactattttttttttaaaaaa

SEQ ID NO: 272458 - DNA, 745 bp, Cannabis indica
atactcacaatattcgaagcaagcatacactcggatatgatcataactaattggtgattgacaaccaaatcaaagaacaattttaccaacgaaactatcttggtggatatattcaagtgaatgtggatgagtagaatgatgaataaatagtatgatcatgatcaagttttttgaatgttataagggttaccacataatgcattttatatttaagtaaaatttgcaaatgtgtgtctgtatattggttgaagtggtggaagccgttgtgataatcgctacatttgaaaatgagacaattatcgaaataattacaatggcaagtgttgcaaatatattcttgctgcaaagacaagataaaagtgtgggaaggatgattaaagtgatgagacaactattcaggcaacgataaactataatattaaaagggtaaatattattttggactctgtgttttgtaaaagttaccaattggactcctggttttgttaaatgataaaatgaaccttgtatttttcaaaattatacaaataggaccctgaacttaaagggtaaatactattttggaccctgtattttgtaaaagttatcaactggaccctctgttttgctaaatgacaaaatagaccatttattttctaaaattttacaaataggaccctgagctcaattttcaacaaatttatttttaattataactaactttaagacaatttttaacatgaacaaatacagaaaatgcaactca

SEQ ID NO: 272459 - DNA, 637 bp, Cannabis indica
gtgccttgtggtctattcttcaaatcattggccaattgccccaattgaacttcaagattccgaagagatgctgcttggctttgaattacagcgtcattcttggccatataatctctcattaagctctccaaagaactagtttgagagccttgaggttggtgaggttgttgaggtcttggttgttgagaaaaacccggtggaaatgattgctttccttgtgcttgtgctccacttgaacttgccccttgacctccccatgaaaaattcagatgatgtttccataccgtattgtaggagtttgagtatggattgttgctacggttgaagttttgattacccacatagcaaaccaaagctggatttgaagggcaattttcaaaagtatgcccatcaccacaatacacacaagaaatttctgccctttgaatggcagcggctggttgtacacttcctcgcatattcatattcctcaaaatgttggtcattgaggccatttgagcggtgagaacggtcaaagcatctacttcaagaacacccgctacttttcgacttgtaggagctctattagttgaccattgatagttgttgctagctatcctttccaaaatctcaaaagcttcattgtaagacttggaaa

SEQ ID NO: 272460 - DNA, 5636 bp, Cannabis indica
ttttaacatttttaagacattagagaaaatttattagtttgttctgttattaattaatatgttttaaaaaattgattattattttttaaatatcttaattaaaaaatatatatatataaaaaatgtgatattttaattatgagaaatgctaaatgaaaaatatagatatagatttatatgtattgattgatattttatgtatgtatataaatgaaatttatgattaattatatttgatttaagttttaatatcttttattaaatttattttttttctaactttttttaaaatattatatagaaaaattattaaaataatagtaaaatatcaatttgtaaatttattctttttatataaaaaaattattaaaataatagtaaaatatcaatttatatagatttatgttttaacaaaatattaaaattgagagaattaaggagagaagagaaaaataattttggagtgactttaggctgtcatgtcaccgcctcatacttctcctttatatagatagatagatatagattatttaatattaaatattaataatttaacatttgtgcatatatcaaaatgtttaattattattcataatcagaaatatctttatagatttttcaaggcataaaccctaataaaagtggcggtacgattgagacaaactcacaagatgacaatgagaaaaataagatgtgaaatggaatgagatcatccaccatcactgtgaatagagagaatgacaatggaaattatctctaggaatttcaattttgatctatcgccgcctgattccttgtgcttcctctctggccacgtctcaccagccttttcttggggtcggtgtggtcatggttggaggggtttgtccctgatctcactagattttgatcgtcagagatccatttatctatggtctcgtatgtgcattttgttattttatgtaattatttttattaatttttttttattttgattatggttttaataatgttgttgcaacaccacaatattagattaataaggttaattgttattttgagggaggttgtttgtgaactttattgggtagggttgttaatgtttcatcaatttactcaaattgcatttgcgaggtagccatgaactcttttcttaggcatttgatttgggagattttcaaatttttatttggttttgtgtctaacgatcttccactctcttgtgtggatcgtattgtgcatggttggtcatgtgttaattttcatttattcgcgattgaataatgggtttgttattgcctaacttttgtctttgacggatagccatggataggtataaatcatcaaatgtgcatttagtttgaaaatctagcatatttcacacttgttggaagcttcataacttgttgcttattaaacctttagttggaatttctgctaggattttttttattattattattgtaaatgacttgtttagtctattgtaaataattttgtttaataagtattaactggatgtaatggatattatctgattaatttatcaatggatattttcattctcaaaaataaaataagaaagaggatgataatgagaaaaatcaaatcaaactttaactaaagaaatgagaaaaaatttgagtaaaatttttagagacaataatcgatgcttctcatcccaattttgaccaaaaaaaaaaagtgaatacgtgtcataatattatttgattacaaaggcccctacttgtgggtttctttttttttggtcttgcaaagaaaaattccatacatatatataggttgcgatggttttgaggataccaaccatggctcgtcaagtcatcattgaaggagactcatcttccatcgagcagtttttctttttcaagtcatgcatccggggcgggtcaaacccaacccgcgaaaattaatgtaaggcgggacataaaccagataagtggcctgcttttttcgggtcggagaatatccgaatttttttgctacctctatcttatctatccttaaatatagaattttctttttctggaatagtaaatattatcctcgtttggtgagaattctttgtctattaccattacaagggaatcttgtttggcaactaagtaatggcccatcttgggatctcgactggaatgagtaattgctcaattaagttcggtattgagctttgtccatgtaacaaattataaaatttctattttctcaagaaaaaaaaaaacacgtacacagcttctgccacatacttatttatcagcaaacacccatatatatatatttatatatatcatcgtgaattggcttttaatttctattaaaagaataaaaaaaaattggatgtttcgctagggaacattgaagaaggcccagagaggcttgagtttcagaggttttaaccaaaaacctatcccaacctaaactagatttcatgaaattcaaaccaggcgcaatggtactaaaattttgaacatgaaaaaattaccattgtaaatttcatatgggtaagaaaaattaagaggaaaaaaaaataactaagacactcaactcaaacaaagcactaaatcatgtcggaaacttacataacatgcctatcctcattaaatcatcatttatgatgggggcaataacaatacagaaaaatacaagcgccacaatacaaggttataatcactcggctacatatggtcagacctgctatcatcctcattaattccatctcctgcatgcctgaaaccaataacaatgccttattattacaattatcttgaagatgcagttaattaaccaaaacctaatctgtacccaaaatcggtttcaaccatgacataattctacgaaaagggaatcaacatttcacaaaaattggtccccgtaatattacggatgacaaaacaagtttaaaacctaccgccaagacgtagttagatttcgagcttttctatctagctgaaggttttccagggcagatgatgctcgaattacttcctctggaagctcatcactgtcatatctccaattatactcatctttcctgtaacttgacatggaagacccacctctcctatctgaatgctagaaggcatcagaaaaacaatggcaaccatacacgtaaccaaacgttaagctaacataagttttttacttaccagatgcctgggaagcaggaagagacctagagtggaaatatcaccaaactaaaacatctcagttacaagtggaaaagaaaaattgaataccataaagagaattgatttccaaaagaaaatgtaaaaaaacataagaaataagaaaaacaatggttggcacaacaccttcctagtggagggaggcccccggcaacagatgaagaggaaggtcttcgactacttcgagagtctagactggatacagactctgtttctgaagtggttagctttcttccagtaccccttgcttgagacaaattctgtatgaacattttagaatcagagatgatagtcagaatataaggcaaggcaccatttgcagctaagctacagatgtgcaaaaaagggtccatatatttactcaaattttcaagatcagaatgttattttaacttctatatgaaaatacttcatgcatcgctacttattggccaatccagcttaaattccatagtgacaccatggtggtagctaatttattacatgtcatcataaaccgtgtacagtgtttgtacacataaaatgctctatgtctaactttaatcatggaagcctctccccattaagtatatttggctttaagtaataaatacaatgcaattgaatattttgccttcataaagttcccagaaaatcattatattctgatccacgttagagaagaaattttcatctctagttagttttaacattccctgcgacaatgtttaaaaattgcccaccaaattgtgctacacaaagttatataactcgactaaattttccgtgcttggtttactctcatataacctctgtttgagtgtttcatccctctcaatcatgtgtatcattctcattctacgacaggttgagaaagttctacaacaataatttaggcagaataagtatgatcttatataagttgtgaacttgaagcttactgttgtgacacatactttggtttgagaaacataagaccaatcatatattgtttcctagatgactagatcaatataaaacaataggcctttaaaactaattctaaagcaaagttaagttctctaacactaacttccttataaaacttgaatatacacaaatatagatctacaatacttctgtatagagagttaatgtcaaacctcaaatttcaagaatccttcaagcacatccaaaagcaaaggaccactatcaccgtttctgttaagatcatacccattcttgctactaaattctttcaattcggttttccagaaatctttttgctgcaagttgtaaaataaatcaccattcattagtaaaggatacagaacaattcaaaaatctcttcaatgatcttgcaatgcataaaaggattttacttgattaccaaattacactcgggaaggtaaactttcatcgtgtgatttagttgtgcccattctaagtattcacatatcaacgcagtcagcaacctccctgcaattcggaaatcgtagataaattaaatatgagattacaaatttcacaacacctgaaacccaaacaagctaaaatgctaggcacgtcataatttctacagacaacgtttaccatctcataggtaaaaattatatcaattaggaagtagcttaagtgaactaaggatgtttagtcagccattagcaaatgaaaaagacatttaatcagcaaaaaatggtcacgagaacccataacctcacaacaagcacctcactccgattctgttttgctatccagatatattattcaaaagcgaattttaacctgtacggttgaacccatttcaacaactccatggaccaatcaagtggataaaaccccaccaacagagctgaaatgacagcccactaaacaaaagctccttaccaaccaatttatgaaagagatggaaaggaacctgaaggtgacgcgtgaagttgtttagcacgatcattacagctcccaagtaaagcaggaggcacaccatcttccttctcgacaacacgatcctcttcttcaattgcctcaaacacacttgctctcaactcagcctagaaatatttgaaaagaatctcaccataaatacaatataatccaaatattttcaagtttcaaatcacaacctaatttttcttaattgagattcacattaacagaactaagctttcggatagaaattaaaacaaaataaaacatttaggtgtttcagtttactttgattccattttataagcactgaattaactccaaatcacaaaaaccaaaacaactaaaaccctaaaacaaaattagtaaatatacgtatcaagcatactacatcgctagctaacacaaaatagtatttttcatatttgcagtttaaaatcgggcgcaagcaaattactgtgaagatctaaataaaaaatccggcagcaaaagaatgacatgaacagacataaaaaaaaaaaaaaaaaaaaaaaaacaaaaaaaaaaacgtaaaaagaatagagtacg

SEQ ID NO: 272461 - DNA, 578 bp, Cannabis indica
ttggttaaacctactaacaactatcaaaataagcttatttcaacatttctaaacataatttatcctctaaaaataataacaaacaccagcaacaactaaattctcaacccatgcaaaatttcactttcttaaaaaaaacaagagaataagagagagttgctaaagactttaccttggtttgggaaacacttagagctgctggatatcactgaattgaagaagaaaaatcaagaaccctagctggtctagggggttcgaaggagagagagcttgaaagagagagggatgagtgttatgtccaacttttctatttttgtaaaaatgaagaataaagtaggttttatttcattaatatcagcttaacatttaattcaaaaatctgatttaaaacttaattaaaattcatataaaacaaaattctaataggcaaaagcccttcccacactataagtcattaaaggtcacttaggggtattctagacaactctaaaatttcgactattcccgatatttctaatgtctaactatattgtcccgctatactaaaaatactaggatgtgattctaatagtcaaaca

SEQ ID NO: 272462 - DNA, 721 bp, Cannabis indica
atttttacgtttaaagagtttttttttttttacatttttacggtttttcataaaaacaacaagaaaactacagaaaagtaacatgaaaataacatctaaataacatcaaaacaacaacaaaaaataatatacaaataacaaaaaatcaacaacaaattaacaagagtacaacataaaaagactgtattttccgtaaataaaataaaaaaaatcgtaaaaaatatttaaaattccgtaaaacattatttttgtaatttttttgttgtgtttgtgtatttgtaaaataatcccgaaaaaaaggtctaattttttggctcaatgccctcatgtcacacatatctattgttactagtaatgagcgttgctatttggcactagtggtacccaacaccttttataggtgacgcctaacagtttgttagcgatatttcctaaaagctattttcttaaattatatagaacgagatacttaattacagcaataatagtataacaccaaggaaaatattaggtagtggccttttaacaattctctactagtaatacatgtgcacatacattttacctcaaagtactacacacatttatgtggtaaatttatcccatcaattatataggggctcactcaattaattaaggaaattatattgtatacctattttattttatttattttaatattaacctttattttcatatttttttaaatatacccactttt

SEQ ID NO: 272463 - DNA, 1344 bp, Cannabis indica
aaatctatgtgtgtgtgggtttggttctgggtttctagcttggaatcgagcaagttctcaaagagaacttgctctgctagggtttcgaatcagagaggctgtgtgtgatttgtgtttggtgtctagggtttctagactcttctactgagtctttaaaccaaagctttgaacgacacagaatttggtgtcgtgtgctttacacggtgccgttttagtctatacttaataataggctaagaaaggtcgattttgaccttgatactgatattaaagtatcttgttggtgtagggcaatttggtaaaaatcctacacaatcataacaaatgatcgcaccataaaccacgaggtcaataaaaatatgagaattcccccaatctaaacatgaacaaggatagtcatgctactagcacaaacatgctttgagccaaatgagatgaccctaatgtcccataaaaaaataagactaaaattcctgctatgaataaataaagtccaactgccatagtaatagcaaggtggtgtagcaacaccattatttaaaataaaaatatacataaaaaataaaacataacaaataaaaatagcacactaagaatattaacaccgatgaagatccaatccattactaatgagcaattcatctccgagacatacctctaaaggaagaagaacgagaaaaaaagaacactcaagcagaatgatatcaacaacctgattaacaaaatcgagaacagtgttaatacattagatattatgtgtaattaaactagatatttttctactatattgaaagttaataatattaaagtaattatttatttggaattacatattctagtatttattagaggaattgggagatttgtaattatgtcatcactgtataaaggttgtttttttttttttatacatgtgtgcaataaattttttcaactctatttttagtattgaatatttattttaaaattttacaagaggtttattattactacaatgaatacagttaatgaaaaaaatgagattaaaatgttccacacgatcaccgtattagggacaacttgtattgatacatatcaaaaagaaaaattataataaatacctaaaatcatagcactaagtagataaatatcttcattttaaaatttgtaaaataattatccttttatactatttattacttaaattatcttttatcacataaaattttcatgtttttcatatatttaatgtttaatctatatacatataaatatatattttttaagaattagaagcatatcacttaaatcttatgatatatctatattaattttgttaaaattatttttattttaaagttatgt

SEQ ID NO: 272464 - DNA, 724 bp, Cannabis indica
tgtaaaaatgaaaaaaccccaataaataaattaaggaaaggaaaaaggtattccctataaaaatgaggagaacctttgtctttattttttccctaatttgtgtgggttccactactttctccctttccaaaagggaaatttgaattattatgaatgttttaatacaaaattggtttggagaacatgtagtgtagataatttttaaaataggatcaattttcaaaaaatccccaaaatagccttgtcaaaatcccaatctctttctctctccactcaaactctctcacggttctctttccttcatgcccgatcccagccgcctctcacactccgactcgcccgaaccccagccacctcacacaaccaccgcaccgtcgcccagtcgactccgaccgagacccacccactatccgactgtcatcaccgccacatggaggaggagacccacccaggataaccgcaccatatctaaggtatttttttaactcttttaaaatttcagatctgagaaaccattggggaagaagggggtccgacgggttgggtccgatgggtccgacgggtggggtccgatggtcccgatgcatgggtccgatggtccgatgggttggggtccgatggtcacgttgggttgggtccgatggtccgatggtccgattcgtgcggtccgattagaccgatggggtccgatggctaccatattgggccaatcggacccgagggg

SEQ ID NO: 272465 - DNA, 1000 bp, Cannabis indica
cagggttgttgcagcctttaaccctacctgagtggaagtgagaagatatcacaatggactttgtggttggattacatagaaccacaggattatttgattcaatttgggtagtggtggaccgatttacgaagtctgctcactttttaccagttaaaacaaccttttcagtggatcaatacgcagatttgtacgtcaaggaaatagtaaggttgcatggtgtgccaaaatccatagtttcagatagagatccgaagtttacttcgaagttttggcaaagtttacaacaggctatgggtaccaaactgaagttcagtacagctttccatcctcagacagatggacagtccgaaaggacgattcagatactggaagatatgttacgagcctgtgttatggattttgaaggctcttggagtaagtatctaccgttgatagagttctcgtacaataatagctatcaaagtacgatagggatggctccctatgaactattatatggcagaaagtgtaggtctcccattcactgggatgagacaagggagaggaaatatctaggtccagaatcagtgaaatagactaatgaagcaattgagaagattaaagccagaatgcatgcttcctagagcaggaaaaagagatatgaagatccgaaacgcagagatgtagaatttcaagtaggggatcatgtgttcctacgggtgtctcctatgaaggggattaagcgttttgggtaaaggggcaagttatgccctagatttattggatcttttgagattctcgagaaagtttgacaagtggcatatctattagctttgcctccagctctttcagcagttcacaacgttttccatgtctgatgttgagaaaatacgtttcagaccctgctcgtgcttaattacgaaaatcttgagctgcaaccagatatgtcttatgaaggacaaccggttcaaatccttgacaaaaaggataaggttcttcggaacaagaccatagctctggt

SEQ ID NO: 272466 - DNA, 897 bp, Cannabis indica
tcatgtcgagggggtggcaggtctggaagctcatatttctttaacttttgtaagagcaatgctactttcctcttggcctgcatcagttcaatagtataagtgcgtatttgatcgttgtaaaagttaatgagattggattggaagtcaagaaaacaggatcaacacactttattaagaccaataaaagttgtaaatttctatataaaaacagtttaacaactataacaataagcaaggaataaaatatgtttatgatcagaaaagtaaacatattcaacaaactggccacctccttggtaagtggtaggattttaagcacatggaaaagaaaaatgccaaccatcataattctgttcacatctccttttggctttatacaaaaaaattcagattattagttaagcatagtttttggcatgaaacagcatctatatgccaaagatctccaacttttgaatcattgccttttcttctgaacataataaattgcaccatctggtgcagtattctattaccataaaacagatctaaaatatcaagtcaatcaaccaagagagaggtagctcaaacgatcaagcttgtggtttgctctgagatttgaaatccttccagatattattattatcatacagcaattactatcttaacaacccagtttaatagaaacaaaagtaagttagcaaagaacacagtattgtcattgcaactagagtaagaaaaagctccaaacaatcatgtatcagcaataattaaaggccaaaaaccataccctttaaaggttgtaaacgtgcctctcactttcagtcatgagcttcttctgaatttttttggcttcttctaacctccctcaagtttaccgctctcttttctatcctctgctcaccttgcttcgcatgc

SEQ ID NO: 272467 - DNA, 2118 bp, Cannabis indica
gaaaaccaagttacatatgtaaaattgcaatgaagtaaactgatatttacctaatctaacaaagaaacaagaaaatgttcaatctatcttgttttgtattcattctcctcttttttcttttgattatggattattaacaatacatattaccattataattaaaacttcctgcagatgaataatgaatttctcctctttaaaaagaaaacgttatattgttgattgataatttagtttgtatggagataattatttccaaacaatatcgcctaggaatttaagagcaggaacacctctgatctctacatcaactagtggtgcctggatcaatgtcaaattggtgagctctggatcactccttatcatatcaagagcacgcatctgatcctgaaaatggttcaaaaagaaaataaaacagtaattgattttcaagtatttccacccttaatttcatcctagactacgtttggaaaagtgggataggattagatcaattgttttcatgtaatttgttgtggaattggaaggagtaattcaaacaaatcaatcctaacaacctaattgatctaagcatgggataacttaagcttaatgaaaatcttaagataaatgttatcctatccctatccgatctcgatctctatatttatcaactctttcagtcttatatttactggtctaatctacttttcaaaggtacgcccaatgtaattattacgcgaaactagagcaccaaccccaccaaaatctcttttgttccatcacaagatcattctactcatggaaaaaatgcagtaaaataatacccacgaaagcaattacagacatagaacattattaatcaatacctttcttttaatggcacagaacttgcaatctgaagcagatgggggaagaatctgattaacaatcaaccttttcacaggaacatcttccttcattaaagaggcatgcaacctagatgattcactaactgccatcacctgtggttcaaatgcagacaaacatatcattcaaattcaaaactctcaagagtagcacgtagcaagcttttcgagcatgattttttctggtgagcctacgggaggagagaaggaaaagaatatagaaacttttttaggtccttgattttaacagataaagttatgtttgtcgatgacaaattatgttcattagtttcagcgtatacttcagaaaaagatgctatatatatcagcaagcaagcaaaatacaccatttaccaaatatctaaagattttaccgtgggaattgttacaataacaaattcggttgaatcagtgtcccgaaatagctcgcgcactttgatcatcctctcccttaatcgctccagtttgtcagtctgcaccatagataacctcagatagtcgataaactcgtgtaaaagaaaacataacggcagctaagaacggcaactggcttactgaatcctgcttgggctgttcttggccgaaaacagatttaatggctgaggtggctgaagatattttttgtttaagctgtaacagacaatataacaataaaggatagaagttagtgcaatttcaagatgttcttctgcattggtaaaacaagagaacctttctaaaagggccagagcacaaacaatgagaaaaaggaaaaatatataatagtatgaagaaaaataagagagaggaagagaagtagacattcaaaccttcaatagcttgcctattgatcggtctaagaaatctggcaaggacaaaagtcgcaatgtgtgaccctgtttaagacaagtcatcaagttaaaaatctgaaagttcaagcaacaaggacagttcatgactaaatacttaccgtaggcgcagtatcaaaaactattcgagtaaacatgctgtattctggtgaatcaagaaattgtatcacctggaaagagacttgaacaattaagaaagtgggaaaacatacaaatttataaatatttaaagatgtgatagttgcaagcgaaactaggggagatatttctacctttgagattgcaatagcttcatccagaccaggaggaggtgtatctagcagttccccaagttttaactctcctaacttcctcaacaaaaaacacataacaattaaaaagat

SEQ ID NO: 272468 - DNA, 721 bp, Cannabis indica
tttttcatcttcattagctcattaaaagatccaagatggtacttcaggtcagttgtaccatcatttggtgtcatacccgactcctcaaaattgggtggaagtagttcaacttgaatctcccttaagaatgaggattcttcatcaaactcatcatcatccaagttttccttcaaggcggtagctatttttagacatagatcttgcatctccacttccagttccttcatctttttgctcatcctttctcgagagttagcgagtggagcttggatcctcgttatggtttgcatagggctaggatgaggtactactcttgtcctatcatcgtgtaactttccaccaaggctaaaggataaggctttatgtttgctttgctcttgggatagggcataggtgttaggattttatgtcctaaataaaatctattttaatgtaatcagatttactaattaataaaagatcagaaattattttatgttgcatggttcacatgattatatatgtaatatataaattctattaaatccagaacctatagttattcatgattatagtgttgtcaacacaatggaatataatcatgattatatatttcaaagtttaagtcccataatttatcagtacactagatttatattgacatgataatcagcgataaaatttacttacaccttggataagtgttatgttttttccaggacattggcaaagtatgctagta

SEQ ID NO: 272469 - DNA, 872 bp, Cannabis indica
gaagcgtgtgagtgaggacaaagcacgctgaaaatattcgtgttggtctgtagggtcagtcatcagtccatgaagcagtcagagtgacgaactcgtgtataagagccattagtccgtgggtgtaaggacccaatggaggcttgaagcggggacgttacatttcgaccctaaatcgaacatctactcacacataacaaacattaatcatacaatttattcctttgacaacattgttgatggtgaagccgtagttgatggagaagtcattgggtccatgggtccttgggtctgtggtcatggtggtcgtggaaatctaagcctcaatctctcttttttgctttgaatgccatcgtgcagaagtttctcttccaacaaattctaacactgtttctgtagaactttctactgtgtcgagcttctcttgattctttaactgttcgagtgatgacttttgaggaactttagcgtttagttcttgatgttgtcaaagctctctctaaaaaacattgatactctatttgtctttagatttggcatctttatttgtgattgtttctttatttcatgttctttttactctctatttgctttctgtttaaacatatttctgttcaatttaaagagttttgatgtctgtttaaacatctcgataacaatatagtatttaattaattaacttggtaatcataaaaatgaaattcacattatatattttattgtattctattctatttttatttttattcgcattttttactattattcttgtatttttatttttctcaaccaaacactatgtctaagagtctttaatttttttctaagtatatagtttgactcctctttttcttcttcttctttttgatttttaa

SEQ ID NO: 272470 - DNA, 3920 bp, Cannabis indica
gacccaccgattttatcaggggcgctcggcctgctttggacaacgtcttagccttccaaccctccaactttgctgtgagattatcaagaatgaagttgaaatctgcatccttttggcttgaacggaaaaggggcaagcctaaatatttgatgcatccttcaggagattcaatcccaagggtctccttgatctctctcctcattcccatgggggtgttcttactgaaaaatatagaagtctttagcctactaacctgttggccagaccaagaacagaaattctcaaggcatctccagaaaccattgacttcatttacattagctttgcccaccagaattaagtcatccgcaaagaagatatgggaaagagtcggaccacccctacttagcttaataccttgaatgtttcccagggcaagagcttcatgtagtaaccgggatagaacatccgccgcccatataaacaggtagggtgagagggggtcgccttgccgtaagccacaggaagggcttatctttccaacctgacccccattgagacaaatgttgagagtagtggtggaaatgcattgagatatccaattacgcaacttcaaaggtgtccctaagcattccatcacatggtcaataaatctccagctcatcctatcataagctttgacaagatcgattttgattgcaaatagaccttccttgcctttctttccattgaaagagtgtattatctcttgaactatgacattgttatcatggatgtttcttcccgaaacaaacgcagcttgagtaggacaaataagcgaaggtaacaaaggtttaattctattagccaggatcttagaaataaccttgtataccacaatgcaaaaggagatgggtctaaactggttagttcttttcgggttctagacctttggaatgagaaccacattggttgagttgatacctctatgcatattcccattagtgaaaaagtaaatgttgtattaaatttagttttatattgccaaatttatataactttttgacacactattggaacaaattttttgttaaataagccatattttagtttttcacattaaagatgcttttattcaatgagttttatatataataaaacaatatatgtactagctagagatatacctgaagaaacaggacataaattactaactcaacatcactttccatgattgaaaagcataacctaaagaaaagaaaacaatgaagactcaaactaagcaccaaatctccggcctcattaaaatataaaaaccagacaatgtttgtgcatgcataccgaaggaaaattatcaaaattttgaacaattgcggctaggccaaagactccttggtgcgcgtctagagcaacatttacaaaaatactggtgatacaacctatccacttactaagaactttagagattatgattaaaaacaatcattatctaacaatttttttatatacattgttatccttatttctgaaaagaagacacgtggcatgttcaattcaaagttaattatttagggtctgcacaatagcaacaagacaatagtccaagacaacttggaaggatgggcctcaagaccatccgagatatcagatagttacgtatggactcgaatatctccgaattcggaagggcgcctcgcctaagcagtaaggatcctccgaatgagcatttgggatacatttggaagggctttccaagagacgctcagaagccaagctaaagctgacgtggcgatcctttgacaccaaattccacagtatcaaggggttgtcccctgtgtcagatcctaagagtgtgcgtaccacaacgggagcatcccttttatcctatgacaactactcagacacaacagtatgcaaaggaagcacacgcacaacacatgtcaacctcaagtggtcccctaacgcacaaaaaatagtagccactacaagaaatacgacttttgtcgtgaattgtgatgacaaaagctagaagtaaactgccaaaaagtgcgaacaattgccaatagttcatagaatttttgtcggcataatgatgacttttatcggggaaaatatgcgccagtaaaaggtaagaaaaggagcgttttttgctacgtgaaaattaggtttggcagaaaaacttttgccagcacaattacacaccgacaaaagtatcaaaaaattgttctaatggaaaagttagacttttctcgacacatatatagaagtcccaaaaaaaaggagaaaatttctcacgtgttatttaggttggtgggaaaccttttgccgtagcataattgcgctgacaaaagtttagctaaaacccagtgttttatattaggttaaattggaaaggctttgccagcgcataataaacttttgttgatgcaattaaatgcaccagcaaaagtcatttaaataaaaccggtcgaagccccttcctcttcgccactttcttctttcttctgcttcttcttcattcttcttccaccgcacaaccaccaccaaatatcaccgcatcacagcaccaccaccaccaccatcttttctcccttttctctctatctatcttaatttcctctctcccacccgcaccacctcacccccaccgtcagcaccaccgtagccccaccacaccccatctcaggcggtaattttaacttttttattattatttatttgtatttttatttaaatgtggatataaatttagatatatttgtgtataaatatatataattaaactctactttttatcatttattttattttacatttgtttatatatgtgtgtgtatatgtgtaaatatatgtatatatctatgtatgtacattgttaacctaaattttgaccacctgacgtggcatgtccacgtaagccaaaaatagagtacaagtagagtacagccctgccagaagcagaataaggtttccatgcaagatatggcaaaaccgtgaagcatcaactagatggtgtaaggcgagccctcaaagggctgtaccaacatccttggccgactaagagaagcctatagaccagccagggtgagcctatgggacggctaggatttgtacacaagctggccgcccaaaaggtgacttcagaccaaggagcctcccttcgactaaggaaacttgacctccacaggaaaacggtgtacaaagctatcctcaactagcaaaaggctggcatccccttggtagagctatagtgacctgtaggatcctggcaaacacataacctgccaagttttggcaagccttaggtggccaaagcttatcttgcaggtcttgggcgaccagacctcaccctgcaggccttgagcggccatgattaacctggcaggacttcatgcatagcccaaaatgtggacaagaagtcatgggcgacgaattgggccctataagcccaacagaatggctaaataatatcaagatttaagggcacattagtcttttgtaattatctgacaaactatgaaaatatctttggatttaaactgtaatctagggttttaggcttcctatataaaggccttaaccttagcctacaaaagctaaatcactaagcctccaaatcactctaagtcagaaaccctagcctctctttctctctctctgctacacgcccaagagggcttcttctcttcaactctctcacatgcctctaaggcaatatcactctcatttaaagatctgcctattgattcatgatttgtatccttatagatagctctatcagatctcacctataatgatctgaatagtattatctttaggtatcaatagagccaaaaggggagtaggccagggtcgaacctcaataacaaatctgtgtgtttattacttattaattctatttgtgtaatacatggtaagcattaaatctatatgatccttctgtcagttgatcactttttgag

SEQ ID NO: 272471 - DNA, 3611 bp, Cannabis indica
tttacagggccttaaaccataatattcaaacttgatgagagacattctaaaacatctatcggggatttaaaatcaaagctaaggataaccctatcgataaataggatgctaacaccttaaataacataaaaacagggaaaactagggtttgggaaaaaccccagttcctaggtaccaaccggtcgaccggttctaatggtctcccaaaaccggtcgactggttttgtgctgggaaccctaaaatcgatccctttaattcaaatcaaccccaaatctttccaaaacttccagaatacctgtatgcactataatgaagcatattcaagcagaagaatacaataaataacacaaaaactcaagatgccattagaggtcaaggtttgagtacaaaaactcaaaccttgctacaatctcaataccacaaccaaaatccacacaaataacttcaagcaaactccataattctaactaaaacaacaattataaccacagctcttaaattcctacaatcttacctcaaaacctagcttaagcttaagaattactaaaaagagaaaggctagaacacaataccttaaacacaagctccaacacccttgatttctcctgaattcagctatgaaaatctaaactttggctgagaatgagtgaggttcgaaagagagagagagagagaggagttaaaaatgaatgaattttctaggtttttctttttattttccttttaactttaccctcaatcaaacataacttaatcaatatataatcagccccccaaatccactacaagacaaataaacacttaaggaaaaagacctatttaccctttagataaattaaaatgagtaaaactcccaaaggtaaactagtcattttccaaaccccaaaaattccaacacctccaatacccaacaataacaccccaaaaataatattctaaagatataaacgcaactctctaaaggcccaacgtcgttttccacagcttctgaacacaaacacagaaattgagatatttacgtaaatagcataataaacatatatgaacttaaatatatttccacaatatgcattttgtaaatattaattaaatctcatacctaaaccctacttatcaaatattccaaagtactaattataagcggtctttacaggtttactctgtacctcgagtaaccctaagtgatgtaccacatacacaccgtacctatccgtactagtgttggtaacactgtactgtactctttaaacaccgcacactataccaatgcactcagtactgctactatactagtgttgtatgtatacaaattacaaaatagcatgtatatatcacatataaaacatgctctatgctattcttacatcgtttctgaattcaagtgtgctggccgacctgaacagaaaattgcaagctggatggatgccttatgtcacaatcacgtaaaaggataaataacacgccaaaacctaatctgggaacctaaactcacaactacaagtttcgctatcgataactaacaaagcaatgtcctaattattgagggaacaaccaactaaggctttaaaaataacacgaattgataaaatagatttttgggaatcctgcccctgatctaattaaccaatttgcactaagtaacccaaacaagtctaaaacttgccaattcgtgtctaaactataccaaaccttacagaacacatataaaaacctcaaactttccaagcaataacaataagaaaaacacccaaaatccaaaagtaccattaatgactcaagtttgagttttcaaacttaaacttgctcattttccactcaaatcatcaaatccagctacaagcaatcaatttcaacttaaactgaacttagaaactgaaccacaatcaattctaaccctaatagccactaactctcaaaattggatgccataaccaactagaacttagagaattctagaagtaagagtttctagggcttaccttggttagaacttcctcaaatctttgatgaaaatctagaaattagatgaaaaccacaagtgtttcccctagttttgcgtcagtcgagagagagaaggatataacttaagaatattgtttttggttctaaatgtcctttgtcttctagctattaccaattaatcaataaatccaatttcttttgcaaataaatagatgaacacaattctacaaacatccactaaaggaaaaatctcaccaaggtagcaaaatttctttactttgctaggtattcgataggaactacactgagagtataagaatctgttgtactagctagcatagttacaaaatccatgtttgcattttaatcacgtggtacttgttagatgagtagtacttaagattgtataatatgtctttatctttgcataagtatgctatcatgtttgatcctcgagcttgatactcccttagactttgattaacaactagttttgaatcaccataaatctcgagtgattcattcttcattgctagtgttaatcgtagtcctactaggagtacctcatactctgcttctttgtttattgtagtgaactcaaaccgcaaagcactgtgagtttgaaaaccctctggagttactaagatgagttctacaccagaatcgtgctcattggaagatccatctacataaattttcagggaaggtccagtgtcctcctgagtagtagtctcaggcgcgtggacctagtcttcacacaccatggggtcatcttctttgaggctagtgcattcagcaatgaagtctgctaatgcatgtcctgtgattgctatgcgaggcttgtaagtgatctcaaactagcctagtttaactacccacttaagtaggcgccctgatacttctgacttcattaaaacttgcctaactagttggtcagttaacaccttaatcgtgtgagcttggaagtatggtcttatttttttggaggccagtaccaagtagtaggctagcttctcaataaggggataccttaacttagctccaatgagacgcttattgatgtagaatatcgagtgttgtatcccttcttcttcatgcacaagagcagcactgttatatgcttgatgatagcgaaatagatgatcaagtcttcaccatctattggtttggataggatgggaggcctggataggtgatgtttgagagcttggaaggcttgctcgcattcattagtgttgggattttaggccctaaataaaacccatttcaatgtaatcttatttacaatcaatagaacattaaaagtcatttaagtttacatattattttcatctttatagtttaatatacaatttctgataaatttagaacatgtagtcattcataattatagtgatttcttcacagcggaaagtaattttgattatatgcttcaaagtttcagtcccgtgatttataagtgcactggatttacactgacgtgataatcaacgataaagttttacttacacttggataagtggtatgacctttctagggcattggtaaagtatactagtgttagatgtatggagtatacatcagactggaccgatattgaacttggataagatagcataaacttgctgttatatctttctaagtcaat

SEQ ID NO: 272472 - DNA, 1743 bp, Cannabis indica
atatataaatcccttcaactaacattcaagttaaaagtaatacatcatcaaaattttatcatattttatttcaaaagtaaaggcaaaataattatttttggctaaaaaaaagtcatgttcactgttttttttttttaaaagaaacaataagcttttatgtgctaccatcgttagtcatctccaagtttcaaattctacaaattttgaaagttaaattgatacgctacattaaatcgtattatattgtataacttaagtattttatattatacttttatataatattatgttaaattttaatttatataaaaatattattcatacatatgtataaatacgccaatatcaaatgtattatataaaaatattacatatagtacaattattcgctgtaatataataaaacacaattaaatataccaaacaactattttagatctgagtaaaaagtgtgagcaaaacaataaatcatacataaaggttaatttggtagagcatataagagtggtattgtattaaataacaaataacatcgtagttggataaaatattgtattgtattaattattatgattataaattttaatacaacgtgagtcatattatttaatacataacaaatggcgcgtattagcttttattataatatttacaaaaggtctgggccaaactcggccttgaccccagccctagaccccggaccccaaaccttaatccgaacttggacccagacacgaacctagacccagaccggaacccgcacctcggacccaaacctgaacccgaactcataccccaagcttggaccccagacccgaaccttgaacccagccccggatctagacccactccttgaccccaaacaaaaatttgaactaggaccacggacccctgaatcgaaccccgaccctgacctcgacccctgacctcgaccccgacctccaccctggacccaaaccccgaaccgagacctgaaccgcagactcgaacaaggatccaaacctcaaactctaactaggactcaaacccgaacccagactagaactggaactacggtataggttcggggttcgaagtcgggcccgactagacctgggttcgaagccgagctaatcgaaattaggtttgggtccggggtctaggtcttgatttgggtctagggtcgaggtttgggttcgggttcgggttcaggtcggggccccgacctcagccctagacccaaacctggaccgtagatctaaccccgcaccctagacctaaatctagacctgaacctagaatcgaaccccgaaccctggacccagacctagacccagagccaaacccgaacctagactcgaaccctaggcctggacctgtacctgaaccacaaatctggaccaggccttggactcggattcgaacctgaacacgggacccaaacctaaacccaaatcgcataccccaatcccaacctagaccctgacccaaaccttgaaccccgacccaaacctgaaccccaaatcgagaccgagacctagaccctagacccgaactgggacttagaccctggacctgtacctaaacccaaattaggacttggacccagaccttagacccgaacccagacctggatctcggaccgggactagggtccaagtttgaggtttggggccgagcccggccgaacctggctttgggttcgaggtccaagtctcgacttgggtctggggttcaggtctggggttcgagttcaggtcaggg

SEQ ID NO: 272473 - DNA, 1558 bp, Cannabis indica
cagtcgacaaccttacactccaaagaaaacattaatcctaataaggtcattaaaaggcagggggaatcgtgactcccttcgcagctttcttaaacgttgcgttcgaacacacttctccaattgcatccacctcgtcagcagcctctcccaatgctttacaagtttctgcaacggctttggattctgttcagcatctttttgataactctgcagtgatcgatgatgatcgctgcggttcgccatgaatatcctaagctggaatgctcgggggttagggaacccgactgcattccgccatttacgcttgcttgtttctgagcaagctccctgtgtgttgtttctcatggaaacaaaattacaatctggtagtatttctaaatttcgaaacagtttgcactttcttaatggtatcgaagttcctcgaattggtttaagtggtggtcttatgcttctatggaaatcggatgttgacgttgcagttaataactactcttccaatcatattgattgttttgttgaactccatagtggtcattcttttcacttcaccggtttttatggtcatccccaagttaaccaacgaatacatacatggacactactgaagagatgttttgatatagctcctcttagaccatggcttgtaatgggtgatttcaatgaggttctttcaaacaatgataagattggtggtccaattcgaaaccaacatcaaattcaagcttttcaatcaaccattgatctatgtcatcttacccctcttatttttgaaggtgaactttgtacttggactaataaatgtcaaggtgctgggaatgtcaaggaaaggcttgattatggattttgtaatgaattttgggcagataattttcaacctctaaccattcagcatctcgacttttaccattctgatcaccgtgccttgaaaactcatgttttggattttcgtgagctgcaacaacaacctgccttcaaatcaagatttcgatttgagaaattatggcttcaagaggatgaatgtctacacataattcagaggcaatgggctgaaaattcacctgatcatattctccaacttactagcaatttggcctcctgtgcatcacatttgcaaacttggcatcatcaaaagtttggtaagatgaagaaaaaaaataaagaaatcccatgagcatgtagctgccttacagaattcagctgacacttctccatcacattttactgctctaaaaaactctgaagccattttggatgaactcctctatcaagaagaaacatattggcaccaaaggtcaagaatttcttggttagaatcgggtgattccaacaccaagttcttccaccaacatgccaataacagaaactccaataatcgtattaaaaagcttgaagattctactggtgttactcaaaccagtagtcaggagattggccgaatcattgctgattatttttctgcaattttttcttctcaaggcattgaccaggttgttgttgaggccgtgctttgttgggttttatgccctaaataaaactctttacaatctgattagttatc

SEQ ID NO: 272474 - DNA, 1188 bp, Cannabis indica
aattagactaatacagatatgctgggccgactgggcggctgtgtgtatgaacattgtctatttatatttccaacaattttattttattaaaattatataaaaaaactgtgtatagaaataattatgaagtttaattgtatcgtagtaaatatagatgtttgaaaattgattcttaaacatttttttactaattaatccgcaaaacataacttttgacaaagtgttctttaaactttagcaatactaaatgccaatttggtacagttgtgttgaaagaaaaatagttgtagctgtgctgtggggaaaagaagctctagcagaattgtggagaaaatctgaagtaagggtttggtaaattataatttttaaagtgctacgagttgttaaagttttattataataatgataatattttaatctagttcgttataatcacaaatatatataaaaaaatatgttatataaaatttttattttttaatatatttttaattattttttttatagtataaatttatatgcatttgataaaaataatttttaatatttttaaattatattttatcaattgtaaaaataaaattgtagtttataagaaatataaattcatattgtttgttaataataaaaatataaacataaaatattttttaaaataaaaaaaaaattagaaattaaaatattatttattttaaatattttttcatttaaaaatatttttattttttatgatatatataataaataattaaataaattttagtaaaaataatttattatagaatctttaatcaaaatagtttttctaaaagttgggttgtaccagctgtagcttttctaaaattcttcaataagctgggttttaactgcttaccagggccgtctcaaggtgttgagaggcctagggtgaaattgaaaacgggacctttttttataaaaattaaaataattttttttttatttttgctctgaggtattatttattattgaaattttgacacaatataattaactattttatctccatataataaataatttttttcacacataaccaaacttaatgtaatatttgattataattaatagcatctttattgaagtgttatatattttaggacttttatatatataaaaaaaaaatcaatagtatgtcaaaattatgttaatttttttaatatatgttat

SEQ ID NO: 272475 - DNA, 714 bp, Cannabis indica
aaatacagggtccattttatcatttaacaaaacagagggtccaatctgtaatttttgcaaaacacagggtccaaaatagtatttacccttttttatataataaatagaataattagcaaattttactctgaactttcgacaatactaattttatcccttaaaatatgcggcttgttaagaatctccctaaacttttacttctatagaaatttagtcgatgttaggttacgttccattattccgtttaaattataacgtgtctttgtaaattagcaattttgtcccctaaactttgacaactatcaaatcgtatcccctcaaaataaacatgagacagatttaacacttcttttagtaaatcttaagaaattaatttagatcttaaaaaaatattttgaatgattaaaaaattaaaaaataaattaaaattttaaaactaattaagagatttaaaacattatttattttattcaaaaatttatttagatattaaaatttaattttacgggaacaaacttgagtatattttgtttttctcaaaaaaatgtagatttatttaagtaaacataaaaaaaaattagtttactttagtgtaaatagcggcataagtacccaaagttttgaatttgtaagcggcataaacccaatgatttttttttagtggcataagtactcaatgtttgtaaaaatttaatttttctctattttcgtcag

SEQ ID NO: 272476 - DNA, 1716 bp, Cannabis indica
aaatataaaaatataaatattttacaaaaaatagtacttatgtaattattcttataatatacacgtatggagtgtatacatggactaaacttgtatttaattttaccatttctttaccatttcctataaattaacaaaataactcttttaatttaagctttgtaaactttttgtctcttatgtttgtttttctctcacttttgttttagtccctctgtaattctatcaaaggggtcttatattaaaaatttgtaaagaaatatgcacactataaaatataatgatgtgtcatgtgccacttctccttatcatgaaatagagaatttaacaaggggtcttaattaaaatttataatacggacatctccaataaattatattgttatgtttacttataagtaaccagttaccacttatagaaagtgacaattattttgttacttggaccaactgccaacttatcatttcatatgagttgggtatttcggtctaatcattacctacatgaggaaatgatttattctcattcatttccaactgagttaacaaagagattagaaagttgttaacgattatgaaatcctattgcattgttcttaattgaggtgatcagagataaacaaatggtatcagaacttggttgaaggtgcttcaagttcaagaactgcgttgaagatttcaagaactttaatcaataatgacatcgacaatgtttgaggtagacaagttcaccatgactaataattttagtctttggaggaccaaaatgaaagctctcctactcgttcatcaaggaattgcggtagccactaatgaagagcttgttgaagagttgaaggatgaaaagattaagaaagacactgacactacaagaaaaataaattttgctggtgatttttctcactggcgaaagtatacatatgttgccgcatagttttgctggcgagcttttacaccggcaaaagatggcaacaataatttttcagtataacgtgtttttcgggaagcaccatacctcaccagtataactatttatatcggcgaattaagtggccgacataagttccctgcaggtaatgatttgtcgactgaggggtccctgatgatgttttaccagaaaaatattgggccgaatttgcgcctaatttttacttacccgcattttgccggcgcattattttgcttgcaaaactttgccaataaaaatattttagttttgccagcgagatatagttcgctgccaaacaatttttttaaaattttatttattaataaaattaaaattaaatttgttaagataataataaataaataaataaatgtaatataacatatattataaaattaaaatttatattataataacaaaactatacaaattatctgaaactaaataaaagtgttattattttataaaaattaatattatttacattacaaattaaaaaataaaactacaagtccacaacatcgtcgtcgtcgtcgtcatcgtcatcatcgggaaggacaatctgtgaagaagtcccagcgccaagaggccgaaatggtaggattggtggaatcaaaggcatcagggacatgttgaatcctagaatgactcctaccagttgttgggaatattttaccaggatctagatttactaacaagtatgatgattaacatcctaaatatgaattctttaaaacaatgaaagaaacacataagggtttaagaaaa

SEQ ID NO: 272477 - DNA, 863 bp, Cannabis indica
ttaaaaaacatatataaaataatttccctaaataatttcaaccaattatttttatctaacataataaatcttatttatcaaaagtaacttgccatattaatttgaaattatacataatgcataatggatatatgtgggtgcaggtgccttaccaaagcttcagtgaaaacaggctcaacaagtccatggcaactatgttcagtaactaatgtggaagaaaccaaacaaatggtaagaatgttaccaatattgatagcaacattcgttccaagcattatgcttgctcaagtaaacaccctatttgtcaagcaaggaacaactttacaaagacacatacgcaactttgaaatcccaccagcaagtctaattggtttcgtaaccttatctatgctcatcagtgttgttctctacgattggtactttgtcaagatcattcaaaaatggaccaaaaaccctagaggaatcacactcctccaaagaatgggaatcggaatgatctttcacatcatacttatgtctacagcctctcttattgagagacatagattaagtgttgcaagagaatatggtgttgttgaaaatggaggacaagttccactctcaatctttattttgttacctcaattcgtccttatgggcattgccgacgcctttttggaggtggcgaaaatcgagtttttctatgatcaagcaccggagaatatgaaaagccttggaacttcttatgccatgactactttaggtgttggaagctttcttagtagttttctactttcaacggtttctaatattactaagaggaatggtcatcatgggtggattctcaacaacctaaatgattcacatcttgactattactatgc

SEQ ID NO: 272478 - DNA, 1354 bp, Cannabis indica
tttgaaaacaaaaaacagaaaactataccaaacatgctctaaatctctcgatgcgtagcaagagagtagatctttgaaaatttgtatttctttggatattgggcttttatgatgataaacctccatattttaatcaaacacatgatatttaggagttttttacttttatactttcagttttttttttttcatgtttaaggaaatttacatagtaactcacatactaattaacagatcaacttaaattacaactaaaatacacatttcaatttatatagaaattaccggaataaccactgtaaattaccggaataaccacggtagcaattcaaacgtaaatttaaaaaataaaataatatataaataattctcttcacatttattcaattactataattttattgtaagagttaaattttatattagagttgttttatttttgccatttaataaaatttctctattatatattatttatattaataaaatttcaaaaaaataaaataaaatttctctattatatattcatggttttgtttgtgtgtactttactatcaagtacaattatatattgacagtaatgactcattgaattgaaacaaaacacagagagaagagtgtctctctaagcacaattttttagtattgagaaaattgccaataatttcacaaatgttgtgtatgtacttataaatggttaatatttatcaaaagaaccaaaataaataaataaataaataaataatagttgcagagaacagatccatacatgtgctgagtagtcttttgactattgaccagtgaaagaatatttttggtacaacaatggagctttttctcagtgtcttgagtcaaactgttgaataaatactagaaacaagaaactatttaataaaaataaattagaaaaaaaaaagaaagaaaataattattatggaaattatatattttttttctgaacaaaaattatatatttaataacgaatatctgaatacaaaattggaatatagttttatttaagcaaaaacaatggaatgtgctttttaattattttttaaaaaaaataatagagataaaaattggaagaaaattaaaaaaaatacttgtatttacttcttttatatacattcatgatttgacagtttactccagtagagccaaagtatactaaaaaaaagtatcaaattcttttagtacaatagctagatagttgtgacattttacacacattatcttcatttgggaaaaagaaaacaataaataaagattatccatttctaaattgattgaatttttcgtagtttggtgatgaaatataatactatttttttgattgtaaatattatttttgaa

SEQ ID NO: 272479 - DNA, 6325 bp, Cannabis indica
gacattttttgaaagagatatgggatttacagaaacaacattttaggatagtgtactataaatatttcccataaaaatatttaatatcaagatttttgacatttattcaatgttctatgctataaattgctctttaatttaccattgcaaattattattaatatactattagagaattgctaaaaggcaacattggtgcataacaccctcttccgtgtcatacaggtgtaattaagtaatggatccccaaaaacttaagataaaaacttttggagaatatcactaaacaatcatatagccacctatagaagatgctaggcatcagtagtatccaatagcaatgctcatagtcatagcattaaatagagctcaatctgatcactttacttgctaaggacctaaggtagtaatttcactatcatgtgtagcttggtttgaaacgaagaaaaaaattgtacatgttatgttccacattgcttatgtaagagtaatttgtaattttattgaattattaaattttaatgctatgataaaaattttaatgctatgataaaaaatttaataatttgataaatattatattcacacatacgaagttatcaccatacagtttggaaaagatccatcgacttatgaaatctttatcagggtggatctccaacttatttttcttctcccttgatgatgtggtgatgaggaaagattaagtaatgttttaggaggaacgtgtttattatttaaagtgttcactcaagaatcatttttatatgtaaaaatattgtgtgtggaatacattttccctaagataaaccaagcgaatcctatgataatgtaaacaaaacattcaaggtgacaacttcacttctactataaaattcttatcaaaacaagcacatcaaattggctaaagacattattgttttcttgaaatgaaacaatgatattcttgtcagataaaatttaaaaacatcgaaatttggaggtatataaatttatttgtattttataagtttatatatatttcagtgtcaattgtatatgtatttattgaaacttataaatattattatcggtagattttggttataatgggttattagtttaactctacgttcttgtggtttataagttgttttgagttgtagccactttcacttttcacacttgtcatcattgctaggcgttttcctattactttcagtgataccaactaatttattaaaggagctaggcaatcatatatgatatgagctaaactacgttatttgttatattcaaaacattatctatgtaaatttttttaaaaaattaaataattgacaatgttaaaaataagttcgaaattttttaaacaaacgtgctaaattgaaatataaactattcaaaatttttctaaaacttaactaatggtaaataccactaaaaaaaaaatattctatgtgattacgaatatgaaggttaactaaaaaattataattagcactactctcattgaaattatattttgagtatacaagacaatacaaaatataatatggtaattgttctaagtaaatagctcaagaagtaagaaatctcttatcaaaaagtccaattaatgtccttgcattcacacacaaattaacctaagtaatcctaaaactaactcagcaaagcatttacacaaattcaaaataccatgctaaaatgtatgacatcattagaacataaagtccgaaccctagaaaaaggcgtatcctgacataagaaggcctacaagagcaatacttgaaatggcaatctacaaaaaaaacaccgatattcggattcgctaaaataaaagtgatatccaaaaggaattactaaatagcttaaaagataagatatgactgctctagatgggccaatattgaataaacgagtatctcttctaaatgaaaatagattttcttcgaaaaggagtttttttaaatgttgcaaacaactgcaatccatacatacatacacatataaacttccctataaagatcaaatttggtttcacgtagaaacagtaattagaaagaaaagataaaaagaaagatccattttacgaaagaaacaacctatcaagcaattgaagaagctttaatgggctcgtatttatctcccatagcaccgcctttctgtttctgaaactgaatgtaccgcaatgtgcttgcaaagaacgcatctgtggcctgatccggtgtggttgagtcactttgcaattcggttgtaatcaattccatcaggctttggattgaagcaacagttatatgtgggttacccttttcgaagaaatagaggtacctgtacatacatacatacacagcacggttagcctaactaatttttaaccaccaaaaaaaagggtaaaagaaatttacttgttcaatatctcaacaaagagtgccactgaaccggtgctaccacgagttgcacttgacatttgctgagcagcatttgcaattcttagagcacgtttcaggcatattaaaaccctggttaaagttaaacaagggataataattaaaaataattctataaataatgaagcccttaattttcttaaaccatgtttgctcggtaaactcacctctccccgtccttcatgttttcttgatcatcaacccaaaagagatgtgcacaagaataaacagctctgcactgatcaggcttctttaaaagcttcgcagaatactgcacggttattttacaagacggaaaagaaatcagtagcaaagactgcgagttaatcccatgaaaatttatagctctataaatttcggtaattacccctgtagccttgtgtgttaaagtatccctgttctcaacaccaaagacgtgcatcctttgaagtgtcccaattatcaaatgtagtgcggttatctgtgcttttgaatcctatcacagcaacagaatgcaaacacaaaattattcgaaaatagataaataaaattttccgtacataaaacagaaggaaatggaaataggtacttaccgatatttcctcttcatacaaaatatatgcttgggtgaaaaattcataggcaacaggttctagctcacagtcatttgcagcctgattaacaaaagaagagaggttaaactaatgcactcagttaggaactcatatgtaaaaccgactatatatttctatttacctcagcgcattgcaagtacaaccttaatgccagttctggtgccggaatgattgatagagcctcaatggtctgaaacacgtggatattgaatttttatataataactactgaaactttaaaatattggctaactgttaaaaaaaggtaagaatgataatggtgtactgttttcctattttgcagacgagtacctgatttaaaagctgaaatattttctttggtgtagttgttgtgtcatcaccaaaagggttttcctccggaccttgcaattgcctaaccaactgcagattcaagatacaaatagaataattcatgtcaatgccaaaaacagtttccctcaattgtaaatagagaatgttcaacattctcaataaaaatttggttacatatacaatgaagccttttttgtcaactatgttacagcttcactcattcatttagaagtttctgaacatatccaataacactgcctaaactctgaatataacacatttatcccagggagtgaagcaagtagaagcaaacctttagggaagagaaaaataagggaggaactgtgaaaaccaagcgcttcggccctccagtaagtatgtgcttcctcacagtacatataatctgcagacgagcccaagaatcattaacaacattatcatgaggtgtcaaattcaatcaagacccaaattctatgtcgtagcaaaagaaaaaagacccagattctatgatgcataccaaatgttttaaatatattatttatagcatagaattcaagtcattttaaatatggctgaacaggcttcaggcacgtcaaagttttgtatagtcaataccttgaacatctcttctggatcttcattggtgagcatctgaataagtcgagcaacagaattttgctcctcgttgaaatcatcttcatcaatctagagatcaaaacaaaaatatagactttacactcatttataatactagactagataacaacagaccaatgattatgcagcagagtatattaattcgggaaaataactgtggtagatttcaaatcaatgactacctcatcgtcaaaagttccgtccaaatccttaataagcccctttattaattcaaacaaagcttccacctacagaaaagtagaccacccagttatgaaaaatcccacttggaaaaaggggcaaagaataagtcattacatttacataccttgtcagcagttgatacatgagtcttatttttcataacacttgaaataataactgtagccatgaccttattggtttcattatcaagatattccatgacatggggataatttgaaagctttaaggtagtgacaatatcattatatttctcaagtggagcacttaaaagtgcaacgatctgttttgttgccttattgtcttcaatcttccctttgccagaaagttttttaacacaagctccctgacaaaaatagacaaagataaacatgtgttaatattactataagtaaatggaaaacttgcatctaccatacaataactcaaccgaaagaacataccaatacttgatccgcataatcaagccgatccgggtgtacgtggagagtaaatttaagaagtgacgagtacaatgttacaactccaacagtaggcatgtcaacatgcgcttctatcacctgcaccaacacacatccaattaattattgactatttagtctaatgtcccaatacaacgagtctcataaaagatagaaagtggctattcgtgacaggagacaaaaggaactttgttaaccacaccaaaccctttaacttaatatagttttcatatttgataactgtttttaatttgtaagtttgaggctacacaagatcctacctaagttcaactatttaatattcacaattaacttcaaacttcaatgctacacaggattttaccttcccaattgcattgctcaatttggaaaaagcttctacttgcaagaactcaggcaacacttctgcacttgaagcagcataatttgaaagcctttccatcaactgggataacactgtcttgatatcaacagatggctggaaaacataattttatacgagtcaataccacaaagtaaatcaaacaagtgaaagttggtcccaaaattctttatcacatagactactgtacatagtttcgatatagaggcggtgtcatgtaccattcaatgcttaacattcacataattgtctctttgttcaacattgtctattaccatacaaaaattaacttttattttgtgtgatattagatacgtttacagaaacttgaacccttgaccactcacaattcattcaactgcacaatcagtcaagctagccttaagtgacaccacttaaaaattgtttttatccagaaattctcctcataattcatataactttctggtcgtgtttggtaagaaagactgataaaaaaacttagttaagccaaaagaccagacatctatattcataaatgaaatttctcaactgtagactatttttgtgaaaggacctcaatatgcttatgaatagagtaggaatcttcaatttaaaaatgtttgaaaaagacaatgcaacttgtgattaaaagggataaaaaagacctaaaactaatcaaaatggaaataatgtcagctacctgaagttgagggcaagcacccaacaatacatcaagagtttgcaagtgatactcatcagggaatacttgaattatgcaatccatcagatagaattgtgcaatctcatctttgcaattgacaacctgtcaaagtagcaatttacagtaactaaaaaaaaaaaacataagaagaagacaataaaactgaaaaggctataacctgctcaaggactctaggaagaacagattctttgtacatctcaagatcaatcccctctatctggctgagcacatgcaagttctttccaacctataaaaagtaaagagtaacaagagacaatccttctgtaagtgcacgcccaacatgtagagagttcaattgcagcaaaaccaaccagctatcagttactgatatttacaagatcacgcagctcgctccgctctttctcccgtttctccttttcccgggcaggtccctgcagaccagaaagcccgatagcaaccctcaactcaggatcagctaagagtatgaatgattcacaagc

SEQ ID NO: 272480 - DNA, 5516 bp, Cannabis indica
tacgtttcctaataaagtaaacaagataaatcacaactattccatttctaaaaaattttagtaaacaacatattacaaatattgattccgattatttttcatttattctgttacatttctctattaatttattccgattctgattactgtatagtaaacgtgccataatagtgtaatgacggtaaattataaaaacacaaaaaaaaaaatcaatatttattaattagtataataaccgctcccattatgttaatatataatccagtaatagaaatccaaaagcttttcactttattatctagaaaaacattatttagtcttcgtgtggtttgctttaccagtttggttgaatataatttaatgaagttagattcttgccaatattttttaattgacccatcccctaatttccatttactgtcgagactgtgacaaacatagttatataagactatcattttttttaaaaaaataaataaataaaagaaatgaaaaaaactttagggtgttagcttgtttatttatttttatgcacgctgaaacaagaatacaactcatttctcactctcacacctttgtcactgccactttctctacttctctctcttcttttttggttcctctacttttttctcctgtgtgtaccgcttgctctgaaagcacaccattgttacttatttctaaccgctatctaagcttgctttatccatggctgttttagcttttctagtgcttattctggctatgactgcccatacaagcagtaagccctttaccaactctgaaaacattatttgccataattagtttttcgttttcctcttctgttggtaacataataatcttgttagatgtgttcccttttgtatatttcatctgggtttgaagataacgaagcatcagctcatatttcatgacagtcttattttttttttcttcttaagaaaacaagctatttttggtcctttattttcatgtgagaaactgtaaatgctcaacactaaatgctctgcatttactctgatctttttctctccagctcaactttttatatttcaagatttttccatatatatttgtaatcataaactaaaatggggaaaagggtaggtactcaaatggtgcttatcctttcaccttctgctctctaatttctttattagctgccttatcacacactctctttctctctctctctctcataattggtcataaaggatctgcctttttcatggtttatcatggatctccctcgatctctactaatttgattatacttccttgaccctcgtatgttttaacttttaaaatatacaacttgatgaaacttttacaggtgcgaattggtgtgtatgcaagagtggattaagtgagggaatgttacagaagacactggactatgcttgtggggctggcgctgactgtaaccccatccacacaaatggggtttgttacaacccaaacactgttcttgctcactgcaattatgctgtaaacagctatttccagaagaagggccaggctcaaggcgcatgtgattttgccggaactgcttcgttggctacttctgaccctagtaagttcccaccacaaaactcaccattttcttatcttcaaggcttaaatgaactgcaactctcttaaacatttactttacatggtgattgacaggtacaactggttgcagttacccttcttcagccaggtatataatacttctgttcacagttttagtttgggaatatattatattttttcgaaagaggggaatatattatatttatttacagaagagaacttgataatcaaaacctttaagcacattttaaatatttttaagtatccacttaaaatggcatatttgttctgagaatattgtgaattttagtgataggcgtgaatcaagtctgtccaagaaaaggttgcctaatcttgtaatttttgcaaactttaggactgtttatatgtctgaatgtgttactattgttttcattcggtgccacttgcagctttttttataattgtcattttaaatgcggtgtcgggtctgacattcatcagggtttcgagttggtatactgtagtcttgttggtttttaaaatttgtgaaagagtaaacatattatggagtaaaagcatatacgtatgtcgagttaagtagtgaaaagggtataatgggaattttaaaaaagtatccccgagaatatttaaaatttaaatgatagattttttttttaaatggtagagactggagaatatacctcattcaaatttgaatttgttttataatgggactcaacgtcgttatctttgattagatcaaagaaatatgtttgaaagtaagaaactattatatagagcttttccatatttcagctgttttgtggcagaacagcagaaaataaataaaaaagctgcaactgtagtttttgtaaagttttggtgtgaaataaagttttaggttttagggatttacccatcaaaactagttgggataaataatgatccatagatagagttagctgtcttagtttcttgtattgctgtagtttcttttgtttttgatggaatgtattattgctgtagtttcgtgcagggagctgcctattttttttttcctgtttacatgatagtttttgcccattcatagtggaatgggcatctttgctttttattttatatatatatatttatatattcagataaaagtatgcctttttgaaagaattgatgtcttgttcaactatttcgttcaattcaaatgccttccattcattttattttaccttattaaaaaaatcacatacccaatacacccttctctatctccttttgctttgtccaatatatgtgtaccctttttgtcattttgaccaatattgtaattgcatcatgatgtccttgactcattgtccattaattggtggtgagcttatgggtatgtgtgactttttcactttttataaaagatcgatgccacaatcattggatccaatgcttttacagatggttaatgtcacatagtatttgaacagagtaaagggtaaaaaagtcaaaagtaaatttcctttttacccttaccaaacacaatgcatagttttgttgctttttatgactgatagtagtgcacccaagctaagcaatggtcaaaagttgtggccatcaagaactgttggcagtgacttgagaagttgtgtccacattatggtgcaaaaatagggtatagcagcggctgctttttctgggtgggggctactcttttgagattgtccttgggataagcaagtcttttgagattagagccaattttgtaattttttggggcattctcgagagttgtgctttgtcatttctatttcaccatttatatggaaagcagcatagtctgaaatctaattttattttctattttactgaagtatatagatatgtgtaaaaagtaaaataaaacaaacaaatattagggaatcaaaatgttacactgctattgaagacactcatcacgtattcacatggtggtgggtctgagtagtacttgaaacaaaccatgacattgattataaccttgccaggcaattttttttgtatttattatacttcttgaataatattaagaagtacccaacgatcactaatggtgtcaaaattatttcaactatatcactttatttttcagcttaaatgactagagaattgcttttgtttgttcctagtttgaagttgcctttatcattcataggagtcttaacttctaaatgtgttgaccacatggattttgctttaattatgtttcagatttgtgcctcttgccacgtaggtaggaaaagtgcatgcatattttactaatcttatatatgagaatgttgcaagttaatacttaatctgtatcattctcttgttcccgtgcttagtcttatggtgttttatgtattttgtttcatttgattagctcaagcaccagtactactccagtgtcaagtacaacaccatccactagcactggcacgaacacgggcacaggaaccggcacaggcaccggcaccacgccatccagcaccgggacaccatcgaccacatccccatacagcacaaccccatccaccggggtgctaggaggaggaatgggaggtggcatgggccccacaggacagggcattaacacagatgaaagtggtgggtttagactagctaagactagtgtgttctcttccttggtgaccttattcatttcaggtttgatgctctgtttgggttaaaaagtaagtttagggatgatggatgatgtggggtagggaggacggaggctagtctgctgatgctgctggattttcaatgtgcacaggttgtttatgcatgtgattctgctgttgttttgtaggtgttcaaatctaaaaaaagacaacctttttcttaattatttattttaactatttattattaatatttcttcactatttttgtattttgtcttctatcatcatcatcatcctacatgggaaattaagatgggtttttgattcctttttggtggtgtctgcttagtggaatgtgggaaaagaagcaaagggttcaagtttctctagttgtttctccaactttgtcatcgctttttgtacatctagatctttaagagggtagttatctattaattgtatggagaaactcaaaacttttttatgttactcttgtaatgcccctcatttaacttgttatctatttagaaatgggtttctagtatggtagttggcatatatgaatgaatttaagatagtatgatgtggtatataactaattaattaaaaggacaaaattgaaaatttgttacaacttttaacaatcggggtttttgtttatattttgaaaagtacaaggacttgattggcattatcttttatctaaaggaagctatgacataaatcatttataaagatttctcactatgtttatggagctcgggttaaaatattttttgacatgtttttgaaagaaaagaaaggagcccgaaaagaagatattcatgaaattttatagtcctaattagtgaccacaaatatttatttggtagaagaggtaggaatgagatgtacaataaatatttaagggagcttttaatggttaattgactatggagtaccgaaagtagaggccaagccagaggatctgaaggagattttataatcagagaacattatgcaatggcttgtttacagtatcattattgtacggccttctttgtggaccacacgtgaagatggtttgttttttagtgagcctaaagtgtattgcttgcaacaaaatttaatctaatattacttccattctttttttttttgaaatttccagcactgtaatttaataattatcattaaatttaaattcagagaaagagactgatcaggaaagcataatataaatattaatgagtacttttataatacaacatatctagaaaggttgcagcgatatactattaattttggtcacttaagaaaaattttttgagtttttttttttta

SEQ ID NO: 272481 - DNA, 604 bp, Cannabis indica
cacatatattttatataaactatatatatcgtccttcttaaaaaaaagtatatgtattctttttttttagaaaaaaaaagtttatttagtgttattcttaaattttattattaattatttgtaaattttaaacaaaatcaaaaatttgatagtaaaaaaaatgaaaaattaactatagaaattatacatataaataatttttaactatataaattataaaaagtaactatagaaagtaattattgattatataaatttgaatataaaattaattattatttaagtatgtatcttctaaataaaattgaaattgatacatatattatcaaaaataaaaaatgaatttatattatgaatattatattacactatttttttttaacaaattatattgcactacgtaattaatcataaatttaatgaataatttattgatataattttatgcattgttacatatttatcaatttataataaatatttattgaataaatataaatatcattttaattagcagtttctataataatatgaatcatatatatataagtctaaggaccgtgcgtaagcgcggtttcattctctagttaataaataaacctag

SEQ ID NO: 272482 - DNA, 2406 bp, Cannabis indica
cacctgctcagctgttggcctagcatctgcatctttctgtaaacaggcttcgataaatgagcagaactctggtgaaaaattgtgtttagaaggtgagggagaaggatcctccaatatctgccatatcacccaagcataattatgagtcttcgacatttataaacactctttttaagactttaatagctaaatgtatccctaaatcacctttctgtttctaaaaattatttgctgttctttaatgttgttaatacacaaacaaataattatatgaaatataataaaataaatctttcaaatcatattttatccacctttgaattataacattatttaaaagaactagatatcaatatcaattgagttcaagcctcaaggagcaaaaataaagggggagttattgttaactataagtttgcaacggatcataggttgtcacctgcaacataaggttaacaggtccttcagtagctgtatatgggaattctccagttccacattcaaacagagcaagaccaaggctccaaatatcagctgggtaagaatagttgtcatttctaatccgctctggcgacatgtacgtaacggtcccaacaaaagtggcacactgcaaaattcaatataaacacataatatgagcaatgatttagagaaaaccagcattcccaaataaacctctatctcaaaataattcaccaaaaaatgtcaatattaacaaaatcacttaccattgccactgaattctctaaaccagcactaattccaaaatcagttatttttggctctcctttaagattcacaagcaaattcgcaggctttatatctctgtgaactagatgcctaactccatgtaagtagctcaatccctataaaaggaaaatgagcatatatttcatttaaaggacaaacaaaccaataccaatacattgaaaaactttataggaagattcttttacatacatgtagaagtttttgaaacatagaggaaagaacgggttcgggtattttctttctcagctttaagatatcagccaaagaccctccatccatatattccaaagctatgctaatttgaccagagtctggcgtataaaacgcaccatgaaattccacaagaccttcataacaaggtgcctcacacagtgtccttatttctgtcaaaagctgttgtcttttttcctaattaagtatcaaaatcaacaaaaatatataaataaattaattaaaaaaaaaagaaaaagcaaaactttttcaaaaactagaaaaatatttatcttctttagggctgaaatcacattaatgttaatttccaaccaaaaagaaaagaggaaaagaagaaaacggtaaactataccttctcaaaaatattgatcttctttagagctaaaattcgatgagtcggaatatgaatagctctctgaacaacactactggcgccattccctatcgctccgaataccctcatctcatgcgaagcacatcggtaagtcttctcactctcggaggtcgcgtccaccacagcagccgaagctgtgcatttctgcaatccgagctcattgatgttgtaaacaccatacgattggctcaataagttgactgttccaccgtccgacagcttcacccaattcaaaaacaacaaaaacgaaaattcactacgaagcaagaggagatattagattacgagagaggaattcgaaaattgagagtgaaaatttcaccgtgtaagaatcggaagggtcgaaggttgaggatgaagagaaacccttttcggaatcgaacaatggtgtcagcttctttctcaattcttccaatccagccatttttgtggcgattctgtaccaatgtcaatttcaatctgttgaattgaattgctatttttgtaaaattaataggagaaagaaaggtttagaaatcaaaacaaaatgacttagttgaaacaggtcaaaggtcttctgtaactttttttctgctcaagacacaatgcccaatcagttaccgccacgatagaataaagaaatctaatgatgtaactgttattaactaatttttcaaaatcactgaaaaagttctatttttattttttgattttttttattcactgttttaaaaaaaaaagatatttttatctacaaaaatatattttcaataaaaataataattttttttattattttatagtttatttatgattgtattataattgttatgattatttttttgttgttttatagttgatttatagttgtcttagagttgatttctcgttattattttaattctttgctgaataaaatgtatctttataattttaaaactttaaaagtagtattgttgtgattaaaaagttaaaggtctgtaaaattttaggttaccgtttggtaataattgtgttttctaatttttaat

SEQ ID NO: 272483 - DNA, 572 bp, Cannabis indica
cacagggctttgatcaagtccaagagtgagcgagcgagaccgtcaccaagagggtggttctatggaggtagagggacaagtgcagacttaggattcaggagaagcttggagtaagcttaggagtcgagatcaggaagatttgcctacggtccgtcgatgagggcatcgacatgttaaagtgggggagagtgtaacgtgcgtgctaagatggcacgttacaagctaagtgatgcccacaagttggccaagtggtggtcaattggtcgcgcatgctgttgtgcatgctggtggcatgctgatgcttagtttgtatgcagtggcattttcgtaaatatcttcaatattgtttggaacgggacgggacttggtaaagccatttatttgggtccacaaatagaatggtgcaattggtttggcgaaactaggtgatttcgtatatggttcttcccatatgtctacagagcaaaaatcatttatgttcctggtaaaaggctaaaagctcaaaatgctctttaaagggggtaccctggtgtcagctctccaccaccccttgcaccttggtgctaagtgag

SEQ ID NO: 272484 - DNA, 533 bp, Cannabis indica
agagaggagagagaagaggtaagtgcatagaaggcatcgattggctagctatcccgttagaagaagatgaagtcaaggatgcaaatttttagttgcgaaggcagcaaggctttggggccaaatggattcagcttggcagtttccagtctcaatggaaagttattaaggaagatttgatggatatcttcagagcttttgaaaaggaaggtatcattcaaggaagcattaatcagacatttatttgtctgatccctaagaaactcaatagttgcaaagtcagagaagaccaatcagcttggtaacaagtgtgtataagataatatcaaaggtgttttctcttagattaaggggagtgctggaggagatgatcatggaatcacaatcaacttttatggaagggcggcaaatcttggactcggtgctgatagcaaactagattgtggaggattatagaagcaaaggcaagagtggtatggtattcaaaattgatttttaaaagcctatgatagggtggagtgggtttttttagatat

SEQ ID NO: 272485 - DNA, 537 bp, Cannabis indica
atgtttttctacttaatttccttccctcgattgtggagtcctaaccttgattgcaataagagtgatctttgagaaacaataattttcttatgaaacctaaatttcatatttattaatattaaaacatatcacaatggtacatatatatatatatacgaaaccttaaccttgaatctacaaacttaaaattatagaatgataccttagattcaaaaggaaatctggcagaaaaataatggtggtgatgatattgatatatttaagtaaataatggtggtgtatataaatatgtaagaggttggtggtagtgatatgtgagtatgacaagaatgatggagataaaataattggttgggattagtgttgagatgatggtgaaatgatagaaaaagaaattgtaaaaaggatgatagagaaaatgatgaaggatgatggtattgatggtggcgtgaggtaataagcaatgaatattatggcataaaaaacaaaataaggagtagtagcaagagatgaaaaagagagagtaatctttgattt

SEQ ID NO: 272486 - DNA, 1691 bp, Cannabis indica
ctttggtaccccatcacgtaaattggtacgtgtgaagagttttttttttttttttgaaatcacgtgtgaagagtttaagagataaatacattttcatttgcccaattcatccttcgtagtagatgtgggatgccaggcataatgcatctactttacgcaacacaatcggatcaaggtgcagcgaggagcgtccgactcgggcatctaccatatcgggcaggctagatggactttgggttcagttttgacactgcaatcctctccataaagcccccgtttgggctgtagtaatgtcaataatggaaaactttcattagagattaatgtctataaatatatgtttgtacagtacaccttatgagagaattcaaacaacaaaaataaacatatttgtggtcattctggaggatttcatttagttgaaagtagtatgtttgagtcaaagaattttagtcaagccacaatactaagttcaattgagtgtgtgttttaactaactatatatgtattgtcctaataatgactatacaacacactttacacctactgctcagcccatttccttaatattgtactttgtccatatattaaatgaagttctttctttgctgtttaaatcattgttagtgaagatttctgttttcacactatccaggacttgaatatccgcagctctaaaataaaatttgcacattcaattgaaattgaaataataagcaaataaaaaggacaactttaaatcctctgcaatatacaatgatttatatcattgcctttttaacagccaattccatgtgatgagcaggctgccgggccgggccaaagtgatgtcggccgggccgggtttgtagcgggccgggcccgactgacactcctatgagcagcacattaattaaataaaaaaacaatagtgtaatggcatttcagatatgatattgattgctttctttcggatgaaaagggtgtttaaaaattaaaacagagagaaatttaagtgattaatcaaactcttaagctcataattgaattgaattatataaaacaccaaccccagaagcccaaacacttaaataaaaactcaagctttccagaatccaagacaaaactacacacaattaagaacaaacattttattcttaaatcgggagccaaatacccctagagccctagactagaggcttgaattcagtggaattggcaattaaatttttattcctaatactccattttttgcatctgaataattctcgaacagatactgaaaacaatataagagagcatgttctttagatgattgatttcctcatgatttccagtaaaatgagagagagacgattattagaaagaaaataagaagagagagccagggaaagaatgagtagagaaatttttgacactaatctataatgattacatggtggaaattggactcgtaaaatatcactgtggttgatcatcagatgccattgcttttaaatactttccaaaatctcacttggtttcacaaattcctctcaaagtctttggaagtactggatttgttcatatttccaacataacacgtgatcgaacatagaaattccaaccccaactaagaattaaacaaaataataaataaacttggctttcttgtcttgttgctttccaaatctctagttaagctcaaaaatcatggcagcagaactggtagc

SEQ ID NO: 272487 - DNA, 1104 bp, Cannabis indica
tggaattactaattgaaaaaagttactaatcaatattcattattataaatgagctaccactttattttgtcttatacacaaagtaccaagttgacttactagaaggtttgacttagaaaagaggaatgtataatttggaaatcatatatggattcatacgtatactccactcaattatgttgttaaacacactaagaaagtcaaaaatgtctgcaacttatgtccatatatactcactacataatcaatcatgaccacctttataaagattactatgaactgagcttttcaactaaaaaacattaccaaaaaagaaaagatgaagttaccacatgaaattgttgttgttgtttttctagttctatgcatttgcatagccgaatcagcagaccctttgggagatttctgtaacaaagagactgagataagcaaaggcagtaaaatatcatcaaacattgacaatttgttgtctgaattggctctcaaaactccctcaactggctttttaactagctcctatggtaaaggcgaagaccaagtttatggcttggctcaatgcagaggtgatgtgagcactgaagactgctcaagttgtgtcaaagatgctgctgatcagatcaaaactcgttgcccgaacgaagctgatgctaggatttggtatgacttttgcttcttaaggtataacaacaagagtagttttattggaaaagttgacacttcttatggcatactctatgctaatgttcaaaatgtaagtgatcctgaaaatttcaaaaaggagttaggagctttgatgaatcagataagaaaagaagctgttcagcctaagaatcagggtcttggcaaaggcgaaacacagctttcgccttttgtcacgctctatgcattggtacaatgcacaagagacatttctagtatagattgtgctcagtgtttggccattgcagtagaaaactttgaccatttttgcaaaaacaaaaagggttgtagagttttgtatagtagttgttatgtaagatatgaactctatccatttttctttcctcttgcttcaaacaataccaaggttttagatcattctatgataaacatgatgaaggtgaa

SEQ ID NO: 272488 - DNA, 658 bp, Cannabis indica
aataaagtatacagttacgtattaggatataaactcttgcagagtattcttacataatagaaacatactaaaatgtgtgagtatgacagagcctagttgcacactataccacacataataaaagcactatatagaaaaaagttagcacagtagtgaagtgacatatataaattatatgtgatgatttagtatttctcatccgcgccttatataaagattgtgtctttatagcagttggtttgaatgattaatgtacgtgataacttattatgaacatgcaagttctatattgtcaatacatgaataattgatgggcgatcaatacaaccacaagcattccatcttctaatatcttcatgggtttacatacctaaaaccccaaaagggtcatacgttctcgaaaggtatgaagacccaatatgcaaataactcgagtgaattagcaagttcaaaaggttacaacaatataaacagttgatatgcgattatataattgcacccattcgaatattaaataagaatagtcaaatatcaattaagtgtaattaataatgtaatggtcctctctgatcaattatgtaattaaatgatcacttacttttcatataaataagtgatttgatatgaataagacaaatcacaatttatcttctatagt

SEQ ID NO: 272489 - DNA, 883 bp, Cannabis indica
tttacactcgtaaaataaaataatcacgcgtccaacacactgtttgaacataattttcggcgtgttaaatttttctaaatttcttaaaattttgcaggatgtcttaaataactataacgtacatgactattagaaaaaatttgactaaaaaattatttcgaatgctaaaatagatagagatgcatcaatatatctattttaaggagttgtattgtaaaatttttgtttaggagtcaaaaatattcttctatcaagaaaataattgcataaatatttcatttttgtttttactctaaattttggtgtcgttagtacttttttttagaaacgtactaagttatggagcattgtcattacttatcttaaggtgtcctcatgtgacgctttataagttatcgggaacttttttatattatttattaattttttatttttaaaataatattatttattaaattaaaatatgtaaaattatactaataataatatatcacttaaaataatatgtgtcactaattcatttgtttttaggggtgttcataaaaaccgataaaccgaaaccggccattaaatcgatcagaccgtaaccgaatttttgattccacatcatcaccaaaatttggcggtcagtttcggtttcaattttttaacatggcggtcggtttcggtttttgaaataaaaaatagttaaactaaaaactgccaaaaccgccaaaatccgcaataaacctcccaaaatcctccaaaaccgtcaaaccgaaaaaccgccaaaagtcgtacgatcggtttatacggttataatttctaaatggtcggttacggttttcgtaaaataaaaactgtaaccaactggtcggttataaaattgtaaaaactgaccata

SEQ ID NO: 272490 - DNA, 615 bp, Cannabis indica
gaaatgtgataagtgccagaggttttcacatatacctcgcatgctgccaacagaactaagaatgatgacctcaccctacccatttgttatatggggaattgacttaattagggcatcacccattaggcgaggaggttccaagtatgcggtagtagcagttgacttcatcactaaatggacagagggcaagccccttgtttccataacttgcaagaaagtcctcgactttgtcgtcaagaacattgtctgtgggtttagaattcccatgaagatagtatccgataatggaacccaatttgatggcgacttgttcactaaattttgcgagaggaacaaaatcatcaaaagcttctcattagtatccaggcctcaggaaaatgggcaagtggaagctgttaataaaaccttaaaggatactattaagaagaagttagacattggcaagggcaggtgggtcgacaagatacctcaagtactctgggctcacataactaccgagaagacggcaacgggacacactcctttctcgctaacttttgtctcgaaggcaatgctgcctgtttaagtgaacatatcgactcacagaagagagttttacaatcaagaagaaaacta

SEQ ID NO: 272491 - DNA, 685 bp, Cannabis indica
agttataaccaatgtcaggtcaaaaatggagagattaaaggaagaatgtgctaattttagagttaaatccttggtcgaaaatatgggagaatcaatagtaaattaacttaatttagtaatatttagttgggaatcattggtattcatatttgtatcgggcctataaaactgatggaaatctaatgtaactttcattcttcaatcaaaacaaaaagcaaaagcaaaaaaaaaacttaaaaaaaaactaatacaaatacaaaatagggtctcatcgaacgaaacaagaatgcaatctctttgcttgtatttttgtacgatttcagtcacaattaactgtgtctcctttgatataaccaaatacggtgcaaacacgattctgatgtgactcaggtaactccacaaatttgttaattataataaattttatatatatatttatataattggatcgtgtgttgtttataggctatagcaaatgcatggaaagacgcttgtgcggcaccaacgagatcgaaagtatatattccaaaaggaacattcaaattaagcaaagcatttttcgctggaccatgcaagaatcccatcgggtttgaaatcgcaggcacacttcaggctccatctaaggctaatgggttcccaagaggggcagggatggatacttttgaaaaaatcaaccagctaacca

SEQ ID NO: 272492 - DNA, 521 bp, Cannabis indica
gacgatagcccgatgtaggcccgatgatgggcccaatataaggctcgatagtgtgtctaagctttatgcttttttataaggcccgataatgtatctatttttgtgctattttgtgaccatacatcgagcctcatatcgaaccatacatcggtccaatcgagccttacaaaaaaagcataaaacttaggcacactatcgggccctatatcaagcccagcataagacctacatcgggctattgtcttcaacctttatccctttttaataacaaaaaatacatcgggcttgcataagaccaggccaaaatcaaaatcttccccaaaacacatatatgaccattccaaccctaaatctaatccaaactcaaaaatcaaagaccgttaaccctaaatctaaataaacatatcaataatttcatatattttaatcctaaatcatgcaaaaaaaacaacaaaaacaaaaacaaatatttaacctttgacgacattatcgatggaaaaagccgtggccgatggaggtca

SEQ ID NO: 272493 - DNA, 1887 bp, Cannabis indica
ctggaaattcaatgatgtcaatgccttaatgagccgaattgcacaagggcctgatcctactttatattcattgggttacaagttcaagtagggaagcagttgcagtaccaccaccaggcgatggcttagctcatccagtgtttcaagagaccaatagtgaagtgagtgacattagttgatacaagataatagaaaaatcagcatgtaaaaaaaaatatcatgttatgtatcatatttacgagtgtattctctccaaaaaagataaatatataaataaatgttccatttatgatccgtcccgccccggctcgttggactatttatccagatcgaatctggtctgactcagcttattcggattagaaatttagtattttttaaagatttttaccaatttactaattttgatttctttttttaaaaatttttggtaaatttatatatgattgtatttaatttatttatttttagaacaaacataccaatttttttaagaatattgatcaaaaagctcaaatataaaatgatctttaaatttaaaaattaggtgaataaatgtcactttctataaacatttagcaaaatggcttattagttaaaattttcataatgaatttacaattataatttttgaatatttaccttagttttctacctcttctcagtctcttgtgttcaggccaaacgtcttgctttcttcttctcttgtcgcgccaataagttcagctttgttcctctcttccagtccgatcgccacttactgttagataacatgtcttttttgagacaggacaaatctccaaaatatactcttcgagacactaccaatcttccaatcgaactgaagttctattttttcttcccatatccaataatagctatacaatacatatttataagcttttacactatttgcaaatcactaatgagctcttatagcatttttatagtctaacaatttcccacccttcaaaatcacattgtcctcatagtggtaaaagtaaaaggaaaattcaatacaaatacaaacataaaaatttaaaacttaacccacttttcaagcccattagacttttatgtttagtccataaaagaagttcatttttttaaaattatttcacaaatattcaaaaattacaaaacacatttataccgaattttaaataattatacaatttttataagtttatttacagaaatataatttttggatgtacttttacattttttttattaatttattattaatatttttattagttgtatgttatttttttattatttttatatataaaaaatctttaaatattaaaaaaaatgtaaattttttagaaaaaaaaatagtgctattatccttttctttttctgtttttctttttttttttttgttttaaaaatcagcccaagcccaataagacttcttctagggtaagacgtgagtcttcttctccacatgacgagaccgccgctgaaacttgaagcaactcaactcaatcaatggattaaatttaaatcccttcattgactctattcaccatcttcttcagtcaccaagtttccctccgatgtacttctgctataagctcctccgatagtcgtcgtttgtttctctgatggacctctgctattcggcgcgaccacgcctctctctggccgtcggtaatcactccgttcactttccttcgctctaataatcttcaaatgagttcatcatttttgcttggaaactccgaacgatgaactctacaatccatgccagatctgattggcgttacgaacggcgaagtgtcgccgccgctagtgtcaaatgttggtgttctcgagcctagaatgtcgtctccgacctcagtactctgcaagctgccatcattgacgcagatcgagccg

SEQ ID NO: 272494 - DNA, 861 bp, Cannabis indica
aaaataaaaataaattaaaattgagactacgatatgagaaaatagttaaaggttattcgccaccctcaacagtcattcctaattcctattaataaatgtaattttaatttctaatcaaactattaatctcacaaataaagttgaagcagtcaattatcctaatctccttattacatgtaatcaaggcgaagcgctcaataataaactctttacctaagaaataaatccacgaagcatgcaacttatttaacttagatgaagcttaaagatttatagagatagattaatctaggcaataaatcaataaagcatacaattcatttaacctaggttctattattcatcacaattaaaaatacctttgacaatattaaaaatttcaatttatcacaattacttagaatcctacactattaggtgaataataatcctaagatgatggtagattaaagtaaaacctaaattagtagccatctaaataagattaaaataataactatgacattcaacatagaagaatataataaatttgatataatagaaacaagaaattaatattcaataacaaaattaagaattcatgtctcgagttttgaaataacccttaactaaaaggaaactactcggaactaaacattataacaataattataataaatagtaagagcttaaggagaagaaaagaactatgaagaagaatacttcgaagttgccatctccatctcttcgtcgctctctctcgctctaagtttctatctcaatttggtagctctaggggtctgaaattcgtagactaaaaggttctatttatagtgcttgaataaacagatgaatctttttaaaattaggattttttttttt

SEQ ID NO: 272495 - DNA, 669 bp, Cannabis indica
aaggtagttagggtgttacacgttccatctgttaaataactaaatacaaagtgaaaacgaaataaaatagaaaggatgataaccaacacaaaaaaatataatttaataattaaagtctaaaaccggtttatgagctcttacatagccaatttaataaataaaaccggtttatagcaagcacaataaagacattctttttttagaaaagataaaataaaggagtatgaaaagaccaatcataaaggaaaaatagtaaaatgtgaaaagcaagaacatgaacagagaatatagtgggcaatggttgagtaatgtgactcgatatgtgaggatctatgcgtcttatatagaccctgttacatgcaaattcgatcaaacccagatggataagctcacccttattcttgatcccaccaatgagtgtgtggaactctgatacttgtaataaagtctactcttacttctaggagcttgttgatcactatgaggtaaataaatcttaatatatatatatgttaaaaaaattattgagttaatatcatcaatactaacaaattaatcattaggatgcaccattggctgagtacactcttcccttgattggtttagacatggggagattaagtgcaatatgaatatatatatatatacacaaccataaatctcacacaa

SEQ ID NO: 272496 - DNA, 3373 bp, Cannabis indica
aactatgcctctaagaaaaacacatctgcatctgtcaatcctggcaacaatactcgaggtcgagctgctcatcgtggcagaggtggtaggacaccaaacaataataatcgaggaggaaatcgaccaatctatcaagttttgtggcagatctggtcacactgtaatcaaatgttatcacatatttgatttttgatctgagttatcaaggagaaggcaattcaaacccaaccgaacctacttcaaatgatcctcaagcacttcttgcatctgcaacaactgttcctgatcctcaatggtaactggatagtggagcattgcaccatgttgtggttgatgcaactaaactaaataagacagttgattacaaaggcaaaggaaaattggtattaggtaatggtgcttcccttcccattcttgctattggttcttgttttatacccacatctaaaccattatgtctacacaaagtgttacatgttccttccatagataaaaatctcattagtgtctcataattcactcttgataatgatgtccatatcttgtttgactctaataattgttttgtcttggataaggtcacgaggaaggttcttcttcaaggaacacttagccacgacctttatcagctgccattaccatcttttaattcttgcactttgtttcctccttctgtgcttttagctacaaataataatgatgtactttctcattcagaccagtcttgcaatgtttcaaagagtaatatcaactctgccctgtgtaaggagtccagtcgaattgctgcactttggcacaatcgacttgggaatccatctcatatcatcttaaacaaagttttacattctatgaataaaacttgttctaaatcagatttaccattttgtgatgcatgtcaatatggtaaaaaccatttaaagcatttttttagtgtgcctttaaaaacaacatcctgccttcaactcatccattcggatgtatggggaccatcaccatatcccacaccagaaggctataaatactacatcttgtttgtagatgactttactaagtatagctggatataccctatgaaaaacaaaacagaagttgtcccaatctttctcacattcaaagcatttgttgagaaccaatttgacattaaaataaaaggtatgcaaaccgattggggaggagagtataggaagttacaacctattcttcaaaatttaggcattcttttcagacatccatgcccccatactcatcctcaacaaggaagagtaaagagaaaacatcgtcatgtcacagaaatgggtctagctatgttagcaaaagccaacatgccacttaaattctggtgggatgcttttgtttcagctgtctttcttatcaatagacttcttactatagttaacaagtacaaatccccatatgaaagcctgtataaaatcatacatgattactaatttcttaaaacatttggatgtgcttactttccttaccttagaccctacaacacacataaatttgagtttaaaacctcaaaatgtgtgtatcttggttacaacccatttcacaaaggttatagatgccttcactcaataggtcgaatatataaagcaagaagtgtcaatttcaatgaatctgaatttccattctcctccatgttctctgtcaaacaacagtcctctgttcacatgcacacaaatctcttagcaccagcttttgtaattccagtcttgcacaatgattccccatcaatcccacctatccaatttggttctctccctatacaaactgatgacacaaattatgagcaaaatgattctcacagccctccaccccaacctcctgttcacaccagttccaccgcatcagcccacaccaatcaaaacagttctcactcaaatgaagtgcctaatgaatcactcatatctgctgtccatattccccattcaccacccccattgccttcaagacatcatatgcaaacaaggtcaaaatctgaaatttacaaaccaaaagtctacatggtaacatccactcaacaccaggcctatgacataccaagaacagttaaacaggctctaagtttgtctcaatggaagaatgcaatggatcgtgaaaatattgcactaaaaaagaaaaagacttggatattggtgccttattctcctgacatgaatttattaactaataaatggattttcagagtcaaatatcacaaagatggcaaccttgataaattcaaggccaggttagttgcaaggggttttcaacaaactcctggtcttgaatttacaaatacattcaatcttgtgataaaagcctccacaatacgattcatttttagtttagctgtaacttttcaatgggaaacttcaagagaaagtttacatgaagcaaccaataggttttgaagatccagaaaaaccaaaccatgtttgtttgctccaaaaatctctctatggtttaagacaagctccacatgcttggtttgacaagcttaaaacagcattaattcaatgtggctttactgaatctgtatctgacacatccttgttctatatgaacatacaaggcaacttattactggttctagtgtatgtcgatgatctattaattactggaggtgattccacagctgtatccaaacttatctcagatctacacactcaatttgcactaaaatctcttggttcagtaagctactttcttggtttcaaagtatacagaaactctttagggttatatcttactcagtccaaatacgatgttgatctccttgataaaactcaatttgatgatgcaaaagccttctcaaccacaatgatacaggccaacaaactggcccttcaagacaatttagcttttgacaaccctgccctatatagaagcaccattggagcacttcaatatcttaccttagccaggccagaccttgcatatagtgtaaacaagcttagtcaatttttaaaggcaccaacaaccaatcttggaatgcttgtaaacgagtactcagatatatcaagggcaccacacatctcggtttacttttcaggccttccaacatgcttcacttagaagcatactctgatgctgattgggcctccagtttggatgacagaaaatcgacatcaagtttctttctatttttaggtggaaatcttgtcaattggagttctagaaaacaacaagctgtctctcgatcatgccttagcttcagcagctactgaactagtatggatcacatctttgcttactgaaataggaataacattgcataaacaacctcctactctttggtgcgacaatcaaagtgctcaagcacttgctctaaatccagtatttcacactagaaccaaacacatagagttggatgttcactaca

SEQ ID NO: 272497 - DNA, 849 bp, Cannabis indica
acacaaataaactcaattaattttcaaattattcccacataaataaaatgccaataattaatcccaaaattatattcagccctgaacccggttcggcccgaaatacccagttgtgactataccgcgccgaattgtcaaaacacatcagtaaaaggacaaaacatgtataactatataatgatgtagtccataagcacgtaaataaattaaattcacagctttacccttctcgggtcaaaattactaaaatgcccctagctcaccaacagggtcttaacatgtcatatctcatattaattcacatataataaattatataataatataatttcacaataatactcatttaactagttagggttttgcttatccatttccttaatcttagggcattacaggtacgctactcatatgggataccggaagtatcaatgttttagacttcttggtaggagattcttctatctcagtctttgttcaagtagataagaaaaacccttggtgatttttagggttttatggcccatcttcatacaagttaaggttcgcctttcgggatgaattggtaggtttaagtacaatatgtggagattcatggtgcttaggaggagatttcaacgtagttaggagggtccaagagaaattgagtagtaaatcaaacacaaagagcatgaagatatttgatgagttgatctgagaacttaagttaattgatcctctgttgaataatggaagattcacacggtcaaacttcagatcaaagcctatttgtagtagatgggatagattccttttcaccaatgcatggaacaatgcgcttctttatgtcagacaagagatgttggtaag

SEQ ID NO: 272498 - DNA, 999 bp, Cannabis indica
tgttagcataatatatatattttgagtattaatttagtattgttataatttctttgtggtatataattttattactacggtatattacttttcaatgatacgatatatctaaaattgtggtatatatatttaatgatctaatatattaattcgtttatgttacaatataataatatgcaatgctaaaaaaaaattatataacttaatttaattattatatttttgttttaaaaaaataatatataataaatgtatttttataatttttattagctaatttattatatttggtcatttcttagtttttttaaaagaataagacatttactaatttaattttcaaatttaggactattttccatctcaatcctataattatatggttaaacaaacattacaaattatataattacttccaattgtacccaaatctaattacactagaacttttcaaacgtaccttaaatcaatgtttcattcataatctatcacatatgtatagattagttaacaaaatagttcactttgattgttttcggttcttttaaaggagataatactattttagttcatgtaatgtcgctaaatattattttcgattctttatcctaaaaagtacttaaaaggagccttcgatatattattaaagtagcaaaaaaaaagtttctaaattataattttagttaattataatttttaaaagtaattaagtcattctgcaaacatagttgcccatgcttttgcatgtggctcttttttttttttttacttggagtgatagttcctactatgttgtcatctttattagtacgtgactgtttgatttaattgaagttgcactctagtattaaaagaattaattacccgtttttactttattttcttcaatttttaatttatttatttaattttgtttttaaaatttattagctaattaataaaaaattacagtatgactatattatagatgatagtctaccaattttagataaacccaaa

SEQ ID NO: 272499 - DNA, 1237 bp, Cannabis indica
cattttcgcactatttttgtttcatagtacatttcgatctgtactaagtgcaaattttcatattttggatccaatctaagctgcataataactcaaatcattctaatccaatccgcaaaagtacgaattgaatcgattaatttagattggttagtttttaatattaaattgcttaatatttattagatttttttttcacataaataacaataaaataaaaagaaattattattgctttatgtcgccaacaacaaattaaaataaataaaattaaaaaacaacaaacacaagggaagaaaaaattgtatgtataataaaatatttagttttgttttcctatgtgcacttgcatagcaaataaattgccattgtgtacacttacatgacaaataaattttgcaacaataaactattacgcttagatgatattagtgtcttattgcacgtcttataattatccaaagttgtcatagactatcaaatttagatgagaatgacggtaatcgagattgttcaaatagtttttaatgcaaaacttttcatctatctattttatgcattttttttatttgataaaatttatcattcaattttttatttgacaaaatttgtcatttaaatattattattgcatgtgttattttattgttcactagtatactttatgtaatataaccatcaacacatatttaaaaataaaaatttaagactttccaccacattaatcataaactttaaaaaatttataatataagaattgttccatattaataaatcttaaagaaatttaaattcttgtttagaaaaaaaaataaatttaaattattgaattaatttaaaagcttaaattaaaaaaaataaaaaaaatcatgtcttttcaaatgattgaactcatgttattggacttaatatgtaagataattttacaacttacaccatgattatattgtcggttgtattgattattataggattaaatagagcattgtactattgggcaccagtggtgcccaacaccttttataggtggtgtctcgcgattgattagcgatattccctaaaaactattttcttaagctatatgggacccgatactaattacaccaatagcggtatgacaccgaggagggtgctaggcaccagtggtgccttttagcataaatagtcattagataaatgaatatatgagttttcttaacaaaaaagtagttttcttttggtggtgcgggcactctat

SEQ ID NO: 272500 - DNA, 2462 bp, Cannabis indica
agatttgagaagcttcaacctaagcagtaaagaatgaaatacttttctgaaattttaggcgtacaaaaaaattaagtgactccattacatgctgaagtgaactacaaacctttttaacagttcctatccataaagtaaatataatctcaagataactaatgtagccattagcaaagtaagaaaacacaacaaaagagtcatccctacccataataactttttaagaagttgaaaatttttataagtcgcttgttgacaagttttgaaaagatgacctttttgctatagataatgtcttcaaagaaggagaaatcaacagcatagcatctctcaagtctaattcttgctctaatttactttcagtaaaaactccaaaatgcggaaaatggcatacagtcttcaagttttcaaataccctcttcaacttttttggaatgatgagagagcttttcatgtatagagttaagaaaaagaataaaatatcaaatgcacaataaatagactaataatataaatggctgaaatgttccaatgaggtaaaggattgagaccttgaagatagtccacaatcgctttacagtcagagaacacaagaactctcttctgacccttccttgttgcgaaaagcaagcatttcggatcaccattgctctcagtttccatggcattgatgagagcctgaagagagtcagagaaaacattcaaacagcattggaccattctcttgcaagctcaacggcattggtgcctggtgatcgcgttcagatcaactttttttgattcaaaaatgcatttattcctggaaaaccagatggtctcacacaggccagctagctgcaaagctcatcaattcatctctgtcaacctgaaggggggcaaatggggacactccaaggagtatttcatggaaaccattacctcaaatacatgagaaagagaaatcacattctacataatccattacacctcaccaacatattttgcctgtcaataaaaacctaactgattgttctttaccaattttcatgtcaataataatctaaatctagcatgtgtgaagagagaaaaaaactgcaactttgtacagagcagccacttgttgattagtttgttctccttttaattctaattcttacttgtttactttctgaaaactataattaaatattaagcatagcaaaatccaatggggtccttaccatatatgcagtagagttataagattgttatttgagtcaaatttatgagtctcaacaaggcagccaagaagaaaaaggctccgatcaagtctttcactctaaaagggtctctgactctccaccaggagctgaatttctcaggcaataaatctcacctgaactggtagttgttttttttttacttaaaaccataatatacagttcagttatacattgctataacaagaaagagtacacattacagaacaacacagcttgaaaccagcagtgcattattattgtatatgccttagttcttaccacatttccaattgattaagctgaaccactcaaatcacacaacacaaatttcacaaacatattaagaaaccagctcatttaattacaatacagaactggaaatatagggggcaaacaattataagttgttaaagttgaacaaacagtggtcattgtaatgataaatattaaatatagataatgagagatcagtacagtaatctaagcagccataatttaagaagtccttttcgctatagataatgtcttcaaagaatgaaaaatccacaacaaagcaactctcaattctgattctttctctaaactacattcagtaacaactctaacatgctcccagttaaccaatggaaaacgagatgcactgttcaagttttcgaacatcctcttcaagtttttcggaaagatgagagccttcatgtaaagcgttaagtaaatgaataaaatatcaaatacaatacacagtaattagactagtaatataaaattgaaaataaaaacaccacataatgaaataagacaagtgataagcatacctcagctgtgtcaacgtgtaggctgaccatactaatttaaactaattttttttataaataccgaaacaattaggtgttatattattagaacaatgattttagtgaggtgttattattgaaatacctttattattttatgacaaaggtttaatcatttaatatggcaatgctgtaaaagaaattaaaaataataaaatataaattgacttttttaaaaaaaaaactaatttactccttgcaaaaatttccatcaaactatcataactatagtaagagaatatgttacatattatctatttataaacaactcacaattgtgaagttaatgtaataacattagcattttcattttcatttagcagtggaattttcttgctaatgtttttgaaaagtctatatcatcaataaaaaaagtgtttttaagtgtatt

SEQ ID NO: 272501 - DNA, 506 bp, Cannabis indica
ctcttaattttcttttttattttttgttgttgttgttgatcaatttattagaaaatgggttttgcttatccctctatatgagtcatacaatgcatgatcttttcatgaatattagttagtggaattgatatttatttaattagcacatcatttagagttacagttttaaattaattaattaattaattaagatcttaagatacccccagcaacaccacaaccttatctcgcacccaaaaaagaagaaaaaacagaatttggtagtgacatcatatactaattaattgactataagacagcagcaataaccattattgtgtgtaagaaattaaactaatcttgcgggctatataaatatatacatttgtatttctagaaatacatttgtatatatatggaatatacatacttatacacttggagcctatcatcatcataatcatctttgaactaaatgaaatttgcgtaagcaatatgtctatttcgaagcttttgggttctccact

SEQ ID NO: 272502 - DNA, 674 bp, Cannabis indica
ttacaaagatttacagctaatagatttgcattgttgctaaaaatatattctgaatcatcatggcatatttacaccaccttaaatgatctaactcatcaccagtaacaataatcaatgtcatcttgaaaaatacacttttagtacagacaatctagaagctttatatactcacaagctttccggatacgtacatggcttccttcccggatggaccttcaagactgacagtaagatgttcgggagtgtatctccggattaataacaagctatcttggagagacattccatacacggtacaagcttatttggaagtaacttttagattctacaagaccttttgcacaagactttttagatccacactaagcttccagtatatgctcttcagattcacagcttccaatactggatgacaaaacttgtaaccataaccaataaatttttgttatttgtatgttattttttaagttgttatgttgttttgttattattttgatgttgttttcttgttatttttatttaattttttgttgttttcttgttactttcatgtaattttttttttttgtgtttttataaaataccgtaaaaatatatataaaataagtaaacgtaacaatataaactatttacaaaaattagtattatatcaaaattgtaattagtgaaatgtg

SEQ ID NO: 272503 - DNA, 1631 bp, Cannabis indica
aaaaaaaaaaaaaatagcaagagagctaatttgtctcccctcaaggtggcaatgtcactccttatggtagtcatctcattttggagagtggaaattgagtgttcatttcacctctcaagttgtttaaatttgaagtaatggaggtgtgaaggttagcaaaaaatgttgaagtgaggagcttgtgttattggaggcacttcttcttcggcttcctcatcgctttgagcttgggcttcttgctcctcctcttcactttcacttgagaccaagggtgcttcctcatgggcatgtggaccttgtttggtggaaatccatttcttttccacttcattgaacttgtagcgcatagacttgaatgtgatctcaccaagagtgtcgaactccttgggttcataaatgtcggtttcatcttcaattgggattcctaggagtgggaacaagtagctaagaagataaccataggataagactctttttagggtaggcttatacacttcattgatggtttttaggataaggtagcctaagttgatttggttgtctttcaagatgatattgtattggatcatttgatcaagtgcactcacttcaccttgatggcctttcctaggaataaggttggagcatataaaagcatggaggattttgccttgaagggtgaggaaggttcgttttagttttaaattaaagttgtcacctacacacacatgtttgttgaaaaggttatagttgaaggtggtatcattcttaaggcgaagtttatggtcaagcaagatgccttctttgggtgcatttaggagatcattaagcgtgtctacggttaactcaaatgctatccctttgaggattcccttaacactatatggattgcaattaacctcaatacaagcataaaaagctctaactagcctaggatagatattagtttgaatttctaacaaggttttccatcccatatgttcaaaaagagaactgaaattgacatactcaagggctttgagatcacattgcttaccatttagaatatctctttgtgagaagtcctcattgaatcttcttgcatacttttcatgggagaagaggtcattccttgctttggacctttgttccctttgttgcattgagaatctttgcctttttggtcttgaagatgaagcatccatggaggtagagggttaaagagaatgggaaagttaggtctggagagagaaaaattgagagaagagggttggaggcttctatttagggttaaaaaatctgagtggggaatagaaactctgtggtaggatttttatagggaaaaattcgagtttgaaaggactaaaaagaccttggaatcgccacttgctgcgaaccggttaactggttcgtcaggtatgcagaaccggttaaccggttcctgcagcaggcagattccccaaaaatggctttaaaatgcgccattaggtgcatatgggtgattacaattaaatttaatccagatggaacaattgcttgcataaagaccagtcttgttgccaagggttatgctcaaacctatggagtagactttgtgatattttttctcctgctcctaaattgacttctattcgattgttcattttcatagcagctattcatcattggccttt

SEQ ID NO: 272504 - DNA, 547 bp, Cannabis indica
ccccttaaatttctacttcccaagaattcaaaactacaccaagataatcaaaacaaatacatgcacagtccacaatcacaatataaacccaaaaatccctctatcaaccaataatttcagaataagcactattttcacaaaaatactcaaagttctcatgcaatttctcaaatgtaatagaggaatctacttacaaacccgaagatgctactactccacctccattgttgaatatccttgaaagcttgaggttgaagatgaagaataatgttatttttggatttggggaaatattggtgatttttgggatggtttttgatggaaaatgaggattgatgagtgaaagtgggttttgggatggattgggatctagaaattgaagagaagatgagaaaattgaagaatggagatgagaaaagttagtttttggttgagaagagatgaggggcggctgaggagggtttgaaaattttgaaattggtttagggttgaatggggggaaattggatttttatagaaattctgtcagctggtcgcgactagcttg

SEQ ID NO: 272505 - DNA, 1731 bp, Cannabis indica
tttcggtggagagattgagatagggagcatatgtaattttgatgtgataagtgaaatatctctctctttgtgggtttggtaattttatcaaactgaataaattactttacttcgtttctttgtcatttcactgcatttgaagtttattgttttcctcaacaagtagtacttgagccaaaggttaggagcattgggatagctggttgcatttgcgatgtgtgggagaagccctcaatgtgatgatctcgcatttaaagatctatatggatgtcttgtatcgaaattttagctaatattgaggtagtcgggtggcgtgtcccgttggtgattacagcggtacaagatggaaatcttgttggcgccttgtgtcagaagtcttcttgacaatgaagtttaggcaatgtgttccattttgtgatagcaatggtgcaagatagaagatcatttgaggggaggtatcaaaaatcctaaaatcgatctaaaaagtagagccaaaagagtcaaccactcgtgattcaaggatagtaagccaaaaaataagtcgcgcttgtgatcgagttatctaagatggtaagcaaaaaatatctactatcttaaaagagatgtcaaagagtactacacatcgttaacgtatagaaaataataaaatatataaatttataaataattttctcattattaattaatttgaaataaattgagtaagtgaaatatgatgataaattgggtgagatatcgggaggagagaaaagatgaggcgtgatgaaacttatgccttttccttttccatagaaaaagagtagtttcaactttatgcatttattaccgttcagttcactctttctctctcctcatttgtctcttttatgccccatctcaaattctccattttaccccctctcaactttctctattcacataattgcccttcccacttataattaattgattgcaacaataataacctcatttaacaacatcattattggaaatttattgtattgttatttatttttgaagaaataattggaactaaaataaataaatacaatattttaagcattgtatcgaaataatttaataataattaaaaaaaaagacaaaaacaaatatatgcagtgtgtctctatattatttgttgtctttttctttgttgttttaataatatccagacatttttatttttaagataagagaatttagcatcatataactggctattttatgttttacacaatattgtatatataattacttaatttaaaaaaaatatatacataaccatataaatattcacacaaatattttaaaacaatgtcaactcattattatctctataaaaactactatagctagctcctttaaaatatttatattaatttattattatttttctaaaaaaattgtatagttagtctacttatttgatctcattaagatatagaagaagtactaaaatgattactaaacttgactatatatatagttacacatggaaaaaaattacatattatttttcaactaattcaaacatagtgattgctagtctttgtacattaatcataaccctatactctttcttataggtgaaggttaataataattaattaaataaaataaacaaatatattttatatatatataattacatatatataaagaatccactcattgtggctgcatttgctatgaaattattatgcttgtgtttgactccaagaaacattaatc

SEQ ID NO: 272506 - DNA, 992 bp, Cannabis indica
attttttttaaaattttttcttcacatttatttttatgtttaatttttaattactttatttttgattttcatttttcattaattttttttctaatttcatgttacatttttctttttattgttttctaagaaaatttcattataatttttttattttaatttttttgtcataatatttaaaatatactttatttttatttgacaagtatattttttaagaatataaattagaagaaaaaaattaaaaaaattattacaattaaaaatataaattttatattaaactaaaattattaaaatgggtgcctttaaaaattgttggggcttaaataaaatttcccttttttttttagtcaaaaggatatatcagctcttactatatagtaggataaataaagtgatctgtgacggtcatgcctaatttttctcccgctcacagttttccaatacaggtagccacctagggaagcacaacttttaatccgtgtcactaaatcattcgccaacgaatagccaatcaaaatcgattaatctaatactcataaaataatattaaaatatttaaaaaaaaaatagagggcatttgttggggtaaagaaagataaaaggcctccatcaatatcattactcttgccctttttcttctgtaaaattctgaagctctctcttcaatcttctctgctacaacaatcaatggcttccagtcgatggctcaggcctgaggtaggctttcaatttaggcttacttctcctttgttgttttttcatctttccgataaagtctgtaattttcttttgttttcctaattatttatgggtttgggttttgtatttaggtttacccactgttcgctgccgtcggtgtcgccgttgggatctgtgggtttcagctggttcgcaatatctgtatcaatcctgaagtcaggtctttctcttatctataaatacaaataatatatatatatatataagcttgtgttttggctaaataa

SEQ ID NO: 272507 - DNA, 709 bp, Cannabis indica
ttcttgcttaattatactatacgtgttctttaacttgttcgttaccagcttaccgtaggactaatctatacttacatcttggcaattcggtagtacaattgaatgtgagtcttgatcagagatatggaatctataccttctagaactattagaagtgaaacgatatttttcttagagcttggctcaacgtgataaatgatagaacactcatttcagtaattatattagtttactgaaatatcatttacaagtagctaagtattttaaggataaaatacattaaagggtaaaatagtaaatttatccttactcagtgtaaaccgtccatagaggatcattgattgtttagattgtaacaacagataattcataacgtatctatatttggtatatgtaattaggagtgtaattccaaatctatagtggagtcaggaggaattaataagttaggaaatttacttggtaaattttgaatctacttattaggagcttggttacataggcccatgatccccacatttgttgagataataccatcttgtagactcaactaattgatttagtatgttaattaaaattaaaaaaaaaaaatatgtcttgtttgagaatttttaccaagtttggacatttcttagaagaaaaaaaaaaaataggggtttatttaaataaaaattggtatttaaataattagaagagataagtggtaaaa

SEQ ID NO: 272508 - DNA, 934 bp, Cannabis indica
gcaaagaaagctacaaaatctggctctctaaatgaagtttcaatggtgttgcttaacaatctattatctttacctttcgccattgttttaattctcattttcggtgaatgggaatatgtaatgaatgtgtaagtcttgtcttaaaatgttggcattacaaacttttcatttgctttctttcatggtttaagtagttaacatttcgggtttttctctcattgtttcggtcaatgcagggaagtaacgaaatcgccattgttttgggttgttgcaacggctagcgggtttctcgggctagccataagctttacttctatgtggtttttacatcaaaccggtcctaccacttataggtaaccctttcgctccaagctttaaactaacttatgagtataaatgttaactcaattttcgttaattttttttttaatataactaacttgaagtcagtttctagtacgaaaaaatacaaaaacatgtaaccagtctggtcataacacttaaaagggtcaagttattatttaattttaatttgatgaaaattaagctcagggtactattttaaaaaacagagtctaattttaacaaaataaaagaatttaatcggtaactattttatagtctaacattgagcttctactactcgacagtttggtgggttctttaaacaagattccgatctccattgccggtttgatgctattcaatgtcccgctaagttcctccaacttcttcagcatcttgtttggtaatcaacattacaaaacattttctcattgtaaagacagattcaaccatctcattttctcatttgtaacttttttttctttaacattttcaggtttatttgctggagtgctgtttgccagggccaaaatgtcatgattttcgtatacaatagtctgaattaatacaaatttttttcttttttttt

SEQ ID NO: 272509 - DNA, 870 bp, Cannabis indica
catgagaccacttaagcccacatacctataagaattcgataaccaaacacgttaagttagttaattgtgaaaaatctttcccacaacgagaatgttttgtatagttattgcacacaccttagacttatggccaacaagcttgctgatgtagtcactggagacccgaagatcatgttgaaatatgttcctgtctctgcttccagaagctaaaatgcgtgagttgttccatgccaaaacacctgttcttctttgatggccgcccaatgttcgtacccttttgcattgtgttccgtcccaaacctgtaatagaaatttaaaattttcaaattaacttatgatcgatcaagatgggttgagatacaaggctatatttcttggtgataatgaatcaatatctgttcaagtttcatcaaattctactcaatgtgatagtaattgcatatacttcgttcatgacaaaaatactggtggatttggtgatacaatcttaaaactcgttctttcgtatgtcgttttaatattgataagaaacactttaggaaaatggtggcaaaataccaatttggattgtacctgccatacgcaatgcatagtgcaaccaggccacaatgtatatgtgtttatcaattcaaatttattactaatattaagcgtttaattgttatttaaattaaataaatggtaaaaatattgaaaatttatctaccattgaaatgtatttatgtatttttatggtaaaatcttcaaattaattatagctttctaattaaattttgattaattaagttatttttttatatgtatcttgtattagttatgacttaacacagagatatcacaaagaaagtccattcatcattccattaagga

SEQ ID NO: 272510 - DNA, 711 bp, Cannabis indica
ttagagatctgagtgaaaggagacatattccgctgcacccactgtaaggtttcgcatactttatatgtgtatatttatttatcgttttagaagttcatatttaggttgttaatcaacatacttgtgagtagatctaagatcctggtaaaataaatcccaacaataaattcataccctttgcgggagcacttgacttcggtccagcaagagtagatggcttccattcccaagaatggggaagactccagatggcggatatcccttgcatcactgactattaggggagttccaatcatggaggcctttccacgagtcaaagccgaatatatcttaaccttcctggaacagtggtcaagagagtttatcaacaaattttatcttaacctttcttgactataattcacgtgtcgagcttacaaaaattcgaacaacacttactgagactaatagttttgaattataatgatatcatcataacactactagaaaatcgggttttagtaacacacattgagtaactctaaaactgtttagtgacacttcaacacgccactaatgagggtgactggaaagacagtttttagtgacacttcacacgtgtcactgaacctttttacgcatattcactttctgtgcgtcattataggcgtatagagtcaggttttgtcagactgaaaaggtaacaaccacagacatgaagtgtcactatat

SEQ ID NO: 272511 - DNA, 962 bp, Cannabis indica
gaaaacttcgaacatgagctatagttgaaagggttggccactcttgaatgactttgatcttctcttcatcaacctcaatacctgtagcactcacaagaaatcctaggaaaacaagcctatcggtgcagaaagtgcacttactaaggctaacatattgcatctgttattgaagcacatcccacactaattgcaaatgtgaagaatgatcatacaaactcttactataaattagaatatcgtcaaaatacaaaacaacatattttccaatgaaagcacgcaaaacatgattcattaatcgcatgaaagtactaggtgcattagttaatccaaaaggcatgactaaccattcatacaatccaatgaaagcatgcaaaacatgattcattaatcgcatgaaagtactaggtccattagttaatccgaaagcattcatacaaatcttatttggttttcaatgcagttttccattcatctccttctttcatatgtatttgatgatacccattcttaagatcaatcttgaaaaacacataagaaccatgcaactcatctaacatatcatctaaatgaggaatgggatgttgatattttaccgttatgttattgatggctcccaaacccagaccagggcccgggatccgaacccgaacccgaacttggacccagaccgagacgtagggacccaaacatagataggggacctggacccgagacttgggccccagaactgggaccaaaacctgagcctcggaactagggttgggatccaggaccagaacccagacccaaacccaaacttaggacccagctcgagacccaggacccaaactgggattaggatctacactcaggatttgggacacgagccatctacccgacctgtagtcggtctctagatttgggactcggacacggatatgaacccaaacccaaactcacactaggaccctgacccatacctg

SEQ ID NO: 272512 - DNA, 592 bp, Cannabis indica
cctcttcttttagtccctgttaatgctatttctgttgctggtaaaagagttttcaggttcgaaaattcttggctaaaagaacctctctgcagaaagattgttgaggatacctgggatcaaaatcctagctgttctatcatggaaaaaattgataattgtggtaaggtgttgtttgagtggggaaaggactatacgggaaattttaaaaaacgtatcaaagagtgcaaggctgaaatcagattatggaagaatggtagggaccccgtggctgttacaaactacaaagatgctcaactaaaattgaataatattttgcaatagcgggagattttcgagaaacaaagaagcaagcaattgtggtttcgtgaaggggatcagaattctaaatacttcatgccaaggctacttcgaattagggctgagcatttagcccgttgggccgaccaaaccggccgacccaacccgattttgggccgaaacagcccctttaaatttggaccgaatagccattggtttgaaaaatgtcaacccgttcagttttgggtcggaaatgggttgggcagtttatgggccaatgaacccaacccaaccc

SEQ ID NO: 272513 - DNA, 1264 bp, Cannabis indica
cagtgatcatattcatatcatatcatatacttaagacttttttctttttgtggaagctctcatgaggccaggtgtttgatcactcctactcattaccatagaatttgttggttgttttttgggaaatttttgtttatcatagattgggccatttatttcaattagtaactatatttaaggggctcatttcaatgacaccatagctttaatatactttaattcaaaatgatattgattgactataggagtagagtagaatgctattagagaaaaccactccaaactaacatgcatttatggtaataataatcatgccttatcatatttgcaataagattaaatttaaattattataagccaaatttgagatttttagagtttgcaaccttttataagaaggtatccaaagcattatgggcaatttgaaagtgtgaagagtgtctagcacgcgcggcagagagatctgcataaagcatgtccacacaaaattcagtttaccataataccctttaagaaggcgacagtacataggtattccatacataagttgtttttttttttttttcctttatttcactttattcaaaaatatttggtttgaaatttattttagttaatttgttgtttcagttggaaaaaggaaacttctatttgggtaaagagtgatatagtttgctgacgaaagttttggtatattgttctggagcagcgaaggaactgtccctctcgctcttaacaaaaatatatgttattctttctttctttctttcttttattattattcttttgtatctatatatattatatgattatgaatattacattgattctaaaccgttcgatcatgatctcattctcttattttatttttgtatactggtcagtattttaatataagaactaaaacaaaactttcattctcattttattgttttcatcaattaaaatataatgtgagaagtgagaaccccgcacccctagtgcagtagagcacgagaaaatgttttcatgtatatattacattcaaatttgaaatttaacgtattttaaattaggttagtaataatattaataaagcccccctcaaaaaaaaaaaaaaagtgtaagagatacatttcctttcatgaatataataactcgattcagtactattagtaaatgacttaacaccattattaatgttcttgctcaatgattttaggggagttttttattcccagcaaaaaattaatataaaggcaatcatttttataatttttttttg

SEQ ID NO: 272514 - DNA, 531 bp, Cannabis indica
catcaatggagattccaagtcacctggtaatttttcagactggtaatctcatattaatataagtatctagtgtttaatccctctctctctctcaatatctaactctctgttgttttcttgtgcatgtgagatcatcaactccttctccttcaagctttcaacctctggatcttgaagagaacactcaaccgtacctggttgtgtatctgatgtaggtatatatagatctagggttcttgttttttgcttctgaatttgttagttagattagttatagaaattagttaggtgtggattaatctaatccattctaactaatttctgttagggattatagaggctgaaggccaaattagggatttgcatgtatttacttttctgttcttgtattaagtccaatatcagtgtaagtagaggtttactccaccaatattttaaaaacctacctaaaaataatactaataaagtcctaacaaaagtctcagatactaataaaaatattttcttcataaatacattatttaattatta

SEQ ID NO: 272515 - DNA, 1473 bp, Cannabis indica
tggcttagagaagtcaaggtgccgcacggatgttccgctgcctgaaaggtgagcccgtgacagttggtattagagcaaagttcatctcagtgggaggtgaacctggttggcctatcatagagaggatgtaggcgggtggacggatcgaggtggtccaaatgttggaacaagacgtcgttgagccagttagtcttttaaagaggattagtaggctgagatggagttaagactgggttgcttttcttcatgggaatactggacatcctagagaggagacgttgatggttgcttcgagtcaagttcagagatgctagaaagacaactaccacgtgcaattgtagaggggcgcaacaaaatgtttgaaactcgttggcatgttacaaggttgacgagatagtccatactgtatgcttggtacactaggccaagtttgcctgagtgacatcgtaagccgcaggaggcgcttttgttgaaaaggaagcttgttggcaggggtgtggaggtagtacatagaccgtcagattcttgttagtcacgacaaaggtcgagagttgatgactgagatggttcaaattgggatagacatggaatgcttcagttgctacatgtgtgtgtcaagagggacgcacatggagaccaacggggcagaggccgcaatcgtcagaggatggttgtacttggaggtgttcacatgtgagttttatttgatccatattgaagtgctgtggcagttgagcgagatgtgttggcttgtcaaatcgccagagggcgtaagtcacacaaaggcatcgatagagatgtagagttgtggaatgaatgcatcaaagaagccatcagggctaagatgatcgagcgcaagcgttgagatggcgctagagtttgtgtggaagccagagggctgtgtcagtgagacttagttagtcatgtttacctgcgaagttggagaagggtgctagagtttgcatgaaggaaaaagggctgcatcattggaacttagtacatcgtgggagccagaagggcgtgatgcaagtgtgaatcagctggatggttgagcggactttgcatgcatgtggaaatcgacaggggtgccatatgagttagttgactcaagagtcacatcctgcgggatgcactttgagatggcatggtgtgcatgaagagttggggcggtcaggcatttgcgtggagcatgttgtcgaggacgccaacagatgaagtgcggaagagaccttcacggttcactcaacgaactagagattcattacaagcatcgagatgagtatcatggagattgattgttgtccaggatgtaaagtgaagaagactcaggacacaggtagtgctagttatctagggtgaaagtctgcgggactcaggtactaagataacaccatggcaatgttggcctgttataggcataaatttaccctccccgcgagaaagacttgtctatagagaactcgttgtattgaa

SEQ ID NO: 272516 - DNA, 583 bp, Cannabis indica
agacataggctaaaaatagccaacagtagtccatcacgaaagaacaccacaattaagatgggtgacctcctggtaagcttttcccaggaagtgtgcgagtgagaacaaagcatgttggaaacactctttattagtttgtagggtgtgtcatcattccaaagaaaaaccagagtgacatactcgtgtagaagagccattattctgtaggtgtaagggccaagggaggcttgaagcaggatcgttaacaaaaaattgtatcaaagccttaacccagctggatgtgtggtcgacgaggacgtcgaaccccgtaaggtgggtgattgtgtgacaattagtagtcccgttatccgtaaggggaagcaccgggtaagctgtgtaatcccacatcacttgaagaaagtcaagtgtgatgattttcaaactgtgtaggtatgagactacatagttggggagggcttaaatggattgattggtactacctatatcaaggtgcatcatattttttggtagcccatcatgaaagaactccacagttaaacatgcttgacctgaggtaatttcaagataggtgacctcttgggat

SEQ ID NO: 272517 - DNA, 2241 bp, Cannabis indica
tattttatagtaaataaaatcaaaaaaatcataaaaatgtttaaaattccgtgaaaccgtatttttattatttttgtgcatttgtgaaattaaccctatattaaatttgtgaaatttccttaaaaaaaagtgtgtaaattttttacattaacttgaaatattaaactaaaaatataaaaaatggagcctttgatctccatttcataaagactttaggtccatggaagaacagagcaaccaaaggaaccccatttcagggatttggtggttcttcgccatagccacctgcctgaagctccttctgatcccatcctaccacagcacagactttgaggtccatcgcaattggctcgctgtcacaaactctctaccaatttcgcaatggtactcagacgaaaccagcccttggacgctggactatccacctttcttcgcttacttcgaacgcttcctctcaatcttcgccaaactcatcgatccccaaattgtcgatctccaaaagggtttgaactataactcaaatactgtaatttattttcaaagaattactgtgattgtatcagatttgtgtcttgtttatggggttttaagattgacaagaaatttggattcaaagaagcgaaaatcgatatgggtattggttatttggtccccaatgcttatgattgtagaccatttgcattttcagtataatgggtttctcattgggattctattgatttcactttcttatgttgaggaaggaaatgatttgatgggtggttttggttttgctgtcttgttatgttttaagcatctttttgctgtggctgcacctgtttactttgtctacttgctgaggcattattgttggaagagtagggtttttgaggggttttaggcagctttcggctatggggactgtggttgtggctagtttttgtagcagcatttggacctatttttgtattatgggcaggtaattatctcttcttgtaatgtttaatatttagagtaaataggcaaagttttcaggttgtaagctgcataaagtaactaatgtttataaaattgtgattttcgtttagtttcatcaatacaagtgtcttaaataggacacatataaggcttagattctaaatcattaggtttggacagaaacatatagtatcagtatcagttacttctaatttttttttaataaattcaaaacgaagtctgtaccgataaaattagacgaaatctatagtttttctcatattgagtacttatgctgctaaaaataatcattgaggttataccgcttataaactcgaagttttggtcacaattatccctatttatcattgcttttgttttccttatgttatcaaaagtgaccacgtttatctatagcttagtaatacactggaaaatgtttatattgttgccttggtctttatgatttaattttaatgtatatgcatattggattgatttgaatcttttacatgttacagagcatgaacaaacaagtaccaattgagatattacagttttattcttttctatatttgcagatacaacaagtcatcagccgcatgtttccctttggtaggggactttgtcatgcatattgggcaccaaatttttgggtgctttatattatactagataaagggttggcattctttcttagaaaacttggtttcaatattcaaacacctacagcttctttcactggtggggttgttggggattcttcaccttttgctgtcttacctcggatcactccattgacaactttccttatggttctccttgctttatgtccttgtctaattcaagtttggagaaatccacagccaaagaagattacaagatgggtagcttacgcctatatgtgtgggttcttgttcggttggcatgtgcacgaaaaggcttcacttcattttgttattcctcttgccattgtagcagtgcagagtatggatatggatgatgcaaagcattacttcattctatcaatagtgtcctgctattccctattcccacttctctatgaaagtcaggagtacccaataaaagttgtattgttgctactacactccattctgatgtggttaggattttctgcactgtatcaaagtggtagaactgtgaaaacaaggaaggaagtaaagacaagtagttctagtacattagctatggaggaggagggagggtttagtattggcttacttgagaaaagctatttgattggcattataattgttgaaattt

SEQ ID NO: 272518 - DNA, 531 bp, Cannabis indica
ggatgaaaattcatgttatcgtactgtgttcgtgttgatatgtttacacgattattaattatatcaggatttcaaacacgaatgcaatacaatttcttaacagatcacacgacacaatgatacattttataaatgtacgtcatgacacaaataaaaaaaatgacaaatttaaacatgattaaacatgtggaattaattaaatttattatataaaagagttttatgaacttgctacgtaattaaaatatattgtttcaactaaattattaaaataaataaaattaatttaattttaatttaaaaaataaaagaacaaaaagggattggtattttattaaaataaacaaattggttataaaaaattaaaaaaaaataaagaaaatattgtttgtgcaataaatatgtatttttttttactttcatataaagaataaacgaataaaatgttaaatatatatatgcaatggaaaaaataagaaaataaaaaaagatttcaaatataaacaagataacaaaataaaggaaaataat

SEQ ID NO: 272519 - DNA, 663 bp, Cannabis indica
agagaaaaaagagagaaatgatgtatagagtgattgatgtaatgcatcaatcaatcaatcacgtgtcaaaaaaggttgaattgtatgtgcatgtggtaaaatagtaataaaatataaaagatgtgtaaaaaagttggtttagccgtgtataggtattaatgtaataaatttatcattttagatttttagtgtaaaaatttcaaaaattaaatggttaaaaaaaaatcatttgcactcgtatttatttttttaaaattttatttttgatattataaaaacataaaaaatatttcttttagttataatatataacaccatataaaaaattatttattttttagtataacttttctggtaccaaaaataaataaaaaaatgtccataagcaaaaataatccccatatgtatgagactcaattagtgtctaaatcctaagagttaagagcactctattcaatcatttataatagctgaaaaaaaaaaaaaagactaagagcttaaataggatcagccctaagtatacttaggttagactcatgtctaagacttacacttttcgcgagccaatataaaaattaatggtcttattagacttttattttagtaaattaagtatattatataaacaataaatattcacagcttaattagttgatgtgtatg

SEQ ID NO: 272520 - DNA, 5650 bp, Cannabis indica
gaggaaaggtatacactataaaaatacgtcggtatgcacttctgtaaaactaaatgaactatcttaactctacctggctgcaggagatctccattggaagcaagtttctttcagtattaactcaaattggcaggtaaaaagcataacgcatttatgaagtactaagctatattttcgcttatcttatcatttctaagttctctttgcaacaggttgtggcgaaattgaaaagcaaatacatggcaggaacatttaccaaaaagacaaaatgtaagcaaatactaattaccttaaaagaaagcttttgtaagctattctcaaacatgcttttttcggttgcaggtgtagtctctgaagttcgttgtgatatcccagcatggcccggaagagagaaagacagtgacaaagaatcaaaggcatatttcgggataaagacagttgaaaggaccattgagtttgaatgtaaaaataaagaagagaaactaatgtggacagagggaatacagcacatattgaattgtcatgccaatgtaacattatcttaagtggtatgatgattctttgtgatcttctgtaatcaaataaacttgcagtaaataatccttagatgtacatgtcattgggaaagcaagccagttttacaacttttacaatcatgtacagattgatctatatctatgaattgggatcaagaatgttcattcatggtgtgattttagataattttactctatgcattaagctttcttggattaattgatggcactacagaaaaaaatgtagtggctgctgttatttgggggtcactctagctccttccgaaaatcaatgttatcgacaaagacctgtagaagagggataaatttttaacatgtgttgatcaacataacaaacatgattcatgaaattttaagcagaatagacccaataatttttttagcggcataagtacctaatgttagtaaaactgtaattttcattcagtttcttcacgacgaacttcgttagtgtcttaaatttagagttaactgatactacatgttttagtccagaactaatgatttagaatctatgccttattgatactaacagaaaatgtactgacgaaactggacaaaaatcacagttttactaacattgaacacttatgtaactaaaaaaaaatcattgagtttatgtcagttataaacttaaaactttaagtacttatgccactgtagtaaagagttttcacaacaattttccagtttccagtagctttaaataatgtttttcttctgcaaagtctcattgaaaacaatgactacataatctttttaaataagaaacatatgtttgataaggtatcatacagactaacagttagtggtatagattatagaatgagtctttattcctagataaataagtatgagaagcagtgtaaatgttaggcagctatataagtgtagtgtatagtgttaagaagcatatatttgtgagttgatttgaacattaatttatgagaagaagagtcaatgtaccgttttccaaccatctgggtccaagcaagcagtgatcttggtattgataccaggcaaggggccaggttcgagtactattttacctccggatagttttactgcttcggcggtcttataaacatcgtctgtccctattgcaatctgttaaaaaagacataacacaagcttcattatagggtaaacaaagttcactcatgggaagaaatataagagaaggaaaaaccatattgacctgtgcataaccatttcctttatcatactctgtgaccccatagttatatgtcaattccagcactgcattcttatcttcagggccataccccatcatagctatggtatactggagaacaagcataaccaaaagcaagttgagtaaccataaacagatatgaatatagctaaaacatagaaaagaaacacaaaggatcttcatagaataagaattcaccatctatcaacatctaagccatctcaagagtctttacatgagatcatttagtattttaccttgtgatcggggttatcctttactcggagaagctccataccataggcctaaattggaacataaattaaattaaaactcgcaacaaattgctcgttttcttttgcatattaagaatgaaaaacaccgcgcacaccttcttatagaagtttatagcacggtcaagatcacccactcgaagcataacttgacaaaggggctcaggagtaggccctctctccaaaagctcaaacttgtaaccatcgggatcttcaataaaagcaatttttgtactaccacctttaacaagaccaggctctctggtaactgttccaccctttgcctttataagttcaactgttctatcaacctatacatagatttacttgtttagaagattatagctaagataattctctacaaatcccaaatatgctgaactataaagaaattatatgattttttctgttaaatgataatatatataggaagcttcttaggtggaatcatcacttttgcccctattgtaagagtgtttttgtttttggcacatacagaaactatattctatttttttaatatgactgtgtagactaaagttatagtaaccatcctgtatgttttcgagaaattttaaataatttatggcataaaaaatcaagttcaaaatagttatataagcatgcgtgcaactgactatttgaatcatatttttcgacaactttaattagtcaaaatttcttgaaaacaaataagatacatactataattataatgtacatcatcataaaaaaaaatataccgaaaataagaaatgtcccggcaaaagtgacgctcttacctaatgaatttcctatatatataaatatttatacattagcacaaaaagtaaagcattgcatactaatttcaaacttacatcctcaacagctacaccaaaatggccaaagccattaccaatatcatatttatcaactccataatctagcaaaacaaaacatagaaaactcaagtgagaagaagctagtgatttagagaacttccaagtacaaacaataacaacatagtaatagcattgtagtaaaatttgacttactgtaagtaagttcaacaacaaaatgagaatcttctggtccaaatcctagaaaagcatttgtgtacctgtcctcaggtatgtcacgctttctcaagagcttcattcccaaacattcagtatagaatctgcacctcaagaaaataattagctatgctatctatctatgtgaaatttgcacaattgaagaaagtttcagaaagtgacatactttatagtcttttccaagtctccaactttgtaaacaacatgtagcattcttctgttgtcattcttgacccaatctaatacattttcctttgtggtagtagaagtagctgcttgtgccataagtctatctacagtgttcccatctgctcttaataaatttgatgcttttacatctaacaatggtgagtgtggaagcactatataatcaccaaaagagaaaggaaaaaatgtcagtaaaccaaaaggaagattcaactaatgatctttttcttgatgaatttaattataccaaacatagcatttatccaattaccaaaatctttgatatggttaaagctttatagctgctaagtataatataaacactacaattcactcacaaccaatgttggacaaacacaagtcttttgtttttattctataaatataagtacaaaaaacacaacatttacatcttgtagattcaacattgtaactgtttaattcatcatcaatgagagcttttctatactattccacttaaggaaattcttaggctacttaagtaaacatggagatatataatatataatatctatatatatatacatttctatcaacccatatcaactgatagccaccactccacatacatttacagattacagattacatattgccccatgaatgaaaataacccagaaactcaaaaacagaaataaaggaacacaatttggttttttcagaaaatgggttcttaatatttgatggttttaaagagaaaaaaatgataaaagtaaaaacttgtaaaggtactatggattgaaaagcttaattacctgagccgaggtgtaagagagcgagtctccgtgaaggaaaatatgatgagttagaaacacgaagagcagagaattttgaagaaggtgatgatgagaatggagggagtgaagctgtgaaagttgagagattgagattgagagtggttgacgccattgtcttctctattggctccactcaagaacagtactcagtcttacagtgtggaagatatctgacttggtttggaggtgagtgagtgagagattgattggatttttggccaatattatgggccacaggcccacaagcccatgtaaaactgtattttgggcctttcagtgtaacttttttttttttggatttttacacaaaagtacttaaaatgatgtttttcattaaatgtttacaaattatgtattgcttcttctagctaactaggatttttgtcatttgacatgtatcaaattatacttttaaatttttcagtttgttaaaagttcttcccgaactattgaaattattggattcaaggactcttgtctaattctattcaattttactaacacaactattattcatgtactaatttctacctcataaactttgatatctatcaaatcgtgtctctaaatttttatctatgtcaggcttccgttagtaaaaataaagtccttaaatccaacaatctcaatagttcgggagaaaattttaatagcttgaaaagtttaaagaaaataatttaatatatgtcaaaattaggggagtagaaatcctaattagtcacaatttttataaaaaacaataaaataaattaattatatttttacgaagtttcatgaaagcaacataaaaataacgtctgaaaaatacaaatataaaacaacatgttataatattgttgtgagaacaaagtaaaaaataatagtttgtagtttcatataaaagttaaaatctgtaaaaatattttaaaaagttgtaaatccatattatttgtaaattgttattttaatacatttatatatttatgaaaacagctcaaacattttttaagagcaaaatggccactttctatcaatatcaattattttagttgtatctatctatctattactacaaaaatgtcaccattgggtactttttatagagcttaaatcaaatattctttggattgatttaagacaatttcaaatgaaaattttgactaaatatacttacctaattttcaaaaaaatttcctaaatttataattaccaatatttataatttaggccaactttaatgttatcctcaaattaccctcctcatttacatcacctccctctctctcttctcttcctatttcttcttcctcatcggaccccgtcggaccccatatcggacacaatcggaccttgcatcggaccccacatcggaccaccccatcggacctacgtctcctacctcgcaaccttacagattcattgaacctctcggaccccatcagacctacatcgaatgaacatcggaccttgcccaaatcacagatctaacattctaaaccta

SEQ ID NO: 272521 - DNA, 2045 bp, Cannabis indica
tcattcttatgctgtgactaaaaaaatacgtgacataaaatattagtcacaaaaatcacaatttattattactaaaactaaattagtgacaatttatacctataaatactatgtttagtcacaaaaattttattgtgactaaaaaattaatcactaaaagtgactttttttatagtgttaaaagatcttgaaaaagttgtatcccataaaagagctcataaggctcgtataatgagctacatagaactcaatttctcatctcgaatttagtcccttaacaactttaataaccgttataataacattccacagtaataaattgcaagcttttctccgcaataacctccaacgccaacaaacaagatacaacttcaccacatagcactagcataagggcaaacacttggtatcaacccaaagcaccttccctacatgatttcaagccaccatagtcagcatcattgccccctccctaaccgtcacattacaattatgtttaatctaacctatgggcagaagagtccactcagcgacggtaggagaaggttgaaaatgcgacaaattaaagagagtaattatactttgtataacattgagcaatataatcaataataatatatgctatatcatttcttgtatatgcactctgtcatttcttgctttccacatagtatcaactacgatacatgtatataaaaacacattatcaacttcgatttctaaacaggaatgagtctctaagaaaagtacgtatctccataaaaaaaaaaaaaaccatgctacaataaagaaaatgatattacatagtttctataattgtttacatatatagattttagattaatagagagctgtatttgagagtctacctttcaacttcaaattatattattatgatcattatttcccaataataagtaaacaaattttgctttgtaaaaagacacgtgtccatttttaattgaaagccaaatatagtaaatgaatagactttatttaatatatcattttctaaatgtatataattttttttttataattattgctcaatattattgtctcactggtccagtccaatcaaatctttatttattctatatatatttttacttgactaagctatatggtattgtgtggaccacatattaataatatggctctataattaacagccagatctgcttaattgattaattatattaatattaattaattaatcaattactatactaatatatatataaaaaaaaggaaggaagataatccatgtcttaaaagatggactcttaaaatggtcccagcaacaaggaaaagaaaaggttaaaaaggagtgattaatttaatctaattattatatataataaaacagtgattgtgacactacgtacatataaatatgtcacatactttgatataaattgatataaggggcatgagccacagaagaaatgcagagtttgtcattaattaaatagtactgaaaattatggttcaaaaaaataatagtactgaaaacttgtttaaaaaaagaaagaaaaaatagtactgaaaatgagtcttcaagaaaatgaagcaaaattaattatatctctaaaaaaaagtcataataatattaataaagatgggatgagaatcatagaaagtactcgaaggggatcttgaggatccttcttgtcatttatgtggttatgaaaaagaaattatggaacatttttttcttcgttgtaatgttgtttatcattcatggagatcttttgcatggggtttaattctagtaagtgataatggcattaggtgttgagattgggttaagttcttgtggggtttcaaatcaaggggtgtggataccaacgagttattcttgtatgcgtttattgtggttgaaacattgtggaaggctgtgtttggccttgttcttccacgttgttagactgtcatttcaccttaactctcactagtacgatattatccgctttggactaagctttcataattttatttttgggcaccttcccgaaagacctcatactgatggattaagtaga

SEQ ID NO: 272522 - DNA, 591 bp, Cannabis indica
agtgtttgccactaaaatataatatagaatcacatgcactacgtactgacagtccagaagcacactcctgcagtactatatatacatttaaaattaggaataagttgaacaaatatgtcgagtagtatcaacgacacatcactcctatcgatctttttcttctttatcattcatctgtgttttactttctcctgcacaattaacaatattcattttggaacttatatcactcttctattattcacatcataaatatatgttagtatactggttgaaattgtgtttgagaaatgctaaagggtaccagtagtgtttagcaccctcttatgtgttaatatcgctattggtccaactaattatcgggtctcatataatttaatataatagcttttagagagtatcgctagccaatcgcaacgcgacatgtcgagaaagtgctaggcatggtgcctaatagcaatgctcattgtgtttatataagtttaattattttttcttagaaatatatctattctatataaaatgtatctatataacaaaattctaaaaattattgggtgacttttttattatgtaattctagaaattatt

SEQ ID NO: 272523 - DNA, 508 bp, Cannabis indica
gccttcggcatccaggggtcgcagaccgaccatagaaccctgttcaataagtggaacgctttagctgtccgctttcaggttgggcagtaagggtcggagaagggcaatcactcattcttaaaactagcattctttagaccaaagagtcaagtggaaaaggggggaaacctctccgttcctggttatcctgtagctagatcctccggaaccacaagaatccttagttagaatcagattccaactcagcaccttttgagattctgagaagagttgctctttggagagcacagtacgatgaaagttgtaagctatgttccggggggagttattgtctatcgttggcctctatggtagaattagtcgggggcctgagagacaatggtttaccctgtggcagatgttagcggtttgagtctgcttatctccaactcgtgaacttagccgatacaaagctatatgatagcaccctatttttccgattcagtagttcgatctatgctagatttat

SEQ ID NO: 272524 - DNA, 741 bp, Cannabis indica
attattgatagtaatcttatattaatccttttgcttgaagataatatatatttatacatatattgtatgtgcaccttgttccatccattggatatgtgttgtagtgattattatgaatcttaaatgcttgattagctataatggagaataattaagatgaaaaagaaaagtaactataatataagatattgtcatgtttgatggtttaactttcaaccaaagtatcccgaaaattctcatatatttagttagtcttaagagagcagcatctcttaaaataagaaaaaataaataaagaaacaaactatgagggaatataatataggaatttttttagtagatctctttaaagtagtgttttggtagactcttatctattttggtatttacaaaaaaattgtagttcaatattttttcatgatgatatacgagttaactatttaggatcacttgtaaatatttaaaagattccaaatagtttagtgtcaaaaataaaattcataccgttacttactacgcgtataaaaaaaaataataatttcgcatgtaataaaatgtttaaactttattttcagcatttgtaaaagtcccagaattttctaaatatttgtaaggtcctaactaactatatatatatacaatcataaaaaatttgattaaaaagctctcttgaataccaaaacagattgagaatttactttaatatactacagatatgtaatcccttttgacctctaatct

SEQ ID NO: 272525 - DNA, 2486 bp, Cannabis indica
ttttgaaaattgcctataatttccgacggttatttttgtggcagtccaatagtttgagggcccattaggcccaacattctgtaactgaataatcgttctgtaacgaaaatctcaataagtcccatttccatgtctgaaaattatacatgaaaaggtagttgattgattggtcacaaaagagagaaacaattccaagaaagctgtagaagaagatacactcgaatcttccaacttcaacaatggcggtctcatctaatctcacccatttcatttccctctctctcaactctcctcgcactatcacttcttctaaaatcaactcctttgtttgcccaattgctttcacccatttctattccggaacaagctcaaggtcaacctttttgaccatccatggcacgaggagaggcagcagacccatctctgttcaagctatgtcttcttcttcttcctttggctctcggcttgaagagactgtgaggaagactctggaggaaaacccagttgttatttactcgaaaacttggtgttcgtaagtttaaacttcaaaccccctttgaaattttattcttcttgcaatgcttaaaaatgtaatctttgatttgaaatgatttatttttttttttttttttgtttgttgttgttaaaggtactcgattgaggtgaaaacgctgttcaagaaacttggtgtagagccactggtcatagaattggacgagttgggtgagtatcttttcttttaattatgactttgataagtgtttcttgaaattttggttttgtataaaagaatcaacaagaattgtttattgtttatggaactgtgtgaataatcataattgtcagaatcatagtcataaaccaacattgtaggatgtagttttctcgatgaacaacattgtttcttttctctcttgtttataactcttcaactctaagcaataggactttgtgctgttgaattctgaagttgattagtgtttcttgaaattctggtcttgaataatcataactgttagaatcagtcataacagaatgtccaagaataccaacattgtaggatttagttttcttggtgaacaacattgtttcgcttcactcttttctataacttcaactctaagcaataggaatttgtgttgctgaattatgaagttgattagtgttaattgaatttctggtcttatttaaaagaatcaaccagaacttgttattgtttatggagtgtaattaatcataatactcacaacagaaagtccaagaataccaacattgtatgatatagttttcttggtgaactgcattgtaaccaccaaccaatctgagtattataatgcaacaaaacaagaaagattacacaccaacattgcatgctctttttggtgttcttaataaaaacaagtgttcttaatagttagatattccatgtacaccttgttgcttattcatatgtgaattgaaatttttggtgattcactttctgaggcagtagtttctcttcttatgtatcatggtttctttctaatttaaacttgtattctactccctcaggtgcccatggaccacagttacagaaacttttggagaggcttacaggacagcatactgtacctaatgttttcgttggtaagtaagacctttcaatgcttttgataactacctgagaacatcttgaaatattatttgcacaaaagatgagaaatgcctttccctttccctccttcattgagccatggtagactgttctccattaggatttgtttcattatagcattgacttgggttcacatgtccaaaaagcaaaaagaattcccattttcagatgcacagtattggcaatataaatacatcttgattgttaaaccactagccagcatgcttgatttttctgtctggctgttattgttaaagctggcctttccccttttttgaggttattttctatcatgaagtccacttttagaacagaaaatcagtgcattttcaactttaagcacactgattttgctttccttaagttgcaataccatgttatatttgaattgatgtttagtgagactgaaagctcaatcctttttcttcttttcaattcatgaacagggggcaaacacattggtggctgttcaggtacagcttcttcctatactattttgttttcttttatttgtcaaacactaatattctacccaaaagcctctcttagtttgttaggaaaaaattatattatttagaaaacctttggccttgtatgattaacatttttcttcccttaatgttttgcctttctaatatatatttaatttgtgttgatgcttatttcctatgcagagactgtgaagcttcacaggaagggagaacttgaacctttgctggtagaaatcaaaaataaaaaggcacaagctagcttgctgaccaaattttgtttagagatttcaatggccttgcaatatgactccaaacttgcacatttgtagctttatgtttca

SEQ ID NO: 272526 - DNA, 4987 bp, Cannabis indica
caagttttggtcgagcctatgtccactttggaaatagtactaattatttttcattactcaactcgaggatttgcattttctggcgttgttacaaaattcctccaacaacatgaataaaatggtctgttgttacaaccaaaagttctatttattttccagctatgactaaaatttagatttcatattaacaattaaaactttaaagtcagttatattttatttttcaattacatacttaccagatcacttttagtgggtccaagttcctctctctggtaaagtgccaaagataattcctgtgagtggtaaacatcagaagcgtcaaatgaatctggacgttcaaacttgccccagtggttctggatggcaagcttagcaatctcatatgagtcatggcctctagattcagcgcgtcccctatgcataacatctccattttcatgtgttttcaaatctaaactattctttgtattcactgcaattgaaggctctactggattgaaaatgtgtcctcttgaaatagatcgagtatgtgatcttattgaagcttcatctttccttcttttcgcccacgcaaagccacttgaagtggaaacctgtaatgggccagaaaatggaatgtctccttgagatgcattcttcgcatgcaagacctcttcttctttatcaactgacggctttggtgcatccccatctaatttaccattttcttccttatgaacatgtagactacaaccattgcttttacgtgagtctcgcgacagagttacagagtcctgcaacataagattactttgatttaatggctagcatttcccacaaaacaagcaagcatatcaacagatacttgaaatgaaaacaactttgcagaaaaaagagacctccgatggtgccaatttactggttcccaaaggtttccttgtcggcttccttgtttccgtcccccgaactctcccactgctcttctttctgaattcggtataaaaaagaaaaaaaacgaagtcgaattaactcaacaaataattaaagcaatgatttcaaatttttatttgaagtgtacaaaattttcaaaattcatattttaaatcccatgccttccatggatgtcccatgaagaaggtcttgcttctatgcagtcacataatttaaggagatctttgtgacttgtgacttgtttaactttgtcaatttacaacatagtaccaacaagaacagcacaagtttttcttatgagaagacattttaacataacctcaaaatactaacaaattcctcacagcatcaccacaactgaatgcaaggcagcactagacttcctttatcatacaattgaatgacctccttacttatttctatttattatttattttattatagaatgcaaactgtgcaaattttataaaataaaagaaaatgtctcacctcttagcttcctccctgtttttagcatcgatctctttgctaggtgggtatactggaaagcttgatggatcacatgcgtaaggctttgttgagaaatactgaaagcgaaacaaagtgtatacattttgtgagtcaatgtgatgaaattgaaattccacagaagtgtcaatgttaacattgtaaaacaaattgcctcaaatactagtaaattatcagtattgctgtgtaatcaataagacaagaaaattacaatgtagctgaataagtacctcagatgcaagagctaaggaggctgtcccccgtttatatggttccactgaaagaagtgtctcgagaaggttcacattctctataggaaaatctttaaaagtctctcgcagacaactatcataaggatgttgtggtttgaaaagagttgcgtgggggagtttagattttttccagtattcatctggtggggaaccacaaagcttgaagatcttatgtaattgttcaacctgtaagaagacaaaggaactaactagtgattagtaactaccaagccagagaagtcaaactgaggaacgctaagagatatccattaagtataagccacaagactattgtactaatggtttaagagatcttgtgaaggacaacagttgaaaaacacaatgctaattgtggcagtcacactccatgtttctcaatgggatattcagggttttaagctaagatttaatgtctatcttatgcgactcattttatttaaatgtgacccttgcatttcattttcttttaatttgtagccttaatcaactaatgctgcatgcagaaaatgaagtaccaaatttaaaatcattctcacctaaaaaatcatgtgcccattgtattttctgtgttatccttttataaagtttacatgcagagattgatatcaaccgaagcaagacaattacctctgttcttccttgaagaataggttttcccatgagtagttctgcaaaaacacacccaacactccagaggtccactgcagctccataatctgttgaccccagcaaaagctccggtggacggtaccataaagtgacaacacggctagttaatggttgtctatgcccataattgcagaagttggccaatccaaaatccgccacctttaaaattccatcgttccccactagaagatttgatccttttatgtctcgatgcattacacccctcgagtgacaatgctcaatcccagataataactgcttcatgtagcatttaatctgaaaatataaccaacttcaaagatttactgcgattgcagaaattaaagataacatattgaggacgcagctggacaccatactaaaacaaaactactagtaggtagccatggcataaattgatgaaacaactctggttttgtccggaactcaaaaggtttaatacattaatgtgatcccgaaaagtttaagtgtacctgtgactcgttgaacttgatgtcagggcaagataagagtccagtaatatcatgttccatgtactcaaacacaaggtacaagctacatgatagtcgagaagtaattaagccctccaatttaatgacatttggatggtcaagcctgcgaagaatagtgatttctcgtgccatgaaccttacactctcaggttcaaaattatcaaaccgcaccttctttaaagcaactatcttcccagtttcaaggtctcttgctcgaaatacagtactgtatgtaccctgtccaatctgttaaaagtagtaaaaaattaacaagatcacataagaaaaggaaatttaactgtcacgatcaagttaacaattaataataagatactgaaccaacatatgtaaaacgaaaatgagagggcagcaagcatcagttctgatcaagtcaagaagaaacagaacgatatggttgagtaaagaatgtggaaactttgcagcctcttagggactttttacagaatcataaaacagagctgacaaaaaagaagcatatctcaaaagcttaagcaagtaaaactttcatctttttaactttccctagatagtaattataaatcaacacaggaagaatcaaccaaagatcactgtttttgttgctctgttaatgaaatagaagacaagaaatgtagactcttgataaccattaaaatcaaaacgttaaaaacttacaatacccatcaacgactaaaaaattgttttgcatttttcaacgaaaactcgaaataaaattattgtctcgggtacatatatacttgtataaatatataaacgcaaacatacatacgtatacgtaatgtgtctatataataaggaaataccttctctagtttctcgtatgaatcggctcggagaggtacccaaccatgaatagcttctccggcgacggcgctgagccaagccggccaaccagcagcaacctgttctccttccacgtacttatgaaggtttcccaatctaaagctcaaagactcaacactcccacacccaccaccaccgtttgaactcgccctcccagactcacccaactcgctcccactcagtcccaccaactcacttcccccactctttttcttcgtcctctttccccccaccgccgctgccgtactatttttcttctcaagctccccagccccaacccgggtccggcccgaattcccggcattgtcccttaaagcacccgagtggtctatggcaggcgtgacagacaccgcctgcttggagctgacacaccccattgatcctaagccacaacccgacccgatccagaggaggatgcgagctaaaagggcgtgaattgagtgagtggctcaccaagattataggatgagagagaaatggggaaatgggtattgaacgtgggctttatacatagtagtagcaccataagtaagataagccaaacatagctctagcagtgaaggaaaatgaaatggaaatggtggctttgagtttgggtggtcactttctctctcctactttccattctttcacctcagttttgcgacaatcgcgggagatggcggacaaagatttttattaagaagacactctctcttctcttctcctctcttcacaacccattttttttttttctcatttctttttatttaataaaaaaaattaagtagttgcgaaatcaacgggagcataataaataataaaaatataataataataataaatataataactggatatgagtttttgtatgtgaaaatttttattctctgtttttggacttttccctgttccaaaatctacgagagatgtcttttgtggtgtggttgtacagaaagtgagggaggtccatgtcccttactatgtgggtcccattttcattgcctttcccccaattcctccgaatgaatgagaatgtgagagagagattcacataaaaaaagaatgagagacattgggtaggaagaaagagtaatatattgttaataatttttttttttttttgggtataataatgtgtttatttatgtatattgtacgttcgacgatggatatatgcggcgtccccgaatgagtaaaccacttcgggctagctcaagtggccatagg

SEQ ID NO: 272527 - DNA, 829 bp, Cannabis indica
aaaaaaaaaaaaacctgaaaaattaactaaattgtaaacttaaacacttcaataaaaaaaaaattataaatttaaaatttactataacaaccaatttcataaattattataaagtatttagttattttataatttaaaattattcaaaaaaattatattatagagcaacttcgtaagttattaacaaaacaaaagtacttataaaaaaactaaataacatcttaagtcataagtataatctaatactttcacacatctcctacaaagaggacttttagtcctctctcccccaataataataataaaaaagtcatagagtcacttactttactattttcttatttttacaatatctaaaatactatctagtttctttatataagttattttgaacatcttatcgaaattactttgttagttaagcttatgtagaatattatttagttacttttgaatataaaataataaaatacgttttggtaacttgtaaaattggttggtatattttgtttaagtttaaaatttgattatgttttctacagcaaaatatttatatatatatataaaattaaaacatcaccttttatttcgattatcttttttaataacagtgaaaaaatatattcttcatagttcgtacatgtaaaaagaatcaccttgaaaagtagattgtgatggttaggcttagtgagacataactcttgagttcaaataataatcagtgaccataatattttttacaatatttgaaagaacaaaaaataacttaagtgcaaaagttaagtgcaaaagttgtgggggttttgggcatatcatggccgagtgtagg

SEQ ID NO: 272528 - DNA, 5560 bp, Cannabis indica
agtgtgcagtatttttgtaaaagctaacccaagttctaatatttttagtaaatttttaaataatttaaaaactatttataacgaactgaaaaatttaagacaccatttcatgaccattttatgttataataatcaaacaataaaaaacaagctaatgaaacggcaccgtttgagctacaatgctttgctgtttggctggcttttattagtggaagacatttgaagtttgaacgtttctaatggatttggaattatgtgctgaccactaattatattttaactcttaattttattgtttattccctaaataactataattattaaattctagattaccttctttttttatttcatttatttagtatctctaattaatcaagtcattgaataagaataataacccccattttgtttttatcttgaaaaaaaaaacattaatttatttgttttggaaaactatctctaatttaattttttaaaaaataaattatttaaaattaataaagaatttaacctcaaactattattaaaattaaattattgctgataaatttatacacaattcttttaaaattctcccaatttaccattaaaataataataagagattacataaacgaaaaaaaaaatctatccattttttatccattttactatattattattattattaaattgacgtgttatatcttaaaaactatctttaatatcaaatcaaatcattatcctcaaatttgggagaaaaataagtaatttagtaattatattaattttaaaaatagtattaaatattgtttcaaaagaaaaatagtattaaataataaatattaagcattttttttttttaaaaaaaaaatcatatttattgaaaataaaactattttttaaaaaagaaaataaaactaattaattaatgttcgataaagagtaattttcgcgttatcatataataatcttttcctttttaaaaagataaaataaaataaaatcattttatatttaaatatttaaattattgatatatataagtcaacgcgctgaatttaggcggtggattatactcgcgctcataaaaagagaaagattctcgtcttttattccttcgacaccaacctcaaaaaaaatccccaattctcataaaattcaaccctaatttcccttcagttgattcaaagctttcaactttagcgcttcaattcacccaattgttcttggtttcgtttcggtttgtgttgattttggtttcaattaaccttttaattttaggttttttatggtccaaaaaatgctgataaagctaatatggctgagcctgggttagatttgattgttacgagcttcgttgattccagaaatttcggtattatgggatttggatgttctagggtttgttttctaggctgccggtttcgcttccgatcggcattcgattcttactccgctgcatgtgaagcattctctgaaaagtttcttccttcaattaattctgttctctagtagcgattgtgtttctagtttggtttttttttcttttttctttgcccctccaaaagatttcttcttctttttcctcttcttctgtttttcttgggtttggtatggattcgcgtacagctgtaatgcgtggaacttcggattctgggttcgatgatgttgtggagaaagatccaactggacgatatttgcgggtaatggaatcgaaattctgtattgaattgttgtatttcaatttttattgtagctttattatcaaattagatatttttctgttaaatttttagtctttgtaaattctatgttatgttggtatttttatcattgtctaaatgttgttatctatttagaattttaagcctagttggtgctgaactaatttgattagttgggtaatatttggtgttgtgtgatttcatacttgctttttcattgtttattgggctttgtatctgaatttattgggttttgatttcatacttgctttttttttttcattgtttattggttttttgtatctgaatttatttggttttgatttaattttcctttgtatgattacagtatgaagaagtcttggggaggggagcattcaagactgtgtatggattatacttttgtttattattgaaatttcaattactttttcgtcaagaaatttttacttctctgagtgtctaagtactgatttttgttttgttcatttatattttttccttgtatttagatataaggcttttggatgaaattgatggagtagaagtagcttggaaccaagtgagtattgaggatttaatgcaaacgccggaccagttggaaagattgtattctgaggttcatctgcttaagtcattgaaacatgagaatattatgaagttttgttactcttgggtggatgatactaacaagactattaatatgataactgagctgtttacatctggcagtttgagaaagtgagttttgtttcgataatattttgttcggttgtactttgccttcatcctgtatcatgttttatttattgttaattttaatataggtaccgaaagaagcataaaaacgttgatctgaaagctatcaagaactgggctagacagattcttcgaggattgcactatttgcactctcacaatccttgtattatccatagagatttgaagtgtgacaacatatttgttaatggaaatactggagaagtaaaaatcggtgatcttggactggcagtagtgatgcaacaacccactgctcgcagtgtcattggtaacattttttattttatttgtgtatgatattggataaattattcaactgaaagttctgttaattttcttttgtccaggcactcctgagtttatggctcccgagctttacgaagaagaatacaatgaacttgtggacatatattctttcggcttgtgtatattagaaatggttacatgtgaatacccttacaatgaatgcaaaaatccagctcagatttataagaaggttaccaatgtaagtagctgagtgcttgaatattgagtattcggttttaacatgattgattggtaaatagtaattgtcgatttaacaacttcttttattctctttttgcagggaataaagccagcttcccttaaaaaagttaataatcccgaagtcaagcagttcatcgagaagtgtctggttcctgcatctatgagattgcctgctgttgagcttttgaaagatccatttcttgctaccgaaaatcttgtgaatctggaccaggaacctaatgggatacttgctattactcctaaactagttaactcgccacatgctccaatgaattctgaaccacaacgttctgaacatcgtccgatggatgtagattctatcagcaaaaagcattctactattggttcagttttgaaaagtgcaagtggcatgcctagtatttcaagtgcagaactatggaagcacactaagaataatgaattcaggctaatggggaagaaggatgatgataatacaatttcattaactctgcggattgctgattcttgtggtaagtatctttgatacaaaaggtttatttgtttgttgtagtttgttcttcattgaagtgttaaagtgttaattttgtttttggttttaacaacaggtcgggtaaggaatatccattttgcattctttcttgattctgacaccacagtctcaattgctggagagatggttgagcaacttgatctcacaaatgaagatattagtgtcatagccatgttgcttgacaacttgattgtgaagcttgtgcccagctggaaactcgcctctggaaacttgtcaaccggaacagatagctcaaccgatgattgttctatacttgtaaatgatgaaagttgttcttgggattcagtaccaggcacacctctttcacacgaaattgacagtcaacatattctcgaactgacacaattggaagattgtgcgaacaaagtttcagatatctcagctgagtatggtgagaatatgtcatacaaacttgatgaactcttcaagggatcagaaagatgtggtttcggttcagagtacaatcatgagcaggaagagaattttcatgaaggaaaacttgagacaaccggaaagagctctgtactctcatattatgattcttgttcgggtttatcgcaaaattttagcttggcaagtatgcaatccttgtctcttggagagaacaatgattatgaggagctaaagcaggagcttgatgcaattgacactcagtatcagcaatactgtcttgaactcatgagattgagggaacaagctatcgaaaattcgaaaaagagatggataatgaagaaaaaagtagctgctgcttgatttgttttttttcttttgggtggctttatttgtttgattcttgcttctttttttccttcacaatattttcctctgattacaatgagggaatgatttgttttcatcattctttttttaatttccttaaaacaagatgaatttcattggtttttttagtattagaaaaactgagtcgttttcattcttttaattgttattgaattcattataaattattaatttgataattttactgtaattattgaatttacccattctctttcactgaactgaatgtttatttttcttttcaaacaactgaatctttatagataaaagcttaatgaactcaaaatctacaaaaagtggaagaaactcaaaatcttcattaagcaaaatcttacaaaatgagagttctttcttcctttatggttttcccatgttcaaatttcatgattgagtggttatccttcaaattcagataatcaatttctaaacaaagatttcagtcacttgttcaatcaaaaccattaagccattcacagaattatacaatttcagatgagcacaacaaactttaactattatattcacattttattaacaaaagaaatcatccaatccaatacacatatccacacaagaacaatgcacaaccataaccaatgatgacctgaggatattttcagttgctgagaatacacatatgagtaacctttacacactcaccgatatgtccaacggaaaattcagaaaccttctccattgttaactaccagttttcctttactattttcgatttctcgagtatgaactttccttccttgtatttctgtgtttcttcataggctctttcatacttccaaccgagcacttctcgacaatcagagcagtagacatcagcaaccgtatgtaaaccggtcattagttgtctgtcctctttagctcccaccatgacattcatcgcgtgagagaacaaaaacgctcgcccattccttccctaaacatcatcatcatcaagattgtatttgttttccaatactagcagtaataacagaaccaaaactcaaatgatcaactacacatgtctttagttcacataagagaatttggcttgtgtttcattaaaaaattcgaaagaagttcacctagtagagtttggttaagcaattcaccactaaaatcatcaactcaaagtaacatcaacactaaattgttcacctgaaaagctttagaa

SEQ ID NO: 272529 - DNA, 812 bp, Cannabis indica
tttttttttttaataaatattaaataatttaatattaaaaaataattaattcaaaataattgatttaatgtttacttttgtgaattaaattagattgaatttaagttattatacagattgaattggatttaaaatatgaagaaaataattttaattaaattgaattagcatctcatcactaatatgacaacttcacaacaacactcaattgttgaaaagaaaaagtaaataatcatgaattataagcacacgatatttacttcatgtcaccctgtcgaatttcaattgctagatttaaatctccaaagaatcatgggattttccccaataaaattgtcttgttcatagtatcaagcatttgaatatgtcgtgtgtctcccattatttatgtgtgggtaatttatattgtttatattatttggggttggcttggaaagtagtgtaaggggtgaggatagagaggcaaatgaaactttataaaaaaggtgttgagtttaactatcaatatgtccgtgagtcccataaaatactaactacatttcctaacatctacaccaaacttaatagaattgaataaatattatggtgtgatttgtaaaataaaaaaaattatttaaatattatacctttcgaagatggataacaagttaaaagttagactttgatacattgcaaggtttgcattgatttttttgttttgccttgtttcattgaaaactatgctgtgatacagtacagtacagtccaggaacaatatgcatgcatgtaagtggcatgtggactatttgttctgttagcagtcagatgcggca

SEQ ID NO: 272530 - DNA, 1021 bp, Cannabis indica
aggatgataaagtgttcgtttctacaaacgccactttccttgaagatgactatattaagaatttcaagccgcaaagcaaagtagtattggaggaaatgcttttagatataactccttctaatgtttcatcatcttctactcaagtagaggataatcccactccctcgattgaacctttgcaagttgatacaacagataaatctaccactaatgttcctgttcagaagatcatggctcctcgtcgtagtgggagggtttccacaaaatcatctcattatggcttggatggtgaagccaatatggtcgttggtgacggtattgacgacattccaataacctataaatagacaatgaaaagtctggaatggaaacaatggtcagccggcatggattcagaaatgaattccatgaaaaagaacaaagtctgggaatatgtagacgcacctaatgattatcgtccaattgtatgtaagtgggtttacaagaagaaaagaggtgctggtggcgaagtcgaaacttttaaagctagaaatctcacaccgatctctcttgcccaccggaggtcatcaatctctttcatccccttgcaaaaaccgcccgtcagcgtcacccaaacccgaaaacccccgtttgcatcacccaacaccgaaatcatcccatcagccccactcaaccccgaaaccaccccaacccccgacagaacccatcttgctccgcctcctctcccagcgagacccaggaacaacttcagctccatatcctccatttcaggtttattttttcttattatttatcattctatactataatcttcctaattctcggctgatttttttttttttatcaattttcatgactattattatttttactatttggcttttaatggagttttatttagggcagtagaggataatgaccccaaaatggtttagcaataaaataaatgtcaatattttgaaaatattaagtaaatagccaaatatcacatcctaaggcattaaaattacgtatgtagcct

SEQ ID NO: 272531 - DNA, 3649 bp, Cannabis indica
tgcatcttgtttttcggtagcccatcacgaaagaactccactattaagcgtgcctggcctggagtaatttcatgatgagtgacctaacttcctaagaagcgtgcgagtgaggacaaagtacgctggaaacactcgtctttgtctgtatggtaagtcttcagtccatgaagcagccagagtgatgtactcgtgtataagagccattattttgtgggtataagagcctgatggaggcttgaagcagggacgttacagctagtgtgtctctctttctgactcactgaataagctagaatatgaagttgcataaccaaagctaatcaatcgatctctagtgagaagcctttacaaacaagccaaccagccaactagggaataaatgtgtgcttgggaatactctgccaatcctaaatacattaggtagctaatcatgatttatcaatgcattagatttacactgacggaataatcaacgatgtagtttacttacacttttataagtagaatgtcctatctagggcattagcaaagtaaacttgcatcagatgtgttatcccactttctagatagggtgatgtcacatttagtaagagtgacacgtggagaacattttctaagcatggatagatgattgtcctttgacagtctatccaaagagttttacatgaaatggtcaagtttacaccttcagcaggaatcatcttgatagaacctatatgtgattgtctgcacaaatccacattatccaagaatgccgagtcttttaagcaaggtagtttgacataagaagatcttcagagatactttccgtcaatattccaatattcaaatctcaatcaaatccctaattttgtgggattgacttgctccgacaagaaataatagaaaaccttcttagttttatttgttttgggaaacttaactcatgttcttttccccttataaataatggtatcattccattatttagggatctaaaatcatattttttagagagcttttacgctgccaaacaattgtaagcttttcttgagaattattaagaaactcacttaccagctccttttaatcttattaattcttcaaagtaatacaagaacaagggaagcaggctattaccataatcacgaggctaaatctttacaaatcttgtgttcttattttctttattattttatttattatcttatcctcctctcgagtcttcaactggtaataaccagatcgaagaccgatcttagggaagatgatccttctctataattgatcaacataacatctatccttgacaaaggatacttattcttcaccgttaatttatttaactcctagtggtcaatacacactcataaagtttcatccttcttcttcacaaacaaaactggcatactccaagatgaggtactcagtctagcaatttcaagctcaacatcccctgcaactgaatcttcaaccctttcaattctgcaattgccatccaattcagaacttttgatgcaggctttactcccagtatcaattcaattcaaaattaatttcccgcttcggtggtaacccgagtagctcttctaaaaaggcatctagaaacccttagataacgagattgtgtcccggtcccactgatgttcccttcataatattcgccacactagctaaaaggttgatacatccatcctcataacaaatcttttgccttaaacgccgagattaatgaaattcgggacctttgaaccttgcccaagtctacgaatgggtcctcaccttctggttcaagagttaccatctttctttcacaatcaatggttgccttaaactttacaagtcaatccaatcctaatataacctcaaaatcctctaagtttagctcaactaaaacaaccaaccattccctttcccccacaacacgggaagggattaaaccacctgctgaaaaaaaccaattttccaattaacattaaggtaccataaccacttggtaacaccttattaaatatacacaaactttcaatcatcgttctattctggctactataactgtgggcagttcttttcaaatggcctactaccccacattggaagcaggctctcgtgtagcattcactttgttggcatctcttgcatctcaaccctctagatgggtttgtaaatcttcgttcccaccacgttagaaactttggttaccttaaatttgcttactaggactcgtaactggtggattgttagtcctttttcttgagatcatcagggtttgaacccttacctgatccaacattggacgttcgcttttatgaatctttcctcatattatttctctctttgatctggtctttacaccctcaacagtaagggttaactcaaccacttgagcatggaactggacaactcccaattgtttaacaactatatccacatttcgagcgatatactcttcccactttcgattaaatttagctttcctagcagccttagcagccactccatcaaaacaaaactttgccaatcgatccagttttgtgtcattctccatcactgcgctgcttgggatcaatcgtgtaagttctgctacctcgccactcaggtaatctcttacttcatagcatgcatttgctcacagtcttgtggtagtggagggtttatactcacactaccaactctgagcctagtaagttcgcaattatccttactagatcgcctcaagtgcaccttccagtacgctcgcggccattcctttttcattgttaaaatctttctaaccagaattaatgctaataagcattaccggacatgcataaacatatttaataattatcaaaacttatcatgcttttccaacagcttacacatttcatataagcagacaattcaaacaatcaataaatagtctattaatcaactaacaattagcacttactaagccatgagtcgaacgagtcttcacagccaatgtacatatcgagctagtcttcaggatctttaaactttagtcgctctgataccatgttgtaacaccatgacccacagggatgccacatgtgtgcttttacaaacttattcctaacaaatatattagtttaagaaatgtgtgatttaattaaaaactttttgattaaattaaaataaaaatttcgcacaaaatgctaccataatacggggatcccctgtttataaaattcttttacaacaagttacaaaactgttattacaaaagtaaggttatatttccaaacataaaaagggttgatcctactttccggaagccaagacaccacggctgatatgtacattaatgctgggagacctctgactcatggccgaacacagctcctatcctccttaccagcaccacaaagcacccgtgaatcacaatgactcaacaagaaaagctactagattgaaagcattgaaaatgcaagtattcacatcacagtataatatacatactcgtgcttcattatatattcagcatgcatgtataatctaacgtctatacaaacacatatattacgcactataaaaaaaatcataccagctcataattaaccacttcttcattacaataaatgggtattcactcaatatataatcacataatcttagtgtctcataaagcactctaatcacatatcaccatgtgttgggttttatgccc

SEQ ID NO: 272532 - DNA, 929 bp, Cannabis indica
tattacaattagcgctagcaacctaaattacaacaaaaaattgtacagaaaatccctactgcaactagcgctgcaaccactttagaaactcaaaaccgtaaacttaaaaaaaaagttaaaaattagtatatggggtagaacttagaaaataaaaaaagagtttataaatatttaaatatcttaaagaaattatattttagaacatctaatgaaaatactctaattatatcttcttatgtctaggaaattaaattttattagtaaaaaaaaaaaactaaagaaaatataaggaaaaaaaagtaaaaaataaataaataaataaaaaattctcatgtttcgtagagaaagaaaaattataagaaaaaaaaaactttattcaacaaaatttttcataccaaatatcaatttttgttttattattattattattatttatattgtgcgcacgctttgtttcctccattttcagcctgaaattttgttttattaattattaattatattgtgcatactttgtattcaaagaagtaattaataccggttgactgatatattaaaactactttccatattaaaaccagattctcagcctgaaatatcccatatttcccatgatgaccaagtcaaatatcaatatatttatcacacagaaccaattttagttttacaattacacagaagaagaaccaccataatagaacagcagtactgtattaatactttaacatatatattatatataaatataacacgtaccatatataagtatttggagaggaagtttcttgatatcaaattagaacttagttaaattggagctgaaatgatggatgtaagagcaaaagttggatttatcgcattggcttttaggaattgaatatttttatacacaagacagctccaattccaaaggcggagatatttataac

SEQ ID NO: 272533 - DNA, 320 bp, Cannabis indica
gtgtagttccaaagcattctttaagacaaaggatgttttggagactagtgaaatatattcaacattcgaggcgaagagttgtcttctttgaagaagaaaattttgaacttctctcgatttttctcgttggttgattaaattagatcttagcatagttctgccaatattttctgaagtatctttttaggattgtcatgtgacattgtttcttcattatgcaactagatgagttctatttaatctttgatttattgctttgtacacatgttgtaatgtcctagtaattagactgctggaaattattttaccaggatcttaga

SEQ ID NO: 272534 - DNA, 444 bp, Cannabis indica
ttttttttttttttctaattgagctattcccatctattttggcaaaactccacctccaaaaaatctgtcaaaggcatttcgtttctccttaaaatgttccccattctctaacaatgatcacatgccttcacagaatcgttagcatccttaaaaagagtatgccagtagaactcgctttgaagaaacttggcagcagttcttgtgccactgaaataccccccacattgtaaggcatggcagtggttcaagacagaatacatctcttcttcaagtgcacatcttcttattatttgatcagcacaatgtttgtagaggatcgactcttcccagtagtagtgcttcacctctgcaaagaactttttcagttgttgacaagagatctcagagtgtgtaacatttgcagccaagaagttcacatagtctgtgtgttgggttttatgccct

SEQ ID NO: 272535 - DNA, 1239 bp, Cannabis indica
gagagagagagagattctgtagtgaggagagaaaccagaaatagagggaaatcaccatgatcattgctgatcttttcagctagttcttgagtggattgagggctgtaaaaggagattgttcactcttgaagtgacttctctcagtgtgagatttgcttgtaattcttgtactcatgattggtgatttcaagttgtattctttctctctcagattttaatacaatgttatgacattctttagtttcattcatctttaatcaaattcaatttcattaagttttggttctggttttgattacatgtttgctgccattgaaattgttgtccttgaattgttgttatggtaatcttgattaggtttctaatccgcaacaccccctttaccgtcgaaggattaattgtagtgttaaccgctaaaatgtccatgcacgcctctttctctttccctttattccctttccctttcctagaaaagaacctctttgcctcctcactcgtgtgcacaactttcctcatgatcttcatcaattaattctacatcgtcaaaacattctcttagaccatatgtgacgaaattgtacccggatatcacctccgaccactgcccaaatagtgttgctcttattctccttttaaacaaattatcaattcccgaattatgcaaatttggttcttgcaatttgagtaaccactctaacattctcgacacacatgactttcttacttttgagtacttgtacattcaaatcacactccaatccgaaaagatgagatgaaaaggagctatagcgtccaaaaaacttgcaccaagaagcaaagtgtaggtagttttaacatcaaaagccttgaaatcttctttctcgacaaagtaaaagagtacaagagtggcaaagatagaagcaaaagccatgaagcggaatacatagccgacagtgttatgaccacttggagttttctgtagagcacttcataaatgaagttgagctcaacccccatgactctgtaagcgtctgttgccgtcctactcatgaagaacttacggctctcgtcacgctcttcaatgcttaagatggtagacctttgaatatctaaaagtagttatgggcaaagttcacgatctcgatctcttttttgtgtccttgtaccaagtgtttgctaaaggtttctgatgtgtaccccactagttaatttggagacttttcgagcaaggatgcttggaaagtgcttaagctcgccttg

SEQ ID NO: 272536 - DNA, 814 bp, Cannabis indica
atcggttggctctacctcctgctttatctggggttcataacgtattccatgtctcgatgcttcgaaaatatgtatcagatacaactcatgtcttaagttatgaagacattgagcttcagaccgacctgtcatatgaagaacaaccagtgcagattttggacaggaaagaaaaggtgctgcggaacaagattattccgctagttaaagtgctgtggcggaacagcaaggttgaagaagcgacttgggagttagagtcgcagatgcgggagttgtatcccgagcttttcaggtaaatttcgaggacgaaattcctataagggggggatagttgtaatatcccggaaaataaataatatttaaatagacatattttattaaatatgtaattattttggtaacgaagtaagattatgatcttgcttagggtaattattgagaatttactcaatgaaataaatagcgtaatttattaattacggagattatattgggatatgtgagtaccgaggatatcaatttcgaaataaaatattttttgggcccggcaattgtggaaatttagcgatgtggttagaaatgtcacgacgttaatggaagaattattttgggaatattccggactaggttagaaattttagaatgtcggtttaatggaattagcaaaattacaaaaatgcccttaggttattttagagattatttagctttgagggtaatttaattattctttaaataattaatcttttattctttgttttattttatttaggggcagtgatattttaaaaaaaaaatagaaagaaagaaaaagaag

SEQ ID NO: 272537 - DNA, 944 bp, Cannabis indica
tagtgtgtaagactgtgaagaatccaattaactgaaggagaatcgagctcagatcttggtgatactctgctacagaaaggatagaagggttagagatctgagcgaaagaagtcatttaattccgctgcaaccaatgtaaggtttcttgaactttatatgtgtttaaattccattattttagaaatgcatatttaggatgttaaataatatacatggtagtaaatctaaatcctggtaaaattatccccaacagttcggccctgtaagtatggtaatagcttactccccatgtatttgtattaacttgagagaaggaccttcctggtcgcacatgtatttgctcggcataaacatatacgcatcttggtcgaacaacttcttgaccaccctgctcgggagtccgagcattacagatgttgaccaaccataattgagctgctaggaatactttccttcgcccaggtatcagaaatatgggacatgtgtcatctattcttattgaaatgttaagttgtaaaaaacaagatagcatttttcccccaaatctgcacaggaccttcctggtcgcacatggatttcactcagcctggagttttattcggatgggtgacgcgtgtccttgatggcggatgatgatccgatgtgactctaagtaggggtctcttcaatatctatccattaatgctaattgacggatgtgcctcaaatcaaggcttgatacttgagcgtggttgacgattacactccctgcaatgagtgcgtaacgtatactttttgggggaaatttgaaacatttgaattttgaaacgatcaattcctctttcagactacttataaataggactaaggattccgggtaatccttttaaccactttaactcttaaagactagagcaaaggttttctagccaactttcttcccaaattcttcgagaaattcatag

SEQ ID NO: 272538 - DNA, 696 bp, Cannabis indica
cactttatcaattgcttgtctaattgatttataaacaaaaaatattctgaaaactacttaaaaacaactaaaaaataacataaaaaaataaaataaatacacacatatacaataaaaaaactgtgtagagtaaactagaaatacaccataaaaaatacacataaaaattatacaaaaaatataaacaaaaaacaaaaaaataactataaaatacctaaacaacaacataaagataactataaaatagcaaaaagataactataaatcaatagaaaaataataagacatcaacctagttaaaaatatgcaaatcattcataaattaactctgaataaactacaaaatatctaaaaaaaaatactacttttattaatcgtgtaaaagagagaaagatataggaaaagtcctcttaattttttttctaagatagagaaagaatgttaaaagaaataaattaagatttatttttataaaatgtgattaattaaagaaaaataatatgaaatagtttgagtgtgaatagttgaaaaaatattaaagagggaaaaaatataataagtgtttatatttttttaaaaaaaataataaaataaaattttatgagggaaaaagtgttaaaaaaatataaatatatatatatatatataaaatttagtgtaaaaaaagatagaaagagagagagaattggaaaaaaa

SEQ ID NO: 272539 - DNA, 1289 bp, Cannabis indica
tcaagaaaaaatcgaggagctccaaatccaacagaatattttggtgaaatttgggtccaaaagtctaattttaacttttttaacaaaatgtaaggtctaaaagtattttttctgaaacaacagacaaagttcgaaaaggtataaaccctttttaaaacaatccttaaatactctttaactttccagtccatcaaaaatgatggaatagatcacaattgcatacatatgtttctctagttgcaaccactaactaaagcaaaattttacactaaaactaaagcttgactaaagtctttacggttgtcctttattttctagcgacacacaaactattaggccataaaatgagaaaaactcttgcacaaaccatttttgttgtatcatattgcaatattacttgacaacaaaaaattaattgtcaaaggtacacgaaggcttacgctcagtgggccgagacatgagaggaatatgagcaatctttttcttgatttttccatttccattgcttaacgtacatttttctgtaagaaaaccaaagccagccacaatggtaaattagtatagataaaaaataaaagttttactcagtttaaagaaactacacggaaaggttttgcttttggcaccacttaatacaggcaaactgctaagcaaggcttcattgtagatggcagcttgaagatgataggtttggcattgtttcaccaagtgcttgcacagagtttgttgagcatctacaagtttggacacaaattacttggttggtcaatagagaaacaaagtcaagtgattggtcgtggtagacaacggcatgtaaaaaaaaaaaacaagatgaccagaccagccacattgggaaacaacataaaccatttataaaacagggatctcagtggttggattacctgaagagcaaatgaactttaaatcttcaaattcacaggaatgaagaaccaacggaatctctggagccatgagatattgaggtttccttggtatcctgtcaacatccagtaatgtgtctattacctacaagttgaagcatttatacagagtgaggataaatgtttatagggaacgttgtatttacgatgagttgagaataataacgtcagtatgtaatattactataaacccattacaatacaatgttttggggtttcgacaagaaactcggattatgctcaaaatagtaaagttagaaggacaactgatacgcacatcaggggagttcaagaccttggccgaatcatgaatagtaccgcaaccactgcatcggacctcggtgccga

SEQ ID NO: 272540 - DNA, 659 bp, Cannabis indica
caagctcgaataagccccaaataaacttggcttttctaacagcctcagtacctacttcattagaggcaaactttgtcagctggtatcaaatttggtggcatactctgtcaccgtcatactgccttgagttagccatatcaattcttctaccttagcagtacgaatagattcattgtaaaacttttcctagaacaaggttcgaaaggcatcccaggtcatattattcagatcatgaccctaagacacaatttctcaccaaatgcaggcatcttcccaaagtatgaagatagcacattccacctgatcattaccttcaacttgcataaagtcaaaaatggatgttatcatgctcatccattgctctgccttaagtggattagcaccaccttcaaacattggcggattttgcttcctaaactgctcatacaacggctccagatgatttcccacgtcctgtggcactaccaaaggtgccagaggattaggattaggataaggagcacgtcgagcttgctgctctcttaactctctaatatgatcatcttgctgttggacgatctcttaaatcgtagcatacatttattcttagttttgtggtagtggaggattcgcaccctcaccgccagtctcgagcctaaaaagctcacggttaaccctac

SEQ ID NO: 272541 - DNA, 1866 bp, Cannabis indica
caagaactgaaacaaaatacgctcaaatctgtataagaacattatgtaatcccagacacatataagaagtaacaagaaacttttgactcaaccgcaaaaagtatgataagaatgagatcctaactaattataatccaaaagcataaacatgacttgtcaaattagaatgaaagaagattagatgtaagtaaagaataacttaacaatattgtacaaacagaaaaataagagagattagacaatgaaaactcccaaagattttctgagggagtcaaagagacttgattctagggccttggtgaaaacatcaactaaatatactctaaattgttatcaagctaagttccacaacattttgaatcacatctttcaaatcttctgcaatttccttctccccatctacaacataaaaatatagaaaatatcattatcattaaaatatttaacattatagttataaatataaaattaaattactttcatctccaaacaaccaatctcttatgcacaaaatggcttgaactgtatcaggtttaaatgtacttcgaaactggtcaagcactcttccaccaatactgaatgcagattctgaggccactgtcgagataggaatgctcaaaatatcatgagccatcgctgcaagttctgaataacaattttgatgtgttttccaatagctcaagatattaagctcctcattcctatcaattctttcatcttctaaataaagttgcacctgtgtcttttggacaaaatttgaacgatttccacttggaagactatcaaactcctatagaataaaataaatatacaagttatatatataaaaaataataaaatagcagtaaatataaaataatacacacaaataaaaatacaaacaatttattagacctgaaaaaatttattgtcaatctccatagcatatgtctctcttttcttcatttcattcatcttgttcttggcagccattgaagtgtttgggtcaatcttacccttgtactcatcataaagagacaacaatttttcatataaagctttaaattccttagaatcttccccatatgccttgatatagcaaaattctacaacttccaacttgtatcgaggatctaagatagctgctatagtcaaaatgggactaaaatctgaccaatacttttgaaacttaacccatattttacttgccatacgccttagatagtcatcttcaccttccaaagtctttttaaagttatgtagcaattaattatgttgggaaagtacaaattggctgttggatacttcgagccaaaaaaaacaagagttgcatcataaaaaactttcaaaaacttccaaactttctcaactctttcccattcatccttagatggacaatgtttatagtttgaaccactcaaagctaaatgttgaaaggcacgacgataaactaaagaactatccaacataaggtaggtaaagttccacctagtaacaacatcttgacacaatcccctcttgcaaacaccacccgtaaatacaagcttaacacattccaaaaacttttgcttccttagttgtgatcccttaacatactgaacactatcatgaatcttttctattgatacatcaatatcctttaatccatcttttacaactagatgaagtatatgagcacaacacctcaaatgaaaaaaagtcaccattacatggaagtaaacatttcaaattcatctaagtttgtaatgcatcaacagagacatcatttgaagatgcattgtctaaagtaactgaaaaaaaattcccctcaattccccattcactcaataaggaaaaaaatttcttagacaatgcaatacaagtgtgtggaggtggcatagagcaaaa

SEQ ID NO: 272542 - DNA, 1761 bp, Cannabis indica
cttaagaaaacaatgaaagtttccattttttatccaaaaaaaaaatgagcccctacgaccttacctacttattaatagaagcattcattttaagtcataagatactcattaaatagtatacgtatcttcaatcttacaactaataactacttgcacttggctttccatttataattttttagtgtgatacagagatctttttttgagcaaaggttcctaataataagcaatgattcctatgtgagaaaatattattattatttttttccaccacttaatttcttcaattctaataacattataatttttgttgaatattattattactcatattcaaacaccaaccaaataatgtcattggtcaaaacatgatgcatatctaattgtcaaatttcaagcaacattaagaatttttgacacttctaaatattaataattcaatagtagaacaaatttaattattagtttttttacaatttgaaaatgaatacatgttcattcaactaacgtttgaattagttttagaacatgttatgcataaataatattaaaaaaaaacccattttgttaaatctagaagttaatacactaagcatattttgtacatatatataaatattatttaacacccactaacttaacttatatgcatccgcacatgcttaattttcattattagagacaaaatgtataatcacaagctaatatattaacacgaataaacatgagaatgttaattaatacctaaatatttaaataaaataattaaaaaaaaatagaagaaagttctacgaaggaagagtgtaccaaaatagagtgagataatagaggaatggatggatcatgctcgcatgagagttgccagccaatctaacccatatatagcttcttaattattattattattattattatatttattaattaataattaaaataaatatattgtgggtcccaccaccgtcatttggcactctgataattagagaaaaaaaataaaataaaataaaaacagtcaaattataaaaaagcaccgtccaatccccctaaaaaaaaagaaatatattttttataaataaaaacaataaaaaaaactaatagctaaaggaagaccaacagccgtgtccaccggttacgctggttttatccgtttctccaaatatagttttctttgtaacttcttcacttagtcgtgaccgattctcccggttcaaggtagtgattcttttcttaaacttatcctcttctttctttatcattttttattttataattttttttttaatttttttttacacttagaagattatagaagagagtagtcctgttactgtagtagtagtagatttttttagtgatacaaaatcaaacccagaattaagtatttttcaaaacaaacaatgagtatattgggtattcgacaccacatgtttgtatgaaaaaaaataatgaaataaaatctgtccaattattcaaatcataataattaattaacactaaaaaataaaatcagtcaaaacccataacgaatagaacattcataattaagaaaattcctaaaaacccactcgtaatttagaaaaataccaactaaagcgcgtaacaccaactagacccacacatttctcaatttttttaactttctgaattatttttttccccaataaaaattaaaaaaaatccatttcttttcactttttaactatcccaacgtgttaattttggtcccattaattattatgtcataaagaaagaaaaaaa

SEQ ID NO: 272543 - DNA, 616 bp, Cannabis indica
ctaagctcatgcaaacattacagaacctaactaaacaaaaactcatataaaaccatactaaaacttaaaattcaaaagggaaaaagaagagttaagttgccttgattctttcctaccactttaacaccaatctctagcaataattctgaatggtttggtcgtgaagaatttgattagaaagattttggtctttcttggtttgggtgagcggagagatagaaagagaaataaaggaaagagaaattgtttacagtttttataaacaaactacaacttttaaaaactaatagggggtttttggccaaattttttaaaaatagttttttaaaaactgagttttaaaaaactagataacagaaaatatcaaaatgttgtttctagtttttttttttaaaaaaaaaaaaattagtctaacatattccttacatttttgtctcacgtacacctacctggatccttaacttctctaccgcctggatgctgtttcattttgtttttcatttttagtctacgagtcactatagttaccacaattttgtgagttacgttctcatcagcgtcactggaaaaaaatattgtttgaaagttaatgtcacacgtttagttcacattaact

SEQ ID NO: 272544 - DNA, 675 bp, Cannabis indica
tgatgcaatctttttctgtaaggtgaatggctcgaatgcgaatgcccttctgcaatgtatctctcaatatgaagattggtctggccaaaaggtgaacaaatagaagagtggagtggttttttctcctaatacctctcaaaggtgcaaggatgagttgaagaacaagatcggtatgaactgccttcgtagggacgagaagaacttgggtaatccttttttcttttctgctaacaagagaaaggatttcaattttcttaaagagaaaatcatgtctcggttagaaggttggagagcaaaaaatttgtctcaggcgggtagaacgaccttggttggctcggtccttcagagtattccggggtattttatgtccacagccttggtccctaaagctctttgtgaagagttggatagtattgttgctcgtttctggtgggtgggatgtaaagaccgcttagtttaatttagaaattagcagttaatcacgtttaattatgaaaattatttatagccatttaaataattattatactgttattattgaattcagagatgcatttttatgtcattcagtagttttcataattttgcatttctggtgcccggtaacatggaactcggtgtttggctcagcaaaatcacaacttagtatgttagtagtttgggacggtttattag

SEQ ID NO: 272545 - DNA, 589 bp, Cannabis indica
ctctctctctctctctcaaactagaaggatccaaccccaagctttcaatttttttggaattttagcaagatttcaaggtgtatcaagtggagggcatccatctagcgcgtggttttttgtttaggtcacttgaatttggaaacgaggtaagactagcatagaacgtatttagatatgaatatgtgtatgcatgatatatgcatgctatttatgattcggatactaccaacactcgtacagtagcggtactgagtgcattggtataatgtatgatgttcaacgagtacaatacggtattaccaacactagtacgattgagtacgaagtgtatgtggtataacacttagtggtatcgaggtacggtgcaaaccctgccaaaactcatacagtagcagtacgtggtgcatgtggtacagtggtcgtaccttagtaaagaatgttcttacttatttgataagccttgtggataggtatataggcgcctaaatataagtcggtaatatattatatgctatatgatttacatggttctgattcacatgatttatttcatgattatacctaatgtataaattctattaagtccaaa

SEQ ID NO: 272546 - DNA, 2266 bp, Cannabis indica
cagtaaatgcaggaaaatcacagctatatgattttcaaatcataactgcatttacactacgtgatatgtaatctaaccctgtgattttaggggatgatcgttgtaaacatattacagtcaactttgtaattaactgctcactatttaattataaatagtggcaaacaagatcaaaaaagggacgaaaaactcataaaaaaagggccttgggaaaataataaaaaatctaaataagattgactcgtggactatgcagaattttaactgcaaaaccacgtaaaaaatcatgtgttaatacttttacttttatatcttttatttttttctgtgtgaaatcgttactgtgaggctcaaatttggctaacaaaaatttgcgttaacaatactttaccaatgccctggaaagcacataacatgataacacttatccaatgtgtaagtaagctctatcgctgattatcatgtcagtctaaatcagtgtactgataaatcatgggacttaaactttgaaacataaaattattattatattccactgtgttgacaatactataaatatgaataactatatgttttggatttaatagaatttatacatttaatatataatcatgaaataaatcatgtgaaccatacaacataaaatgatttctgatcttttattaattagtaaatctaattatattgaaataggttttatttagggcacaaaatcccagcaccatccatgtaaagcttccaagtaggttagaaccctcctaggctgtaatcttctttgaggcatgtgcatttaatgttgaaataagctaatgcttggtctttgattgttgtgcaaggttgataggcaattttgaaatgaccaagttctactaaccattttttagatgccctgatgcttctagcttctttaagattattatgcgtggttggttagtcagtactttgattggatgagcttaaaaggccaggtctagttttttgtcaccagatgactctgtttgattcctggaaacacttgtatcttaatctttggctaaagcaaagaaaatgcctagaagacttttttgaaaaactccttcaaaatggcttaggatgacaaagtgtcaacctgggagctgggtcccaattatgaccccaagaggactccgtttgtttcctgagagcactcaaatcttaattgttgttggaaattgaaaatatgctcagaagacttcatctaaactacagaagaaagtggcccaggtttacaaagtgtcaacctgggtgttgggtccctgttttggcctctagatcaatccatttcattcccaaaagcacttgtttcctttttggataaagaaaaacaaaatggtctggatgcttcttcaatattattgttggaagcaccttaagttgacaatatgccaacgtaggcgctggggtgcttggggcaacttgtgcctcaggtgctcaaaattaaaagtgtttcgattcaaattctattgcctcaaatatgttcatgaaaagtctaattcatgttccaatacaaattttgagttatttgcactaatacggactcaaaaactaaaaccctagtaggagtgtcaatctgggcgctgggcacctaggttgacttttggggtgctatttcgcgtattttcaacattcaggacatggattcttcttatctttgtggtacataatatacgaagatagtgaattggagacaacttagtgggatccaaacactcattctagagttcccggggtcaacctagatgtagggctagagacccctcacagatcgattgttatgactcgggactagtcaactctgggatgttttctttcttgtcacatgttaaacattgatgtccacgttaccaggattagtttttgatttaacaaaatatatttattaattagacctgcaaagtgatttaattaacaaataaaaccacttttttacttttcttctcaaattttccctttattagtaaaattcataagtaaaacatagtcttctttagaattctaattgatttaacaaaccaattaattaattctacatggaaatttttaaacataaatttgaagagaatcaataagtagttcccgaagtttttaaacgaatttcctatcttattaatttctcctgactccactatagattcagaatcacattcttgtttacataaaatactctatataccaaatacctatctgctaattattcattatttcaatctaacagtcattaatcctctatggatagtttacatcgagt

SEQ ID NO: 272547 - DNA, 832 bp, Cannabis indica
tatagcttctatgtagacatagaagtgaaataataatttccttcgagcttggcttaatagagataaatggaagagctattatttcagtaattatattagtttattgaaatatcatttataggaagctaagtattttaaggataaaatatattgatgggtggaacggttaatttttccctacgtgatgtaaatcatctataaaggatctttgattatttgaattagaatgatggataattcataacgtatctatatcttggaacatatagagtgttctatataattaagagtgcaattttgaatctatagtggcacaagaaggagttaagtcagcttctataagccttattgcctggaatgcaaacttgaagaggatgtttactgagcttccgttgtccaccaagactctggaaactcatttgtttgtgatctgtgctttgattactaagggatagttgtgggggagacacacaattctggcatcatcctcggtgaaggtgataggcagattcatcatcttggggcattatgctggagactgcaccaacacgcatacttccctctcttccacttatcttaagtatcttttctacaagtttcttatgcttcctgcaagatacagcccactggagatcgtggcaacatgtctgtccattggaggtggggtgagtctgggaggatatgggattccaggtcctggttcgagtaatgctaccacaacttgcactggtagaacagggagtgtaggcagtgatgttataggagcttgagaacgacttaccccctgcagaggatttatggcattttttctatcctaaaatgatcatatgct

SEQ ID NO: 272548 - DNA, 673 bp, Cannabis indica
acataggctgtgcaacgaaacacccttaaatgttcaaactttggtggcttccctgtccacacctcttgaggtgtcttaaagttgtttggcactgatggacacctattgattagatagcatgctgttttgagagcttctccccaaaatggtctctccaaaccagctcctacaagcatgcatctaacccctccaacagagtcctgttcatcctttcagcagtgccattctgttgtggtgtgttcaccactgttttgtgcttgaaaatgccttcttgagcacaaaacatcttgaattctcctgagcagtactctaggccattatctgtcctaagtaccttaagcttgttaccagtttggttctctagaagctttctccactcaatgaaagtatccaaggcatgattcttattttttagcaagtaaacccatacttctctactgaagtcatctatgatgctcatgaagtagtgtgctcctcccatggttggaattcttgatggtccccacagatctgagtgtacataggctagtttttctgttgttgtgtgttctcctttgctatattttaccctgtaggccttcccaagtacacattcatcacaaaattctaacctttcttgtagtttcttcttgaacaacccttgcttgtttaactcttcaagtcctctttggct

SEQ ID NO: 272549 - DNA, 590 bp, Cannabis indica
cctcttccttctcctccaagaagttggtgtccatattagggttccaaaggcaggccctagaaaaagtgcgaaaaccaaccttgtcgcaccgttctctggtctcgacttctttctcggcaagtttttcagcaagcatctcctcaaactcatcggcttggtctttaatggctttctcggctttttcttttgccttctcggccacctctttagccttctcggcttcctctttttccttcatggcctcctctttcctctcagcttcctcttttgccttcacgacctcctctttcgccttatcggcttcctctttttccttcttggcttccttcttcttcttctcggcttcgtactttgttttctcgatttcttgcttgaggcaagtattctcctgttgggtgttgtctcgttgctcactcacaaccttgcattgtgattgtaacttatgaaagtcaccctccaagtattcaagccactcattgagtaatcggttggaagcaaaatcagcgaaagaagcttggagaattgcaaacggatggatatgaaagaggggtaaaaaaaaaagaataatataattataataacaaagccaa

SEQ ID NO: 272550 - DNA, 2037 bp, Cannabis indica
tatataaaatcaaaattccctaactaaatcccataaagtcagaaaggtcaaattcacaactttacatttctcatttccaacatgggaagaacactcagaaatgaagagtttcaagtctctcatttctacaaaataacaatatctctgagaactagtgaccagctttgccagaacacaaaaacagactaagtgatgtcaaaatattacttagacatcaaaagtacatccataggatgttttcccattcacctagcctccatgttgacgtcatatgtcaacttgggcgctgggatgtcaacttgggcactaggttatgaaatgccttcagtaacacggccataacttactcaatattaatcttattgatgtgattcaaattgtgtttcgaaactatttcaatgctctatcaagtgatgttcaaactttagtcgtaattctaaagttatcggcctcaaatttcaccccaagagagttacaaaaataagcaatggcttacccaaagtaggttccgccgtcacgacctgctcagaaaattgtctatcaaccttagaagttatttttgactgttgtatcatcatcaacgatcaaaattagccaatttagatttttttcatattttgaattgccttattcttctttaccgaaaccttacctgactttttcgaacatgatataactccatggcctaagcctccacaagctaaacatttagtagggagtcattcatactccaccttttgatccaccaattgcccatttctttcaaaaggcagattgttgagggaggattatctgagatttccatctccacaagaactctagcaaactttaccattgatcgatccctagttaccttgtcaaccattatcgacttgccaattatactcaccaaagcacttagagttttccttccccaatattgaaggcctaggtcatttagaggaatccttaacaagatcgatttaaccaattttaaagtgtccatatccttagaccaaggccaaagtatcacatgtttcttatcaaaatggataacaccactctccaacaccaaatcccttgtaacttcatccctaaacattaccaaagtatacctagtgtgcatttgcacaatacaatctaccaccaaattttcccacactctcttaatgaaaccttcaaaaactaaaattaaagggtaagttcccatcacaatgtagactatagaagattgccaaaaggaagcctcttcctcaacctcttctagatcaatttttgctattatctaatcaccctgttttaaaggtttctcgtattgaagtttatttgatggaggattgacctggttctcctccaatttcccccaaacttctttgcaacatcatggtaatccaccgtagctccttgttgcacttgctccgaccaagatcgacaagcagacaatcgattaaccttcatcaactcatcaacgcctatacttataaatcagagtaagtaatcctcacccttgactcaccatctctgaagtctcctagtttgaagggagcttactcgctgcaatctcatcaagagcatcagtcagagctttgacacctccttctttttcctacccaaagaaacgaaagatctcaacttttttcaaaatttaataaaatattactataactaaaatatataattaaaaataaaataaattataactataatagtattaaattaagaaaaagactgcaccattactttccttcctatatttttgaagaggaggataaaaaaaactgtcggtttaaagattatgtcgtttgccacaccaaacactttcgaattatgtcgtttttcgcctgattgagagtagacgacacgaaccttctgtgtagcggtaaaacgacaacaaaagtttttcttttgtagtaaaaacgacaacgaactttgaagtattagagaacttcgttcgaatcgaccaaaatcgaataaaagattacagacgcggccatttcctttgtattattttgaacaagaaagaaagaaaggaaaggagtatagagagagagagagaga

SEQ ID NO: 272551 - DNA, 3835 bp, Cannabis indica
ttccaaagttcaaagggttggctcggtttagagctgcaatagtttccatattcgccatcaatggtagaaaaagctctgataccatgttatggttattgttccttcgattcatgatgacaaagatcaaagatgaagatgaacaaaggaaagaaaaaatagagagaatgtagaagaaagagaatcaaagagagtcattctattatcgttcaattattacagagtacaaagtgatatatatcacttgagagaaagaaaggccaaacagaataactggaaaaccagtaaatgacagctctgcaataacagaaataacaaacaataatagacgaactaacaactccctaatactgtacaaaccaggcttcttatgatgccacaccaagttatcacaagaaggcatattatatcttggaattaaaaaaattaaatcaacttcatctaagaaaaagatgagccaatcaactctttgttccactctccattatcattcattaagaaatccactatgacatctaaaggtaaggtaggagcagacgaaattttattaccagtcacagaagaaagccaacgatcattatacacaaataaagaagtgtcctcactaataagacaacaaattccatcaaggaacaactcttaccccaaagattagaatgccaaataaatgaggacttcttattaacatttgcttcaaggaaaaaaatattagggtagaagatgtccttcatatacttacccaccaaagagtttgagctaagctcactcttactctaaatggtcattttgtttggtagcgtggtggtgcccctgattcacctcatttagactgacagtaattgatcaatgatatttcttggcactctttttcctcctgaagttttttccactgagttacgttgaacgttttaatggtgccatattttaaaaagaaaatgaatatttgacctatataaaatatgagttttcttgtttatttattttctctcttctcataattgtagtctgatatagtaagataattttaatttcttctaactgaaaaaaaaaggttaattaccattccaaaaatatttaggctaaagtataagctaagttgttagatgtgttcggagaaaatataaaattcaaaaagaaagaatgatggaaaacaatactttgagtaagattatagcacacctctcttctgtctttgataacaacttaacaatataaaggcaaacataatctatagaaaaagactattattatcccaaatttgttataagatgatgtacacaaggtaacaagttgtagatatgttaaaacctagtcagagtatatcccccaaacaggccgaccagatctttcctaaagtttaatttatccaagtaaagctatcctacaactattcttggaatggagccagtatctcgtgatatgtcgtgcaaccgaacatatcatgctgaatgtactgtctgtacagataaatacactaggaacagatcttctccatattatttccttaactgcttccacgaaactagaaaccaaaatccatattcattcgagattaactcatcagatcaagatttgtgggattgtcagcatggagtcgatccttaaatgactccgccaaaataagaaatttgatttattgatcctattttatacctctcctctactactctttgacgctcttaactagcgattactctataaaaatatttgtacactcacaagagctattaagaaacgtctcacttggtcggaccttgtggttttagtaattttctctaagtaatacaactaaaaggggagtatgctattaccattatacgggaatgaacctttatacgtctcgtgcgttgttttaatttactattttttaccatcaatttattatcattcttatcgctttaattgactccatgtcgttagccaaaagcgaagttaatattttggtgctttcattgagagcctaaaattccaattcgctctcatttgatttttaatgcacttccaaatcagcgacaatggttttgacaaggagatcctcgtcaactgaaccaggagatcctatatgttgaaggaccctggcatctaaacactggctgatccaggggttgacaaccccaacacgcggctaccaccacagggcaatccttccactattcctgccaatgttgacccagggctactgggatcgcaacacctgccactgggataatgcttggggtccaagatactgggaatagtagtcaggcatatgttgggaaaactgggcatgacactagtcatccctctgaaggagaaccccgagttgatctgggggacaattctgaactagacactgtgagagaagtagtaggacaggtccaaggacacaccaatgttctcgaccacaattaggaagaaacgcgtgttgtcatgaacaacgtgttcgaagagcagaggcatgaattccagagataaatggataggcaatctgaattcatgtgggcccagcaagaggaaatcaatcgtcgatcaagaaaggccaccgacctgatcaggcgattccatcaatatattaggggtaggtactagagaactcaccacttagaagagatcctaatcagaaaaagcatcttacatccttactgaaggacaagagtacgacccggaggaatgcccaactaatttatgttcaatcgccttaacatgacaaacgttctaactccatgccctagaattaaattgttagcaactcaatagacgaccaagtcttacttggtcactatcttagaaggaatgatcaacccaacttctgtccctagcctgaagggaggaaagaagatgaacctcctcagccagctggaagatctcgatggcaggtaggtacatataaccaagatgggtgagtccaagtttatagtcagtctcaacataccagccaacaatctcagaaagacaaaacaaggtctcatagtggactgtcatacacaagcaagaatgataacaaggatgatagtgggctgcacaactattatcatcgttataaccatcgtactcatgaaaaaagctgggaaaatcctccgaacattaacaatctacctaggccagctcgatctacaagccaaccctacaaaagaggtgcaggcgactcagttttctaatgtatggggcccaaaactaatcttcgagatgatttgaatcgtaagagaggaaatagggacgaacattttgtccctccacccaataatcagccaattaatgtggagaactacatcccacaaatcatagataactacgtacccattgaagctctagtgggtcaactggtgacacaggctggtcaacaaggaggtcaagtcgatccagctatgcaagcccaactggataaactaaagggccttatatagagcctgacctacccaaagctcactaatctagagctagacaggttaagaggttcaccattctttgcacggataaacacacttccactcctaaccaagtttaagatgtccaccgagaaaaattacactcgaaaagaagaccctctatcccaaatgaaaaaatactttaagatccagactaattttcaaggtgttggggagatgtagactgcaaaattttcctagcaactctggaagatactgcctaacagtgatatttcaagttagctccatgaaagtttgactcttggaaagctttcacagccgaattctatactctattctcatcttctagaaaactaccttaatacctggaagacctggtcgaggtgaagcaggaagtagaagaacctttgaatgactacatccaaaggttcatgaattaggccaccaaagtcatgttggatatttattttacc

SEQ ID NO: 272552 - DNA, 749 bp, Cannabis indica
caaccaaaaatccatcgcaatgtcttcccacctccattctggaagtgttagtggttgtagtaatccttcttctttacaaataaaaccgaagctccccaaggtatcacactaggccgagtgaaccctagatccaacatcccctggagttgtatcttcagttcttttaattcggcaggtgccattcggtagggtgcttttgatacaggttctgctccaggaattaaatcaatgataaaatctatctcccgctgaggtggtaacccaggtaattcctctgaaaatacatccaggaattccttaaccactttaacctcttccggtccaggtaacaccgatttactagaatccactacaactgtcaggaaccctacacatccactgcgtaacaaatccctagctttcaatgctgagattcttggaacacgagaaccttgaaccgcaccaacaaagacaaatggtttctcattctccggttcaaaagttacaatttttcgtttacaatcaatactagcagagtatttggacaaaaagtccataccgagtataatgtcgaactcgaccaatggtaactccacgagatcagcgctcaattctctatcttcaattcaaattaacactgatctaaccgactttcttgaaacaactagttccccattaggcaacagggttccaaatcccatctcaaaaatatcactaggtctatcaagttgatcaagaactcttgtggacacataagatcgagtagcacc

SEQ ID NO: 272553 - DNA, 1326 bp, Cannabis indica
agtgatcatttgtcccggtttaaccgagtaatgacggttatgagagttagtaatgatgccaagtgcttatgctttccactaacgttaagcggttctacgaaagagtgtttcaaaaagttggaaccaggatctgtggattgctggaacaagttacaagttagttttctgagacagtttatcgccgtgagaaagattaatcacgaagttagcgccctaactaacatcaagcaactacccgtagaaacattgaaaaatttcataaagaggttcaacgaagaagccttgaagaccaagaaagttgatgacggacaacaacttgtacttctttaagctaagatccgtacagaaaccccgttctggaatgagttacaacaagaaggagccgcgaacctctaagatttccagaagagagtccaaaagtacatcaacttggaagaagccaaatagtggcttacggaggatactacccgaccggggtggcaagatacgtacctggagttcagctctcgagaaccctacctccggctactccacaaatgagcggtataaagttcttcgctactccaggatacaattagagccaccttggctcccatcttcgcattacgggaacccctcgggggcaagcggacaagttccgtctcactctgctcctgctgcaagcctagccggaccttcttcaggctcccggagcaagaggtcctcaaaaggcagtaattggacggaggacaagcgccaaaaaagagggtatactctccaatatacccaatacacggagctgacggactcataagagcgtgtgtatttctccacaaggcaaaagacgcactaccggaggccgcctcctctgtacagagatagttcgtgaagggatcccaacaaaagatgcgaataccacaatgacattgatcacagtactaatgacaaaaatttgaaagatgagatcgaaaacttgatccgattgggtcatctgtatgagtggattaagaaccggctcccccatctcaacccggttccgacagggggcccattgccccaagggacaccagggggtgcactcggagcgttggcaccagctgcaccctcaggaggaccaatccctcagcagacgcctggcctgccaccaagacccaacggaagagtggctatgatctcgggtgggccccatgtcggggggaccactcaaaaagagttaaagcgctatgtcagggccatctaacaagacgaagtgtgggaagtcactcagcttccagcttaaaggccccgactcatggatcagtcgattactttcatggaagaagacgcaaggatggtgcgttttcctca

SEQ ID NO: 272554 - DNA, 1002 bp, Cannabis indica
aacattagagagtttctcaaaccagccgaggggcctttaaggccataaatggccttgtttaacttgcaaactctatcaggatattgaggatcttcaaacccgggtggttgaatcatgtaaatgtcttcttgaaggtcaccattgaggaatgcattattgatgtcaagttgtctaattgcccacccatttgtaacagcaatagtcaaaacaattcgtatggtaatatgtttgacgactggactaaatgtttcagtaaagtcaaagccaacttgttggtgaaagcctttggcaactaaccttgcttttagtctattgacactcccatcagcattgtattttattttatagacccacttgcatccaataggggttcggtctggtggtaaaatgacaagatcccaagttctgtttttgactaaggctttcttttctgtggacatagcattgaaccaatgaggttcttgaagggcttgtttgacagtcttgggttccccaaaaaccagaaacaccttgggttttcgaatgccagacttggacctagttgtcatagggtgtttggaggtagtgggatcatgggaaggtgcagcaggaggatgttgattaataacaggtacatcagtaactgtattgacaacactggtatagatgtcttgagcagcagtaggctgctcagatgggataacagaggcagaagcagggtgacatgggaaagtacttgtgctgacacttggtgagtgagatgaaggtggagagagatgtggtgattgaatgggaagttgagtacagagcagaatgggagggataccaggtggtggtggggagtattcacttgagtagtgtgtgaagatgggggaagtagtgttgggcaaaagggggaattttgggactcgatcaaaacactacatcacgagagatatcaaacctcttatcttttagagaagtcaacttgtagcctttgtgagtatatactgtagcctagaaaaatgcaaggagtagacctgt

SEQ ID NO: 272555 - DNA, 3512 bp, Cannabis indica
gcgtacgttgccatccttgactcgatctagtttttctagtcgccacgtcccccagattccttacaaagtaagcctagacaaaaaaagaagaaacgtggacaaatcaatgtgatattttaggctctcacggaataaaaactaacgaataatacaacccattcaaatcaacccaaatctagatccaccgtattattagttcttttttaatgacccctattattaataagtattcttattctgaaccaatcgtgtttagtatttttaagacgtgtcattatgcgattagttaataatattcctaaaaagttagatcaataacaatattaatagataggagaatgtttgacaccacttatactttttttagcatttctcatcattcattgcacaacatagcttcgttaagtacacacgcaataattaagaaaaattaaaaatatatacgttcatgaagtgcacaatttatattctctctctcatttaattaaagtgattaacacaaatcacacaaccgtcacacatcataaaagtcaacaaatatatattatatatataaataaataataaatatctaagctgctataaaaacctatgcttcctctcagcattctatcatcaactcgatcacgttatcatttcaacaatggcttcgtttactcacttaattctcttctgcactcttctcataaccaccgcagtagctgaaacaccatcggttcgccccaaggctttacttctcccagtaaccaaagattcttccaccaaacaataccttacccaaataaaccaaaggacccctctagtcccagtgaaactcaccatagatctcggcggcgggtttctttgggttgactgcgaaaagggctatgtctcttcaacttacaagccggcacgatgccgttcggctcagtgccacctcgcaggatcaaagtcctgcggcgagtgctttgacggaccaaaaccaggctgcaacaacaacacttgtggtctcttcccttacaaccctttcatccgtacaagcacaagtggcgaattagcacaagactttatctcaatccaatccacaaacggctccaatcccagtaaagttgtttcaattcctaacgttattttcacttgtggctctacattcctcttagaaggcctcgcttccagtgtcaccggaatcgctggtcttggaaggaagaagatcgctcttccttcccagttcgctgcggctttcagctttaaaagaaaattcgctctgtgtttaagctccaatggggtcgtatttttcggggacggaccttatatcatgcttcctaataaggatgtgtctcaaaatcttatctacacaccgctcattctcaaccctgtcagcactgcgggagcttctttcgaaggtgaaccatcagcagactatttcatcggcgttaaggggatcaaaatcaacggcaaggacgttaagttaaacacttcgttgctctctattgctaaagacggcactggtggaactaagattagtactgttcagccctatacgtcgttggaaacttccatatacaaagccgtaattagtgcttttggcaaagcggtagctaatgtcccgagagtgaacgctgtggcgccttttgagctatgctttaactcttccagtttcggcagcacacgagtggggcctggcgtgcctcagatcgatttggtgttgcccaacaacaaattgtggaccatttttggtgccaactcaatggttcaggttagtgacaatgtgttgtgccttggattcgttgatggtggtccacttcattttgttgactggggtattccgttcaccccaactgctattgtgattggagggcatcaaattgaggacaacctgcttcagtttgatttggcttcttcaaggcttggtttcagctcatctcttttgtttaggcaaacaacttgctcaaattttaacttcacatccattgcataaatgggaaataatcgagtgaactgatataagtgtctatttgtatttttttttattaagttgcagctggtttactgtattacatatcttgtgttgataatttttttggaaaattcttgtgttgataattaagtttgcatatatactgcttttacatgagcatcaataagtgtaataatgtacacgttaaacatggcttgtcaatggctacttgtaatataatataatattgtattggtaatgagtattgttataaactatttagttgactcttttaacaaaatcgaatatttcgttgagctgaaaattatagcaccttacacaataatacagcgatcaaagagtctatttactgttgctgtttcaactagagtagtcgtcctttgggtttatttaattgggtgaggtattgattggtcacttgagctactactagtgcggaaggtttggacaataaaagagatgtgattgagtagaaaagacagtaggagaaacatatcaaaagaagatgttatgccaaatttaaaataataaatttggaatgaattactcatagaaaattctcgctgaatcgtgaacaatgtcctttcttttttgagacattttgcgactctagcaaccaaggcgtctccatgataaaatagcatctgtatacaatatgttctgcactgaacaatatcgttcgattacaccctaaattattgctctgagaaaacttgtaagtaagaagaaaattctttattgtgttgaaaggatgtatccttccgtcgttctgatacgacctatatagagaaatcgacgatctaagatattaaacggtaatataatcgtgaaggagttagatcatggcagtgaaaagtggataattgactgatcgtttttactacttcattaacattaaaaataaatataaaaatttatttaattaaataatttttcttttaaaattaaatgacagctcacccgcccgctagcccagctcgcctcgcttggacgggaagggttgttacggttagaattagaattcgagttgcggttctgattcttaaaatgtttgccattaggcttcaaaactgttggtgtggacttctcagtgttgttgtttgaaacaacaagcacttcatctttctggtcttgttttctcgcttcctcctctatacgaaggtgtgtgatcaaactttctatatatgcctgagagtacttttaaaatccttccaggaaggggctaacttatcaattagtacaacgacttgaaactgttcatcttaagtcataccttctgagataatctcatgtgcaatattttgaagctcgtgagattaggcttccacagatttgccgtccaccatttgatacttgaggtagcgactgacatcatacttttaattccagcttcttcagtatcatatttcatttgcagagcatcccaaattttgtttgccgattaatctaagttaaaatagtcagataaaccgttaagaataaagttcttacagagaaagtcatttttgacccaggagttcaaatctttttgttgcttctcgcgttcagcctcttt

SEQ ID NO: 272556 - DNA, 1242 bp, Cannabis indica
tgtgggtcattgtggacaggtttacaaactcagctcactttttacatgtttggatgaatttctccattgaccagtatgctgagttatatgtcagagagattgttcgtcttcatagtgtcccaaagtccattgtttcagatagagatccgaagtttacatcaaggttctgggagagtctgcatcgagctatgggtactcaattaaagttcagcacgacatttcatcctcagacggatgggcaatctgagaggacgatacagattttagaagacatgttgcgggcatgtgtgcttgactttgagggatcatgggtaaaatagcttcccttgattgagttctcttataacaacagctaccaggcaacaatcgggatgactccttatgaacttttatatggaagaaagtgtagatcgcccattcactaggatgaagtgggtgaaagaaagttcttgcgtcccgaagctgttcagagaacaagtgacgcagttgagaagattagagcgcgactgctcactgtttagagtagacagaaaagttatgctgatcaaaagcgtcgggatattgatttccaggtcggggacaggtatttctccgattatctccgataaaaggcattaaacgccttgggaagaaagggaagcttagcctgaggttctttggaccttttgaaatccctaagaggataggacaagtgccgtacaggttggctatgcccccagcgctggcaactgtacatgatgtgttccacgtttctatgcttcgaaagtatgttttagactcgtcccatatcctgagctttgaagcattgcaactccagccaaacttgtcatatgaggaacaatcggtgcagatactcgatagaagagagaaagtcttgagaagcaagacagacagtggcactggtgaaagtattgtggaggaacagtaaagtggaagaggcaacctgggaacttgagatgtatatggaacagaaatatccggagttatttaggtaaatttcgggacgaaatttctataaggtaggggtaattctaattcgctagaattaagaaatggattaggaaaaccctaattagataattatgaatacttgaggaattatattattatatagttcaatatatgagattttatttgattaattatatgttaagaccccgttggtgagctatgggcattttagtaattgtgactcgggaagagtaaaataatgaaattaatttaattacgtgcttaatagaa

SEQ ID NO: 272557 - DNA, 750 bp, Cannabis indica
tgtgtaattgttctaaatgtcataaaattatactacacttaaattttaatttttctaaaaattcaaagtctaaacaaggtctaagaaatcctagtgctctactttcacttggttggttaagagagttcaatttgatgtaattttatagtgaaaacttttacaaacatatattagaaaagagaagctccaaaagaaatactataaaattctattgctctttctttctcctaatcatttcttacacaaaaatccaaattccaaacaaagtaaaagaaagaacaaagatgttaatagtgtcaaaataatagtttggcgctcatcagcttttgtttaaaatcttaaaaaagaagaaagaatgcccacatgatcaaggtctaatcaaaaaattttgaaacacctataaatacaggcactaaaaatagttcctcccaagaatctagacagaaaaattgtcctaaatttttccaaattgagcatgtatacattttaaaattaaaacacatacaagtaaattgtaagctaagccatagtcataccttgcgtgcgagcttctcaagcttctccttctcgattttctgaattataaaagattatacagaaacaataagacaatatctactgtaaactttgaagcaacagataaatatcacaagctattcaaattcacacgagcacagggctttgaacccaaatttagtattcacaattgaattaaacatgttagttggtaacagaaccttcttcaaaaaa

SEQ ID NO: 272558 - DNA, 1326 bp, Cannabis indica
gtttacatggatgacttaaccgtctttggaaaatcttttgacacatgccttctcaatcttgaggctgttttaaaacgatgcatcgagaaaggtcttgtgctcaattgggaaaagtgccattttatggtatcttctggaattgtcttaggccacattgtttctgaaaaagggattgaggttgatcaatctaaaattgacctcatctctaaacttcctacccctaagactgtcaaagacattcggtcatttcttggccatgctggtttttataggaggttcataaagaatttttcaatgatttctcgtccattatgcaacctcctagccaaagatgctacttttgagtggaccccaaagtgtgaggagtccttccaaacacttgtgaattcactcacttctgctcccattattcaatcacccgattggagtcttccttttgaaatcatgtgtgatgccagtaattttgctgttggagctgttcttggacaacgaagggaggggaaaccttttgttgtctactatgcaagtagaactcttaatagtgctcaaatgaactattccacaactgaaaaagagttgcttgccgttgtctttgctcttgacaaattccgagcttacctgattggatcacctattacgatcttcaccgatcactctgcccttaagtacctcctttccaaaaaggatgctaaggcacgcttaataaggtggatccttctcttgcaagaatttgacataacaatcaaagacaagaaaggtgttgaaaatgtagtcgcggatcacttgtcccgacttgaatttagtgatcccgctgatggcccacctattcatgatgatttccccgatgaacaattattcgttgttactaagttaccgtggtatgcgcacattgttaactacttagtaactggtgagctcccttctgagtggagttcacaagacaaacgcaaattcttggtcgaggtgcgaaatttcttttgggatgatccatacttattcaagtattgtcccgaccagattatgcgaaaatgcattcccgatgatgaggtgtctagtgtgctaaatttttgccacaatgatgcttgtggtggtcacttttctgtgaagaaaactcccgcaaaaatcttacaatgcggtctgtactggcccaccttgttcaaagacaccaatgatttttgtcgttcttgtgtaaggtgccaaaggttaggctccttgtctcgtcggcacatgatgcccttgaacccaatccttgtcatagaaatatttgattgttaggggatagactttatgggaccatttctgttttcttttggttacctttacatc

SEQ ID NO: 272559 - DNA, 1054 bp, Cannabis indica
gaagtcggcttatgaaaaaactttacatttgcatctctttgcttgtagccataattgcttggagcgctgcctccaaaaaaatctctctctgggtaaacacctcaaacagattctttcttgcttctttaaatttttgaacgaacagagcatctcgatcgtcaatagttggtgccggttgaatagtctccgagaaagctaaaacatcttcttctgcatcctccaaaacaatattagctccttgttttgacagatcaagagttcccatactactagaatccataaaagaaaactaggcagaaacaaaacacaaaaacaaaacccttaaaacaatatgatcaaaaccaacgtgtcacaaagacaagacataactcataatctaaaaactgtataaaaaatatattttagcgtatacatataattgttattagtagttgattatagctaatttttaatttatattcatttttaaaatgaaagtcttctacgaatatttcatcttccctgacgtctttaactttttgttattaattttgtattatgactcatataaagctaataatattattaatactaattgaaaatatacaaataattaattttatttatattattttaataatttataaatataaaaatattttttattaatgaatagtattaataagtggcaaatagataattaaaaaaagtgatatatatcgtgggctaaaatttgatatatattatcttttgtactaaatttgatataatttttagcttgagtcaaatttggcacatattttacatcactattgaagttagcttttagcaaaatattctaaaaaatggcaatacaccacatttatagttctccattagagatactcttagtaacctcacttgcatttgaggtgttacatacttcaaataagacaataaataatttactattgcaacaagtaacttttgttacttttattttaggaaaaaacctattattataaattaaaccaaagagtcatttacaacaacagggtttataggtggaggagtacaatccgaccaaaaacaatct

SEQ ID NO: 272560 - DNA, 1283 bp, Cannabis indica
agttttccttgtatgacatgtgcataggctatgcaaccaaatgtctttagattcccatagtttgcaaggtgtccagaccataattctattggtgtgttggcttggattgcagctggaggacacctgttaatcaagtagcaggcagtcacaacagcttcagcccaaaaacttttaggcacacgagagtagattatcatgcatcttactctttctaagatggttctgtctagtctttcagctaggccattctgctgtgggtttcttggcacagttttgtgtcttgcaatcccattctgcttgcagaaagaactaaacaactcagaacagtattcaagcccattatcagttctgagcctcttgactttcttccctgtttgagtctctaccagtgccttccattccttaaatttactcaaggcttcatgtttatgcttcaaaattgatacccagacatatctagaataatcatcaattatagttaagaaataccttgctccacctcgagatacaatcctggaagctccccagaggtctgaatgaacatagtccaaagtgccttttattgtatgtctccctgtcccaaacttgacttttgtagacttacccaaaatgcattgttcacagaagtccagatcttgtaaagcatcttttcccaacggtcctttcttgttcaacacttacaatcccttcaagcttacatgtcccaacctcctatgccatagagaaatcgaattagttatttcttttgaaacaactgaagccaggtttcttgaggtgactccttgtagtatataaactccattgatcatagatcatttcatcatcaccattgatccttttagtactttgagaattccaccctcaacccttatagaacacccttctttgtctaacattgctacagaaattagatttcttttaatgtctgggacatgtctaacttgatgaattttcatagtagttccttctgctaactataattgtactgatccaatcccaattatcgagcaagatctactatccccaagtcttacagttcctccatcgatttccttgtagttaagaaagtgttctttatctggacatatatggaaagagcatccagatataatcacccaatttgacttcactaatccattggtcactaccattacatcagcactttcataaccttcatctgatgctatatatgcattcccataccttctgtgatctcctttcttgagttctggaaaatctttctttagttgagaagttttgtgacaaatgtaacaccttttctt

SEQ ID NO: 272561 - DNA, 1012 bp, Cannabis indica
tgtcaaaatgcatgatatgtgtgcatgtggtaaaaaatgtaaaaaacttaagtaaaagtgtataaaagttctttcaccgtattgtagtatatatgtaataaaattaaccttttgtatttttagtgtaaaaatttcttttttttatatagaaaattttacataaagttgcaacatatgcattttaagaagaaaatatttgtagtttttttttcatcattgtcaagatttgaaataaacatttattgttttttaattttttgttttatttttccaatcttttaatacattataagtacgtagtaatcaacagcattgacaaaaacctaaaagaacaagaaaaaattaatagaaagaaagaagaaatgaaaaggtatgaataagtgaagaaaaaaaaatgttacacttattacaattcagtatattaatttaaactcgtgaagaaagaaatgacaaaaagggttaaagaatttcgtgttacgtgtgccggggtttccaaagtggacaaaaatatgatatttttattctaattggggcagaaagggaaactcccaccaaagtcaaagtcaatgacgcaacaaggaaactactacgaactacgaactaaatcatcaaactacactgccttaacaattcatctcttcaaagcaaccgcgttctacttctatctatgtttccttttcctaatttatttcacccaaattaatactaaccatatcaaaacatataaacgcgtttattcttacgtacataataatacaaaagaaaatttgtcccaaaaaataaagtaaaaataacacgctctgagtcacacaaaaagtcattcattagttctcaccttaaaatctattaaacccctataaataccacactttgcatttccaaccttccattcacaaaccaactattcttctacctctctgatttttttttttttttgtttatttattattatctctgttcatcttggagtttcttgagttttttgaattttttcattccctccatggcagac

SEQ ID NO: 272562 - DNA, 648 bp, Cannabis indica
tggccggggctgctgttggagggaggcggatacggttgagttgaatagagaaggagacccttcttctattttagttttttttacagatatggtttttgaaattaaatatatcaaacatatggcacaatataaaccatataaaagttttaaaacaataaaatgccatataatgtggtcaaagttaaaattgccatatttaagtaaaatattttcaaaaacccatgtaattttcactagattaaatcaaataaaagataaatgggcttaataaaaaccctacagccgaaatccactggtttggtttttttttttttttttttttctattttgttcaatcgaacgttgattaaaatactcgtctttttcaaatttttcctttaattatatctaaactatttaaattccaattttaatttaataattatcaaataaaatataatttaaatatattcattaatttaaacaacaaagtgtcataattaataaatataaatttaaattacaatatttaagaaaataaatatttatataaccacatttaatataatatatatttatatatatatatttatatattctttctgtttaaataaataaaacagctaaattcataattaacattgcaatatcatatcacaattatttgat

SEQ ID NO: 272563 - DNA, 857 bp, Cannabis indica
atttattttataaacatttatatatatatacatatatttattatatattggtctaactcaatcttttcccttctgattttcttgggaaaatgttaagagctaacttttcttaacctttaatgctgtaatgggttgtctctagattggagttttgaactttacttttgtcggtttctataaaatcaatgagatttggcttatgccattatatataaacagttacttataagatactatgttgttgagctagtcttggatctattataagattctttgttatatatttatttttctcgattatagaatgcttaaaacattgttttgtgtaatttgaaaactaattgtttgtttaacttatttttttctattttatttgtaggagttgattttaagatcaagctgctcacagtagatgggaagaagttgaaactaacaatttgggacactggtaatctaattaattttctctatgtgtttacttacctttaatcatgatcaataatatcaattaaactgaaagaaaaaaaaagggaaattcgcctaaaataattagctgcccacttgcttttttaactgttatatactttcatcatagaccccagttctgaacttagaactaataagtggtcatcatgacataggtaaagctatgcaaacatgtaatcccttattgtgattttaatttgtatttttgttcttaaattatatattaaaatgtaacgtttattttagtaacaaaaaaaacgtagtttgtccataatgagtaaagaacaaatagtatttgtagctggacaggaaaggttcagaacattaacaaagttcatattacagaggagcgcaggggatcattctaggta

SEQ ID NO: 272564 - DNA, 1503 bp, Cannabis indica
ggataggagataatgtaaatgggtgtatcttagggatattataaaatgtgtcatatcccacaaatattacatgttatgtatttaggaaaaaactattaggtatttgtatgcataaaaagtcaaaattcccaaacatatttaattagtcaccataaactataccttttatcatgattattattacttagtcacaaattgtttaggtgtaaatatgataatctaatcaccatttttttttaaaaaaaaaaaaaatcacacaaattatgttgtgcctttagaaaatgtagtagttatgctatatagatttgtagtgttgatgcattaggttaattaatttgtgatgcattacttaatcaagtgaattaggttatctacaaaagagctactagatttattttcattcattattagaaaattaataaaataagttgactataatattattgttatgaggaagtccactctagtagtgcaactacctttcatttcattatcaactttaatgaaaattgcatgtgaagaaagattgagaatttgagagagataatagttcaaaaaaaaagtttgataggaatatagaattaataataatagttaaaaaaaaaagtttggtaggaatatagatttaatacttttaacaaaattaaagtattgtaatttgaggacgagttacaatttaaatcattaatggctgtaattctattaaaaaaattatatttaaaaattaaatatttttcttttaattaaataattatataacaaaattgtgacagttagtagttttgtgatctgtaaagaaaaatattggggtaagttgtgcaatctcacattacatgggaatgtcaagtgtgatgattcttaaactgtgtaggttatgagactatgtagttgaagataacttaagtggattgattggtattacatatatcaataaaatgcatcttgttttctgatagtccataatttaagaactctaaagttaaacgtgcttgacttagagtaatttcagaataacgtgcgagtgaggacaaaatacgctggaaatgctcttgttacaaaaataataaaaaaaagccccacaaaataattataatttttatttaaagtaaatataaatatttttataacaattaagctccattaaacaaatttcactagcgctaatcaactattatattgttaaatcttaatttaattatgtataaaatatttattgaagaaaaatatatataagtagttaaaattaaattattataaagaaaaaaaatattaataatttccatgaagtatgtatcttgagctacgtgttacgacgtgagtaattaaaacttgcaaaaaaagcttttaatcagtaatagatttttgcaggtctcaattactcacctagtgatacgtgactcgaaatacatatttctatatgaaaaatatttttgaaataataaaaagatatatggttaattatctatatattaatataaaggaatgcacaaagcattctaggtg

SEQ ID NO: 272565 - DNA, 798 bp, Cannabis indica
cattatacaagtcccgaccaattacaacacctctaaaacccaacaataacatcccgataaaatattctaaacatataaacgcgactctctaaaagcccaacgttgctttccacagcttctgaacacaatcacagaaattgagaaattttacataaaatagcataataacatatatgatattaaatatatctccaaaatatgcatttcataaatattaattaatctcatacataaactctaattatttaataattgaaagtattaatcatatgtggtctttacaattatccccccgctaaaaggatttcgcccccgaaatctacctgaacaactcaggatactgagccctcatatcagcctccaactcccaagtggcttcttccactttactattcctctagagtattttaaccaactatatggttttagttcaaaggaacttgtccttcctatccagaatttgcacaggttgttcatcataagataggttaggttgcaactccaacatctcataactcagaacgtgcattgggtcagatacatactttctcagcatggaaacatgaaatacattatgcacagctgacaatgatggaggtaaagccaatcgataagcaacttgtccaaccttttccagaatttcaaaaggtccaataaacctagggctcaacttgcctttctttccaaagcgtctgatccctttcattggagatactcgtagaaagacatgatcaccaggttggaatgtaacatcccgtcgcttgggatctgcataacttttctgcctgctttgagaag

SEQ ID NO: 272566 - DNA, 981 bp, Cannabis indica
cttttttcttttcctgttcatttttttaactttattttctccaaaacctctttttctttttgttcaccttttttttcatcaacttgttcatagcactgattcactgggtcatgagtcatgactcattgtaaaggaattttaatggacactgtacactatatacatttccattttggcaaaaagccttttttttcttcattttttttggctgatttttatttttcaaattgatagctttctttcttcttttttctccccttttttgtataaatataaaaaaaaacaatgagaatcagaatcagaatctttcctttgcctttaaaaagtaaaattaatgctactatggtcaagtcattcttgattcacctctgcgagaggacaaaggtttttcatttcatataagcaatttctaataattatacataagtgattttgaagtttgattaaaaggatagaaaaataaaataagctaatagaatagaatctaaaattaattaaagaataatagaacatgtgaaaatattgtattgttcctcctggtaacagttagaaacttgtgtaggtttatttaatttatttttggaattaccaaaacaggaaaaaggaagagagttgctgactttgcttaaattgagtatatgacttttctagaatggatcatcacaattcacaaccatgccaaatgccagtttctatatataccaacaaaattataccaaaattagattgccacaaccttacgatgtgacacctcctcctttaaaatattcatctacaactttaccatatggggccatagcctcagcatcactttaatccttttttaatttgttttttcaattatatttatatccccactatacttttttattttatttgcctttctaaatttatatttttttctctacaaatattaccctattcagaaaaatctggttgagcatgtggaatatatagggttattattattattaatttttt

SEQ ID NO: 272567 - DNA, 1965 bp, Cannabis indica
atgtaaagtttaatagttattttacgtactttttcctgaaatagtgtggtaagtaacgcatggcaattaagaattaatatacaaatcaccatgtatatctgcagcgctgaccttcattaattttcatattatattaggcgagaatatatgctaacatgaagctggtatcaaatatacatcaatggtcaatttattactccatacattatattgattgttcctgcatataagattatttccttaataagaaaatgactaataaagaatcaattaccaaaaacgaatattggtagctcagaattgatgtgccaactcgatcatcactaaaaagtggaagaaaaaaaaaaggttgaattcagctgtgttatttagttctttatattacaaaatatacaaaaaaaataggaagaaaaaattaaaacaattgacaaaaataaaccaaatgattcattacaaacgtttgatgagcctatacctcttatagtatgatcaacaaccaatcaatcaacccatgttatattcttccataaaatcacaaaacaagataagtttcatgaagttggcatgttggaaaatccctgtttaaattattatctttaaaaaattaattagtgaatcagatgaagatacggtgactatacatatacatgtttatatatttagatcaagccatgtgcaggaatcacgtgattctactatataaacatctgtccaagtggtaagaacattgcttgtgagttgtgagccctacaatttatttggttttgtagggatgcagagttgtgttagttaagaggggtacataaatccaaaatattgatagctttttgggtttgttaagaggtaatcaatcgtaagttgtctactctttctttccctttcacatgttctccccagtttctaagcaattcaattataatcattaggcaatagaataatgctatgtcagtaatataagtaattcttgttagttaaaaataaacaagtgaggaagaaggttacaggaattaaagactaagtagttaaaaagaatagaataaagaagcaaaacccaaactatttcaataggagaatccaataatcaaagaccaagaccaacacgctacactaaagcaacatctcccttttatttattatttttctgcattgaaattaaatcaacagggcaaattcaaaagagtaaataaactttggatcaaccccaaagtagcgtttacataaagatcagcttatgcacaaatcagaagtacttgtctatattgaaaagtaaaaaaaaagacctttacgagcgaaggttgaatgtgcttctttcttttctaaaataagaaactgaagttaaacaatgccttaccaaagagatccaaactctgttcttgtaaatcacttatgcataccacttctataccaatccaacaagtagagaatcattatatgataatcctccggagtcacacctgagtcttcaaatttgtacaagaagaaattaaattaaattaactttggcattaaagcaaatgctggatgcataactcccaatacagctggatctctttccaaactcttttaactcattcagaagctatgagcccccccattgttgctccacttaaaagcaactgggcttcgaactttatgagtcccgtcagtccactcaatcgagccaaacttggccgatttactgtaaccaacactagtagagaatgtaacctcgtatgcttgtgtttgattcacaccactaaacacaagcttgcttggagaaacattgatttcaatccccgggggtgaactcactgtcacttggtaaacagcatcaacttcacttccaacattcttgacaaccctcttatacttgaccaaaccttgatgtgaatcgaaaacaaccgaaaacgatggataattcaaaccaccagggctactcaaagccccaactttgttaaatgtcgtttcacaaatatcagctctagt

SEQ ID NO: 272568 - DNA, 1183 bp, Cannabis indica
taccttaaaatggtgttgtgtatataataacaattgtgatttatttaggtgccgtttggtaatacttttttagttagttttctgtttttaaaattgaaaatcaaaattttgaaaacaaaaaaaatcactttcaatatttttttaaacagtttttctttttttcttaatcaatatcttggacttcgatcatgacccacccggacccaaatcccccccacagtcctggcgctgaacccggcctctgacttgaactcaaatctgacctcggacctagacccgacataaataaaatcaaaaaatgaaaatgaaaatgaactttagagaacacacttttatttgctgtttttaaaattgaaaaataaaagtggttacagaatgcatttttatttttcaaaagcaaaattttgaaaaacaaaaattttactttcattttgtgattaaaaaattagaaaacaaaagtattaccaaacggcatacttatctatttttataatatctcatcacttaaaaataataatgagaaatgttaagggccaagcaccttataaagctaacatgcaccataattagtgacaattttaatttaatagtatcatatattttaatttaataattaatattaaaaatatgatagcaatactctaaaataatatatctctaatttatatatatatatatatctaaaattaattatacatgtgtgtatgtctaccataattcaaactcagtatttttatatacatggaataatgtgaggaagcaatcatgcaagccttaccaatatatacatagaataatgtgaggatgcaatcatgcaagccttaccaatatggcaatatcttatacggcatttaaaaacttcttttaatttaatttttttaataaacacataagttataattatttaaaagaaatttttactatgaaaaaatctattttgcacaatttattacctaaatacctctacacgcctatgtctacatttttacttactaaagttggttttattacacaaataccacttagtcatcattccatccatcatcaatcaaatcctactctcttccctctcttttttcattttctatcaatcaatccatcatttcactctctttttttcttttttttctttttatttttaattttatttcagtttttaattttttattttttaattttattt

SEQ ID NO: 272569 - DNA, 1389 bp, Cannabis indica
ctgtcatgttttagaaggaaagatttgctgtggaggattgagttgtgaaggtccattaataggttcgagtcgaagatgtgtgcctattcccgggtgtaggcccggtggagctacatgcaatttgatgaacgagtgttgctacccctatcaatgcaatggcatgggcggaggatattgcctcccgaagaatgaagtattaaatgagctctttcctaatagaaacaaaaataatgagaatgaagctgcacaaactgatgaccatcttcctctgtcgtcaattgttgaatagtacgtacttgtacgtactattgcatgcatgcatgattacgtactgcatgcatgctcgatcaatcaatcttaattattatgtattatatgtcatgttgtgtatgtgaaaaaataaaaaataaaaacgatgtatgatttaccaagctgggctgcatgcatgcatgcatcaagtacgtacactactaatacgtacatatatatatatatagtcctgtctttgtaatttatactattctgaccttgtttgatctgtatttgtatttccatgccttctgctggaaagggtacgtgtgtattatctattattttcattttcatgatacttcctataatactattatctatatatatatatgcattgtttttttttttttgaatatttcgagtttttaaaaaactagttataaagaaatgaataataagaactaagagatgtttttaacatggttttggtattaatatatatattaattcacgagtcaatatagtattagctagtttttgcaataatagtcaattggacaacggttttgctctgaaatacaatcactacaaaaaaagttgctatttttagtgataatcttttaatcacagcataatttttttgattaaatgagacttttagtcataacaaaaaattacttgtgactaaaatataatatttagttacaagttgtcactaatttagttttagtcacaacaaatattgtgacaaaaacccatttagtcacaataaattataattttggtgactaatacttctagttacggaccttttagtcacaatacaataataatgataatttataaatagctacaacgtacttttttatctttagtcacaaatttcgttgtgactataaataagattttttgtagtgaatgtgtcgaaccattttcatcatggcgaggctacactataagaaatgtcacttttactagcacagtttgctactacgctggtaaaagttactttttaccagcgtatttcgcaaacttcgttggcaaaaagatcaaagttttaccagcgtacatttgcaatggctaaaatttaacttttaccagtgcatttacgcgttgagaaaagttatttttgccaac

SEQ ID NO: 272570 - DNA, 1053 bp, Cannabis indica
atacttatatatacacaagcatacaactatttactttttataaatatctcatgacttttttggctgcaacccagtaatcatgtccagacaagcggtgtaaggcgcgattttattttgacataaaaaatgtgttataaagtttgtaaattaaagacatgtctattctatataaaatgtggctatgtaaccgaatttttggtttaacgatattttttaaattaccacgtcaacttaaatagaatatctaattgcttaacaaaatatttctttattaattttataatattattcaatatatttaaaaataaaatttgtatagatattttatataaagaaatttaaatttaaatttaaaatttttaaaatattatagatatttttaactttattattatttattttatattttaaattgaaatggttataataaggaattgattgctttctgtttttagttatggtaaatcgattcacataccatatttttcgtaagtttgggaacaaatttcctttatatcaaattaattacgaatccaacctatatgtactatgtagacacacttaaatttggtcatgtgagtttcggttaagaatatagcaaattataatgtatgcattatcagatacgttattttattaaaaaacattaaaaataaaaaaaataacgtgtatataatcacattcaaatgacacactaacgtaacaatagctaaaaaaaaaattaaagatcaaaatctcaaacttcattttaaaaattaaaaaaaattcattatctaatttaaaaaaattaaacatacatgtattgtacttaatattacgtgaacttaattaaaaagaaaattaattacatgtaacatcaacctagtatatatatattagtttgaaaaaacaacgtatatttccatatcaatcgtctctccagacccggttctgtctagaataggttagaggaaattagactttataccctttttatattgtcctcttttatttttaccttctttttaaaatttatcattttacatcttttctaaacactttactgattttacc

SEQ ID NO: 272571 - DNA, 774 bp, Cannabis indica
aaactaattaaatatttgtttccctggcataaaaatgattgaccataaggttatagaggatgctttcttgggcagtaggtggggacaggatgaatccctaggtttgaaactctctatgttgtatttcatccaatgtttccttcttagcaatactccggataaggaagtttccaggttttgatttagatagtctttttccaaaggtttataaatgtcttttatactatttccctacggttcttaaaatcgttggctatgtgggtgtcataaaaataagaaactttaaatgacagtttataattgttggaaaaaaatcactttaaatgacggtttataattgttagaaaaaatcactttaaatgacggtttaaactttgccaattaatagcaatctatcaaatctaacatttcatgttgtcaaaattctcatatagatttaaacaattcaaataattttgttgtatctctttaattgcttgattgttgcatgtctttcggctgtgaccatgttgaccatatttgttgcacctatgctgtttttttttatccaatcagttataaatcttcttttccttggtcttctagatcttattttttggtttggtggcagaataaggatatcttttatgttctgcggtacatcccatgttgtgtgattgtgtaccagatatgttgactcgttgtatgtttcaagctatgttcttgtcgtgtaataatgtgaacagtaattataaacatttaagttcatctcttatatcacagcaagcgcatgag

SEQ ID NO: 272572 - DNA, 654 bp, Cannabis indica
atatatctggattgtctattttttcgttgataaattgaatatggtagtgtcgacaaaaagtgaaaaccatgtttaacaaaaagtgatagtattctataacaaaatactattaaattatttgaatttaaattattttaaaatactatattttattaaaataaaactctatacgattaaaatttcatatttatctttattcaaaaagaaaaaaaaatgataaagtttctactattatctctactccctttctagatgtgaataatagtctttttttttcttccatattcttctttattttttgtatattgtatttgtagcatatatgtaaattattacgtaactttaaaaaattttactcctcgaaactaatgcatatgccgagcatttaaaatcatttgttagctgtaaactttgttgggtttttttcgccattgatgcttggttttgtgatctttgataaaagtcacgtcttctttttttattatttattattacttatatattttgttaattaagttgtgaaaaaagaaaaaaagagaagtgcggattgaaatattatgtgtgatcctagtgggaatgtccaaattgtaataggaaaaggaatacaataaaaaattaaaagaaaaatcgtaagatgtacaacagcaaaaaact

SEQ ID NO: 272573 - DNA, 1879 bp, Cannabis indica
tgacatctcaggcctctcatgcttcttaggaacgtgtgaaattcacgaattagtaaaacgatgacacgtatgcagtgcaagaaataacccttaaaaatccccaacctttcacattttgttatctagaagatgaacaaattgcttcttcaaaacaatccacgtgtccgaagtgctcaaagttattcggaggtgagacttcaagcttccaccactcccaagttttgaaagcttggtggtaaatgttaactatgtttctgcacgagtgacatgtggcattttagaggagtgtttggtccgcataatatctagcataggccttccagcatacaaaggcccattccaatccgaagatgggccctagcccatcacatctctaagagcctcgcctccagaaataggatcctcctattctcgagagcccatctagccttccaagaaatggagtgaatggtgtcctctagacgattaatgaagcatatctggacgggaagccccaaaggtgcatctggaagcccttatatgatgacgtggctgctctctaacgcctgggcctaccaaatcaaatcttgtcccctatgttaggacatgatagtgcgcgtactggaagtggaaatatattccttttgtccaatgacgcctctgacattcttgtctacagtagttttacccacgtgtgacacttgtctagattgcacgactactctttcgtacgggcaggtctgtcccacaagccagaatactaccgttggcctcacagtcgtgtatttaatgcatttaccccaatagtgggcttattttgcataagagaccctagtgggttgtgggtatgcccagaccctggtctaggcctatataaatcccattatccctttatgaaaggagtaaaagggatcttctctaagctttcctcttcactaagaaaaacctaaggggaaatactataacaagaaccagggttcttcaagctgtaatgattcatctgtaatacattcaaagcctcttaaggccaatacatatactcatggactagggatcattaacgcctaaccaacgtaaaaatatctgtctcattttacttatacattcatttaattttttagctcttacttaatttagtttttgaaaatctcagtaaataacaaccaagaaataaacttaggtatttacatcacaaataactctttcttatgtatattcgttattcacgtcctacttaaatgacctttatacacttaatttacaattgcttcaaggtacttattgtctttattttatcaagagaaatttgcgacaaaaatccatatgtggtcactttgttgcacttaaatttttagcggtaaaactccctatgtactcattttggtataatattagtccctttattgctaccaactcaaggattaatgttgcatcaaaagtataatgattgagatttttgctgtcaaatatgaactatataagaatttttactgctaaaaaatttacaaaggaatttaagtacaacaagataaactatacaaaaatttttgccgccaaaaaaatgtacataagtatttaagtgcagcaaagtaaacttcatagaatttttttgttgcaaatatctctattaaaaaataaaagttagtttgcggctaaactgtctgaattttaaggtttggaaattggcacgatcaactccatgtactaaaatttttgggtaaacccgtccaaactatgtttctgatgtgctgtctactattacgttgctttaatctattaaatgcctaggtagattgccactgtgtacacattatacacgccataattttttattagtccacctcattataattatttaaataattaaaaaaattattataaaataaatgataaatgatag

SEQ ID NO: 272574 - DNA, 4193 bp, Cannabis indica
acaaggtctgatctccacaggatatgtgatgaccgtagaacaactaggagatatttttacaaaggttttgaatggggtgcgggttgattatctttgtaacaagctgggcatgattaacatctatgctccagcttgagggggagtgttagatattagttatatattagctgtaaaagaattagatatttagtagatatttagtctcctaactttgtatataaatatgtaccattctatgaaatagacacataattcgaatcactattttctacagtcacattactttccatgcttgttttacgtgtagtttgtcacttctctttcatgtcttgctgactattttccagaatctgttgaccaactttcacattttaactggcaattgtatgatctgcctagggtattctgcttattccagtttctcacaatttctgtgtcttcttttcgccccttggattgtaatacaaaaacacaagcttgctgatttgttcttggttgatgctatttggattcccttacattgcattaagataccacaaccattattctgttaatgatttcagctgttgctttattgtgttggggctaatttgtccagattttttgaaaaatcaaatcttcttggctgttaatttgtcagatggttttactgtctgtagaagttccggttgattgatactgctggaattagaagaagagcagctgtagcttcactaggtagtacaacagaggccttatcagtgaatcgagcatttcgagccgttcgtcgttctgatgttgtagctcttgttattgaggcattggcttgcattacagaacaggtagtcaatcctttagctttctgcagggccatattccaatgatatcagtgcatgtgcctttcattgatagtaaacttttgctattcctttttaaacttctgaatttgagttttctgtcttaatgtcctaggatttcaagattgctgagaggatagaaaaagaagggaagggttgccttatagttgtaaataagtgggatactataccaaataaaaaccagcagactgcatcttattacgaacaagatgttagagagaagcttcgcatactggattgggctccaatcgtgtattcaactgcaatagctggtcagcagagtgttgaaaagtatgttctgacaaaactcgagaactatagtgttagatgctcaataattgtgaattatcataaaatcctgtattttagctaaggtatgctgtgtgccatgcttcgacttttgcaagatcttcatctcctcgtgaacattaatttcctaacctggaatagcagatggaaacatgtctttcttcgcggtttaatattggatagctgttgttctttgctaaaattaaatattatttgttacttttttgtttgattcagggtaattgttgctgctagcgcagttgaaaaggaaagatcaagaaggctgagtactgccattttgaatcaagttgtacaagaagcacttgcttttaaatcacctccaagaaccaggggtggcagacgtggacgtgtttattactgtactcaggtagattttcctttggttgtactcgtaagttgtattccttttacaattctgtcaggcaagatctgaggtttgactccctcctaagtactcacatagtaattgttataattatagttttctaatctaaaaaaaaaaatcattttagtggtaaaattcatatatttagagcatgtttggtattgttttttgttttttgttttcaaaaaattatttttagaaatgagaacaaaaaatagtttttgaagttcttaaaacacaagtcacgtttggttagtgttctttaaaacaatattgaccaaaagtgaattggtttttaaaacagaaaacaacattttgttgttttcaaaattcttgatttttgtagctttgttttctgaaaattgttttaaaaaaataaggccaaactagtcaaattgttttcaaaaaataatattttgtttttaaacacaaaaaacagttttttaattatgatatcaaatatgcactaaatatatatatattttttttaaacacaaacatgacatgtaagtttgttatccagtggagttaacttagtttacttgatattcatatgcaggctgcaataaggccacctacatttgttttctttgttaatgatgcaaagctttttcccgagacataccgacgttacatggaaaaacaactacgtacggatgcaggatttcctggcacaccaatccggattctatggcgcagccgaaagaaaatggaaagaaatgatggtgagttctagtctagcctcacctcatatgtgtttgtgtctaaaatatgaatgttggtgtttctgactgattaagatgattgtaatactttccgttttgacaggaaaatcttcaaaatcacaagggaatcttgtgcctcgtaatagaaaaatggcatctgctattactacttgaaggaaatgacaggtttcaaccattatcctaaaagactaagcagtaagattcttcatgtgtctaagaatagaatagactacataactcagcatatgcatggaatgtactgtagataagtacattccaaacataaaccagttagtagtttcttgttttttttttttgtaaggaaaaccagttagtagttattagtaacttgattcattttatcttttctctagttgagagagacactttataaatgtttcacaccaatacaagcaccaatcaaggagtggaaagagactggcaaaccaacagacatgacagtctttattgtgatagcattgaagttgcttttcctcttgggaaatatacaggtcaagtcacataatgaggaaaacaaatgtattttgaggtaacagcttaaggtgtttaactaccattatgtgctatttttttaataaacatttatatattacaatatatagtttggagactcaaactacaacttttaatacatacgtactcttttatgatcatttgagctaactttaactgattttagtattgtatgctattagtattacattagaagcactacaaagtggcaccatacaaatattaataggttgttcttaattacatgatatgttggtaagtgatgctaattatatgatacgaaaaaagatgttaaggacggtcttctagaatttttgttgatcattgtatcatattgtcttatgtttgaaattttctgtttacacgtgatctctgacaataaatcacagttttttaattttgattgagattatctagtaaacaaaatatccagcgttagtaaatatagcttctgacaacattcatggttttgtatccaaatcattacacattggagtaagcctttattatgacacaaccataagaaatatttcttttttctttttcttctttgatagaccatttttttaaattttttattagtggtcattgaagataggtgtgtttctttattgttcttaattataagggcatgtgttaccccagcaactgatctatctatcagtatgtgattattgttgtcccatttgagtatttggcaaatcatcaaaatactttgatctgctatgaaataaagaattgaatgtggggagtgagttggtcctcatgctagttgctgttattctttatattttattcgtatgagtagtgggtccttgtcatagttaaaatctcacttattcacattgaatgcttcgtaccaatcatgattattttaagatgtgtttggatcatgttttcagttgggtttcttatccttatttatttattattattttttttgaacaaaatcaataatggttcattggtctttttgacaacttaaaaaagttataatcttaatttattgcactcttttattttacatggatatgaaataaattatttgatctctaccttttatattgtaaattattcgaatatctcaaaattttataaaatattttaaataactatattgcacacttataaatattaaaattaaaataatctgaatgttaaaaatatgaagggatacattgtactttttattttaccgtgcaccctagaaatactctttaataatttatgttgttcatccctcttctattttagagtgacctattttggaatcaataaatataacttgtttgaataagttattttttttttttttaaataatactcttagcacaacttatt

SEQ ID NO: 272575 - DNA, 484 bp, Cannabis indica
agacccagaactggacctaaatatgggatatgatcccaaacacagacttggatctagatattgatccggatacgaacctggactcgaaccaagacccagactgggatcgaaatgctggacctaaatctggaccgacatcctgacccagacccaaattttgacccgcactcgggaccccaactttgacctggacccgaacctagacacagatcggggtccagacttggacacaaacccagacacaagactcggacccgaactcaaacccacacctagagtcagacccaaaggacttagacccagaacttaatctagaatcagatcgggaatggaacttgggacgcgaacccacacttggagcttgatcaggacctacattgaaattcagacccgaacccaaacctagacaagaactcaaacccaaactcgaactcagaatcgcaaatggaactgaaccgactaggactaggaccagacaggacat

SEQ ID NO: 272576 - DNA, 903 bp, Cannabis indica
aatcaaattataaattaacacacaaaaactaattatatgaaatagctaaataaaaaattaattacctaaaataactaaattaaaaataaaaattacttaaaataactaaatataaaaactaacttagaaacaacacaaataaaatagacatatattattaaattaaacagttactaccttgcactcacaaatattaagaaactagtttttttgaaaaaaaaaaaaattaacatatattataaactaagaaacaatccacacttcgcgtgcagttgtattttgtttaataataattaaataaaaaattatataagactctaaattttatatttttatataacttttctactaatataattaacaattttattaaatttttattttttatcataataataaaaaaaaaaaaaatattgtacaaattattttacacttaataaataatactttttaattatttatttattatagatatattacttaaaattagttttcaaaatatatataatttaaataaattaaaaaaaatatcataaatttatagaaaactcatcacataatatcaaaattgttgtcattactgaatcttacttgtagtcacaactataaattcaaagtcattgtcgtcactgtatttcacttgttattgtcactatcattttcaataatttttttctgcacataaaacaaatcaaataccgagataactactcaattttatacataatactacaacaatgaaaatagatattattaccaaataaaagaaatatacccaataatattgtcatcaaatttttaactaacataatagattttaaaatatggatagacttctttcaattgtagtagtatatataactcttcaatggctcgtttggaacgccgtattaggtcgtattg

SEQ ID NO: 272577 - DNA, 1084 bp, Cannabis indica
gtaagactagctaatctcataattaagttgacttgattgaaagagtattggaggatcaggaaccataggagagattagcaaataagatacaatgaagtggtaacagaatcaagagactacaataggaatcaaagtctatgctacccgggaaataaagacaaatgcaacgagcatactactaaatgagttatattcaataccaattggttgcttaatggatcattaaattatataaaaggaattttaaagggctcaagtgattattttcctgcgtcatggaactagtatttatcattgctagagtaataaccacgaaacttgtttttcggtagcccatcatgaaataactccacagttaagcattcttgacttggggcaatttcaggatgggtgacctcctgggaagttttcccaggacgcatgcgagtgaggacaaagcatgctgaaaacactagtgttggtctgtagggtcagtcattaatccaagaagtagccagagtggcgtactcgtgtataagagccatttattccgtgggtgtaagggcccaatggaggcttgaagcggggacgttaacaaaaaaaaaatttaacactcaacgaaagaatggaaaaaaaaaattaaagagaagtttgcataagttctgctaccctactctttgttgtttgctatttttgtattgtataatgtgttctcaagtgacatgtaaggatgttcataagagaataaatggttttactcttaatggcatgtaaggatgtttataagagaaataaaacttttataatattatgagcatgcaattacagaacttgtgtaattaaggaatgtatgtgtaagttattatgatggagtatgttttgttattaagtaatgtatagaggaataacaatacttaattaagttgtatagattatatgtgttgtggattgaatgataacacaaatgttaaatatttgtctttgggtccacatggtagatacgaaggcaacatgttggtaaatgaggtaaaagcctaatactctgagttcttaataagtaaaatttcgaggacgaaattttttttaaggagggtagaatgtaata

SEQ ID NO: 272578 - DNA, 2488 bp, Cannabis indica
tggcaatcacagaaaggtgccacctcagactatgcgaaattagcatgtaccttttgccctttttgcatcacaaaagaagttatgattttaggagtgggttaaaggatttccctgtcagcaaatatcgaaaggaccatggggctcccactattaattcgctattaagaaggataaaagacccccagaagctacaaatattgtaggaggatagcaggttagtctaatttgggaaagttttgaccagatggtcttggaacctatttggttgtatcttattcggagctcgtggcaacagtgtcatatctcctgacaccaaatcagatcttgtctcttgtgccagaccttggtagtgtgtgtacatgccactaaagccccttattgtccagcagcttgtctagacaacaattttgcaaggtaaaacctttgaggaacacgtgtccttattcccgcaaaatgccttggaacaattgtacacctcatgatggcaaagcctcctcaacggacagtcaaatcatcatgttgtagtttcggcccctatggcatgttgagtaagaaaccctaggtgggtaaaagggtatgcccttatccacacgtgtgactataaatgcctttatttttcatgtgcaaaggatgaaaaattttatacatacaaaacctctgaaaaaattcctactagctttcttcttcatcaattgaaacaataggaatacagagctagggttgatttaatgaacacttgtaatattcaaacaaacgcctacaaggctaattctacggactcgtggactagggattattaattcatgaacaacataaaaattacttgtctattatttattattatatatttttcttaagctctaattaattagtttccaaaaatcttgataaacacttacaaattcagcatcttctcatagttcaccttttgaagggagtgcataaatcttgcaaatgagtgcttcctccaaggaatttagaagaaaaactagagatctttgacatatctaagtatgtaagagataatctatctcaacaaacatgcacaagctaaacttgtacacgtcttctagatactgacactttgagaaccgcttcgagagtgcttctatcttcacactatcagacaagttgaaatatttgttgatcaaccggtttgaccccaagtaggcagccttcacagccttctcctcttctaatacccctgaggtgaagttcaggcctgtaatgagtgcaaactcaaccactccaaatctgatctccttccaggcaaagaaagaaggaatctcttccgtcttttcaacatcaaccttcatcttctgcaacaatacttggtgaaataacaccgaagaaaaggtgaaaggtacgacattctaaaattattgctttcgtcgtctcattcaaattgtattcctcaaaccgcatcttcattttcacaaaagtactaatacctctgtatgtcacacaaccagtataaaatggtcagatgcttgaactatgagtcgtgaagtcatttgaaaaaagatataacaaaagcatgcagtaagcacaccatcaaaaaatcatcgataaaacatacataaaccattaacaatttaaaattcttgaaaaaatcaaagattcacaattcaaaatattcttaaactatctccaaattatcgacatcctttaagaattatctaaattaacaaaataacataacacatgaaaattgtcgaaatcctattgacattatctcaattaaataatcagagaaggaggaaaaattatcgacaaaataacgtcgacattatttcaattaaaaaaataactttttacgagaaaattgttgatatcctgttgacaaaatactgacagtatcacaattataataaatcaagaatgcaataaaattatcaacaaaatattgatattttaccgacatactcaagatattctaaaagtatatagcctaactaaaatttttcagaaaccattgataaaatattgatagcctatcgatacacattaaaaaaatggagaaaaaaatagttatgctcaaataattcactacccatttgatttttcgtctataacctatcgatatgctatcgatattttattataacactgtaaattaaaatacacacacaactgaaatatatccaaaacttcaacctatcatttgaaagatcacaaaatctataaaaattgaactaatctcaagaaaatatacaaattcacatctaaatctattgaaaatctaatttttttatttaaaaaacatatcttttgattcagcttggcggtggtggcggcgaaggtttgaatcttaagttgtgggtactactctcgttggtggcctgcggtggtttcgagctagctcgtggtcattgtcgtgatggtggtaacccggttcatggtcgtggtcgtggtcgatatttgggtcgcatgaggaaaatggagagagagagagagagagagagagagagagagagagagagagaga

SEQ ID NO: 272579 - DNA, 2034 bp, Cannabis indica
tgtttatgtcttttgtattgtctagatcgagtctgtaactaagtgtcaactaccgtgttgaaagattattagttcaaatcataattttaattagttaaataaattattgaattgtaactataaataccacatatgactacacaagcaaattattcaaaaaaaaattctaaaaatatcacaaaaaagagtcaagttttcattaattattataattcgaaaagaatttttgtcacttaaaaaatttcaaaagacaataattgaaaggaaaaaaaaaaagctaattgtattgatttttgtaaatgacaaatgaacggtccatttaattgtgttttttctgttggtggtttgttttgatatttcatccaccacaaatatgagttatgggtatgtgtgtggtccttcaaatagaatggtccattttaactttttattatttcttttatataattttggttccatgccagtctgcaactagcttaatatcagtttctcataaagaattaaatatgtatatacatattacattgtgtaaaaaaaacacaaatatttataatgttagttcatttccaactactaaatttaaataaaattataaatgtgatcatcacacaaattagtttaaagaagaaaatgttgtcatgttttcttaatcagtaagtctatagtacaatttatgtttcagttcatattgccctaggtgtctactgtctagcactcttttagttgttatatcattttttatataattaaatatcgagttttatataatttaagaatattattattggacacaagtggtgtccaatattttttataagtagtatctcacaattgattagtgatattctttaaaaattattttcttaaattatacgggacccgatacttaattacactaatagtaataagacaccgaggaggtgctagctagcaattctcataatttaatgcaataacttttagaaaatatcactaaccaatcataaaatattacctctaaaaagtgttggggtctccattagcaatgcacaattcaatccatataaaaaaaaaaaacaaaaaaggaaacccccattcaaaatgatatgatacatgtaatggttaaatatttgaatgagtttatattaacattaattcgttactagttttctaaagagctagcattattagtataagactctatacaaaaccaaagaccctacattttttatagcaacaagcattttagtatttatattctaaaatattaagacaacaataaattcttatattgagtaagtcaataacctaattaaatcatgatgtattattgggtaggtgaactgtacgaatgaaattaactctgtaatatccactgttcatttactttaattaaatacagatgttgtgtacaattatgaactcatttatttttattaaagggatacattttaaagcttctttatttggaaagaaaaatggtaaacaacattagtggtgtatagtatcaccacgttagttatactcttattcgtattattatacaccgtgtctcacatattttaatggataaatattattttagattttatgtttttgtaaaagctactaattagattttttgttttgttaaatgacaaaatatactctgtatcttttaaaattgtacaaataagaccacgaattaatttttcgcatactttttctttttttcttatattttcaacacattcttttttctccctcaaaattcaattcttagacatagcctaaagagttacacttaacttgtcaaagaagatatattattgaagatgttaaagatggagtactcgtagcccatattgaatccgatcataggtttgggacctttgactttgaacagtcctgaaggttggtttgtagattgtttgtagatctaagggtttgaaaatccattgttgaaaaagaaattaaaaatgaagaaaggaaagtggggaggatgggtgagagaaagaaggagagtggtaagagatagtttacactaatttttggataattgtgttttgtcaaata

SEQ ID NO: 272580 - DNA, 545 bp, Cannabis indica
aaaaatataaaaaataatatataacaatgatatttagtattcataaaaaataatcatacgtgaaatttaacatataaataaaggtaaatattattttagatcttgtgttttgcaaaaattatcgattagactttttgttttattaaatgacaaaattgaccttgtattttctaaaatggtaaaaataggactatgagcttaatttttgacaacttttttttttaatataactaacttgaagacaattcctaacacgaacaaatacaaaaaaattaaacagttttgtcataatacatgtagatcagattattattaaattttattttgacaaaaaatcagtttagggtcctatttgtactattttaaaaaatacagaatccattttgtcatttaacaaaataaaggattcaattgataacttttgcaaaatacagggtctaaaatagtatttaccctataaataaatacataaaaaatcactcctaataaaactaaactctaatttacttatttatttttaaacaaataacaaaataaaataatat

SEQ ID NO: 272581 - DNA, 1124 bp, Cannabis indica
aaaaatattttaatgcatctattaaaaaaaaatgacaccaaactaaaacctctacccaatagcaataccaataaccctaagccaactttagcaatcctcgaatgtttgatcaagacattcgagactttgtctcctccacaaaacacaaaatgcagagagaaaaattagagtttcagatccaaacatgcacacacacacacacgatcaactagccaaacataatcagaatcaaagatagaaaaagagagaatgaaaacaatatagaaaacaccaaatttttgtcaaggttcacccaaatgatatgctatgtccttgtcgagtttgcttcagtgaagctcgagttccactatcgtcaataataggtacagatctttgaatctatttcatgccacaatcacgtttggcatataatcttttgtattaactctcttcaaatgtgttttcttctttctttttactaagtactctcttttgtttcctttttttctggtacgataatggcgagtaacgttcttctctatacaaagaaagctctctataactctcagctcgcagaagatggataatgcaacatgttgatcttctgttattctcttttgacttttataacactagggtctgttttgagttagttcagttgagttggacctgttgtgactaaaattttactatttgtaaattctattagagcaaaaggcaatgtcagcagcttgaagttgagctgttgtagtatgtaactatttttgattattggtttttgtaaacttgggcttataagggtatttattaaaaaaattccacctaatgataggggatctctaacctttaaggttagcttcctttgtcaatccatagcaagcccatacaatgtttaaacttgctcaggggtatgactttagttcccatgtctgttgggttgtgttcagtaaggaccttcactactatcacttctccttgtgtcactttatctcgaataaagtgatacttaatctctatatgcttggttctatcatgaaatcactactacaaatattagaattcgcgacggtcctaaaaacgatttttttcggggaccgtcactaaaaaaattaagtaacgatttaaaaccgtcgggaaaaatttag

SEQ ID NO: 272582 - DNA, 2833 bp, Cannabis indica
tgtggcatcagatttgtccacacaatctacatcgtagtaatgaatagctggattcagggtgagatcaggactagaaaagtgaaaaataagggaagagcaggaccacaatcatgacgatccttctattccagaaaagggtgatcatataactataattattatttgctaaattaaaaggagatcatacttgtacttattttcataggccattagtattacttcattcttactgggttcactcaaagttgggtagtttatgatacaaacaaactataaatttaaggatttaagcacccccgagataatgcttggccatttacataccaagtttgaacatttcttctcttttcttgacaataatactaatatacctgtcttcaattttcctcaattcctttcctccaagtctctctcatgacattctgtatcttttcagtgttgcttagcttcaacctaaacttttaagtagagaacttcacatagtgcaagaaactttgctgatttgttggtagataattttgtaacttctttaactagattttcgttcacaaatatgtttgagatttcaataccattgcagcctaatccataaaattagtttaagattatttaggaacttataatcctatacccaatccttcagacgagtcacaagaccatgttcataagttaagagaccaaaggaaaaggaatcgcaaaatgcaacactttaaaaatagaaatctactatggaaagtataatctactgttcataaaccccaatcccttcccgaaaaatagaaagtaatgaaaattgagtaatataaaatggaaacacaactagtgagactcattgactacgggacactagctaaaaatctacattaccggtctaacaggaagttctttagtgttataatatagtgccggggtgaatggatcagaagatttcacagactttgaatctccaggtgctccctccatcttagctgcttcatattggctagatccattttcttgtccagttgatggtaaaagaatacttttgggtgattgaatctgcaggttgaaccaaacttgcaagttccagtcttcaagtagaactgtcaagttattttttaggatttgaaacatatcatctggtgaataactacatcaacaatgaatttagatgtataactgaaaaacaactataattatcttacagcacaagggggttcagtaggcctctcaggtaaggcagagggatcaccattccctacagcagcctaaatttataacaaatttattagtgtagctaagagaaaaaaaaaagcacataagaatcaattcataaataacctccatgcacttgcacttactgcagccaaagtttcctttggatgattaaatttgcatctcaaaccaaatttgcatctttgagtcttcacatagtactgcaacaaataaagttacaaaaagcattgaatacttcaagttcacaaatacatatacaaatttctgtagaaggattacagtgtggaacttactgggcaatctgacacccctggtctctcaggaaggtcttcactaccaataagtggaacctagatgaacagaagattaaatgttttcctcattagaatgaagtaattttagttcaggaactgacctggtcacagcttacagatagagagtgacttacaaacataaaaacaaaaggaaagtagacatatactgcaattccaaaagctaatatatcccacaagtcaaattgatataatacaagaatacaaactatgtttctagttctctttataggcatccatataataaacaatcattagaatgctatgcaaaataataataatagtaataacaacaacaacaacaacaaaaacaactaggcataacatttttgtagctctcacttgaaataaaaaaaaaagacaagaaaaacatgaaaaagaatcagtctcatgaaactgggaaaacaagggacattgaatgatgcttaacagaagtgcataatgcatacaatgataattaacataaacatgcaaacacttcaagtgtggcagtgcttgcaagtaagcaacatagctaacaatcttagatctgatactacaaagaaaatgctcttatatagtacagaaagcaaaattatagttcaacatcttgaagtttaggaaagtgagatattatcaaagaaatgtgatatagtaactaggggtatatactacagaatgagaatctagtcaacaacaaacaacagtgaggtatgtctaaagagggaaagagtaaaaacaaaagtaaaatactccactattacaagccacagcagaaggcgagattcactatgttgcattaacacatcatatatataacttcattaattctgttacagactttcacaggtacaaacaataaagagagtacttgttggattataaaattctcaatgtaaatatttaattagtattagctaccttcttgatccccaaattattgagaaagttctgttttacaaaattttaaaattccattcaattcaattctgtaaacattttaaacactcgtccaatctgttagtgctttctaaatcttctgtcaaaattttaagcatgaaggaactaaatgaaactaattttcaatgttcagggaccaatattaaaatgaaaaaaaactgtctgatgttaaatttgtgcttataagtttaaggaccatatgagccaacttaatgttaaggggccagaacaaatattagttgatatgtcacaattctaagctgtattcagatgtcataattctacttatcccttcctttaagttctatacctttactcctctcctattcttaagttcatccgtatac

SEQ ID NO: 272583 - DNA, 880 bp, Cannabis indica
aagtcaaaacatgatttttgacacgcttttttagtgaaacttttaggagttttaggggcgacaaaagtaaacgttagatatttgtagattatttttaggggctacagaagtctctcctaactagaggtgacttttttgtcgcccctaatagtacttttagacgtgaactagtagggacgactttttaggggcgacttgtcacctctaatagtgattaggggcaaatttgtatagttttagcctaatactcatatttgttgtagtgttttgaccctatatacccagttgtaccctatttctttccttctaagagtagaggaaccaaagataagtgaaattttttgctaaagccaatatttcatctttccattgctatgagtcatatctaatactaaagagcttcttagactgaagcaggttctctagacacaatgaaggtctttggtttgcgaatgactcgcttagagtgagtttgcatatgatgtctaagagctggatcaacagaagcaaaagctggtgtgatagacaaacatgctataggcttaggaactggttttgtagggtgacaaacaggagtggaaggtcaatgtgagttgctttaacctcttgaactgttgttcaaggactaaagagttagtgctgttgagaatacttatacgtgatcatattattttccatgtaattattgtttaacataaataataattaccaataacgttttatctaaaactttacgaatataaagtttcagaatacttacaatggtctttgctcagcaaaatatgtctcctttcactgtaatctgtgttatattagatttgtgtgagaaagtgttacatcatcatccatggattttgaaatttcagagagagagagagag

SEQ ID NO: 272584 - DNA, 632 bp, Cannabis indica
tgcctgctgcagaaactggttaatcggttcggcatatctggcaaactggttaaccggtttactcgcaggtcacgattccaaggctgtttcagtctttccaaagagattttttttctataaaaaccccactaccgagtttctcaatctccattcagatactttaaccttgaatagagcctcaaacccttttttctctcaaattctcactctctaaacctaaatttcttattctcttcaacctcctaccaccatggatgcttcttcctcaagaccaaagaggcaaagattttcaatgcagcaaagggggcaaagaaatatggcaaggcatgaggtcttctcacatggaaaatatgcataaaagtttaatgaagatttctcacaaagggatgtcatcaatggtaagcaatgtgatctccaagaccttgagtatgtcaattttaattcactttttgaacgtatgggatgggaaacattgttagaaattcaaacaaatatatatcctaggttagttagagctttatatgcttgcattgaggttagttgtgatccatatagcgttaagggaattctaaaaggggtaccatttgagttaactatatactcgcttagtgatctccttaatgcacctaaag

SEQ ID NO: 272585 - DNA, 651 bp, Cannabis indica
aaaataaactaaaagtataaagaaaattaattctccaagaaagctgatattataattatcccctcctaaaaaagaaattttgtcccgaaattctacccgatttttttttgtaaagcgaagactaaatgtctcatacctcagcacttgtcaacactctgtcctgctcctttgatagcaaagaccctcgttggaacatatttatcgtcttcctttgaatcttctttgttctcagtttgtccccacaatggctaattacgtttaatatgaccttcttttccacatttgtaacatgcatttgccctacactctctcagatgacgtttggtacatttaggacattctggaacgttgcgtccattgtttccattagatcggcggtcattatcagttttgtacctcttgtcttgacttgactgtccgggctgatcttgttcctttttcttatggtcattaaaattggttccgcctttcttagattccctcctagtagcattttccttccaaattttgttttcacttcgcttagctgtaagagccatttggacaacttaagcataattgaattgaccccttgacacaatttctacatcccgagcaatcattggttttaggcattccataaatcgatgtgctcgcactctatcagtaggt

SEQ ID NO: 272586 - DNA, 476 bp, Cannabis indica
cacaataaacaggatcaagtaggtgaaaacggtttcagaagaattcatacattatgtacatataatcatgaaataaatcatgtgaaccatgcaacattaaatattatttctgatctatgttaataagtaaatctgattatattgaaatgagttttatttagggcataaaacccaacagtgtagtatgctgaatagaatctaaaataagagttagaaagagatttgttaaaatttgctggaggtaatatcttatgaaggtatcttgaataccaagagataagcaaagcatcaacaaatagtagattgcaaaaggaaaattgtaatcttcaaactcaaggtcaactattttgtggaggagacaacagagtaattcttgcatggttcaaaaaaaagtcaaaggaggcacacaaatgaggattaggcacctctatcaatttggataaactatggataagagactatgaagaggagatcac

SEQ ID NO: 272587 - DNA, 1115 bp, Cannabis indica
ctttgagtttttactctcttaaatctttaattctctcttatgatttctctcctgtgttttctcgatgaattttgtgtccctgaatagtgagatgattccactatttataaagattaatagaaattataataaataaagaaaccatttactttctataattacaatgagtaaaatagaaaactaggcgagttgcctttcttctttgatattgcgtatccatctcataaaattagagatattttcatgtcttgcaagcatgaagatatatatatatatataggatatatttctgaaaatttacaaactcacattctctggtcggctcattcgagctgcccatatgttggaagctagttgtgtgctcttgcgcgcctacttgaaagtgtaagtaattgcataaatttgatgaaagtcttactaaacatactaggagaacattacccatgagctgcttcgagtttttttgagagactcctttcaatctttacctttagtttcttggaaggcttcttgtacacaggttttcgcttgagtctagcgtctttttgggtcagtctgtgttctcgcagctttgctgtcgtacaaagaatgcaccaagcacaatctctaattggtagattacttagtacctctacaatctcaaaatgattcccagtgagttttgatcaagctggtcttcctgcaagtataaagaaaaggtcaagatcttcaaaagttagaataaaaataatacaagtgtgaaagtatgcaatgtacgagggcaacggtaaaaatctatcctaatcccagacagagagaacgaataaaaccatttcaatttctagtctcccatgttggaaactgtgccttcaattcaattgacttctgagttggcctacttactgaaacagtagaagccattatcggggccaacattattaacgtcgtagaaatagcaaaagtcattgatggtaggtaccccttgtgtgtattccatatacatcggatagaattcaaggacaattctataattgttgggggtaagctggaagggagcaatgtcatagtacgtcaaaattgcttttacgaaagaatggaataatggaactgggactctgaagcaaagaatgggaaca

SEQ ID NO: 272588 - DNA, 745 bp, Cannabis indica
gcctgcacaaagaaaaaactttagtatttgagctaattacagaagagtaaagcgaagtgttcagaaagacttaccctggtgaactccttcaagactccgcccaccagcagctccaaagaagagtcattgtcagcaccagccagttgctcactgacctcaggaaccagccgattcatgtagtgggcaagaatctctttgcccttcttggcctctggaagcaccaacaaaggcggagtaggtgcccgcacctgttcatgttcactcttgaccagctcagacccacccttcggtggttcagacctttccaagcttcctccccgagactccttggacttagtattttttggggtagagggctttgtagcagttagctcctcggaaagatcgacgacctcaccagcaggcctcttttcctttgaagaggacccctcaccgcccttagacttcttggctggaggagaggcactagagcttccgcccattctcttcttcagagcatcaagcatctgccgagacatgtctgtacagaatgaaaaataatatggttagagaaaacaggcatcagaaatataaggcataatagtcaagaagctcaaaaataagacgaagtagtatgctaggttactgccgaaacaagactcagaagtccatcatcacctgacatcgctcttattttagacataacagctttcccttttccgaacactgaaggggatggccggacatgtgaaatgggctcccttat

SEQ ID NO: 272589 - DNA, 663 bp, Cannabis indica
gatgaggattgagagcatgaatttctccaaggacagctatggcagaagacctcatgtccgagaggatatttgaaatgtttcactatggatctaagtgagaaaggttgggccttgattagcagaggtgaatatgatgatgtggtcatgggtaatggggatcacatgttcttggtttttgtcgaacatcttaggtggatactaagggagaagaggttgggattccttccagctcttgatgtttacctccgaaagatacaacatgatgatatgacacaacaaatcaccataagttttcctcccaatttctacatttccaaattggtgtgctttgtatgtggtcgtgtaatgtccaagtacattatgctcgttcactctagtgatggagaatgatttgcttctattaataaaataaacagaaactaatgtaatataatgtgttagtaattatcacaaatatatggccatgtttgtcatgttggtttcaataatgatctgattcaattaaaggtttttttttgtttactcattttcatagctacatgcattgatccataacaaacacaaacacagtactgctatcaatttagtattcaatcatgcatatatatataatgcatatttattaaagtatattaaaagggcttctccgggacaaggttgacg

SEQ ID NO: 272590 - DNA, 853 bp, Cannabis indica
taaaataatttccaacaggaactgtttcttaaaatccctggacagctgttcctaggatgttatggaatggtgagtaatcttgttgaaccatttgcttgctgctccaactagcgaggtgggaaataaaatacaacgtaaattgtttgtcacattactagctcgcattattgtgttgaagttgttcaaatgcgagaccggatcggtggttccatcatacgatgagacatgtgggtttttaaatcctaggggaaaaggagtattcatgatatctggatggtacggctcgagctcctcgtctgagtcgtatccagattgtctccctaattcccccacttgatatctcttgaacttgtcctccaactcgtctattcgcaattggattggatcctcttgctttggaccgagttgttggcgaagttcaagtgctctcgcagatccagctgggagtaattactattagaccttgttttactcacagactgagtcctactcatggacctcgtcttgctcatggatcttgtactcgagtgactcgcgaatttactagttcccatgctttctctatcattagctcgttgtgcaccctctcctcttcgagttgatcggctgtgggtcctttaacgccctgaggtcacacttgcttcttcacgctctgtttttcacccctgagtgtggtttgtcatatttcccacgctagggtttgtacgcgccctctctctatgggtttgggaagaatactggtgattccttgcaagtgacctacgttccccaggttgagtcccaaggtcttcctcatttccatgaggaatttcttgttcattagtttctggttgcctcccattctcatttttat

SEQ ID NO: 272591 - DNA, 990 bp, Cannabis indica
tagtgacatagattgacccaaatggtttttgggcagaagggcgtacccagatgaaggggacgaagattactagttttcagcaagaagaaaatggcagtgaagaagaagaggacgatgaaggggacgaagaagaaaagggcaagattactggtgtttgtgaaattttcttttgtgtttattttttagttttaggttttgagttttaatttaattaaaatatgaatattaaatatttattattttattttaatttaaaattatttttgttttatttttaatttttaaattgatttacaaataaaaattttaaattaaatgacgtggactaatcaaagaatgacaagtggccactaacctgacatataacgtccaggtacctacggaagttccatactagtgacggaagatattttttaccgccaaaaatacgacttaggtatttatctgctactttgcataaaacttaggtatttatgccgcaaattactcttatatatatattgcacttttaattttttcatgtataaaaaagacatagcatcaatgccattgtgtggcatcaatgcaaattttaagaatagcattcttttatctccaatggtatagcatctctatattttgccacataagttttccacctcatcaagcattctccaaaatattaccattggagatgctctaaggggacatgtctagaagtgctagacaccactgatgttcaataacaataggaaaatttacatggtatactaacttttgctatttttttacaaaaatactgtcaggcggtattttttacttttttactgtatttttttataagtttcatactgcagtatactgtgttaagtttttactggtattttttagttgttctaatggtgttttaaattgttctattttgtgttctactggtgttttataaaaatacagtatttttgtaaactttttcgtgtgacagtatttttgtaaaagttaccccaaattcta

SEQ ID NO: 272592 - DNA, 626 bp, Cannabis indica
aacctcaacctggaagcggcattgttattccagaagtcacccattttcttaataaaagtttttgggttaatagcattagatagacatcgcgccacaaggaaaaatttgggagcattgttctcatcagtgagatcagcagaagtcaaggcatggactgtactttccttttctgaaagcaccaatcaggaatccatatcaagaagaatcgaatccataaaagagagaagaacaaagtaagcgaacagaaagagaaggaataaggcataaatgcagaactgtgattcatatataacaccaggaatccataagaactgcctgagactcatatcattgtggagcacgactccattgaagtcggattgagaagaaaagtgcgaggacatggaggaaactaccggcgaaagaaggggaaaacagcaaagagagggaaactgcactggagaaaagagagaaaactgaaccccactcgggcacttacttaaaaatatagcctttgtagttaggacttaggacttcagttatgcaataattcaccgactttaatttaaaaaaaaatttaagaagaccttttttagcaattaaaacttataaataatttttttatttatatataaatcccttagctt

SEQ ID NO: 272593 - DNA, 806 bp, Cannabis indica
aagagttgaccgggtcaacccgcccaactaaaaacccaccaacccatgacacatgaacgagcgagttcagtttcacttcttttcacccaaaacccgccaactcgaaacccggtcaactcgcccgatgttcagttctgcacttaatatcatatattaaaaattgtgtcaaattgaaccttaaaccatgatttcttttcaaaaaaaaaaaaaacttaatctatgatagaattttaataaatgtaataaatgttatattaatgtgatgtgagtttagttttttttaaaaaaaaggtgtttatatttactatacaaatgattttataattaatttacgaacatttattatttagtatttggtacctatttacagagtttttcaaaaattagatataaagaaagattaagctaaagaaagaatcaaaataatcaaatataaataaacacaagattttttacgtggttggagcgttaatgaatcttagtctgtgaatcaatagtattatcaatgatatttttcgacacttttgagcagagttttctctctgtaaatataaggtttcgaaccctattaacggtgaagatgatgccttatttataggcagtcatgcaaaataggtcgggctgacctggatccgtaggattactctaagtttaaagcccactaatggggtatttccatattgttatgagattgggccttagacttaaggtccaataccaaaagtgataggtgtgagacactatttgaaggtactcttaagagcatatgtgtccggatacacgtggtcctttggtgcatggggaaa

SEQ ID NO: 272594 - DNA, 2472 bp, Cannabis indica
actaaattaaaaatatactaaacttaatctaaatttaatactaaaaataacctaacaacattatttaatggttttaatgaaattttttttctcccaatttcaatgtattatattaaattcctacttaattacttttaattgtctgaccatcaattaactattttatgatttcaatgcaagatctgagaagtgagtgtcgattattctatagtgaaatagaatagaatttcgatataggacgagagtacctatatggtttagatagcttataggatttctgtgtttaatatctgttacatgtttaatttatcacgagagtagaaaatttacatgtaattgagatttatctatctgagaagactataaattatcttagtaaacctgttattgcatagaaattgatcataagaagataatcatattaggtcataatcaatagaaataattgaaatcgaagccctagtttttattaactgttaatttcctttatttatttattttcttcctaattccactagttttcctaatttaactttctctcttaatttttattcaaccaaattgaagtaaaagtttaattttaaagtacttaagtacaatccttgtgggatcaacctcactcttggcgagtttactacttattacgatacgtacacttgcgtgtgtaaattaccacaatacaaacctaaaaaataggtcaattcacccaccatactcatctaaaatctctcttctatttgtttcacaaaaatcaacacctcattgttagaagtagaaccaaacacaatatcattaacataaatatgagcaataattatgttatatttaatatttttgataaataaatttttatctactacaccccttttgtaaccatgagaaactaaaaattgaatgagtctctcatacaaagtctgaggggcttgcttcaaaccataaagaactttctccaatttgtatacatgatcaagtgcatgagaatcttcaaattctttgggttgtttaccatatacctcttcatttaagatttgagaaatatggatttgacatctatttgaaacaacctaaaaccaatcaaacaagtaatagacaacaataatctaattgattgaagtctagcgaaagggaaaaatattttatcaaattatattccttccactcatgtatacccttgtgccactaatgttgctttgttttgaacatctgtaaaaaacttattagttttattcttgtaaatctattttgtaccaataatattgatgtacaatggtctaggcacaaagatccatattttttttctaaaaaatttctccaactcttcttgaatagctttaatcaaatttcatcagttaaagattctttcacatttttgggttcaagcaaagataagaaacaaaaaaactgaacaatattactaaaccttcttcttgtaaccatcccatcttttgaattcctaagaattaaatttgttggatgattcaatttaactcttctagaaggctctttccgatattcattttaaatgatacttggaaatttcttttttatctgctggggatctatctcaacaaattcataatctgttggtacagattgatcagttttttcaataagagaatcactgacagtggtattctctagaattttagtaggctcatcaagaaacatatcaattgctttcttagtagaaaaatcaaaaaaatccctagcatcatcataacaacatttgcacactttattatagtttaggttctcatgttatacacatgataagtcctactgttagtagagtatccaataaaatccccttcattacttttagcatcaaacttaccaagatgttctctatctcttaaaatgtaacaaacacatccaaaaatatgaaataagcaacactaagttttttacctttaaaaattttcataagatatttttgatgtacctggacggagaaaaacatagtttatgatattcagaggccgagacagcaaggtcctccagcaatgcctcctcagcaggtgccagtcgctttagttatagtggtgtcagcagaataaccttttggtggcaatcgtatggagcctttggataaatgattttgtaaacagacacctccaatttttttgggaggtctagatgtcatgaaggccgagcagtggctaatagtaatcgagagaatcctgaattttatgggtgtcaatgggaatgatcgggtcacctcatgtggtggggttccctcacccgagacgtcactacaatgacctaggaagagttttgggatctgtgcaatgctaaatattacaatgaggcagcctgtagtactaagagtaaataatttatagatttggttcagggtgagaatatgtagtaacataatatacaagggaaatttgcgccaaaagtccccaaaaagttcagtttgatacagataagtccccaacctccaaaaatagcggcaatagtcctcaagat

SEQ ID NO: 272595 - DNA, 646 bp, Cannabis indica
ttttttttttatttcacacacatttaagttgtgttttctttagtatttgaacatgaatttttagtttatttttggattatcttaagaacatattacacttaaattatcaagttttcttaaacactataatatattacatccagtatttacttttaattgtcaaaattataaattacattatttagatatacataataataatcttacctaataagtaataatattttctctataattgttaattatatcttttaaataaagtaaaaaataactaacataaaattagtatacgtgcctcgcacgtaactttttactagtctatctatatatataaaggagaagtatgaggcggtgacatgacattctaaaagcattctaaaactatttttctcttatctccttaattctctcaattttaatattttattaaagcataaatctacaaattgatattttactattattttaatagtttttctataaaaaaaatataaatttacaaattgatattttactattactttaattttctataaaaatataaagtaattttaaaaaaaaaatagaaaataagaaataaatttacaaaaaaatattaaaactcaaatcaaatataattttctctaactaaaatatcacatttttt

SEQ ID NO: 272596 - DNA, 1018 bp, Cannabis indica
tctacatcatccataattggtagcccactttgtgttttagtagtgttaccaacctggcccaactcactatgttcagcaggcccaatattctttcccaagcccattcttctcctcttgttgtccaatactaatagagcatcctccccagtaatgtgaggtgattccacatttttctcataattaggagattctcctggtacgtcaataatcttttgattggttaactgtacagcttgaggaatagatcccccatcaacacccccatcattaaggacctcttttctcagttgagacagaagagatccctgatttttagtgattgaaaatcccaattgattgtgtcttgactggctaccgctgtgagaagattcgccaccttgttgacaagaatcgttattcgccggattgttcgaaaacgcagtaccaccattcttgttcattgctcctgatcgcaaccacctagcaccaatagcataaaaaattattaatttaatacataataaaaaataaaaattaatatataatgtataaaagggtaagtctttctatatatatataaaacaagactacggtagaacttagcttaagttttttatcagtatggaagttttttcgaccattaattttgactcatgtggttattaaaatgtaaagtgtatactcttacgataggactgcatttatacaattaaaactttatagatattataataatatttaattatatatttatttaaaaaataaaataataatttaaattatttttatataggtatttatttttaaaaagtaattttacttacaaattttgctaatttttttacactaataattaactataacataattaattatttaagtactttcaccactaatttatttagatacataattctaccataattattttttaaattaatttgttttattaatttttttatcaaaaaagataatttatattgattcaactgagccaattacatccacaagaggattcctcttcaaaagagaaacttac

SEQ ID NO: 272597 - DNA, 1925 bp, Cannabis indica
atttccaaacaatcatcaaataagcacataaaccatcatgaaaccatccgaagaacacatcgaagtaggggcattgaatactctcttctatatagtttgccttcgatttccatataagcacataaaccatcataatttttgcgcctcgtttttgtcatttggaagttgcccgttgagtaaataattgataataggcgtcatccatgttggagagctatctatcatctcgacatcttcagtttcacatatacttggctcgctcagcatctctaccggaaccaaattcagttcatccaggtcgttatgcgaggccagttttgctaaggcgtccgccttagagttttgttatctcaaaatttgttcgattttaatgtaatcgaatctttccaagttctttcgaacattatctaaatactttgccatttttaagcctttggtctggtattccccaaggacctggttcacgatcagctacgaatcactatgacaaatgagattttttgactttcaatgcctctgctatctttaagtcggtgatcaaggcttcatactcagcctcgttattggatgcgtcaaattggaacctcagagcatagtgatatttaaagccttctggagatattaatattatccctacacccgaaccttgctcagtggatgcggcatccacgtataaacctccaggtttcctcgcctcgctgataggtggaatttcttctggagttataccttctatcaagaagtcaaccaaagcttggcccttgatggatgttcgaggatggtatgttatgtcgaatttccccaattcaattgaccattttatcaatcttccagaggcatctggttttgataaaacttgtctcaatggctgattggttaacacttttatggggtgagcctggaagtatggtcgtagccccacgagacgcatggactaggcacacccgagtttttctagaaggggatatatggattctgcccctagaaccttttacttacgtagtaaaaaggttgctggtgcttgccctcttctcgcactatagctgcactaatcgcatcttctgagatggctaaatagagaaacaacgtctctcctgttaatggtttcgccaaaactggaggcgttgctagatggctttttatgttctaaaaggcctcctccactcctttgtccactcgaattttttgttgcctcgcaaagccgaaaaacggcacacacttatcagttgactttgaaatgaatttgtagtgcatccattctacctgtaaaagcttgaacttccgttgggtttagttggtgatggcatatctatcaaagccttgattttcttaggatttgcttcaatgccccttgcgttgactatgaatcccagaaactttccttaggaaactccaaaggacactttttcggttaagtttcactttttcaatatttcaaagcactccactaggtctgttgtatgatctccactctttatcgattttcaccaacatatcatcaatgtagacttccatgtttcttcctatttgtctcgcaaacatttcattcacaagtcgctgatatgttgccgtagcatttttcaatctaaacagtatgactttataacaataaagtcctatgttggttacgaagcttgtatgctcttggtcaaggacatgcatttttatctggttatatccagagtatgcgtccatgaacgacataagctcgtgcccagcagttgcatccactaactggtgaatccttggtagtggagagcaatcttttggacatgccttattcaagtataaaaagtcaataaaagtcctccaagtaccatttggttttgggactataacaggattggatatccacgagggataaaatgcctctcgtataaagtcgttactcaacaatttctccacttcttgcttgagggcccctt

SEQ ID NO: 272598 - DNA, 1011 bp, Cannabis indica
gacatcattataactcctgccccctgagccattctcatttgaagccccatcaacatatagtttccatgtttttatctcgcgctcaacatcagggtcttcttctaagtttatttcttctactagaaagtcagccaaagcttgtcctttgattgacactctcgagtgataagttacatcaaattgtcccaactcaatcgaccactttatcaatcttcctgaagcatcatgttttgataaaacttgccttaatggctgatttgttaggactttaattggatgtacctggaaatatggccgtaacttgcgagatgcatgaattaagcatagtgtaagtttttccaatgatgggtaccttgactctgcccccagtaaccttttactgacatagtaaataggttgctggtgcttaccctcttcttgcactaaatctgcactaatgcatgtttcgagacaactagataaaggtatacaatttctccagttattggtttggccaaaactgggggtgttgacaaatgcttctttatgcccttaaatggttcctcgcattcttctgtccattcaaatttctttgtccattcaaatttcttattgcctcgcaaaatattaaaaaatagaaggcatttatctgtcgacttcgaaatgaatctattaagtactgacattcttcctatcaaagcatgaacttcttttggctttgttggcgatggcatctcaattaaggcccttattttttcagattgtcttcagttcctctcgcattgactatgaaaccctttcctgaggaaaccccaaaagagcactttctagggttaagcttcatgtcatatttccagagtatgtcaaaacattctgtgaggtcctttgtgtgatcctctctttttactgacttcaccagcatattgtcgacgtacacttccatattttgtccaatctagttctcgaacataccatttactagccgttggtacgtttgtaatgatcgcattagtaatttggattagtaaaggc

SEQ ID NO: 272599 - DNA, 1791 bp, Cannabis indica
tttaagttataaagtcaaacaacctcctacaataatttatacagattaatttacaattattatatttatttatttattttagacaaacagttgcatttcaatcaaaatatacatatatattgcttcaatattttttttataataattaaaaaaatattattgcaggttgtatgaaaaattttcaatgaatttgttcatttaaaaatatatatatatttttaataattagcttaaaaaatgaaattgtttgtatatgttgtaaaataaaattcttttggaacaaatgggaatcctcaaataaaaaggcatataactttcaaattttgatgcatatttaaaagactttgaacctcaccatcatccatacttgaacaataaatggctgatttactctcatttagctcttaagcccgaagttgcgaaaaaccttttaaaatcccttaagtgaagttacattgatttaaaattattttcacaagacaaaataaggtcatctgccaaacaaaaatgagtaactaacataatacacaactattatgaaaaatgaatatcaagaaggttaccgcctagttactccatttcccaaaggaccttccatagtaacatacttcaaaaaagtggattcttatttccttagttcttgcaagtaagtcttggctaatagtattaaatggttgtgtccacccaaactcccctaccatctcgaatggcataaactctattcttcacttttctcgccttaataatttgattaaaagaaatggtgttctcattcccctcttttaacagattcaccttagccttttcacttagaaatatttacatgagcaggtctgtaatgctctttggctacaccatcccatgaagaacttcctcgcaatgaatcatttcttgcatagcctcgcaatcatcaaatattgagaccaataccaactcaagtatactaacctattacagacggaaaggggtgaatcactataaaattttcgtgttcatttttgataaaccggtttactttaattgatgaatacttgtgctcatcttgatcgtttatgatattctttgattcgttgacaatatatcgtgtcaacaatttagtgctttcattgagaacagtgagcatgagtgttaatcaccacttgccaccatggtcagtatgaggcggatgaactatgaggaagaagacactgacatccccatgaatgaagaaaacaccattgaccgcctggaggaatttcaacctgctgaacccgcttaggaagggacctctcagcgcctaggcaaacaacccatgcctcaggacgaaggtcaagtctgaggtgctgggaattcctcatcaccatcccacggtgtgagatgaaccactaatgttcatgaggcgttcatggaaaatgaagtgttgtgccaacacctagatgagactctcagacttaatagagagtgacaagagagatataatgcttaagaggccacaaggccacatcgatgtggatcgcgtgggcgtcttggtatggtgagaagaggatgacccaatggaagtcgcttaatgcgtcatcctatcgaaagtcaggagaggtttaggtcacaaatggtgacaacacaaagttgggaaaccacccgtaataccgtgcctcaacgaccttctcgtgagaattatacccatggtaggaggaatgaccgccctccatcacaacaacgccaacgagtaaccaccttgggtcgtgagaacgaaaggaatgatgcacctcctcctatacaacaccagatttggagggatgtgtaagaacctat

SEQ ID NO: 272600 - DNA, 615 bp, Cannabis indica
aggagggaaacaaagaaacaggagtgggttagttaagggtaaagataaaagcaaggaaatgatgatatgaagaatgtagttgatgaagagggctatagacaggttgtgaatggttggaagcctaaagagagagtaattcctgctgatccatcatcatcaaatccttttggtgtattgcagaatgatgagttcaaaacctccaggaatttgaagttcgtgaccatgaagaaaggctagaagaggttatcacgggaggagggggagaacctcctctttgcaatggataaaattctaagttggaacgtccggggaatcaacaaccaacacaagcaacatgaagttaagcaatttattgcaaaaaataatgttggtttggttggtctcctcaagacgagagtgaaggctccaagccttggagctttatatgttcgaatgttttctaattggtgttttacagcgaataatgcgtggcataagggtgggcgaatagcagtggcttggaacccgttgagttttatggtggatattttgaggtgttctagccagttaatacatttggaagttactactatggacaaaaggaacaagttttttgtcacttttgtttatggtttt

SEQ ID NO: 272601 - DNA, 873 bp, Cannabis indica
acccttgcaatttagaaaattttccaatatgcatagattgaatcatttgtcgatttgtaggggttaaaccatcataaaaatattttactaatctccatttttcaaaaccatgatggagacattttaataataaatctttgaatctttcccaacattcataaaatcttcattatccttttgataaaattcagagatttctcttcttaaattatcatttttggacattggaaaaaatttagccaagaatttattaagaagttcttcccaagtagttatagttccattagggagagagtttaaccatgccttagacttatcttttaatgataatggaagagggtgagggaaggcggtatcgactcttgcagctttgggctggagctatggaaaaatcaaggggaagagggtgagggaaggcggtatcgactcagattacaaaaagaaagggaccaaactctgtgtgtgatgtgcacaaaacaaagtcaatggatgcagtgcttggaattgctcccatggagttcttggatgctgaagaggaggagttagtggatgtcgataggattctaaaactgctggaaccagagcctctatcaccgaaataatctctttaggagattttgcaactggaggatatcagaaaggactttgggcacttcttggcagctaatgagcaatgctcggccaagatttgtcaaggtagagttcgaatccccctgttctgagatctagtttagttgtgcgtagtctctttactaagatgtgaaaacagagttaagataactagtgatgatattcatgatgaggttgaattttgaaaccctcaattgtatgcaatgtgcttggtgcaaacccaaccttagctattcttaaggg

SEQ ID NO: 272602 - DNA, 520 bp, Cannabis indica
tttttgatttaagcgtttatatattacatcagcataatttgaaactcgaacccaggacctccaatacacacaccccatgtggccacttgagctagcatgaagtggttcacagaaatatgtcttgctgtagtaaattagatagtctctctttcactttggtcaacctggaaaaatcgagggaatttcctggggtcactcgtctattaacgcgtatggtcaaactacgtatttttatatgaaaacgtatgttgaaagattagtctatgctcttacggtacaattaataattaaacttagacaatattttatctagtagctagctctacgtgttttgtctctatacgttggctataatcaattcgagtcttatttaaaactctaaagtcttaacacatactatttgcatcaacaatcatatatatcccttggtgaaatacgacgccaaattctgcaattgttgggcgcaacttgtttgttatatatatatcctcgtacatacagttataaaacctacctctct

SEQ ID NO: 272603 - DNA, 558 bp, Cannabis indica
agagagagagagaggagtgaaaataacaatcctattttctctctactttgttatgctttttctgtatgttaattcacttattatttacgatgctatatatccctatctatagtattatatataaagcttttatttaaaataaaagataaatataaatatctaatttgatttgaattcaaaatttaaattcaaatataaatattattatatccaaaattcgactagcactttggaggaggacacgtgtcaaattggatagaatacgaaccaacaaatgtaattatatttaaagatgaaatacgttaaatatagaatcaacagagaatatttacaacttgctgactgaaaggtcttacgcgagataaatatatacaaactgttaactcatgcattgacgaaaaaccatacgacatcagatgtgcaaagcgaggcatcaacctcgctgtgcagaaagagacgaaggcaagacataagcgagacatgatggttgctaaagacactcggtttataatatacgggtaaacccaaacaactaatagcgaggcattcatctcgcta

SEQ ID NO: 272604 - DNA, 597 bp, Cannabis indica
cgagaagtacaaactagaaaaattcatttattgtttggcatgatcccttgggccatcccatttcaatcacaatgcgtagaataatagagaactcacatggtgatccattgaagaactaaaagattctattatccaatgagttttcatgtgctacttgttctcaaagaaagttaatcattaagccatcaccagtaaaagcttgaattgaatcccctggatttcttgaacaaattcagggtgacatatgtgggcctatttgcccaccatgtggaccattcagatactttatggtattgatagatgcatcaactaaatggccacatgtttgcttattatttactcgtaatgtagcatttacaagattgcttgctcaaataatccaattacgagcacaattcccaaattatgcaatcaagacaatttgtcttgataatgctattgaatttacatcacaggcttttaatgattattgtatgtcaatagggataaatgtaaaacattttgttgctcatgtacatacatagaatggtctagagaaatcattcattaaacgcctctagttaattgcgagactattacttatgagaacaaaactcc

SEQ ID NO: 272605 - DNA, 312 bp, Cannabis indica
tatttaaatttataataattggtttgacaaaaaaattattaaaattaaataaagtaaatagatataaatagaaaatataataattaaatatactaaaaaaattgatgaactaaacggataaaaataaaaaaaaatataataataatattatgacaactattaaacagtttattggaaatcttttaattttttttaggaaaacaatataaacagaacacagtaaataaattaaaaggataaataaattagaaaattaaaaaataaagaaaataagattttcaaaaatgtaataatatttatgtgatatgtata

SEQ ID NO: 272606 - DNA, 543 bp, Cannabis indica
agaaccgaaaaaatagagaatattcacagtgatagatgttaatttcctacaaaaataaataacaaaaaataaaataaaacattgaaaaataaagaatgcaattaaagataggttcagtagtgaatgaattcactaaccttggtaaatcgggtcgtgaaggattctttcctccacttcaaatggtcttaattctaaaaatggtttcaatctttgaccatggacttagaatatgttaccaattttataatttttaatttcaatagcttcatgaggaaaaatagtacgaacagtaaatagaccagtccatttagaacgtaacttaccgggatcaaaagaaatgtcccaatcaggaggtcgaaataacatttgtggtctagggagtgattttgattctctaggaattttcacagatcgatcagctaactaaagtgtaatagatgttggtttcagttttcctagaccaagtggcttataaacagaataaggcaacaaattcacactaactcataaatcaagtaaagctttgttaatcacatgatcacc

SEQ ID NO: 272607 - DNA, 2661 bp, Cannabis indica
aatttctcaccaaccaaacaaaaaaaaaaaaaaaaaaacacaatatttaaagtttaacaagaatcaaatatgactacatcaaaaacttcagtaattactatatttattaactgaagcaaaatctcacctcatactcaagattagaccttttctcatcggcggcaatggctttcaaaatcgaaactgaactcgcctgttctctcctggattttactctgaactcaatatccgacgcctcattgacacccttgtcattcaaaccctcaacggaatcaatcgggttctctttaatggacccgatcgacccatcattgggaataaacgtctccagctcctcccctgaatcgatcaccgatgcatacacaccaccaagcccgtcaccctcttcttctttatcatcgaaaccgacgacgaggcttcccagtcgatccgggaaggctttccgggccttctccggaagcttgagtttcttccctttgagcatgacagaaaaaaagttggaatcggaagagttgggttgagcaaacaaagagagagaaagagaagggtttggggtgaatcatagctcggttgattcaactcggtatggccttggcgggaaagagaatggtagcggttgaacggcagttggcctccacgtgagctaagccaaattcaaaatttcaaaccaactagtcgtcggaagcaagaagcaaagccgctagtggctaaattttctcattcatttcacttacacttaatgttctaagtttaagttcaaattttaatggtaaaactctatgaactactaaatcatgttgatagtataagtgacaatgattagttagaattggttaatagtagtttgttatgtctttaaactaactgttatagagttagctattctgttatttcagttgagcttgtactataaatatcaccattgtattcatttcaattcattcaatacaataacagaattcttctcattcattcatactttgtttctctcaagctcaacatggtatcaaagctcacggtgcatcaatgtcgtcctcctcctccgatgctacagccattagtctgttgttcccaccacaaatgtttgtcccaccccttcgactaaatcgcaacatatttttttggagatctcaagttcttcctgccatccgtgcccatgatctcgaaggcatactccacaatgagaatcgtccccaaccaaaaatttgtcaacctctagagtcgacaacaatagtaaacaatcatgaattcaatatatggatgcgcttagatcaatttctcctttcatggctaatgtcaactatttctgaatccatgattggacatgtaattaattgtgctactgcctccgaaatctggaccacacttgagcaaatctttgggactgcatcatgagttagacagattcacctgaagaatcaactctaatccaccaagaaaggctcattggccattgatgaataacttctcaagatgaagaatcttgtagatggtcttcgtgctgctagaaatcagattacagaaaaacaactcattctttatgttcttcctggccttgggacagaatatgaatctattattgtgataaacttaaacgcaagagaaagactcaccttgcagaagttcaattcatgttgcagaatcatgaaatgcgaattgaagcaaatcatgctcaagccaccattgatttacatggagccacagcaaactatgctcaattcaagaaacctcaatctggccctccaaattcaaatggcagaattggacccgccaactctcgaggtcgtgcaagaagctcttatggtggacgacaaaacagtggtagtggcagaggttattctaataacaacaaacctgtctcccagctttgtggtcgaactggccacaagtccaaaaatgctacagatgctttgacatatcctacaatggaccagatgagaacaatggcacctcaggtcaaaacccaccccaagctcttactgcttctactagacaccatgatgatgatgcttggcatctcgatagtggtgcttctcaccatgtgatccaagatagtggcaatctccaataacagaccacttacaaaggcaaagaaaagattattgtatgtaatggctcttccctatctatagataacattggtcatagttctttagctgcaagaaaatctctttatcttaaaaatattctccatgttccagccataacaaagaacttaataagcatttctaagtttacccgtgacaataatttcactgttgaattcacccctgatttgtgttttgtcaaggacaatcactcgaagacccttccacttcaagatgctcttaaaggtggactgtaccaactaacccctcaactacttcagaaggctcctgcctcctctacctcaagcatactaattgctgtcacaaagaatcattctttgtaccaagctaatactttatttactgaaacttataataatggcagtcataaggttgtttcttgctctcaatcaagaaattcccaaattgtaaatttatggcacaatagacttgcccacccccaatcaacaagttcttaataaagttcacaattttttaaaaatctctaccattgatatgcctatctatcatccattcatatatagaaaactccatcaatttgttgggttttatg

SEQ ID NO: 272608 - DNA, 515 bp, Cannabis indica
ctctctctctctctctctctctctgtgtgtgtgtgtgtgtaaacacgcacacgtaggagcacacaaacgacccacacaaccttagttccttctctccacgaccaccatgaccacagacccaaggacccacggactcaatcaccactgcatgcggacccaacgacttctccatcaaccacggcttcactatcggcaatgttgtcaaaggaataaattatataattaatgtttgttatctgtgagtagatgttagatttaaggtcgaaaatgaccagatttgagttttaggctaaaaacttattttttgtcaggcccgatggtggtccgatagtggtatgatgccttcctgttgttaaaatgagtaaaagttgaagacgaaggtccgatggtagctcgatgatatgatccgattgggtctaatggtggcacgatgccttcctcaagagcttaatgaatggagcttaacatctataaatgtagatatggtctaatggtggtccgatagtggtccgatg

SEQ ID NO: 272609 - DNA, 532 bp, Cannabis indica
atcctgacctcgaccctaaaccttgtacccgtactaggtctcagactttgaacccgactctaaaccccaacctcaagcttgaacccgacctcggaccccaaacacggtcctggccttagtgtcgaacctagacctcgaccttaactcgaaaaaataatataaaagacaatgaatgaggatagagaaaaaagaaaacactaaaagatatcatttctcatttatgcacacatacaatgcataaatatgcttattttacaaatttgatatcttgcttttaataatacttatcacaattattaaaaaaattataatacttaaaagagtatattataatttacaatcatatatatttactattccagactcaaatttaatcaatataattattaaactgcattcattcaagttgaataaatttttaattcaaacttaattattaaatatataatgttaaataaattatttatattgataaaatttaactctagaatatcaaatatatataattttaaattacagaatactacatttt

SEQ ID NO: 272610 - DNA, 453 bp, Cannabis indica
atttaaatgacctagatatttttttgtagaaatttctgttatacccgaaattcgactggtacttccaaatgtgacacgtgttaatctcagagaatatgaaacagcaaatataatggtaattatattaataaatattaaatgaaataactcattaaatgcagagttaatagggtatatttataactcaaagactgcacagtctttagcgagacaaggatgtacgaagtattgatgcacgtattaacgagaaaccatttcatgccagaggacgtaatcgcaaggaagacatcgataatacatagcgaggtatctacctcgcaatatgtagggaggtgttgataaggcgaattggctgttagaacacttagagtataatatatacattatactaactaagtataatagctcgaacgacgtagataacacatagtgagactgttggaaattatttta

SEQ ID NO: 272611 - DNA, 2604 bp, Cannabis indica
atttttaattgctgatatgctatttctgcttgacagcattgtatgccaagaggaacaggtatcaaaggcaaaaatctttgatgaatcttgaaatggagagtcaacacgccaaggcattgcaatcaccttcaactcctcggtgactcatcataatggcttttatgcatgcttacttagaaaacgtatagaaaggggggaactttcagaaagcttgtcaattgctttttggttgattttgaagtgagaagaaacacctacaacattatgctctcctctgctccagtcccgaagattttggcttcttctttcaaactaattattctccaatgaggtcctctgtgggggaattcatttcattctgtctccaggatgcaatgtatcagaatatatactttacttactgacccaacaaaggcatcatcatcaccatcaccttcttcctttcttaccttactgtatcatatatatgtatccacgtggaatttgctgagtatatgcttgttagttttgattgacagctcaatgcatgggatggaattgctacctcacaacacaattatacaaattggtcctgggttcactttttactgtagtcatgaacttttccttttcccttcccattctaagatcatattaaacgctcattcattgacttaaactaaatatattttttttaaccttaggattgtatcttgtcgtccatacttttgtaatgtaataattttcagagagctatttttattgccctcttggttttctctaaaaaatcataaatgatacaacatgttccactcaatcagattatataaaattataactatatatacgtatccatttacgatttcaattgttatattctccttgatgatgcgaatttcgacgctattcgaaacataatgcaaatatatatggaatctaatgagatatgatgcatgcacactactcccttccttagctattttataagtatacatgacaccacagacagctctcttgtcatttttggggattcatcatttagaattattaaaaaataaaaaggattttggatctaagaagtaggtgagtttgatcaaacgtttatgtctcactgtgacgaccgatgataccaactgtactctgtactgatcagcatgagtcttgacttgttttaatttattattattattagtactgttactggggggtttcctgctctataattgtattatattaaacacttatgataatggtcttcaaatttgaaagcaaaatagacaaagttagtgtaggttggcattcatgtcatgctaacgttgagtcgacaatattacgaaatagatcagaatagcagcaaatattattgttgtttttctttttattttaataaaagagagaatctctcgtcgtagtttatgtatatacacatgatttgtgacgaaatgtcaaaacgttttaaattagtgcaaatgggacactaaacaaataatatattccaacacgggcttactcttttcaggtctcaacttaataagtaattatatattaatagattttattaattagtaacaagttacacgtcggcaccacttgtttcctttcctttaatcatggtctctgtttttttgaccgcttctctcttttttcttattcaaaaaagaatactatttaatttactattatacccattcgccaatcacggtcaccatcatgcttttgcatcactgtatgcctatatatttattatatccacacaccaagtgtagattacagattactactactcgtgattgtgtatgttggtttttaaataatgcgagagttgagatttgagaactaagcaataggttgttacttgttagttaacactaattaatatgaggattaagataatagtattattaatcaatacatattgcatattttgtttttcttcaaaaatgggttttactcaaatatatgtgagtgtcgtttaaaccacgcagttatagactttgacaacatatatagagtaatatataaataaatatatatagcacatatatgtcttttaacgcttatttagaaaagcacgatctctcataatatgcgccctaaactagtcgacgaccctacaaaattgtgtggcttaaaatcttattttgaaggtcgaaaaaagttgtatttgagttctgacttttgacttcccaacaaagaacaatgagcccaagatgactctctataatacaaaatatacaactattcaagatagtgtgagaaatttataccgatatttatttagagaaaaaaaaaaaaaaagaaacaaaagagacttggcaaattatgtatagtcgtcgtcgttgcatgtatttttgttttggagtgatatttccacttctcgctaacaaaatcattatcaatgagactataaactataatctatttgccctttgactgtaataacttgaaaattcaaatatttaatttataactcgtaattttcatccaaataataataataataaatttataactcgtaatgaataagtcgcacaattatttaggttgccccaacatgacatgaaaaatatatagttatatatatgtaaagcgcaggtgacaatgtaatataatcaataatttcac

SEQ ID NO: 272612 - DNA, 1308 bp, Cannabis indica
agagagagagagagaaacaagaaacaaaaaaagataaaaaatgaaaaggcatagaccagatttatgtcactggaggtcgagctgccaccatgggggaagcggagagaagttgaggtggagagaaagggctaaattgtggagctaggtcgtcacagaatggagaggccaaccttaacttccatttgggccctcaatggactaaggtggcccttcggggccacatcgtgaaagatgagagaccgcagagatgcacaatggttttgctttttcgatgctacaagagcgagaagagttagcgagcgattagcagcgacctcatagtggtgccccaaatcttgctttatatggcactgcgagatgagggagcaagagagagagggcattggtagagagagtgagagtggaagatatggaattagggtttttaggtttagttatataatgttcaatttgttagaaaaagttgacttagtcaaccattttatttttgaagaaaaaaggagtgggttttatccgacattacttttgaagtaattttgataatttcaaaagctataaatatgcttaagcctttgattttaaaaaatacacaaaaatcttattttgtacaaagtttataacatatacaatttacttcctttgaggataaactgttaatggaataaaatttcgtaaaatactatttagagtcattatgatatcacagtgtgatagagttcaggcatatttagtttaccaaaagtataaggtagtgcgtcttgtaactttattctattgtatcctgggagatagacactgttgaaattttctagcaccaacgagagaaggcgaatctattttaaggaaactatgttctacacaggccttagatattttctaataggaattgcatttatggttgatgttctttatctctataaatttgtacagtgtatttaagcatattaatggaagtatagtaattgtaatttatcatcaagtttatgtcaactattctattagtctcgttaaattgtgcaacaatcataaaacagactatctttaatataatatttgagaattaaatgtaattttatgatatattttttatcataaatgtttgaaatatctagtttggatgatataaatatatctattaatatgtgttatactgcggtaaaatatttcggattgtgatatcctatctaaaaagattagctttaaggtctgtgatagagtatcctccattacttatttaaagaaccccaggaaattcaaaacaagtgtgggacgagtgatacatttccaaccttcccaattggcctgggg

SEQ ID NO: 272613 - DNA, 945 bp, Cannabis indica
tccatcgatcttcgatatcgagctgaccactgcaattttgagagattaactcccaaatacagaagaaaatagaagaagaaactaaaacaaccttaccttacctgcgtcgagtcgaacgcccgtggctattttgatctcttacgcccaatcttgtcgaccaagagcagctcgactcctagcatagcgttaggctacgcccacgtccagtcgcgtcacagagagagagagagagagagagagagaatattgactgttgagaattgaggaagaaatgaaacttttgtcgtaagagggtttcatattgtatgagctattgaagttttatttttcttttatctactaaagtatttggtgcgacagtaattcgttccaaatactgtggaatatatatttttttaaattgactgtaaaatgtatattaattaggagaaaaaatgttggcttcttctaaatggtaatatttttttaaaaaaaatcaggaacaataattttgcgcttgatgagagtttggtcgtttcagataatcatttaattatttttttataaaaaaaatttatttggaacaactttgttaagtcgcgcctaataccatcactatcaagaatgaaattctgtcgttcctgatactgtcgcgcctgaaacccttatttgttgtagtgcatcgagttaaagttacctttactaaatattattaagtcacctgcaaaacacaggttagttaaacgaagatgtttgcacaatggatgatatccaaaacccttaatctcagaatgaaaaccaagaagcagtaaggtattccattatcaagataaaaagaagaggagacataggatctccttgcatgagccctttttccccttgaaatcgccttgaattctgccatctagtaaaaggtggtaattcgttccctttagacaagttgtaggttctttttagtattatttt

SEQ ID NO: 272614 - DNA, 500 bp, Cannabis indica
atcttcttacagtcatattatcttcttacagccatattatctttacagattaacaataattttttttttgtaaggagattaacaataaactttgattctcgattcaaatgttatttttcaattctattttcatatattcaaaattctcaatctataaattttccactaacatttttcaatcaatgaaacaaaaaatgcaaactttaattcccgtatgaaaaatcaaactctcaatcccaataattaatagaaacaacatcaagtttcaagttctcaaaatttataaaaataaatacataaataaataaaaacatatctcataaacacaaactcaaatattagaaccccagtaaaacactaaaacattaaaaacacacacaataaaatttgaaccctgaacttaacacacatatcagaataaaaattaaaccataaataaggatgtatgttactatttttctaattttgatatttattagcaacaaatttaatattttaag

SEQ ID NO: 272615 - DNA, 876 bp, Cannabis indica
tcgtccgaacaggtaagaagtgggatgactttgtaaacctgtccacacaaagtcaaattgtcccgtggttctaagcaaacctaccacgtagtccatagcaatatcttcccatttccactctggtatgttcagtggctacagtaaccctgcaggtttctaatgctcagccttaacttactgacaggtaagacatctagcaacatacttagcaatgttattcttcatgcctggccaccagaacatggcctttaggtcttgatacatttttgttgaccctggatgaactgaataaggagtcgtacgagactcatccattatctctcttttgataccatcatccataggcacacaaacacgatttctgaatcgcaacattcccgtttcatccattgaaaaatcactaatctttccagccgaaaccttatcttgggtttttaccgattctggatcttccatttgcacttctttaattcactctaaaagagtagattgtagagtaatattagctaactgccctacaaccaactcaatcatagctcggctcatctcatttactagttgctgggagatttgtttcatcgtatttatctaactctgtccctttctgctcaaggcatcagtaactacattggctttaccagggtgataaaggatctcacaatcataatccttgaccaactctagccagcgtctttttctcatattcagatcactctgggtaaagaagtatttcatactcttatgatcagtgtatatctcacatttctcgccatataggtaatgccgccaaatctttagcgcaaaaaccactgcttcgagttctagatcgtgagtagggtacctttgctcttactcctttaactgccaagaagcata

SEQ ID NO: 272616 - DNA, 1226 bp, Cannabis indica
aaaattaaaaaataaaaaaatacacttttgacggcgcatatgtcgctggcatagataaatttttaatttaattaatttttttattcccgttttgtcggcgactaaactcgccggcaaaaataaggcgccaaatgccctaatccccacgtcatcaaggacacatcaccccgcggacgtattgccggcgagtcccttataccggcaaacaaatgcgccggtgtaagtacctttgccggtgcaagtcattaagtcgccggcaaaaggtcattcgtcgacgagccattgtcggcagcttttgcctgtgacaaatggcgccggcaaaagtttgccagggagttacacttacttttgccggcgagcttaagcgctgtcaaaagtagcttttcttgtagtgttgttacagcagtaacaatgtttaagaaatacaatttagaactaaaaccaatcacaaaaccaaaatttgaacttaattgaaataagacaaaaaaaacttaactcaataatggatgaatagtggatctttattgaatactgaatctaaagtatgagcattggagattagagatcagaactctcgactcagaccgcctttttagaatagaggaacccctatatatagttgttggtgggttccctttaagtttgtattaaatacaactattatacatagcagcaacttttttcagattcatctgttgagcaaatagatagacatactaacttgagaggttaaaggagtttaatcccaacagtttgcgaccttgatgttggctctttgttgtcacctatataggtttgtataatatgttccatgagctttcgtagatggaaaaaaatatttcccacctatttataactatatgtcatttcaatcagaatatgatcaagtcttctcctaattgaacaaccacaaaaaaaaacacaaaaacaaaaacaaaaacaaaaacaaaacaaaaattaaagcaaatcttcttggctaaaatcttaaagttaatgttgcacaaccaacaacattacaatcccaattattggaatgtatgaagatggctacaccgactttgaagattagttaatcagttaattctattgtaatctactttatgttagttaaaaagttgttactaaccgattggttgatttcttatttctcttgtactctgcacctctattaatataaatattagaagttgtcctcacaattagttgagcagcataattcattctct

SEQ ID NO: 272617 - DNA, 622 bp, Cannabis indica
aaaatgactaagtttgaaaacaaactagcaaaatagaggtagtgtttgttttaacaaatactacttttctaagaaaaatgactaagtctaagtgactttttgtgttctatcatcttattctgtataagatggtcccactgcctctgttgtcttgacacaacagaagaagataattccacttatgttcttagacaaaaagtcacggtaccttgtcgtagtgggagggtttcaaggaactcaccctgttatgacttggaagacacttgtgatgaaaatccattgttagtttaaacaagtaatggattgtcagaataagaaactaagaagcaaagccaagagaactatggttaaaaccattcatatggaacaaccaaaagttttctattacaaggacaagaaaggaaatttcgttagtaagtctattcaatggacttaacaaaacttcctgttcctagtattaaaggtttgagtttatctaaacctatggcttgtggtatgcctggtaatttacttactctagtgcaagcaacttactttagtaagatgctgaagcattttctagtggctaaatctatagaagcttttgaaatctagatatagatttcatttatctaaggaaaag

SEQ ID NO: 272618 - DNA, 642 bp, Cannabis indica
atattggtttgaagaatgtaaatcgtataagcattgtgtagatagaaaatgaggtaaagtttccattgttgcaactgaaagcaacttacatatgttgtaaacaaagaaaccaaaactttaccaattgaaagaaaaatgatgggaggaggaaggaaaaggatgaagggcaacgatgattagaaatgatccaaaaaatccatggatgaggaggtggtattgtaaaaacaagagaagaaactgataaaaaatcagtacaaaactaaaactgccacatagcactttagtgggcagacactccttgtaataatttagttttgaagaaaaacttaaatttcagttacattatctttacattttcaaataattttatgctactgtaaatcacatgtattatgtataattacaacatgtaggtcttagctaatttaagctagcttaaatatagcttattgacactaaaaatacaaaatattaacccttaagaatagagactaatctttcaaaaaaaaaaaaagaatagagactaaaattttcataatttgttgttacatcaccatttatgtatgtatttgttgtttagacttttaaattgtaaaaaattagcatcaaattagtgtgaaatatactattaaattgtttaga

SEQ ID NO: 272619 - DNA, 1436 bp, Cannabis indica
agggttgaagatgtatcgtaccccagtgacctttattgcatgaaaaataatgtgcatgcaagagtcacattgaatttttatgaagcaagcttcagcttccgagaaggaaggctaaagttgcataaaaattcaagcttagacttcactcgaaaatatcaatggaaagtatcatggggagtaggacagacttcaagcagtccttccattcggggaaggagggctgaagatgcatcatacccctaatgatatttctttcacgaaaaataaagttcatgcgagagtcgcgttgaatttttataagggaagctgaagcttccaggacggaaggctgaagctgcatgaaaatacaagcttagacatcgctcgaaaagatcaatgggaaagcagtacggggaataggaaagacttcaagcagtccttccattctaggaaggagggttgaagacgtatcgtacccccagtgatctctcttgcactaaaaacaatgtgcataccagagtcatcttgaatttttatgatgcaagctccgacttctgggacggaaggctgaagctgcataaaaattcaagcttagacttcactcaaaaatatcaatgtgaaggcatcagggggaataggatagactccaagcattccttccattctgggaagaggacccttcatatccaccagtaaacggcaccgttttaaacgaactcatctactttaacaaactctacgattaccaaacccaagtggccactaagtggtcaaccttccggctacttgccccgagccacagcgaagtctacaccaccgacccgagaaacatcgagcatgttctcaaaaccaactttgataaatattcaaaaggtcaaaccaaccaactcatagtaaccgatctccttggccatggcatatttgcagttgatggagacaaatggaagcagcagaggaagcttgccagctttgagttttccacaagagttcttagagattttagctgctctgtttttagggaaaatgccaataaactcgtcggagccgtttccgggctttcgggtcgggttttcgatatgcaagtgagtagctagcatgaaatagtgagtcttatctggttaacatgtctaaattttgtttttggcagctactataattaggaccttgggttattattgatcgatgaaaccaatgaagtcttttaataattacacttggagtttctatttagctcatctagctctttaatatttattggctttgtcacccttataaaattgtatatacaagaaaattacatacatataacatataacaagacgagcaagaaaaaatcaaaattaaaatattaaaattttctttcatagtgccttcttataaaaaataatttaaaaaagtctttagtacgtcttggatctggagatgagttatgagttatgacaaactttctcttatat

SEQ ID NO: 272620 - DNA, 745 bp, Cannabis indica
cttaagattacaatagtgagaattagtaggcaaatctcaagtaagagagatgaaataaactttatctcttctacaaagcttggggcgtgtagaagagagggagagagagaattagagtttcagacttagagcttgagagcttagggagcttgagacttagagaaattagggttagttaatgctctttatataggagagcttacaagagaataataacctaatatccctaaaaaataagaactataaagtatttgttacataataaaataataaataataaataggttaattataccccaaaaaaatttaaatagttgatatttctcccctatttttatgggttgttgaagcccaattcacaactaggattgttgtcccagatgaatgctacacaccaagtgcctgctagggtgcaagttgactagccaagtgcctgctagggtacaagctggccgacctttcttttgctcgaggctggctggcctatgctggccatagggccagctaggggggtccagttagacccctgaaggttgccagtttgttgtctctccatcttgcttaagtatttgggcttccaaacaactgatgtattgtgtagatgacttcgccttcttattgacaagttttactctacgtgacactggtcttgcccacatggacatgccatgtaatgtgggtaaaacttaggataacattgtcccctaagtccctactgcggacttctgtatggattgagactttt

SEQ ID NO: 272621 - DNA, 2047 bp, Cannabis indica
tacaaaaccatttataagttttttgtgagaaaattcaaaaaaatgacacggttaaaaggataagaactcggaaaagaaacaatacccagtccaagatcaacaagatatagtttcttctcatcaactgttccaggttgaccaagtaaaaaattctcgggctttacatctccatgcacaaacctatttagaattagaaaatttgaaaataatcaacaatgcaattgttggaaggatattacaattgaagtgtttctagaaacatggtgaaaaatgtgaatttatgaagaacttaccctttcaagtgaagcttctcaagaattgatattgcttcaacagcaatgcaagccgccatatttggtgacatcctagtttagaaattaacaagtttagatcaactattacttataaaaaaatattcctagatatgcatatactgtgtgagtatgatagaatgaaacatcatgatacaatagagagatcttagtatcttacgactgtccgagagaattccaaacatcccaaagactgggtccaagcatatccatgacctgaaatatccagagtatgttatacaccaaatatatgattcagaaaatattctaataagtgtatcaatatcaaacctcaccagaatatagaaatctccttggcgacccttgtaatgaacccatggaattccataacatccatttagagtactaaaagaacataaaataaaatcaattagataatatgtttacgaaaatcagacaactatcatattcgattatgaaagtagacagcaataacaatgtacttacttgtacactgtccattcataaggggggccataattgcatcccttactatttcggtgctcaaacttcaaggccacctacaaaaaaaattgtacaaacttcaggcatcttgtgattagctatctgaaacattaaaacaagattatcgtctacattcatacctcaactgcatcagctcccgttctaccactgcccccactaacccttcgaccaacatagacttgaccaaaaccacccttgcccaacttcctttctgtcttatacacaggagaatttcccacctgtacctgcaacccacaacagaaagataagacaatattttcgtcataatagtagttagatacgagtaacttcacagccagtctatgtaaaatgagaatgtatctagtatatccaagccacttcattcgtactgaatggataaatagagttgaaatgcagtgtcaagtaagagaaagtcctactcattttttcaatgatatggtaccacaaataatgccaatctacatcaatttagaagcaaaaatagtttaatgcataattaagcaaacagttagtaccctatccgggacaggagttgtgcttgcttcttcttcaactcccattactttgtcagcacttctaccacccacaatttcgatatctttgtcttctacaacgtctacacaattgtaacccggtgctttaggaacaaccacagaaggttttggttctaaatcaatcaacttagttccacggcctcgtccaactgcagtctgttttgtcagtatcgccggtgactgccctttcgcaactgccttaccacctcttcctcttccacctccaactctcctcctagttttattctgagcaggaagttcccagttttcagccagatcaatttgttgcggggaaggctgaagatcaccaattcgtttcgatctccgcactccagtttgcaactctggcatcctcaacccatgcaaatcacatccacttaaaacatcccaaatcccttaaaaaatgttctgcatctcaaaatacccaaaatgaaaaaaaaaacaaagctcatcaaaaccctagcttgttattcttcacatacaaagtcctaatataaaatagccaaagtatacacttatgactgatacccatgcccagctattcaacatagtatcaaggagttaccaatacagaaaatacaaatatcaacacaaccagtttcatttccttccctaaaacaaagcttcccaaacacccaaaacaaaataaaa

SEQ ID NO: 272622 - DNA, 3900 bp, Cannabis indica
gccaacaagaccggcaaagaacattgcaccaatggaatggtctcaggcacctggttacacataggacaagcttggtctagaggaatatgtttggtggtaagttgaaccttagtagccaaacaaccagataaagcacgccacatgagttggtgcactttgggagggacttgaagcttccatgcaattttccatatcttaatctcagactcactagtattagtgatctctgaatggtgcagcaaccgatatgcctccctcacagtatagaatccataaagatccttattccaataccaagtatcaataggagtctcttgatcaatgttagttcgaatgatgatctctttatctcggtcattgaatatatctgaaacacagtaagaccttgattaagctagctagtatcaataggagtctccttatgaagatattttttaaaataaagtcatatataaatatttatttctatacaatcagtggtcagatccgacaaaacacagtaagaccttgattaagctagctagtatcagttagcaagttgcacaaatgcaaatcttgatcagtttttcatgaatagtttaatcaaattacagactaattaagcataaggctatagcctataggggtatatattaaatatattaatttgttctttgttcttggcagcctggaatttcattgatcattgcatgtgggttatacacttatcaaccgatatattatcaaacagtacatgttaaccacaaaataccaacaaataataataataatatacatctacaacactacaatacattattgttttgttgaaagtgctccatatggtaggtcctatcatcatcatatacattgatcaaatataattattctggttttgtactatttattccctaaattattttctcggtcccattctttaagtatggagtattgttcttaagtatagctggttataatatgctagtaagtacacatatacacttcgatatatgtatagattattagttgattttatttgttatataaaccccaaatgagcaccaaatatatgttatgttgcatatactttaaattaattcactaccaatatataacccttccatatctgtaatctcaattgtgtcattatgtattaaaataaattaatagagtgacaaaatgaaatcaaccacttaattaattaaattatatatgtacatgagtgtacagtatctgatcagcttggctatcattttctatacagatatacaaaaaatatgtatatgtataatatatacatactctttcagatctcttcggtcgtacatcgcatcatctcatttattataattggatcaaacgtccctattcttctttgttttgacgatttattgccattttttaattctcacttttaattgccttctttttttgaaatggcacgtacgtactactactgcctcactcttttttatgtatattactctacagatcttgacataatgatacacatcacgacaaaaaaaattggtgtatttagatggtgtttactttgttttttaactattttttaatcatattaatattaatgaaggtagatttttttaaaaaaaacattgtttttgaaaaataagctacttttgtttcttaattttaagaacaaattttattttttatttttgtttattatttttatttaactcatgtctggggttgggtttagggtctgggttgagaaccaagtttgggtcccgagtccggggctggggttatggttcgagtcagagtctaagtcttgaattcgggtccttttttcataaggaatgtctaagtgaaattttcaataattaattacttttgtagacaaaatatacaacaaccctgcgttcataaacacattaagaaaaatgcaacccctaattagaccatacataatatgaataatttgattaagatagacttgttaatttctttagagaatcaaattctagagccctgatgttttagagtcttttatgttaatttagtttggttttacacttgttttcgtttattttaggaatatatgataaaaaatggaaaacaagttaaatttgtagaaaagcaggaaaaagaatagagcaagaagccctaggggttgcagctctaccatagggagttccagctcctgaagcttttttttttcttaaaaaagatagggcgacaaagatagatttttaagaggagccacggcttcggtaccccgagctgcgacttttaagtaattttttaaaaaaaattaaagatttttagtattttctagagaacatttttagcatatataaacatgttaattttagtatatttagtacgctttgaaagctctaaactcagaaactcatttatagcaactacttagtaatttttatcatcattttttttcttcttctttaattttgtttatattcttattttgaataatgaatgcaatcattatgaacatgattttcatgtactaattttcttatcttggggtcaacgataataatttcattttctattttattttgctttaatgttttattaattctttttctctttattgtaatttatatgatttatgcttaatacttgtgaataacttatcactatttgtatgttttatgattccaattcaagattcgagagatgaaaattgaatatgctatagctatatagacatagattacatattagacgatagtaccagtatgacttgtgtagaaaatagaatttccattcttatatcttttaaatgttgaaatttatcaaggatacgtaaaaaatttgcacagagattgagattttatatctcgagaaaatcgagaaagaataagattcattttagttaactcactattaaaatagaaagaggaaatgatgaatgaattagtaaaataaatagactgtaaagttgatgaaattaatagcctaggctccattatttgatattcttaatcattgtttgcttattttaatttcataattaaattattttcatagatttaataacattccttcaatttttacttgctaaatagaaaatggaaaaataattattggtacttggtaatagtcttcttaggatgattctcgtgcttaggcactttattacttaaaacgatacgtacacttgcgtaataaattttactattaagtttttggtgccgttgtcggagactaaatattaaaacaatatcaaaattagttatttttcattcaacttttgttttttctaacatgttctaatttggtttgcttcttattttcttaattttcaagattaataaagtttacgtgacgataaggttttgagtcactagtgcctgttcatcttaaaattgaaaaaacttgtaggcaaaatcgaaaacaaaagcgattggagagaatgaccgctcatagagataatggccttcataataacaacaacaatggggctaatcaacctaatttagccaatgtcgctaatgctggaaacacagctcaggctaacattcctttaagagattacgtactcctagttagggttgttcatcaaatagcctacactgcacaaaacgcccacaccgcacaaataatatgatttgaacttctttgtggtacaattttggtttgtatttttgtcaaatcgtgcggtgcagtgtggtttacggatctgaatataataattatggtccaaattgcatcacactatatattacaaaattttcaaattttatattatatttttatcttattttttttcatatatgaacaaatgtatgtaatatatgtgtatattacataattttgtagggataattcaatataatgacttgatgattagtatatatgctgagatgttaaactttaataagatttttttcaatgtattgttaaaactttatgagattaatttatgaa

SEQ ID NO: 272623 - DNA, 1123 bp, Cannabis indica
gccgatggtaagtcaacaactaaaaaatcttgcattatggtagtgaataaaggcgtctcgcctacagttaatgggagttcaattattccttgactggcgacaccatcgcctataaatccacatagattcaccatgcaaggttttaacttcgcactttccagtcccattttcttcagtgtttccttgtaaaggatattcactgaacttctattatccaccaacaccctttttatccttttgttggcaagctggattgtaatcacgagtgggttgacatgtgggtacctcaagtgttttgtgtcttcccctaaaaacacaatcgggggttctttagttttggctttcttagacgatcctgcagcaaaggctgactgctcgttcttaacttccttgacatatctcttttgggcattgttactttctccaacgagatgtggccctctcgagataacaaaaatgtcctctccttcaacaagaggaggttgtaatctttggttgcctgagttattgggcgaatttggctggttttgtccattgccttgtcacttcacatactattgaaatgtaaccacgtgagataagactctctatctcgtctttcaattaacaacattcatctgtcgtatgcctgatgtccttgtgaaatctatagaattctgttgcatcctgtttgtgccttgcatgtctcatgggctttggcttgcgaaatgcaaccctgtgctcatgtgcgagaaagatattttctcgagtttcattaagctcagtataaatagtgtaaattggcgcgtagttatcgtgttttttctatttttttcttctctttggttgattccttgaagtcatcttttctcttcgtgctagagcctcctcgattttcagccttcgtcgagacggtgcttgcttggtcagtgctgtgtttacttcttgagccagtctttatcaatttcatctcgttccttgcttcttcttttcgcacgaacacctgagctctttcattgaattcactgatgttttttagggcaaccctgtaagtcatcccacagcttgcatccaactgtcgagagatcagtcataatccttgcttgaagagcagtaagcattatactgtcgttcaagtttctaa

SEQ ID NO: 272624 - DNA, 1625 bp, Cannabis indica
cattaggtatttttgccttcaaaagtaaacattaggtatttataccgcaatttaccctaatatttataaggatgatttttgctccttgaactttgacatgtactaaatcatgccccttgaactattgaaattattagatttaaggacttttgtctaatttcattcaattttactatttcagtgattatttatgtactaaaccatgctccccatactaccaaattatactcctcgaactttgacatgtactaaattatggcccctaaattttcatccatgttaaacttttttactaaaattggaacaaaatccttaaatccaacaatctcaatagttcagggaacattataacgaccttaaaagttcaagggacatgatttggtacatgtcaaagttcagaggataaaaatcctaattagcttttttataaaagtaaaataagtgaaactcgatattaaattgcagtaataataatattatacttcaaaaagatgtcagacatcataggtaacttttagcatttcttttttcatttgtacattttaaaatatttttttatttatacgaaaatatacagagcaacttaaatcataacctataaatttatatcacaatccacaaaacaattactgaagcaacccaaactataaaaacaaataaaaaagttaaaaaatagtatacggaaataattttgaaatgtataaataagaaaattcttaaagaaaaattatcacatataccacttttctttttttatttatttagccagtttagattgctttgtttgttccgttattgctggtaagttgcaatataaatttgaatagcaattttaattgctccatgtatttacatatatataaatgcaaaaaaaaaatctactttaaaatacataaatgaaaagatacaatacaacaagttattttgggtatacatttatagtgtgttaaaagatttttgacatttattttatcattacttttttatttatttaaacttctataaaaaatttaataaataataaaattttaaaaaagtgaggtttttgataatttattttaaagaaattaacctatagtgtaatataaaagtataatgtaaaatagaattttagtaatatattttataaaatagagttgagaaattattgtgagtacttgttaaacaaagaaagaaagaaatagacagagcactttaaaactgcaaattaaaagctttggttagttggttatcatttgaaaacaaacaaaaacaaacagtgagtagtgttagcattattatataaatttgtattgcgtttggtccaaacacattagtcgttcctctttgatattatcaacatgatgatgggaataataactcggcagggagggacccatatgatcccagccgttgaatgagagctatcattttctttcacatgctagctaacatattatgatgataataatgtggccctcagtttgttaggaaacacaataatttcacaaattaaaaccagtgaaacataatcacgtatcataatattattacccatcaattacttaataattaatttattcaactgcggcaactgggtccatacaaataatttacatcccataccctctctctctctctctctc

SEQ ID NO: 272625 - DNA, 547 bp, Cannabis indica
attatttttttttttttcgattgtagtaatgctcaaaatgtttattataataataaaactctttaaatgtaacaatcagaaaatagttttataatagttttattataataaaatgtcatgtattaataagttaatatagttttaattattcaaataaaaattaaaataaataattataagaaaatagcttttatatgaaaaataattaaatgattttattaataattattttaaacttgataaatattgaaaatacaaaaatatattttacatttactttaaaaaaaattacaacgaattgggcaagattaagtttattaatcacccatataagaaaataaattatactaactttgggacaatcaaaagcaaaagaatagtgatctatataatgtaaaagtgtagcacccaaaataatttttaaactatgtgggactttcttaatatgactctcatattaccaaaagcataaaaaaatgtgaaaaaaaaagtgaaaaataaagaaaaaaaaaaaaaaagaaaagcaaagaaaattcacataagatgc

SEQ ID NO: 272626 - DNA, 537 bp, Cannabis indica
acactacaatggttgttcaacaaaaggaatagatttttacatgtcaaaaacaaaaacttatcttatctcttacattcagacatagaaaataataagaaaacacacattttgttgattttaaatcaagtggaggcattgataaaaagtgattgtaaatctaaagaaaaattacttatatttagtaataacattttacaattgttttaaaattgtaaacaggctgtttaattttattactttttaaacatgttgcttttacattatttgaatgttaaatttcagtggttaaaattaatagattccttaaattatttatacaattatttttatatttttatatctttgataaatagttattaacagtgaaaaaaacctattaacaactattgtactttttactaaaaaaaaaaacgaaaataatatacccatacttgatgtaaaattaacagaataataatagttgtttttcactatactaaaagacataaacaaattaaataaaattataatgtttaatattccatgcaagatacatgt

SEQ ID NO: 272627 - DNA, 2490 bp, Cannabis indica
acattcctcattaatcgaacccccactcccattctaataaattaatcaccttatgaacttatgttaaaaaaggaacctgactataactctttacgtaactttagatgtttagtctttgcctttacccttacagcacatagaaataagtttgctccacgagttagaacctgtgtgtttatgggttaccctcaaggggtgaaggactacaaactttatgatcttaactcaaaataattttttctaggaatgttatttttcatgaatgtatctatcctttccataaattgaatgaagttgtcacttaaattaatccttttgcagagctagttttaccttctttaggtgtaactaatactctaattcatgactatcctgcttaaaatactaaaattgcaggatcaagacaaactttcactacacaagacaacaatgcctgcactccatcagctactaatataccatcatctccacctatggagcaaccagtagctcttagaagaataaagcatcaaacaatcgagttacctaaaaaattttgaatgctactctaccatacaagattaatttttactcctcagaaacttgataaatttcttgcttatactcgattaactaattcttacaaagcttttatccttgcagctacttcacacaaagaaccccaaacctacaaacaagccatgcaataccagcaatggttggatgccatggatatagaacttactgctctttgcaacaagaaaatatggtatggtgtacctcttccaccaggaaagagagcaatcggttgtcgttgggtttacaaaattaagttcaacagtgatggttccatcaaaagacacaaatcacaccttgtatctcaaggatatactcaataagaaggatttaacttctttgacactttctctcttgtggctaaaatggtcaggtttaaattattacttgccatctctactattaaatagtggcacatgttacaaattgacataaacaacactttcttaaatggtgaccttattgaaaaggtgtacatgcaattaccaccgggactaacaccaccccccttcttttttgtagatttcaaccttgtgtgtagactccacaaattaatatatggtcttcgccaatcctcacgtcaatggtacaaaaagctatttgacgccttaatttaagaaggcttcaaacaatctcaggcaaattacaatttgttcacatgaggctcggatgatcaattcatttcactacttgtttatgttgacaatatcgtgctcattggaccaaaccttaatgctctccaacatgtccaatcttctttactccaaaagttcaagctcaaggcccttggacctcttcgttactttttgggctttgaaattgctagaagcaaagatggtctctttctctcccaatgcaagtataatgtccaacttctcgaagatgtcggctatgcaggatgcaaacctgctaaaactcccatggatccttgaaccaagctcgatgaccagcaaggagaacctttaactaatccgtctacctattgacaactcattgaaaaacttctatatttgacattgtcacggcttggcatcacatttgcagtggactgtctcagccaattcgtgtctaaccctcaaaatacacacttacaggctcttcaaccacttgcttcgttacctcaaagacaatccaggacaaggtctcctctattcactaagttcatctctgcacctaaaaggcttttctaattcagattgggcctcttttccaatcactcgacgctccataactggtttcttcatattcatcggagattgcctcatctcacggaagaccaaaaaataacctactatttccaaaagttctgctaaaacagaatacagagctcttgctgccaccactagcgagataacttggcttcaatatctcttctcagacctccatttacatcaaccaacaccggcattcatataatgtgacaatcaatctgcaaaacacattgccaataatctaacatttcataaacgaacgaaacacatcgaactcgactgtcacttcattcgtgacaaaatcaacaactccaccattcgacttatactttgtccccagcaacttacaacttgctgatgtgtttaccaaaccattaccttcaacaacactttcttctcacgtgactaagatgtttgtatacgatttatacagtccaccttgagtggggggattacaagaattggttctattatttcggttattatttgtctctactgtcaggagttagttagttgtgatcatgtttgttttgtctcgtttttattcttgttattaactaattagttaattaagtcagtttaattggttttggatcacaacctatatatatatataattggttatactctgtaatttattcattcgattactcaataaaatatttctctcattttcatttctaagccgcaatacatattattttttattttattttattttatt

SEQ ID NO: 272628 - DNA, 1202 bp, Cannabis indica
agggttcccaaaattgctccaaccggaagatcggttccccgtccggaagaccagttctgtggggttttctgggaaccaactggaattccagtgcaagaaacttcaaaaataccacaaacacctcaaatcgatcccaaatgaccaccaaaccttccagacctcctaattatatcacaataaatagaattcatgcaaaagaaccaaccaataacccctgaagcaaaaactaccattagagagcaaagcttgagttcataaacttaaaccttgctcaatcaccacaacaaccaacaaatccaacataaaagagcttaaataacctcaacataacatcaaaacacaaaatcaaacatcattaaacaacagagaatccctaactctaaaatcatgcataaatacttaactaaaacttaagaaatcacaaatagagaggctagaaagttttaccttggattaaaatcagtaacaccttgccaaaacactaaattgaagcttgaaaaccctaactctacccatctttgaatatttttttaccactggtcacaatgaattcgtactactaacacatgaacaaattagactagcccaaaacacgacacgttaaaaaatcctataatatgataataatataataaatatgtatttatcaattataaatgaattaatttgataataaaactcaaatataactagggctgagcataaaatccagaaaaccgaaaaaaccgttcaaaccgacctaccgaacaccgctagaaccgaaaccgacggaaccgaaaactgaaaaaactgccaacggtttaaaccgccaatactcggtcagtttttttttggaccgtaaaccgaccaataaaaccgaaaccgaccgaactaacttatacatatataatttttttaattttttatatgtattattatattgtataatgataatatataatatattattattttattaatattaaaattaaaagaattaactttattaatgaatgtttgacttgactctctctctccaattccaaactcactctttctttctttatctctcgtgacccagagtcacattctctttctctatctcttctcttcttctcattttctttctgttactgggagtagagtctaaggcttcaaacagtcaaagccccataatattgctccgacccccaaactcaaaatccccaatctcaaataaaaat

SEQ ID NO: 272629 - DNA, 4423 bp, Cannabis indica
tttgtaatgtaatttcctcgaagagttatggcttggttctcggcttgggctttaactgggcctaaacaatccttgtccgcccactctaatgggccatacctctgttggcctctagagttgccatagggcacaattgtttccttaccggaattttcataacaaattttaagttataagattgcaaaaatatagtttttttctagaatagtattaggtaactagttaccgttttccatagtttttcttgaatctttgtcatatttttttttctgaaaaatgaaaaaagcaatgtttttacacaaatagtataaaaacccattaaaattgtaatttcatcttttgttattactatttaatttttagaggtgttaatactacattttcatgcaattatgtgtgtaagaagaggtaacataagtaagtgtatgaatatgattatcagaagggagggtacgtacatttggttgagtataattgaataaaaagtagttgaagaaccaaaaataaaataattgcgtttgttgaaccactcaaaccaaatgtgcctctactcttattattattacaaaatccaatatatataaataattaaatcgtctttctctttcactaattaagatgtattattaagaccaagacaaaatcataaccacttgtcacgctcccaagtgtcctataataacttataactataatctctctctttgtttttcattattctaattagtaattacaatctctctttcttaatcttctaatgtcagcttttttctaaagttatgtttcaattattttaatttcattatttggttttgttctaactttcataacaaattttgggtgtaaactatctccttctctcgtttggtgttgtgtttatttaattatgactttacaaagactgttttaaaataataatattacaaaaaaaatatattttgaaactcaatatggatagtaaatacatatttttattttgctaaaaatatcatgtataaatatatttaatgcacatataaaggacccttcttaaaaataggtaggtgtatcgaaacatatgtttcatatgtaaatccatgtttggtatcattttaaggtaatctcatttcttcaattaaaactcaccaaatcaagtttttataccaaatattctcttaatgataatatttacatgacttaatgcagcgtaattatttaaaatattttacaaatttttgtaaaatttcaaataatttagagtaaaaaataaaattacttataaataataataataataataataataataataataataataataataataataataaaaaaagcacatgcaacataaccttatttttagtattctatatctatattgttttgaatttttcaaatttcttagaattcgaaatatgtacgatgtagtatactatgatagaaacaaaataaagttacaataaccatgtagtattcaaacattttttaataaaagttaaagtatctctaatattattaattacatacattatcatcgtaaattcaaaatttaaaatgagggacgtcatttttttttaccaagaggggcaaatgtaaactatttttttagataaaagaaaatgctattataggatttgaatccttcacctgtgtataaaatatagcatacccattatactaaaattaacattatgcctataaatatatttattacaaatatatattacaattaaatgtatatacatctttttctcaattttttttaagaaataattgctatgtgagtctatccatatattatcctaatagaatttacgtcgaccgaaaaaaataaaaaacaaaacaattcccaatatcatgctgttgttttttggcaccccatttaccaagttaaaattaattaaacaaagtcataaattttatatgatatgataaaatatttgatatcatattataatggtaagttttacttatgatagaagaaataatattttaatataaggttttatctaaatgatgaggtttttccttaatcccaaatttctttctctccagtccttttctaatcacgttcacgccaaaccttgtctctctcattcatttgagtcgcatcacagttacgataagtacgcatctacgtgatcacaccccacgcaacggccggccaaactttcactcctattcacgcgctgtaaatgcgcgcgtgttgacactttcttcttgttaccacagatctccggaaaaaagcacgagccgaaaaggatttttcacgccaagttgccaaattgaccggttactttcacacgtggcggaaaatcattggttggtggtaaattttgcaggtgaaactgaaatacagagaatcattgtataaaatgaggatgagaccccacttatcaccaccaataattgatcattcttctaatccttcctgtattcaagctggcaccgccactactgtctccttcttcttcttcttcagaaaaaatttctaaaaccctaatctcgattcagtaatcgagctctgtaaatagctataatagtcttgaatatatggtttggaatcttataataatcgaaagatctattcttttctccgcattgttttagtttctttaccaaaaaaaaattaaggggaaatggctttgttacctcttctatggttcttactcgcttcgttaatcagctgtacgaattctcgacagctgaagaaggaagagacgatatatgaggtgttgaaggctcatgggcttccgatggggttgttgcctaaaggtgtgagggaatttgatattgatgagaatggtcgattccaagcttacttggatcaagcttgtaatgctaaattcgagagtgaattacattacgataggaatgtttcggggactctgagttatggtcagatcgggggtttgtctggaatttcggcacaagagctttttctttggtttccggtgaagggtattcgtgtagatgtacctagctccggtcttatttattttgatgttggtgttgtctttaaacaattctctttgtcacttttcgagactccaccggattgtgtggcggttcgaactgaggaggagcagagtaatagcaatgctcctgtagctgagactgtattcaaggttcattcaatctcattcctttcatgatttttatatatcgtattttagaaaattaaaaaatttgaattttgattaatccccatttgttataatacacagagtaatttcgggaaacttcgatatcaacttgagcaggaaattttgggaagagatgatatgtagtatcagtgataaaaaggaagagagaaagagagaaaaaataaaataaaaaaaaggtaactttttgttctaagttggcctgtagctcaatcagcatatgggttttctactcaaccttgtaaatttttcagtcagatatggggtctactcaacagactttcagtgtgtttgcgttttcttttttcttttttctttttttgtttccatatagctgcagagttcacaaactatagtcttttccagctcatgtcgaggttgactattgaggggagggtggtcaacgaataattcattggagaggaaattggattaggggcggcgattgtttcttacatacataagaagattcaagtgaaacaggatcattctctttcgggttggtgtcgaggcgaattcaggtgacgattctgcaggtttacattgttagtagtttattgttataataaacatctttgtgggtggatgattatgttgagtaccgtttttgtagtaagtttttttttttattattttatttttagattcatggagaacttggacacagtttattattatacaaaagattcaacaataaaacatttctgtgcttctactttttggttccaataatgttgttcctttccttctaattctaactttctcacctttgttggttttgcttcttttctttgcttttttacttcttgtgtttttcacatggaattgactgaccagatgagaggaccagaccaatgaatgtgattactactactaaccaaaatttactcttctgattgagtacgtactaatttggcaatggggacttatatttacattgttatgctcaggtgtaaaccttgaagaactctatttccattgtcagagaagtgatgcttaggagtctaaaattctgcaaaagggatttttgatctagaggtccttttctctaaggccaaatttttttgtttcctttcttctttcctaatccattacaattattattttttacattattaacttttggtttggctaggtagaagctctaacactcccatttgcgtatcctaactggttagtgatcacatgcttgattttcttgtttaggtattcttttcaaaacttctttaggtccttttttttccctttctttctctaaatggtctctctttttt

SEQ ID NO: 272630 - DNA, 1471 bp, Cannabis indica
atcttgtccactctagaaggagtcttcaggaaagttattcctcatccgaaagcactttaactcaagttgacgcggccatattgttacaaggagtttgttaagtttattaagtcgtacaaacttaacaacttggcatttgcagtcaccgaccttgagatccatatccctaacctataaataccaccatcgctatcattttgaagtgtgtgactttggaagagtttcaagaggtgacttcgtagttgaagattgagagagaaagtgattgagaggtagaaagagattgggtttgagatttgtatatgaagaatcttctgtagatgaattgaagatttttgggtaagagtgtgagagataaacactttaaagagaatccaacaaagaattgttctcgactgtaatgtatcctgttcttgttcaatcaataaagaagatttcggtaatattttaaaattgaaatagagtcataaatcacatcgatctagagaatttgaatcggtatatatcttagtgttaattttattattttattgttttatttttttctggtttgttagctcccttcatctctaattttatctctaattttattttttttaatctttattgttaattatttattaatgaagttataattaatttgattctgcagattaattgtaatttttccacattgattatagattggatgaattaatgaaaaagtacgtacacattaatatatataacttcacgtacgtatatacaataatattatattttggtaaacagaaattcaatatatatacacccattaatttgtttatatacaacacacaatattatataaattattacgaacaaataatatttattcaaccaaatacatcattcacacacacatatatatcaatatataattctccagaaacctatagcgcctatatagccccaacagaagaaacaactctaagaaagtccttatctgcttcaagcttagtcatgtgttccttcttcaaagcaatatatgcttcaattccatcaccagatttactatccataaaagctacgaaattagtaaaacacagatttgctgagctgacccatattggtttgccccaaccaaaatcagtatcataaataggaaacctacacaaactagagaagcataacgaaatatggactgtcctcctctttcagtaatacctctactatagctcattattagatccaagaattcatcttctccttttttcaccttctccaaatactcaacatccaattttcttataccttctcttattagcttagtcacttcataaccgtactcttcaccggttttcaatactaccactccaacacgactaatatttccaaaggaatgttcgggtagctgtggctcgagcctcgtacggatatttgcagcatgaatcagtgtgtaacccttctctgtttcctccaataactcgtctttgattgcagccacgtaacg

SEQ ID NO: 272631 - DNA, 700 bp, Cannabis indica
gaaaaataaaaccaaacaaattacttacacacgattaatatagatcaaaccaacaaaacacacaaatttctttgttttaatatatttaatcacacaaaatatagtatttatccaattatcaaaacttgtaatagtagtagtacgattataattcaaaatcatacataaaaatgactttattttcttttttatccaaatataccttctatttatttttctttaattctttaagctaaaagataacttatagaaattcaaccaatcataattaaaagagctatctcatgcttcattaataatttagtatttaactgccaattaattaaggtcaacttgtccaataaactttttttaagaagtgttataaatcactttaagaattcatgatgtaggcatcaacgaacgtcaaatgataaccatttgtctagccaaaagacatgcttagccaaataagttgctcaaaaaatttgaacaatataaactagacaacaaaaaacccaccaagattctacacaatttccaaaaacaaaatacctacaaattttaaaattttaagatttataaacattatttaggggaaatttcaattggtcaacaagagggccatggtattggaaaaataggaaaggcccattaaacgaacacaagaaacatctacgaaagattaggaatatataataagagagtttaaggatatatc

SEQ ID NO: 272632 - DNA, 988 bp, Cannabis indica
taaaattcaagtcgaaatatattttatctaatgcacctgaggaagacttcttaaaattatatttattcaatcaaagtgggggaatgttatattttgatataatattttgattgattaaataaatgttacaagtgtgtcacacattttaatctagtggggattgttatattattttataatataataagtatagattaaaatgtgataaatgtatattttattatgtgaataatatagattaagtgtatggtaaataaatgtgtaacatatgattttataacttacacttttgtaacttacatgttgtaacttggagaggagttacatttgttgtcatttgtaactcttgtgttgatcacacattattagtgtaataaaagggttgttacacaatttggtttaagaaattcaaaattatgatgatattcttattataaaatggattaatactcatttatgggagagaaatgagatggtattttgaatcctgagagtgatcacttaaacactaaataaagaagtctaatgtgctcattgagatgagaaattttctatcaataaagcagtttgttagaaaatcctaaaaggcttgataatgcccaaagttatttcctagagagtttccttaatacttagaaataggagaaataagtcgttggacaaaggtgtaatacattgttcaagtcatgatgatctctactattctacactcaatgttgtgagtaagtgcagtggcggacccagaatttaaagtgagggggggcgtaaataaatttaaaaagaaaatataaagtgtagttagtggagtttgaacctttaccttctaacttatttaccaactaccttaaccattacaccaaggttactattatgtttataaatatcatcttttaatacaaatatatgttgtaactaattaaaatacatatacatttttttctcgatttttttttttcaggggggggcgactgccccccctcgctacaat

SEQ ID NO: 272633 - DNA, 875 bp, Cannabis indica
ctgagttcgagtttgggtttttattcgggtcggggttcgtgtcgtggtctgagtttggcttcgggtccgattttagtctaggtccaaatcaggctcctggtgtgggttcgcgtcctggttcttggtctaggttgggtccaagtccaaagttccaatcccgatctgagtcaagattcagttctgtgtctaagtccttggttctgatccttgtctgggttcgagtttgggtccgggtctagctttgggtctgattctaggtgtgggtgtttaagttcgggtccgagtctgtgttcgagtttgtgtccaggtctggactccgatcatagtgtaggttcgggtcttggtccaagttcggctcacgagtcgggtcaaagtttgagtctgggtcaggatctccgtcgagatctaggtccagcattttgatcccagtctgggtccttgtcctagtccatgttcgtatccagatccctatccaggtccaagtccgtgtttgggatcgggtcctagattttggtccaggtccgggtctcagtttcagttttggtacacgaccgtgtccgggaccgagttctagtctcagttttggtctgaggctaggtttgtgttcggttctaggtctgggtctgggtccaggtcacggtcttagtctttttctggggtcctggttcagcgattcttgttcatgttctaattttgggtcccaagtctaggtctgggttcgggtttggttcttcgtctgggttctagtcctagtctgagtccaagatctagacacctactactagtctgttgcaggccttcgttaaccgaatctcgagtcaagatatggatcacagtcacggttctcggtctggttctggttcaggtcccaggtc

SEQ ID NO: 272634 - DNA, 680 bp, Cannabis indica
aataacattttatgttgcatggttcacatgatttatttcatgattatctatataatgtatgaattctatttaagtccagaacatatgaatttgttcaagattatagttgtgtctaagatttagagttatttttatatctttaagcttgaattttaagttgaattgtggagcaattagtgtctatattatgtaattgtgtttagtttgttgtgtctttgtaataaatggaagtgtgtgtgttagtaagtgttaaatagacttatgtttttgtttttatgtgtattaagcagaaaaaagtgcaagaataggtatttggaaatatttgggacaaggagaaaaatgagcagaaaaatgcctattgctgactggcattgctatagcaatcatcgcgtagcaattgccagcccagtaagtatattttggctgaaagtccagctggctttaatgaagaaagaaaggagctgaggtggcaaaatttgactaatgactcaacaaatatgtggaaaatgaaggacaagtggacaatgacttggatttccaattagggtaaactttagtaccctaatttgggggcaaaagaaaggaaggacatagaataagatatggtggctgcactttgaatggagtagtacgaaaaaatcacagcagaaaatagaaaagtacagagaaaagaaaggaaa

SEQ ID NO: 272635 - DNA, 515 bp, Cannabis indica
tcaaaaatggatgttatcatactcatccactgctccgccttgagtggatcagcaccaccctcaaacattgacgtttgcttcttgaaccgctcatacaacggttccaaacgattacctacatccggtggcactagcagaggtggcggaggatcaggattagggtttagagcaggctgagctcgctgctctctcagttctcagatttgttcaccctgcagctggatagtctctttcatcgtggcatataactcttcccagtttggtggtgatcaagggttctcactctcaccagcaaccctgagcccaactagctcgcggttacctttaccactcctcctcgggtgcataatctatacacctgcagtcacattccaggtaataacaatactaataagtatttcaatatattatagtgcttctcgtacattaccaatattaacacaattcagataatcaaacaatcagataattaacaaattatgtattaattaaaaacttactaaaccatgagtcga

SEQ ID NO: 272636 - DNA, 622 bp, Cannabis indica
ctctcacaatagttttcttccaaagactattaatctccccgaattgttgaagtgtcaatctcactaactgagttatttttccaccggtgtcaacttcacctcaaccaatagttttttaaaggactatcaatctctttgaatttttgaagtgacaatctcactcttagattgttgtagtggtaatctcactcttctcaggttgtttacaaagttagtgtcaacctcacctacaaccgagttatttttctactggtgccaacctcacctctcaatataatggatatatcattttgaaatacaaagcaaactctctctaataagatgaaatacaatatgaaatcctagagagaattgcaagcacaaaagagaagataagaacaagtttggctcaactgtgtatggttggattgttatgggaagatgataaacctttagcttaaaacacttagaatgattttatatgatgaataaatgctcagctaaggctatacaaaaatttttgtaaaccgcccaaaccaaacaaaatcgataaaaaatacaaactgacataactcgacaaaattctaaaccgcccaatcagttaattgggcgggttgaaaattgacccaaaccgcccaattaa

SEQ ID NO: 272637 - DNA, 525 bp, Cannabis indica
caattggggatcacctgacaccacacaatgtatgaggtgcaaggccacctcatgcacctgcgacgtgcagcatgaaagtgacacattatccccttgggaccaccttgtacttcaggccattacaacctataaatacctctttttctcagatatgagaagggattggaagatcattttgtgtaactcagacattgaatgcaatagagagaaaacttttagatatcttttcatcttcatattcatcttaatcgtcatcttgtttctgggttaatttagattttttggccactagaatagttgatgatttcttaccgccaatattgagtaggcgtccatgaaggctaacaactcatagccagattggcatctaccatttggtccattcttggaagtaggaagcaatcctttgggcaggctttgttcaagttagtgaagtctattcatacttgccatgtcccgtttggatttggtaccagtactggattatctaaccactctaggtaatagactgttgggttttatgcc

SEQ ID NO: 272638 - DNA, 1607 bp, Cannabis indica
agatcctagtaaaataaatttccaacaacacccatctatggccacttgagctagcctcaagtggttgatattgggcatcattgatgcttgaaagttatgctctttttccatcctacggaaagctcatatatattgaattgattagtttgataacttctatgaaaatatgaaatagaaaaaggaaaactataatatttttgaaaggttctcgttgggattccaaaatctatcattaatcattataacatatagtatgctcatttgttttctaagcataggaagtttacaatttcatggtaaatagatacatttcattttcatgtgtggaaaacaaacaccaaacacaatacagagcaaattacaaaaattagtttacattcaataaaagttgccttaattcaatctataaacaagaatattttccttaattaattgtggaacacactttgcggatttctccttcggttcctgttttgatacctatgttactcatcttaaccatagatctcccaaactcgactccaaaactcagtcctagtaatcctctaatgcccatgaactgttggactattgtcctagtggaagcatcagtccatagcttctggtcggactcaagaattcccttgccattccttaagttggtgaagaaagctgtgtcgaatcggttgcttggtgtgcctgtatcgagctcgatacgcctcgttccatcaccattttggggacagagtgctctcaattgcggaaggaatgtagggttaatggtaggatcggctccatttccagtagtagtgaagttgtatagcctataactaaagaattggcaagctgtggtaccaatggtgtgaccacctattgaaaaaaaacaccaaacacataaatattatgttagtacactatttcacttagtcatatatacaaatgagaaatgaattaagttaattaccaacaagagttacgagatctttcggggtaagaccctttgcagcaaactttagcttttggtcatcaattgaatcggtaaaaccaggtaagttagcagcctcagaggccgatgatattcttccatctctccttcctgttggtactgcccaagtaagtcctctactctgccaaatataatatcaaatataatattaaaatcccatttacatgtattattataaaacagaaacaagaattgtgattgaaaattagaattcaaatacactgaattatatatgtatatattttgtgatatcataaaaaaaaataaaaaaaataaaacaagatataattaaccttgcagctataggccgcataccctagtttgggtataagtaggttaggcctctgtttagaactggaaacttaaaaaaaagtatcttatttcaaagatgtacattttttttattgattttaaaaaaatattatttttttttgaataaagactcaaatatatttctatgatccactaaattttaaagccaattctacacaaaactatagtatataaataagagtagcaagataggatacttatgataccataatattgagttttttattaataaaatagcaatttttggttcaacttaaaattaccgggaatttttctcaaaaaaaaaaaa

SEQ ID NO: 272639 - DNA, 825 bp, Cannabis indica
agtaccaatcaatccatttaagctctcttctgtagtcccatacctacacagtatcagaatcatcccaattgacctcccccaggtagtgttggattgtacagcttacccggtatttcccctacggatcacgggactactgacggtcacaattagacatcttaagatgtcaaataatattgtttatattacaaaaaaaaatgttacttttagtgacaattttttagtcacaatataaacttattgtgactaaatatgacttttagtaacagcaaaaagttacttatgactaaaatataatatttagatacaaattgtcactaatttataagcattagtcacaataagtattgtgactaaaaatgtatttagttataaaaaattttgatttttgtgattaatacttttagctacgaactttttaatcacaacataaaaatgatgatttataaatattagtcacaatattttgttaaaaatcgattactggctcacaacatattgatcttttaagatttgttaaagggttacacaaggaaaaatatttcagcgagaaatattatgaagattgatcttagtaaggcttatgatacggtggattgccaatttgtttttgagctccttaggggtctttgcttcctgtcccgcttcatcgactggattttggtctggttgaaggggacctcctactctcttatgctcaatggtcgtctcaaaagggagaaaggtctccgtcaagggaatcttagatctcgtctcctttttgttctgatcatggaatacttgacctgtttgttgatccaagcttctcattccaaaggctttggc

SEQ ID NO: 272640 - DNA, 1135 bp, Cannabis indica
ggttatacccaaagagaaggtgtggactatgaggatacttttaggcttgtcgccatgctcaaatccatcaaaatacttctctccatagctgccacttttgattatgaaatttggcaaatggatgtcaagacagctttccttaacaaaattcttgaagaaaccatctatatggagcaactagaaggttataagcttccaggacaagaatagaaagtttgcaaactcaatatgtatatttatggacttaagtaggcttctcattcttagaacaaaaggtttgatgaaataatcaaaacccatggatttcaccataaagatgttgaaccttgtgtttaccaactcaaggataatcaagtggtagtattcccgcttctttatgttgatgacattttgattattggtaacaatatcaagaaaatgactgacatcaaggaatggcttgacactcaatttgaaatgaaagatttgggcgaagctgcttatgttcttggtattcaaatcatcagaaacccaaagaacaaatccattgctctctctcaaatagcttacattgataaggtgctagagagattctcaatgactaataccaaacgggtagtgacgccttctagacctggtattcgtctatctaaggaacattgtcccactgatcctcaagagaaagaggacatgagaagggttccttatgtttcagcacttggaagtctaatgtatacaatgttatgcactagactagacatttgctatgtagtaagaattgttagcaggtatcaaacaaatccaggagaggaacattggattgcagttgagcacattctaaaatatttgaaatttacaaggcattatgtgttactttacaaggatggtgctttaaatcctgtaggctataccgatttagatttctaggcttgtcttgataacaggaagtctacatctgggatggtatttactcttaggggtggagcagttgtttgaagaagtgctaagcaaactacaacatcagactctaccatggaggctagatacatagctgccgctggggctgctaaggaattggtctggctaagaatgtcttctcaagacttggtgttgttcctagaatggaaaaaccaatggttttactttgtgacaacac

SEQ ID NO: 272641 - DNA, 2110 bp, Cannabis indica
aaaacttcattcaaggttagaaaggggccgaagccctacacgcccagcggacgaaccgcaaaacctcacaaggaggtggcacaaatattggctaaccacaccaatgatggaaggagcaaaaaagctctcacataggagcatttagaggaataaaccccaaaatagtctaagactaacaccacaaaaaacaaaaggtgaacaacatcaaaaagactaattaaaataaaatacacaaaacaaagaagcaaataacatagaagaacttcaaagaacatccgcaaaacgcagaggaggctgccagagagtccaaaacaaacatgccaaagacaaagagttgctaccaacttccaaataggaaggtccactctcagtctcccatagtggttctgaacggtgaaggtgctaagacaagggaagcacatccctttgggtaagacccaaagccccccctctacatctacaacactccgaaagctaaacaacagccaatgtgcactggagccaggacgcctgaatagaaacccacaaggaaacactgagatctgaaaaaataggaggaaaaaccacactccaaagccaaaacacctgcctgagaaggaccccaaccaaccaaaaacctcaaagacgaaataatgggagcccaaataagcccaccaacaatgccaccacgctacccaaaagaatggaaccactaagagcctttgattggcggcgataaccatctcaacagagacggaccgcctccaacagcgggggccggtcacctgagaaaataggtgccatggaaccggttccccaagagcaacgcccaacacccacttaacccgccaacaccgaaacccaccaggaggggacttcctccaccacgtgtagcacattgagagcaggactcccgggcgccaccagcccagatctggccggtggcgcccaagggtgcataagaaaccctagaagagactttaggaagaagagaggaaaaaaaccctagcagagagagagagaaccctcttggaatgtcttttaagaaatgtgttggattggattatttagagttagagtatgcccaactcataactaatctataattatatgacctatcactttttagcccaatgagctatgacctacttttaacataaccctttattacaaaaaaatgagttaggtaggccaagttgtataatttggcccattttttgtgcacctatattgctaactatttttgaaaagtaattttaaatctaaactagaaaaattaagcaaaaagttgaaagtgaaaattttaaggcttgattaattgataatttaaaaattgttgttctctaatgaaaatatgaattttgtgactaaaaactgtttatgaacaggacgaatctgaaaataaaattgaggcagggtaaatatttatattttgtagaaactttagaattttcataaattttataaaattagatataataaaatttaaagtaacttttatgaacattttacatttacattttatgcatagttggtaatcggttcaaatatattgtaacgataatatttaataaatttttaaaaggagtattgaatttgcaacctcttaagctttgaaaaaaaaatcaaaacattatttcaacttaaacaaatagtgtgtgccattaaattaattttaatatgaaaatatgaaggaaaagagagatagaagtaattattcttgcttttcggctaagaatatacataacaaagtttgcttatctactacaaaacacaaaatttatatgatcaaaacaagaaattaaataatttcggttgtactccggttccttctatctctgaacattgtttttgtaatgaccgtgaggtctaactgtttttctttctaatctatgaatactttttttttttaaaaaaaaaaaccaaataagaaattaaaaaagtaatttgctgaataaatacgaagatcacaaaaatcaacacctccatttaccaattaatttgatatatataacaagtgaaacagattctaatatcactgttaaaagtcacattacttcaagaaatatagccattttaaaagctataattctctaagtcatacaaacattacaagtttacaacacccaaa

SEQ ID NO: 272642 - DNA, 886 bp, Cannabis indica
tctctctctctctctctccatttgaacatcaccgtcgaacccactccctccattcgaaccagcacccacgtccccctccgtttgaagcaaaaccctcccccttcagctacatttgaaccacgacccacccacgaactcacccaccccctcgattggaaccagacaacccacgaaccacccaccccttccattcgaaccagacgacccacgaacccccctaacccctccgtcgaacccactaaccccactcgcactgtcgaaccagcaccgtcgaacccacccaccgcactcgcaccagtctcggggcaccgtccccgccactgccaccatcccaatcgactaaaagaggtattttttttttttaaatttatcttagaaatatgcctaaatttgtggataaatctgtggttaaactgaaattgttatttagtatgtgtttttttgtgataaattgtgcaagaaaaatttggggaaattatgggtttcgtgttttttgcgacattatgcgatttgtatgcgatattgtgcgattttttacttaggtttatgcattttgggtatctttttgcaatttttaagcgattatgtgcgatgtttgagcgatatatgggatatggaataggttgtgcaattttagcaatattatgcgattactgtgcgatgtttgtgtgattttacctgacaggatcttgacatgtttagctgttgtgttgtacattttttagcgatattaatgtgcgatatttgtgcgattctaattgacaatggccttattttttttgctgtctttatgcgatgtttgtgcgactgttgtgcgatatttacgatatctgcatatctttatgcgacttatgtgtgattattatgcgatataatcttattaatc

SEQ ID NO: 272643 - DNA, 545 bp, Cannabis indica
tgagaaaaaatttgactaaaaaattatttcggatgctaaaacagaaagagatgtatcggtatatcccttttaagggggtgtattatagaatttcccaattattttttactacaaaagatgcttgtgtaattggaaaaatttataatacacctttatgttggtatcaagaagagtttcttagttttattttcttatgtcgtgtaagttgtaattatttaggatcattggtaaatgtttagaacattttgaataatttacaatactaaagttaattaagattcaaacagttgtctactatatgtataagaaaaaacagttacttacaaaaaaaatatttgaactttatttttggcactgtaaattatttaaagcatcctcaaattattctttattttttagccaaaaacactaaaatagaaagccttttttatttttattgctccaatcacactccctactttagttcatatttgattactttaataatattttataatttaaatttgacaaatataaataaactttataaaatactgaaaaaatta

SEQ ID NO: 272644 - DNA, 1186 bp, Cannabis indica
aattacacatatagtcaaccaaaagatataatattttcttcaacatgtgaaatttggtgataaaacaatgattgaaaactgataacttttagccaaatttccaaaagagatatattaattacttttaatatattgataatcaaaaaaataaagtatccatcataaggcattatttttgtatcaaacaatcaggttttacaattttagaacaacaaataataaaaagatgtgaatataagaatattggtggagactacatagtcaagataaattaaaataagagagtaactatgtcatatggaccgagaagaaacccaaaaaaatttctacgatcgataaatttcgaaaaatcatcaaaaattagttttaataattttttaactgcataattatcattaaaataataataattattaaacggagtcaaaaaatcaattaaaaatcatagaaaaacataaatttaattttaagcacgctggaaaaaaaatgatcggagccaccgcacgcacccccatgcaccgaggacgagagtgggcttcgctggatagtgtcttcttcttcctccagccgggttagaggcgagtcacgcgacccaatttcagaccagtcaggtctgatgtgaaaaaccagccaaaatcgatcgacggaaaatcaaggaaaatataggggttttgatcatgattggatttctagtcgatctacgctactaatttcgagtattaatggctaaaagattatatcgcgtggaaaaagcaatcaaaaattgaagagcataaaaaaattgtttataataccaatttcggtcaaatcacaaaataaatcatttaagaacattaataaacaattgataatgagatattgataatcaatttcagatcaaaaacaataaaatcaaaaaacacaaaatataatttcataatataattatataaaccccaaaacattaaacttaaaattcttataatatactcaatgatttcatacacataatatatcaactgaacgagaatttaacgataaataaaactcctaaagttttaagattcaataacaaaattttatcattaatttattacgaaaattaatatgtaactattgataattaacttattcaaattataagtcctaaatcacatacaaaagacaatctgataccacatgttaaataaattaacaataaatccaa

SEQ ID NO: 272645 - DNA, 1603 bp, Cannabis indica
ttacattgtataatggcctctttctttgaacaaaataaaacgtcattcacacacttccctaagcctaaataataaaataatacaaataaatgggtcactatgtccgagtcaatgagaccagtaacggacggcgatcaatagaaatcgtcaagtcaaacaaatcaacggtgatttcggcacctcatgtaacggagtgattaacggcttccgttacaccgtcaagtaaagcacctgacctgacctgagtcaactttagtcaaagacatatataccccctcgcccccactttgctatcccttttacagctttctctctcttaaaaaacaaagcctttcactttctctctctagaatccgaaacacacacagctccgtttcgggttttcgggtttgggtttcggatagtataaaaggtcgctgggacgttttaggaaaaactttactcaaaacttcgaaggatttggccatggctgccgagcgtcagagctccgaagcggaaaacctaaagacgaacgaagaacaaggagaagaagaaggtgaagaagaggaatcagaagaaagcgatggaggaggagaagaagaagaaggtgaaagacgactcggcgaggtgcagagttcagagctgcgaagcggtgccgagcttaaagagactcaattagaaaccctagctgcgtcttcttcattggaggtaccgaagaaggatggtaggtctttgtttttatataaataactataaatatatttatatatgtatgtatcatgtatgtatgtgcttataggtgtgttttgagtgtttatgaagctgcttttttttggtatggttgaattacagtgaagtgatggagtgtgttgtttgatcttacagttcttcaggtgaattctacttcaaagtcaaaggatggagctcatttggaagtaagtatagctcagtcttggtcactgtgttcgttgatctttgttttggtgattttatgattttacaggtttttcttcttaatgttatatttggctctttgttttggaattggatctgctgtgatgaattcttaaacctatgatgtctgaattgtgtgattgtcatttctggtaccatgattattttcttttgaaacttagaggaagtttgtataatgattacttgttttatttctcaatttagaagataggaagtgctctatgaatctttctgatcttttggcaagatctgaataaagggatgttgattgtgaatattttaaaatagtttttggcctttcttaattgttcttacagcttctatgcacagtgttcgctatgaaacacaatcttcatcatattaattgggctcacacctctttgcttcaagtacctagacttcatggaaatgattcgtagtgtgaataactgaatataatggtctctacagtccctagtttgatttaggctctttaattaagttgaaaacggaacattgagaacttagagacgtgatgtgaaattttagagtattggaattctggaaatatttggtctacttaaaagaaaaataattattattgtaaaagaattacagagttaaaagaaaaataattattatagtataagaattacttagtgttttttga

SEQ ID NO: 272646 - DNA, 4913 bp, Cannabis indica
atggaagagcatatgcccaagcaaaatagatctgcaagactataaactctctcaaattaaattaatttatatttaacaaatttaaattataaaatattattaaaataattaagtactaaataaaatagagagcataaataataaaatgattctatttctaatttttagatttttttcgttaaaacttggctaaaaataaaaatatcatattggagatattctaaaacagtgaaagcttatcaatattttatgcgtaatatatagtatttatttagtatttttgttaggtgtaatattgttatttgtgtaatttaaaatcgaatttcacttactttattttaattaaaattataaaaattactaactaattataggacgtgactttataataatattaaataccttgttctctcctaacaatgctcatataattaattaataaggacatgttccattgtatctcaatctccactactgagcaaatttcatgaaggtaagtatgttttcattctttattattatgtatatttatatttctcatgaatatttgtcacgattataatttacaagaaactataattagtttcccaattataataagtttccgttttcagaaaattaatttttgcacagattactactattgttttttattatttccttctttattttaaatttcccaaattatccacttttaaatggaagatttctaattatttattaattatagccaaatatattttctaaaaaaaaaaacgtttcttatattcttgaaatatgttgtaatgatatttactaaacttccatattagtaattaaatataatgtataatatatcataatatgtatatatatatatcaatcaaaatatttatatacatatctttccttctttttactaaattaatatgaaattggaaaggaaataatcaatagttccctccaattaatttattatgtccattataaatttctctgaaaacaccattattcgatataataataatagtaaaaatagttttcttctagccaaaaaaggtttagtagaaaattaaaataaaattatgttgtatttttttcaatttttgtttttgagttgttcaatatttttattaaagtttgcaaatggaggtaatttccaatcagtgacagttgaccaatctggtcatggaaatttcaaaactatacaatctgccattgattcagtcccttcaaacaatgcttattggttttatatcaacatcaaggctggaatttattggtaaatattttcttcatccttttcatttttcaatattatatataaatatatatacttacaaaacattattgtagtgggagaaaatttattagagatggtctcgataaaactttcaagagcaaaattcaataagaaaagtcgaaagaaaaatttacaccatctatcaagttctttaaatttattgtaggagaaaatttattagaaattgtctcgtcaaaactttcaagagcgattttcaataattattattaaccgaactactaaatgttttagtacattacacgagagagattatttatatttattgtaagaaaaaaatttgttagagatagcctttttaaattttgcacgagcaaaattcaataagaaaaaactcgagaaagagattttcaatagttattatgaatcgaattgttatatgctttacattacaccatacattatatatttattgtaggagaaaatttattaaagatggtttcgttaaaagtttcaagagtaaaatctaataggaaaaaactcgagaaagaaagattaaatttatgttgttgttaaattttagtttgatttttgttttattaaatataaaatgatttatataaatgcagggagaagatagtaattccaggtaataagccattcataataatgaaaggagaaggaatggataaaacgcatgtcgtttggagtgatcatcaaagtattgcacagagtccaactttctcttgtgctgctcataatactatcctctattccatctccttcatagtaagaaattatattaattcatttattattttcatgttaataataataataaaacataattctattgctcgattttctttcgaaaaaaaaaaacaaaatcttaagatttatcttcaacttactgttttttagtacggagttttattttcttattactaatacgagaaaacaacttagatttttctttacagttacgaaattttttaaaatataaaaaaagataaaattatgtaaaaatagtaaaaaaaaaaattgtattgtttaaattttcttttaaattatctattagggttttattaccctaaatatcaccaaaacaaatcaaatcaaatcatttcaatatattttttcatagcatctctttctatgaatactaatttcaaaatctatgtcactaattaattaatttttttttttaaacagaattcatacaaccacgccgttctcaacaacgagaaagggaacccgagagctccggcagtggcggtgctagtgacgggcgacatgatcaagttcaataattgtgggttttatgggttgcaggacaccttgtgggatcaacaaggaagactattactatcaaaattgcctcatagaaggagctgtagacttttattttggtagtagggccaaacctatttttgaagtactatttttttttattattattaaataatttaaatttcagttttgtaatttattattttcttaaaaattctacattgtggtacattttgtacactatatgttatttatgaaatttatcaatataataatttatttgaacatacctcacaatagtcacatattatatcacattatatttatagagtaatttgtagcttaaataattttgtttaaatttttttttagataattacctaaattaaatttttaacggtaataatacttaagttatatttttgtaatttgtgttatctaaccattaaatgtagtcattatgtacgtgtcatttttttatttgtatatatttaatttaatttttaaataaaaaaaaattgaatgattttgaccaatcaaagactgtcacacgattcattgacggccagtttcatacggaagttccaaaaatataattaaatattattaacgttaaaaaattaaacttaggtgtttatttacaacgagcagttaagtttaagtatttataccacaaattattttttttatttatagtaaaaattttagtttattttcttgtgtttaaataactataatatttctttaagaaaaagaaaacaataaccacattaaatttacacatcattatggcactacaattttagagtaactttgttgtttttattaataaaattttcttgaattttgtttttttaataataattatttttacaaaaaactattaattattgttactaattaaatctttatatttgtgtatagcattgtacaatatctgtaataggaggatcacttgggactggttttgtggggtttataactgcacaaggaagaacaaacaataatgatggtagtggatttgtgttcaagaattgcaatgttattggtaccggttcggtctttttagggaggccatggcgaccctattctagggtactcttttacaattcgtatttatcgaacgttgtagtcccccaaggttggaatgcttggaaatctactggttacgagtaagttttctcgagttttttattatcttttggtaccatgtgttttatcaaatatagagttagtaacttatattttaatgatgtttatttagtattttgtaatttagaatcgtacatatatttataatactctcaatattactacttaagtgataaatcattagtttgacaattaaatttgaattaaaaattcattatcttttgttaacataaatatttatgagttagtacatttcttatatttgtcaatttagttatactaatgcatcttttattaccaagattccaaattctaatactgctctctcaatgtaaaataaaaaattatttatgctttactttttttttttttttttcttttaaaaaacaatattatgcaataaaatgtatgtgttttttcaaaaataaaagatttctcttcctcttcttcttcttaatttttttttacaaatattccaagtttgaatactcattcttatttatttatttatttaatattatttttttatggattataggggccaattgagtttttctgaagagggttgttctggaccaggatctaatctttctacacgagtgagatggatgaagaaattagacaagggctctttgaaccaaatgactagcttaaattttattaatagtgatcattggcttgaaaaaatgccactttaattttgtttgggaaatctgcagttacaggcttattaagtctctcggtttctttttgggtcaatattgtttattgactattgttattaggcattatgatatctaacactattatgagatcattgagatgatatcttataaatggttaacagtttttgttaatcattattaaaagaaaataagtgagacctgatattaaattatactagtataatagatgtattatagcatttttttgatctatttcgtctaaatattggtgcattttactttctttttgagtcaactcgtgaattattattaaagtaaaataaatacgactcgatgttaaattatattagtagaaatatgatatctcatgcaagtgttaggataccacaagtattttttagcatttcccttatctattttgctaatatattggtgcattttactttcttgtatttaatagaattattgaactattaaatgccaattaagttgataaattatcaattaaaggcttataaagtctccttatttcttttttaggttaa

SEQ ID NO: 272647 - DNA, 758 bp, Cannabis indica
ccaaaatatttattgagatttgtagaaaactaattataagtaattagaactgaagaagtaaataattcaaagtgaaaactgaacaacacttagagttttttacgtagttagggcattaaagagccttagtccacgagtcaatattattatgtactttatttagaaaagtctttgggaatacaatgagtatatgtttcctattttcgcttgagaaaatattgcaagattgttcaacctttaattcaaagggtttttgttagtatttattgagtatacaggaattatacttaattttcctttcctctaatggggggtttatatggaaaacacacaagttaggattgtattcgtgaggtctaacccatggacgatgagttgctgactaggaagattgatcacgatcaagctgttattaccatgtcttttaattgtgggtaattaattgtgaattaattacttgatttttattttaggtagtttccccttttagcttgatgtgctcttctggccgagatttaaggagagttaattccttattatgtgcgatttgataaaaagggaaactatactaagcttccaggaacacgctgtaatatttcgataagcctaatggtaaataattaggatttataattatattatgggttaatcaggcaataagtgagattatgatcctactaatctattttagcataaaatttgaatttgctataagtgagtaaataagcgtaatttataaattatagagatttatatag

SEQ ID NO: 272648 - DNA, 515 bp, Cannabis indica
atatttttgaaaactcaaaactcgaaacccactcgaaactagggccggcaaaacgggtcagaatgggttcgggtttgccttaaatgggtttgggtcgtgttcgggttgactcgtctaacccgtttaataaacgagtagtgttcgggttgacacgattaacacgaaattgaccagttaatgacctatttaaagttattttagtactttaacgtgtcatgaatgggttataaacgtgttgaatactttataaacgtattattgattgacatgtttaaacaaaatatgtttataaacgagttacacgggtcgtgtcgtggcaactcgtttataaacgggtcgtgttcgggtttcattttttgacacgattattaaatgggtcgtgttacggatcgagcatgtacctattatacatggatctcgacacgacccgcgaacacgaattgtcacccgtactcgaaactcggttagcattttatttatttatttttattttttatgtatatatattatatata

SEQ ID NO: 272649 - DNA, 1198 bp, Cannabis indica
ttaaatagtaaaaaaaaaaattaaatataagggactttcgctgcaaattactcaaaaaattaaatgatgtgtcaattggtacgcaataggtggggataagattgggacagggataggcgatttttattcaatgaaataaaaacatcaagaagcatgtgtaatcaacaagtcaaaaggcataaataatttcatgaaattaaaaaatgaagcataatatatataactaattgcatacttgaattgtgatggatgccatccagcaagattagatgttgttgttagagcatccttccatttttgtatgatagtatccttgaaacactttttatgattagcaaacgcgtctgcatagcttcctctttgtttgcgcacatcagatggatcaacatggtaaaacactggcaaaactatttgagtcttcttcttcatacatccaagaatatgtacgagctcatccaaacaccacgacgaggttgcataattttttgagaaaataacaatagaaaatttggaattgtcgatggcatccaaaagagcttgggaaatctcatgtccctgctcgagtttatcatcaatgaacgtttcaattcctccatccttgagtgcttgatagagatgagtagtaaaggttttgcgtgtgtcttctcctctaaaacttatgaaaacatcaaacttcttttgagacgccaagatggggcgttcgtcatcatcaacatctgttgatggtggctctagagaaggcaaattatcgcgattgatatacttcttccataggaggattgtgattgagataacgatggagatcgtcactgataagttgttgtcaatggagttgagatcatcattgatataatcaaaacgaagattggaagaacaattttaaaatttgtgaagatcatcatcatcatcacaaggagagagcgaacttgattaaaattttggtttgagaaaataataaatagtaaagtgtatttttataaggtaggcaagcaagtggaaaaagtactcttttaattatcttttgttttggctaagtatttccatatgaaacttccaatccattaccttacaattattgaaaattgtactataaaaaaaaaaaaagaaaaatgtgaatcggacaattaaaatgttaatctcatctcatacattaataatacatataaattgaacaaatatccaacccaatcttattatt

SEQ ID NO: 272650 - DNA, 785 bp, Cannabis indica
caaattaaactaagcggtgtttacagcatccggtggctcaagtcggaacaagaggttccgagggaaccagagtagaggtagccgtcagggtggtgcagagaccccgttttcttatcctgagtgtcccagttgcaaaaggcaccatcagggtgagtgcaaaggtcagggatgctttcagtgtggcatgcccggacattacaagagggattgtccccagctccgatcagaggcacctagggctccggcgagacccactccagctagggtgttcgccatcactcaggctgatgcagatgccagcccctcagttgtaacaggtcagctctcagttaataactcgtattactcagtactgtttgattctggggccacacattcctatgtggcagccagaatctttagtaagttgggtagaccgtttgatagttatgaatcagggtttggaaccctattacctggcggagagttagttatctccaaaaggtggattaggtctatgccgatcagaatagatggtagagagttaagtgctgacttgatagagatgagcctagtagatttcgatattattttaggaatggatttcctatctaaatactcagccagtattgattgcaagaggaagatggtgatcttccaaccggaaagtgaagaaccatttgtgtttgttggttcggttcggggatctcggatcccggtgatttcggccatgtcagctagggagttactgcatggcgggtgtttagggtttctggccgtggtggtggacaccactcggccagata

SEQ ID NO: 272651 - DNA, 1184 bp, Cannabis indica
tatcaccgtcctcccctcacccttgctcttagcgatagagctcaaatacttgcccagttgccggaggatgataggaatatcatcgagttgacctccgatgataatctggtgaagtatgggctttaccctgaggacttttctcctaagtccgtggcagggaagaagaagaagtctgatgctggccggcctgaacgagctcataaggagaatgagcttagtcaactgaagcaagaggctaagttgaaaggaggtgccagggccaagcagtatgctgaggagcctttgaatcctaaagatgaagtcgaggacgagcacgtgaccccattgaagaggaagaagaaactccccgtcacacccaagcccgttgaacatgccattcgcataagggagcccacttcacctgttcgaccatctcacccctttgccggaaaagggaaggctgtcatgtctgaaataaaatcgatgtcaggtgatgatggacttctgactctctgtgcgggcggtcaccttgcatttttctttacttttgagcttcttcactttcatgccttatgttttctgatggctattttctaaccacactgtttttgttctgtccagacatgtctcggcagatgctcgatgctctaaggaagagaatgggcgaaagctctaacgcctctcctctggccaaaaagtctaagggcggtgaggggtcctcggagaagagaccttctggagaggtcattaaccttttcgaggagctgactgctgcaaacccttctaaccccaaatctgccaaatccaaggagtctggaccaccaacaactgggtctgaactggtcaggagtgctcctgagcgggtgcaggcaccagctgcacctttgcccgtgcttccagaggccaaaaagggcaaggagatgctggcccactatatgaatcggctggttcttgaggtcagtgagcaactagctggtgctgatagttactcatctctggatgtgttggtgggcgaagtcctgaaggagctcaccagggtaagtcttttttgataattccctttaactttccacacttacgtccatatgctgacttttttcctttgtgcaggccagtttgaagttggcttacacttactcccgggctaaatctgttacttccaagagtgcggctctgtttgcaccttgaggcggaggcagacttgg

SEQ ID NO: 272652 - DNA, 781 bp, Cannabis indica
ataaataataggtttgtaaaaacaatttgaataaataattaaataatcaagcaatacaaaccaaaacaagtaacagataatctggaaagtaggctaaaatatctctattttaaaattttaaaatttagaatttaaaaaatatattcttaactagaatttaaaatttaggttgttagagaatatttgaaaaaattcaaaacctaacaaatctcctaaataccttaaattctaacttaaattcaaatatctaacaaattttcaaatttcaagtttattcaaaatataaattaattaaatttctaataagataatataatataatatcttgaattttaaaatttaaatattcctaatattatattcttaatcttataatttaataaattaaatattacaaaataaacaatactaaaaaaaaaaaaaaaatgttttatggttaggatattactaattttattaaaaaataaaataaaataagtttgaaaattttatggttagaaaccctaaaatttctaatcaaacctaaactaaccaatatttcaaattttcatgttatttttgccaaaataaattttaataaaaaatatcaaataagataaaatgttaaaataacatttatcaaatcttataattttaatttaataaaatatttcaaaaataacaaatttgaaaaaaaaaaaaaaaaacgatatagttagcaaattttgaaatttgaactagattatttttaaaaaaactattttaatatcaaaataagatcattcaaattttaataataaaa

SEQ ID NO: 272653 - DNA, 799 bp, Cannabis indica
tctaataatgagtatatgtataataatagtttacatttaggtgcattaaattattttttattatttaataatatttttgaaatacatacacctttacaaatcaattaaatattaatattctcactcctctctcctctttatctatctatacctttttttcatcttctccatttattttttatgcaggtttcttcttctttctcctctttatctttcttttcatctcctctcatgattcttttttcaaatgaaatgataaaaaataaagaagaatgtaaatccaacacaactttagttaaaaatttgatttctagtctcaaaagaatttgccacccaatttaattaatcacaaattgataattaaaatgaaaaaattaatgcctaaaaaaacctaaaataattgaatttatattgaagaaataatgcaattgtagagacaccactacatcaaaatattttaaaggagtagtgttttctcttcatcagtgtcatctacacctttaaagctatagacaaaactttcaaagattatcataaaaggcataaaatttgtgaatttcagcccaaaaaagctaaaatgattgtgaataatagtataaaacatatctttgttctagtctaaatgattttgattgtcattggccactactaatatgctatgcaaattctaacgattgcggattaattttatacaaatttgttagatttttttttctctctaaacttgtaaaaatgttcttcaatattctgccttttttttttctaactgtggtaatatctgcaaatgataatttttatt

SEQ ID NO: 272654 - DNA, 2024 bp, Cannabis indica
agaataataatatggcacgtagctttcacgtgctgcgtttatgtatactaatacaaggtattggtttaatatggatttttgaagtttttttcaaaaccaaaccatttaaggttttttgaaaattccaaaactaaaatgatcaaaaggaaaccaaataaatccactcaagaatagattggtttggttcaaaattatgatttgtatttcattaatttttcttatttttttatattaattaattatttttttagtaatttctttttttacttttaataagtttataatatataaataacaataaaaaatattctcatgataatattaaatcaatatcaatattctatttgtccatattgaccgaactactcacactgaatttatttagtccggtctcaaatagtttggtctaaattaattagaatttaaaactataaattgctggattttacattatactatttttcttatttaactccacaaactgatattttagtagtaaaattcagaaactttactttcatccaaaatactgtgtcaaataggatagttaacatgtacaaaaatatacacatgataggattgaaagatagatttgagaaaattaacttaatttattttaataatggggtgctaatagaaatattttcttgggtgtaaatattggaagctgccaaggttgaatttgctagttagtagttattatgcttttctctttccctttttgatttgaaaccgcgtctttgactataaatagtgcaaaaataaaaataaaaattggctgaatcaatcaaagctccattaaagatcataaaagcaagatagtacaacataatgatgataataataataataataataattcaagcttctcaatccatataatacctatattattttattggttgtaatatattaaaactacacaatgagtactaatttgcataaaatatttcttattagtttcttatttctattgattctgttatgttcaacttctagtgctgcagatcaaactactcaaaggaacaacaacatcacattgggttcaaaagtcactgcaaaaccaaatcaaaatgagtcatggatttctccaaatgaagattttgcatttggttttcaacaaatccaaaaagatggcttcattcttgctatatggttcaacaaaatacccgaaaaaaccattgtttggtcagccaatggagacaatcttgttcaccaaggctcagttgttgaactaaccaaacttggctcattagttttgagagacccaacaaatggaacagatgtaatatggtctgctgctgtctctggccttggagtttcctatgcagccatgcttgacaccgggaatttcgtgctcgccaacaacaatcatgccaatctttgggagagttttaatgagccaacagacacattgttacctacccaagttcttaatcaaggtaaaaaagtttttgctaagtattctgagtcaaattactctaaagggagatactatttcattgttgaaaagggtagtttagtgttttacaccacaagacttgttatgcctggtcaaggtaatattcgttattggccaaataaccaaaccccaacaaaagatgacatacaattgcagctggtgtttaaccaatctggctctatttacttgcagaacagaatggaacaaccatctttaatgagttgataccaatgtcatcttctaattctaatcattcaaatggtttctctaccaaagggcaattcttgaatatgatggtgtttttagtcattatgtttatggtgcttcgaattctggtggatggtctcgagtttcgaaatccatacctgaaaacatctgcttaacttttaatgctaataaaggacctggtgtgtgtggatacaatagctattgcatactagaagatgattttagaccaagttgtcgttgccttgatggttacactttcattgatttgaatgacaagattaaaggatgtataccgactttcgaagctcaaagttgtcatgaagatttagaagat

SEQ ID NO: 272655 - DNA, 666 bp, Cannabis indica
caacgacacggtgtagtcgacaacgttcaatatctcctccagatatcgagtgtcactatcaccctcggtgactacaggatcccctccgtcgtccacccccataacatctccgaacatcgcgacagataagtgaattttccttccatacaaatccagtatgctagtggttgggtcaacatgtttgattaaccaactcactagtcgggtgtcaatgtatggtgcatcctctctgatgaatgatccaaatccagcattttggatcacatctttctgctccaggttcaggttcttgcaaatcctgattaaacggttgaaggagcatcgaccgtacacagatgcttcttcactttcaggagcaacctcttcctcatccacctccactttcttccccttgccatcagctgcctttggtttcctcccccttgtttgcaccgccttcttagcgggagtagggttagggtcatagtttctccaatcagacttctcctcgtcggtgaaacctttatattgcactttcaatttctcggtagcctaaaatatgaggcaaacttacatcaaatacagagtacatggaaagcatcttaaagtatgtcaaacaattacgacgaattacagacaattgacttaaaaaaattgagtaacagtcaacatcaaacctctttctca

SEQ ID NO: 272656 - DNA, 1363 bp, Cannabis indica
tacagcctgcaaagaacagcgttgagagctcagctaggacgtgtaacactaatatgcaatagtgtgtctataaataaatgagaggaagaaagaaagagagcaccacaagaggaaacagggagagagaaaaaacactggggaagcaaaggtgacaagaaaaacttgaagaaaacaaaatgcaagaccatctatcaaaggtacctggttcatttgcattattatgatccaaggaaactgcagagcaaatagaatctgcaaagctttgaatcccccgatatctctgaagtacatgaagagaattcttactctgcgtgctttgaacaacttttagcaataaggataatataaatccactggaagactcaagttctttatacaggacattgaggtcatatgttggagttgtatatgtccttccacatcgggcagcaatttccattgattgaagggagtacttaagaatgtcccacataagcattgagtggtttatcctagaggatccaacaagcttatcctgtctatttgataaaaacattttagagaggacacgagtcacaggttcaagatttgggcttgttctctcattcttatccaaggggacacctttgagggtttcaagcccaaaggcgacatttgctgcagagtgtaaaagagccaagccttgctgaaggtgaagcgaactcatatcttcacacgtttttcttgaagagcaactagcgtcgggtgaaccagcaattggattatggggctgcttcaaaaccttctggcactcgccaggcaattcaggtaaaatggaatttgcaagcctacgacatactgggcagagaaactccccctaatgaaaacaaataaagagaacaaacatagtcacagccatctctgttcataagaagaagaagaagaagaagaagaagaaaagagaaatacctgatctgggtctacatatgccctccttcaaagacaattcttcggagatatctgcatgaatatatatgtagaaaagaaaatactcaaatcatttgaagagacgtttaatgattgtaggccagtaaaaactgacatcattctaatttttatgatggcaagagcttatacatttagaagaaaaaaagacaagtagcatccgtcaagttcccttccacccaccccccccccccccaaaaaaaaaacctaaccacttcgcagagcattagcttcaagaaatcattttacgaagaaaattactccaaaaacaatcttcatgagtactttataaaagataacgccatcattttatgacaaaaagtaaaattcaaaaactcggtataggttctcttttcaaaaagtaaatccaggctctctttgtattttgtgattgctctac

SEQ ID NO: 272657 - DNA, 2949 bp, Cannabis indica
aaggagagcatgcatcctcttctcgagttcctccgagttcactgctacaagggaaaggtaatacaaaatttctataaattgctgaagaaaatctatgaaggtaagagctttctcatgttattgattttgtttgtggtgttttatgcagaatatgatgctgaatgacagaattcacaacctgaatggacttcaacatgttctaaggaaggcagaggagtacctgaccagtcttgcccccgaaacaccatacgctgaattcgaacacaagttccaggagattggtttggagagagggtggggtgacaccgccgagcgcgtgttggagatgattcagcttctcttggatcttcttgaggcacctgacccttgcacacttgagaagttccttggcagaattccaatggtgtttaacgttgtcattctttctcctcatggatactttgctcaagacaatgttttggggtaccctgatactggaggccaggttagctaaaacagattttgactctcttgtcttttatttaagtaacttttgttgataaattctaaaactttttgtactttttcacttcaacaactaggttgtttacatcttggaccaagttcgtgccttggagaatgagatgcttcttagaattaagcaacaaggacttgacattaaacctcgtattctcattgtaagttgtcacataagagtttccaactttctttcatgtaatttgtattttgttttcttttttctaatggttggttgtggtgttttgtgtatccagatcactaggctcctccctgatgctgtaggaaccacttgtggtcagcgattggagaaagtttacgatacagaacacacacacattctccgagtgccattcagggacgagaaaggaatggtccgcaagtggatctcaagatttgaagtctggccatacctagagacctacacagaggtaagacaaaagagttctttttgtttgtttgtttggtcttgaatgaacactagattgattgtgagagactaaagaaaagagtatttcgggttgttgtttaggatgttgcacacgagcttgccaaggagttgcagggcaagcctgatcttatcattggaaactacagtgatggaaacatcgttgcctcccttcttgcccacaaactaggggtcacacaggtttgttaagccttctttttttatctttacatgttttgagtttcacaacttaaaatgactttttattatgactctcatttgttgtttgtatgcacttgcagtgtaccatagcccatgcccttgagaaaactaagtaccctgattcagatatttactggaaaaagttggaagagaagtaccatttctcttgccagtttactgctgatctcattgccatgaaccacactgatttcatcatcaccagtaccttccaagagattgctggaaggtgataaatcctctcctctcctctgttttctttcattcgtgcatggttttacttgttgtttaatctcaggaaactaaatcagtctttgtttctatttttccaatccttttcagtaaggacactgtgggacagtacgagagccacaccgctttcactcttcccggactctacagagttgttcacggtattgatgttttcgaccccaagttcaacattgtctctcctggagctgacatgagcatctacttcccttacaccgagacggaaaagagactcacctacttccaccccgaaatcgaagagcttctctacagtgatgtcgagaatgaggagcacatgtaagttttctataccaattcctatgttggatttccccatatttgatcatggcatgtcatgacttaagaactcaccctttggttgatattgttttcgaacagatgtgtgttgaaggaccgcaacaagcccattatcttcacaatggcgaggttggaccgtgttaagaacatcacggggctagtagagtggtacgggaagaacaagaagctgagagagctagtcaaccttgttgtggtagctggtgacaggagaaaggagtctaaggacattgaagagaaggctgagatggcaaagatgtatggactcattgagacatacaagctgaatggacagttcagatggatttcttctcagatgaacagagtgaggaatggtgagctgtacaggtacatctgtgataccaagggagcttttgtacaacctgctgtgtatgaagcttttggattgactgttgttgaggccatgacttgtggtttgcctactttcgctacctgcaaaggtggccctgctgagatcattgtacatggcaaatcaggctaccatattgatccttatcatggtgatagagcagctgagactcttgttgagtttttcgagaagtgcaaggttgacccttctcactgggacaaaatttcagagggagggttgcaacgtatttatgagaagtaagcaaaaaaataagagtagttgattccttcacgcttgttatttagagtgctttgatgggggtattaagagtggtttgtgtctctttttgacaggtacacatggaagatttactctgagaggctactgactttgactggagtttatggcttctggaaacatgtttctaaccttgaccatcaagagagccgtcgttaccttgaaatgttctatgctcttaagtaccgtaagttggtaagtttctaaaattgtttctttgttcagtaagtaacaagtttataaatttctgaatgtgatgatttgatttctgttgtgattaggctgagtctgttccccttgctgtggacgagtaagcgaagggtgaggttgattgatatgatgatgagtaaataagaggcggaagcaaatttggttggcaaagtggagttttttaccttgaggaataattgttttctcgattgtgattacatcaaggctttacttttacctttctttttttgtttttgttttt

SEQ ID NO: 272658 - DNA, 517 bp, Cannabis indica
tggaaccagactagggacacagaaccaaggtcgggacctagaaccgcaccctagtcgcaatctcgaacaaaaactcagaaatgggacaagggacactagaacaagaactagaccgagacccgtgactgtgatccaaatcttgactcgggattcaggtaacgcggcttggaacagactagtagtcgctgactggatctggaaccaagacgaagaacagaacccgaacgcagacctagacatgggacccaaaattagtacctgaacaagaatcgccgaaccaggaccatagaaaaagactaggaccgtgacaaggacccgcaccctgaacttgaacctaggacccagctcgtgacccggcaacaaaaatggaaccagactgggacccgagatcgagatgctgatctggacccagggcttggacaaaacacgaagtcgttgtcttgatttgggaccaagccctgaacccgaaccctgacaaggaccccaacccgcacccagacgtgaacccagtcccaaa

SEQ ID NO: 272659 - DNA, 902 bp, Cannabis indica
attttttttattattttttatttttttttcttagtgtaactctatttagttacaacctctcaattaaaatataattttgattagtcccaagtgtattcttgaatagaaattctacttttaaacgtacttgaattatttttaacttggtgtataagagaggttgatcaatcccaaggagatcacatgcactgaaaaatgaagatagagaggatagacattattcaagaaaaaaaaagagtagggcagaagataggcattaatgatatacaatgattgtgtttgtgatgaatatacataaaaatgctaaatgatacttggatgttagtactcgtatttaatatttttatattatgtgatgtaattttattattggtgtagttttatttattttaatctaataaaaattataaaaaatcgttaatcaattaattaaagcacgttcaataacttttctactctattatttaaaatactaaaattttattttctttattttacaacacatttttttacattatatcattcattatttttttttataagaagtcgtgttataaacaaccttatactccataacaatacataaaatagtaaaaggattgctttgtccattatgaaagaccaaaaaaaaaaaaaagaacttgcctcttgatcctaagcaagccctaagatattagtcactaactaccatgtaatgttgatgctttgcaattttgtcttcccaattaccaacaatgatactaacttgtgcaaatgtaggccaagttttttgttacaacatgaattttagagttatatattagaatatttcgttcccattatatataattaattaattataattgattaatttagtatattaaaatgaatattctatttataaactaaatatttcaattgat

SEQ ID NO: 272660 - DNA, 748 bp, Cannabis indica
gtgcatcttgtttttcggtagcccatcataaaagaactccatagttaagcgtgcttgacctggagtaatttcaggatgggtgacctccttagaagttttcctaggaagtgtgtgagtgaggacaaagcacgctggaaacactcgtgttggtctgtagggtgagtcgtcattccatgaagcagccatagtgacgtactcgtgtataagagacatgattccgtgggtgtaagggccatgattccgtgggtgtaagggcccaatggaggcttgaagcggggacgttacacttatagtttttagctataactattgtagtgacatttatcgtaattttttgtaatggcctgaaatataattctgaactctaggcctagtatgaaactctacaatacaccatatgagatgtatcctcaaaacaataaaagttctctacgatacaatggtaatcttaaggacataatcaaattttgatttacgtgaatctacatagccagtggagtacattagaatctaattggttaactatatttccaaatggtcaattcatctcaataaaatatgtatgaatataatttttagtatcttaaagatacctcatcactttgtatgaaaaataaagtggtcttaactttagttattctgatactacttaacgatcctgaaacaaatgtaatgcaaagtcttattcagactcttaggcatacattaggcttctaaaatagaagcaaatgaatgttcttaatttatt

SEQ ID NO: 272661 - DNA, 791 bp, Cannabis indica
agtagtttgttttctgttttttcattctgttaaatctgttatgaattggttagttagagctaacaacaagttagttatcccaactaacttagtcatctcttccttgcctatataaactgtacatatcaatttagtagaaataatctcattacttgtaaaaagttatggtatctgagtcccacttctaattattctcctctttttttattttcttgttttgcgataagatggatttcactaattaattatttcaataaaataaataattacagtcttaattgttttggtcaaagaaaataatttaaatgagagaaatatatgtttagaagaagatttgtaataaaatcccaaaaaagaaaaactgaaaaatttaaatgaaataatacttttaaacacgtggaaggttattatttggtcaaagaagataatttaaataattattttcttgagtgataaaattaattttgattgtttgttaatttttttaatttggtatctgaatttttttaaaaaaaaaaaattaataagctacaaacaaatacatgttacacaatgttgacttttaaaaatcatatagatgaatggttaaaaaagtgtatgtatagtatagggacaaaaatatagtcaccaccatagaattattatgggtgcacttttaatgggtattacccatgaatgggtaatattaggaaattttgcgtttttatgattaatttttctatttaattaaaaaaaattctcatttttacattatatgggctaggattggttcatcagctaaataaaacaat

SEQ ID NO: 272662 - DNA, 658 bp, Cannabis indica
ggaacagtgagaacaggcgccgaagataatcttcccttcaattctctgaaagattcttcacaactatcatcccacataaactttatttctcttcttgttaactttgtcaaaggcatagcgatccgagagaaattctccacaaagtgatgatagtagcctgccaacccaagaaaacttcaaacttcagtgccattctttcgtcttttccactgtagaatagagtctatcttcgcaagatgaacagtgataccatcttgagaaattacatggcccaagaacttgacttcagtcatccaaaattcacacttctctttcttagcatatagttgatcatgatctctcaatgtttgtaatactattgtcaagtgtttagcatgatcctcacgtgtcttagagtacaccaagatatcatcaatgaataccaccacaaacttatccaagaaaggtgtaaagactctattcatgagaaccataaatgtcgcagcttcattcgttaacccaaatggcatcactaaaaactcaaagtgtccataacgtgtcctgaaagcagtcttagggatatcttcttccctaatcctcaattgatggtagtgttaggttatatttaccctatgtttcgggtttgaaaagtaagcatttctcgtctattggtgtcttt

SEQ ID NO: 272663 - DNA, 869 bp, Cannabis indica
taggttgggtccgagtcccaagttccaatcccgatctgtgtctggattcagttctgggtctaagtccttcgttctgatcctggtctgggtttgagtttaggtccgagtcctggtctagctttgggtctgattctatttgtgggtttgagttagggtctgagtcagtgtccgggtttgtgtccaggtcaggaccccgatctgggtctaggtttgggtcaaggtccaagttcgggtcctgagtgcaggtccaagttttggtctgtgtcaggatctcggtccagatctaggtcaagcatttcgatcccagtctgggtctgggtcttggtccgagtcctagttcgtatccggatccctatctacgtccaagtctgtgtttgggattgggtcccagatttaggtccaggtccaggtctcacttccggtctgggtacacgaccgtgtctgggcccaagttccaatctcagttttgttttgaggctaggtctgtgttcggttctaggtctgggtccgggtcctggtcacggtcctagtctctttctagggtcctggttcggcgattcttgttcaggttctaatttttggtcccaagtctaggtctgggttcgggtttggttcatcgtctgggttctggtcctagtccgagtccagatctagacaccgactactggtctattccaggccccgttttccgaatccctggtcccgtttttgagtttgggttcacgactagggtgcggttttaggtcctgaccctggtcctaagtaccaagtctggttccatgtttgggtttgagtttaggttcgggttcgggtcctgagtataggttgggttgggatccaggtcccgctcctaattcgggtctacgttt

SEQ ID NO: 272664 - DNA, 1021 bp, Cannabis indica
gttgagttgcggtggctggtttgggtgcagaggatgaactagattgatcctctttctttgggatgtttgatctgcaaggtgttgtatttagattgtgtggacttggccttggtttggagctcgaactacccttcttgagttgtctttcaactttaatttccatgtgcaccagatattccaattccatataatggtgtagttcaacggtattagcaatcttgcgattcaatccattcaaaaaccttcccattgttgcctcccgatccccttccacatttgctctaatcatagccatctagatccatatccttgtaatactcatcaacacacttttagccttgatgaagactttacaacttgtggtacaagtctcgataatactgagatggtacaaaatgctgcctcatcaccctcttcatagcctccaaagagtcaatctctcgttatccattcagccttcttttgatgcataattgatcccaccaaacaataaaatagtcaataaattcaatggcagcaagttttaccttttccattttagaatagttgtgacaatcaaacaccaattcaatcttcttctccaactccaggtatgcttctggatccctctttctttgaaaggagaaattttcatctttatatttcccaaatagttatctacctagttcctaacttctctatcccgaccatacctccgatggttacccgctggcatcccatcaaactcttcatcagaaattactccttccccatctacttcattatcatccctcttgtaaaacctattcctgcagggcctctgttgggttccctcttctaccctatctaacctcgcatgtatttgttcacactcctctctcatcatcctcctcatctcccccacaaagcttgaagttgtagatttgaaaccgtatatggtgtagtttcattaccggtattttcttttggaaatttttacatgattgaattctggaaaaaataatgttagatcagttaacaaaaagacctcaccacactccct

SEQ ID NO: 272665 - DNA, 1020 bp, Cannabis indica
ctttctctacggccaggataacttctcttgcttctgctgcgctgtccgggcatacctctcccaagctttgcctgaatctccatcaatatgcggacctcctacgatgacttgcagatgtccatctaccggtggagctagtaaatcttgtttattgtcgttcctttgaccctcggtcttgacatactcctgcaggtgtggatcgcttttccttattaggaattaaatttcccgcttcaagttattgcattcatttgtgtcgtggccgtagtcttcgtggaatggacaaaactttgtcatgtctctcttgctgacatctttcttcatgggcccgggtttcttatatggggccagcgactgagtagccatgtaaacactttctatgtcttcagtcaagatagtgaatgtagtgtactttgcttgattctcacggggagcttgctcgaatttcctggagaactttcccttcttcccattcccttgcctgttgttggaacgtttaccaattgagttcgaattatttgggtaatgggggagttgggcggacgttccagtcggaggagctttcgacttgccaggattttgctcaccttttgctcgttgagtggcttctttgagcttgatgaagccttcaacacggtcaagaaattaactctctaccgggccgctcttccttatatccttccaaatttcatcgaggacttcaataccccacagtatcgcgcaaatttttccatcattagttacccgtgacactttggtcgcctccgtcatgaatctgctgatgtatgctcggagaggtttgcctagtctttgcttgacttcgacaaggtctccaagatgcaacagaagttgctgagaggacgagaattatgcatggaattctgaagagaaggctttccatgaattgaactttccgggggccaacttgaattaccattgttgggcggcttccaaaagggtagcaggaaagattctgcaagacacgtcccctcgtatcccttgcaaagccatttgcatctc

SEQ ID NO: 272666 - DNA, 774 bp, Cannabis indica
atacaagagtgagatattaagaaactaaaaaaaaggaaactaagaaaaagaggaatgttaattataaataatggcaataaataaaagatttggacatctacataattattaatatttataacaattttaataattttatttggtttgtaaaaaaaaatagattatatttatgtgtttgaaatatattagtatgtatttttttttttggtgtgtttttttaattaactaatttttaaatatttgtatagtattgttgtataatttttttaaaaaggtcatgttattaattttatttaaaaaatgatttaaaattgagaataatgtgattttttatatacacgtattttttttgatagagtgatcataattacaaaaaatacagtcgacaaaggaacatccatctaacaagctaatttttagatattcaaattttagtggttatgttgtctaattttttgtaaacacaatataattttaaatatatttgctagtataagtaaaatcttaaaataaaatagttatttaaaattgatagtctaattctagtgatttacttattaaaatttatcgcaacatgctcagccggtctatccattttaatgaatgatgcagttgtagacatcacaaccgctacagtcactataacaatggcaaactgctcaactatcgcttcctgcataattcaatgagaatgtgagatccaataaatttatgtctcagttagagaaacaaaaactacaatcaccacattagcattatttttcattttttttt

SEQ ID NO: 272667 - DNA, 848 bp, Cannabis indica
agaaattagaaaaccgatgataatcatggtgaacaacaatgctctgacatatattagtagacaatgatatatattactcagaatctcagatttcagatgtataatcatgaggtaggttttacattcgaaatacaaacatagtaagtttttgagttggaaaggtgataataattatgcttatatttatggtcttcttttaatgatttgtttgtttttgttcctatatatgcaattcttttacaaaacaatgtctctgaattcattccatcaactctgcttatgattaagtatacagtgatgaactgagttgcttaccttggtttggtagcggatgtgtaaagtttaacttttcaataaaaggtgaaattttcattacaaaaaaaaaaaaagtatacagttgtgaaaaatcaatactaatttagtcaatccaattggtatatatgtactatatatgtataatcaagtaataatcaacttgtgtaatggattatggcaagtttattttttttaaatgatatagtttttggatttttttaattactgtaatgaagattgccaattactaaagatattatacaagcattttggaaccttaatagtctatctaactaagattacaaggtaatatattgactccttattttctatagaaatttagtttaattaatttgtaaattttattggtatataatgtggtgtttttcttaatattagaaagaatttatttatgtagatgatcataactgaaagaaattcaaaatttgaatttttttacaagtttcactaggtttagtcttaaaatttagattttgaataagtgaagtatcaaaagttatattttatgcatt

SEQ ID NO: 272668 - DNA, 1337 bp, Cannabis indica
tttttttagaaaattattttcatgtcctatgtggcctgaggtctttttagaaaattactttattttcagccctaggttcttcatgtttgcatctttggccataagccctctatttttgaacactactagtatttgatcctgttgcttttttatcattgattgtgtgactgactaggcggtctttaattttggctatctttttagggccttgaaaagtaagggttttcttcactttgccaaggtgaagtatgcctgcaggacttagaggcaggtttagtagcttatactaagcgttaaaatttctctacataagttctttgtgctagttcgatgtgttctatagtatgggtgccccccaagtgaccatgcacacaagtctcttggtcacttgctattgatcaagtttcatagactttgcttgggtattgtcttgtgagggtaccatagtatgcatgtggaactaagagaataactttgagaagttaatctgtgagcaagtggctcataaacacaataaacagaatataaatattgcaattattcattaattggtctttgttgttgttcaacttaaatagattgaatctacaagcctatattacacaaatttagcttgtagatgtcaagtggctaaccctgctcgcctactgaagtaggggctactattgaagaacagtgggagaccaagtccaagaagggtcgtgggtgctagcactttttgtactctaatgttgagtagatagaattgctactttggagtagaaatctataagctggttatttgtagtatttgcaaaggtgctctctattccaatatcttggtaggagaacgagctccatgttctcattgtaccttcccagcttataggtgttggggattattttaccatgatctatatttactaccatgtatgttatttaacatcctgtttatataagggtggttttattagacgatcggaagtgttaaattactttgttaagtaacaatgagagtaacagagttattactctataaacttgttgtggggttaacatggttttcttaactaggtaacagaagaaattggttactttattaagtaacattgattattggttatcttattagataacagagtaggttgttttattaaatgatgaggtatataattaattataatatgagatttagaacgattcatcgagtgtgtagatagcattaattgcaaggaaacaatggtagcgtatgagccagggagtgaaaccttggtggtaatgatgggaaaagaatacaagagtattagattttgatgagttaatattgtcaacgagagacttgttggaatttattttac

SEQ ID NO: 272669 - DNA, 481 bp, Cannabis indica
ggaatggagaagaaataggtgggcatgtggggaatagaaaaaaagtaggtaggcacgtgggaaatgtggcgagaagtaagtgaccattttttaatggacccttataggcgacgctttgacgacggttaaaaatcacattttattaaaaaacgtcgcctactttgtttactacgattttaaaccgtcaggaaaatttagtattcccaacgattttaaatagttacttaatttttttagcgacagtccccgaaaaatcatttttaggaccgtcgcgaattttgtggcccaatttttgtctgatgatgttgcccgattgtggcattggcagaattttgtgataggcccgatgggtgccgatattgctccgatgttgtgttcgatggtttgcagatttatggtattttcaaggatttgtatcactattttttgatatttttgttctaagttgtaattgtatttttttaatgtatgtgacaggttc

SEQ ID NO: 272670 - DNA, 637 bp, Cannabis indica
ctgttaacgagcaaaatgacacacaatctgcccctgacaatcccactcctgctgctgtacctagaagaagttcaagaatgtctcggccgcccagctatttgcaagactttgagtgctataatttattggaagagaaaacttccacttcttttcctatctctaaatatatgtcatattccaaactttcaaaggcttacaaaaattttattcttgcagtaacagccgagtttgaaccccaaagctacaagcaagccattcaattcaaaaaatggcttcaagcaatggacaatgaacttttggcactcatcaacaacaaaacatggaccgtcgtaccactcccaccgaacaaacgtgccataggatgtcgatgggtctacaagataaagtacaatagcgatggtagtgttgaacggctcaaggctcgcttagttgcacaagggtatacccaacaagaaggattggacttctttgatactttctcacccgtggcaaagatggttactttcaaacttctattggccattgtcaccataaaacaatggcatactttacaactagatatcaataatgctttccttaatggagatttggaagaagaggtttacatgcaaattccacaaggtctcacccttcctcc

SEQ ID NO: 272671 - DNA, 992 bp, Cannabis indica
gtagttgaattagaaaaaatggtatttttgagaaaataagataaatagttaaaaatggaaaaattgcaaagtaggggcccacatccatggccaaccacttatgggctattttaccatttattttattatttttttgatgccaaataatttaaacctaaacctagttagattcctataaatagatagtgatggcctcaaattaaaagatgatgaacacacttgccttcagtcaaaaatttgaaccttcttctctatcttattcgaacccttcctctctaccgaaaggagaatcaggctcagatcttggtgatactctgctacaaaaaggatacaagggttagagatctgagcggaaggagtcatttaattccgctgcatccaatgtaaggtttctcaaactttatatgtgtttaaattatattgttttagaaatgagtaatttgcggcataacctccttaagtggtgaggtttttgcaaataacccccaattctaaaattttggtggtaaaacctcctaaacccaagttctgttagcaattagccctttccatccatttttgggtattaagtgccaggttggaatatctacgtgtacacagtgtacacatagcacaatttaattagtccacataataaatatttaaaattaaaataaaaattaattattttaaaaataaaaataaaaaaaattattttttctttaaaaattaaaaaattaaaaattaaaaaaacaatttttcttctcttcttcatcttcttcataccatctacatccaccaccaccaccaacatccaccgaaaccacaactaccttccatctacaaccaccacccaccaccacccaccaccactgaaaacaccactgctcaccaacgccactaccgtaccctattttttatacctaaatcacacatacacaaacaaaaacaaaaaaaaaatacaaaccaaatttgagaaccccaaatctgaaaacacttcacattcatccaac

SEQ ID NO: 272672 - DNA, 587 bp, Cannabis indica
tctggtggatgcatcttatttttcttggcttgggacatggccaagttgtaacagtgacaggcaaattactaatctgctctcgacaacctacctcgtggcttattgggaatttcaggcaaaggtggtagatggatgttattgccttcaggttgtataggtctggttagcctatcatggcgttgaaagctgggggaacgtaattatgaaaaattgcaccatcacagctctggtggttggactttccccaacagtgaggggtagtcttatgtacgcgatggttgcaatgccttggccaaagaggccatacatcacttgattgcagggtgccaagtcagcgggttggagcctcatcttcttgcgtgttgattttgaaaagaatgtttaaagaggctccattgtccaccatatatcttgctacagtcatattcctgatttgtgcggtaacgagcagggggccattgtgcgagaaactatcttggacaatatctcctttttgagaaagagattgtgggctctccaagctttggttgcttagagccttgttcttcgccttgcaggaagagcttttttgcttatgacagagtgtt

SEQ ID NO: 272673 - DNA, 648 bp, Cannabis indica
gaagttatggtgtgcatgagttaaatctctttagtcaataacatccatggaggttatgacttatgaatttgaatttcaaatggtgatatcctaaacactatataaagaggtctaaggtgctcatattgaagagaagtttctatcaacaaaacattttgctataaatcctaaaaggcttgataattcccaaagttttggacaaaggtgtaatacattgttcaagtcgtggtgattcccactaatttacactcaaggttgtaagtgagtgtatatacatatattattatattacatatgttgcaatcttcttctacaaatatgtaaattttattttaatattataaactacttaaagttttttaaaaatttatatatagtcttaaataattataaagtgatgatcataaaaaaataaattaactaaaaaatatttcgtaatagattaagggtctatcgaaacacctatagaggggtattaattctaggctaattagtaatttttctcccataattttgacatgtactaaatcatgccccctcaactttttagccgttaaaagttcccctcaaactattgagattgttaaatttaaggacttttgtttaatttcaatttcaattttactatttctagtgtattgtttatgt

SEQ ID NO: 272674 - DNA, 563 bp, Cannabis indica
gaatttaaatttgatagatatttaaatgtaatataaattatttatgattttcatttaaaccaatataatttgaagtcaattttgactgtatatatttatacttttttaaagcaatttgactatatatttatttatataattaaatagaaaaaaaaaaatctatctatgtctatattttaaatattttaacaaacacgaaattcaaattttaatttttaataatgggtaacctccacttattattttttgagtgaacttttataatattttgaggatgtatttttcaaacaagtaaaaatagtcaagtaaattataattaaagaaggaaaaaaagaaaaacttctattaattatattatctcttatctttttaaaagcatcatactaataaaaaccattaagtgaatcactaaagaatctaaaagtgattctattgatctgttattttttatgtttaaaggtatatcaagtaaattaattaagaactaaaaccaaactaatactgcaggaaaaaaaaaccaaaatatttaattagttagagcatcatattcttatttggcaaat

SEQ ID NO: 272675 - DNA, 6932 bp, Cannabis indica
cctgctgcaaaatccgggtaaccggttttacaggtattgtaaaaccggttagccagttttacccagaaaacccaaaaaactttaaaccataattaaattgattccaaacttaaccaaaccttctagacctgcatattataccccaataaatatttttcaagcaataacacaactacccaagctcagaattgaaaaacaccattaaagctccaagtttgagttctaaaactcaaaacttgatgaaacctacttacagccactaaaacatgctcaattcaacctatctaaacataatttaacctctgaaaacaaaaacaaacaacaacagtgagaacagcaactaaaacctcacttcatgcaaaaattccttttcttacaattcaagaaatcaaagaggaggttgctagagactttaccttggcttggattacactatgagctgctggaaataactggattgaagaggaaaatcaagaaccctagctagtctagggggttcgaaggagagagaggttgaaagagagagataagtgtttatgtctaatttttctatttttgtaaaaatgaagaataaaataagtttaatttgataaatatcagcttatcctttatttaaaaaatctgatttaaagcttaattaaaatccatataaaacgaaattctaataggcaaaaaaataattttgccctccccacactataagccattaaaggtcacaagggtatttttgtcaactcaaaaatttcgactattcccgatattcccaatttgtaactatattgtcccgctatactaaaaatactaggatgtgattctaatagccaaaaactgcgttccaatgttgccgggcacaaaacatgcaaaattatgaaatttctatatatgacatataaaatgcattctgaattcaaataaattatcataaattaataattcaaaattaataaataatttccataattaaatcctaattatctgctaatttccaaattatagctaagcggtctttacactagaagactgacctagcacccaggttaacactgggcctagtcaccagctcccaggttgacattttctcaaccttgccatttccaatgacaattctgacaaagtcttttgagcatattctccccattcataaaaaattaagatatgcgtgctttcgagaaacaaatggagccactttgtggccaaaaagatgacctaatagccaggttgacataacttgggtcagttctaagcattcttctcaggaagtctctcaggcattttctccttttttgtcaataacaaagatgcaagtgttctcgggaagtaaacaaaagcatttgggacccaatgacaggttgaaactggcgtttgtcactgtgctcaggttgacgtccaacctaatttgcttggttctgctgctcaaatgaaaattctactccaggaattcttcttatcttggtccaaaataggaagagagacctcattcgtaatttctaataccatagaagtaccaaaatgagtcttgagaagctcaacaatgagcacccaacgcccaggttgacatatgacctggtgcgttgggatctgcttatctgattccagttccatcttaagcatttgattataatctatagtaaacaagaggtacgacttgtgacaagttaaatttacactttgatatttcacctttttcaacagagtgaaacatcaacaaaatagttacaaattgggtagtttcgagtatttcgattccgcaaagatacaaaactctaaaaattggtgaatgacttcaccaaacctaagaaattggctaagtgatgtcaaaatatcactaaagcatcacaaataaagttccttcatgatttcccactcatatagcgtccaagttgatgtcagaatgtacacttggacgctggatgtcaacctgagcactgggtgttgaactactatcaataaaacaactataacttactcaatactactatgattgacatgattccaagttcttggaaagctcttttcaagctctttttatgcatgtttcacaatcatatctcaattctcaagattttaagtcaaaaaatcatccccaagtcgaagtgtaatttttttcgcaaaaagcctaaaaatcatccaacaaacgcgattcgagctctaaaaattaacgattatcatacaaagtcattttaaccattacatcatcattaaaaggtcaagtttagcacatgatgatttgttcatattttttgtattattttattaatattttaacggacctcctcgcctataaaaggagcgtttcgttagctcatttttcgcattatgttaagtctccataaggtcagagcatctctctctagtctctctctagaatatgagatctctccttagctaattctcttgtaattcttacgagcaataaaaactcaaagtagatgtagctctattactatcgcgacatgaaaagtgaactactataaattgtggtgtctctcttatttgatgtctttcatctattacttttcttgccaatctagagagacagtgttggccaatttttagcgtcaacacatactcatacactcaaatatatatacatcttatatattctacatgcacacgtatattaaatatcaaggattagataacttacttcttgaagcctatcaatgtatccttcaatatttttgaaaacaacaatgatcttcctatccttgctttttgatgagtactcacaccaagatcttatagaatgttctctatgttggattttataccctaaataaaactattctatgtaatctcattttattaattcaataaagaaaatagaaaatattttatgatgttgtcaattgcttggttcacacgttttgttttacatgattataagtctaacatttaaattctattaaattcaaaaaaaatatatatgcataatcattgtgatgtcatcacagtggaaaataattgtgattatatgaatcgaatattttagttctgagatttatcagtacacaggatttatatttacgtgataatcaacgatgcagtctatttacactaaggaaaagtggcatgtattttctaagacattggtaaaatagacttgaataagatatatctatgtttatatcagactagatcgatgttgatagaagaacagatatcataatcttattgttatatctattcttattcaacatcacttagtttatcatagatcaatttgatctaaatcctagattaagctttaagctaattatgtcattagagtttttttgacttgtttgttactgttatccgcgtttctagacaagcaacatgtgtacgctcagtatccctaagactatttgcaagtcaattctcatgacccaaataagtagcaatcttgcccaataatagatggtccgaatttggtcaagactgacccaagagtaaacccaaaccacacggacctggagagcaaattcaaccatattaacacgtgtctgataagacacaaatgggtaccccaaggttatcccagaatggtagttctcaagatgtggtggaagcttacctcacaaaaagtgactttgtaggatttgtctgatgtgccatgcctttgacacgaagtcctacaaaattagggccttgtccccataacaggcctagggaatacacacaacataaaaagtaatttactttttgtccaacgtccactccttagtaccaggcttaaaagccaatattaaattgtattttacctcattagtaggcttctttctaggtgtcgaaaccctatcaggtttgggtttgatccaaaacccggtcttaccctataaataggattttattccttcatgcaaagggttacaaacgttagacaagaaaactatgcaaaaatttggcaaaaatacttgtgtaaaatacttcatagccaaagagattcaataatattgactcatggactaaggcttattaacatctcaaccacgtaaaaatccttgttgcattgtctttaatttattcttctttaagattaatttatttcttaatcgatttctaaaaattttgataaatattttattgttgtcattgagagtttgaagaaagttttgctatagttgttgttaactcaaaaaatttctaacataaaatgaggcttagataattaatgctttgaatatcaaaattaatataaataatatatgcaatactgaatcataaatgatgaacatggagtttttattgtggttttgtagtttaattctacatacttcacgagtctttattatttcttggaatattgaatatcttatgaacaatttccccccaattacattattcctcctctagttaaaagggttaatgaaacgtgaacattgcccatgtttcatttatctataagtatgtgcgaacgattttcaacctacattcaaaatggatgactgtttttctaagatctcaattgttatccacgtttttatatggatgacacgtggcatattaaggatgtaactgatccgtatcatcagcagcctgagccttccagcatgcgaaggccgagtccaaaccagaggcgggccccagccctttatacttccaggagcttcgcccttggaaataagatcctcctactcctggaagccctttttattggagtttatgccctaaaaggaagtaattaatggataatatattagagaatatatgaaatacatttataagataaatgatatatcaattataagagtataattattaaatatctaaaaatttcttattcatatggaaaagatataatcttgtaaggatgtaaaagagaattaagattatacgatatgaataaaataagtcggtagtgtatgaaagtattgagaatctttaatatgagactgttaagtacgatttactatacactatacttctagtgtttgtgattttgatttagatcacatatgtagatggacatgtagtaaaggtactatatatatattagattatgcatgagtggactgatatgtaataattggagggcgaactacttatattgattatatcaatttttcacacttttcattctattccacatgcccacagttctttgagaaaaacaatttgttttctttccctcttgacgctgattttttttttcttcttcttctatttctttattaatcttatcccaagggctcctaaacttcaaaaacccttgaaataatttttccaagccttccaaaaatccaaaacactctacttgtgccttgaaaaagtcttccaagctactttgacttttttcaaccaagtttgactttccttgagttgtaagaagcttaaattattgagcttgagatggctagtatgaagagaagtagaaggttacttgatgaatatgttccccatgttgctcaattcatcagagttaatctgacattgcctaagtctacgaacatagacaaggcacgtggtggaaaagtgatggcaactgagcttcttaaagctgccattgagagtgatgatccaagagatcaaacctttaagcttaggcctcttgtgtctagtatccttaccgagcttcaagctcaaacaacttgggatgattattgtcttcctgaaactatcattcaaaagcctcaacatggtgctcctaagggttcccagaatacttgttgtagtgcctagtcaagattccacatgaatgtgggtgcttacttgcccgtgcatccatggtttatatcaattgatgacttcttctgtgtatgcccttactagataaacccaaatggctataggattctagccaccttcttcatttttttatcacattaagaacttgcctattccaactcctcatgagataagctttctttgtgactttaagaggagtccaacccgtagagatcaatgcttttaccacttttaccaatttggcccatttatagaacacataaccaagagtaattgtgccctttactaccaatagtacttttatactcttgttcttccgttgagatacattaccttcaaaaaagttcaccctttcaaaagacctgctcctctattattgacatgaagaggagagctaatgtcatgttgcttgaaattgatgcatgtgagaatgatagtcgagccctctttagtactaaaaatcttcgaaaagttgggttgatcatgtcatgccacagagtgtatgctaatgttggcttccttgacgagtcttggaccatgccactcgagcaaagtgatgaagatgcttagagtgctattgttattctatctcaaactttgacagaagaagtgttttctatttgaaatgacacagaatattcagtgataatagctgtgttcttagacaaggatgaaggagaagttacctctgctaggactgctccagagaaggatggggaatcagcaggttactgacgctccatgctatgatcttaacttgttgacttgcttctcttagttgtactaacctcttgtctttactttttgcagacaatatgagctttttaagtgccatggcatctttttcgtacgtgaagaggaagattttgacactaaaggagactaagcctctaggaagggaagtcgttcaaggcattcctgctgcctctgctgcttcgaagatgaaggtcaggttgaagggtagaactgctaatgccgctcttcctgctcatgactttggtaaggagaagtctaacacttctggtgctgataagagatctttgattgacctctctttagatgattcagaacatgctactccaaatttgggttcgaccttaatggagaaattgtgtgagcaaggctcctggcctctttcaaacagtgagtgtaacgccccaatttcttgagacgtcacacttactagtccgtttaaaaccatgtaagttaaagacaataaaagacttctctaattaaaaataactaagcatgagatctcattattt

SEQ ID NO: 272676 - DNA, 1034 bp, Cannabis indica
tcagccatgaaggagatggttttctttaaagaggacagttttttttgagctttttcacaaaggctctcaatgaaagcaccaaactgttaatgcatatttttgttaaccaaatatgaccctaatagtgataaatttcacacataaaaataaaaactgtaaaggaaaaagcataaacacaaaggattttttacgtggttttccagttgaaattctgcatagtctacgagtcaatcttattagatttctgatagtttttcagggcctcttttcttatgatttttttcttaatctaacttgcccttatttataatcacatagtaggaagttaattacagagttgactgtgatctttacaacgtttatcccctgaaattgtggggtttaattacatatcacgtagtataaatgcggttattatttgaatatcacatagctgtgacttatctgcttttacagggtcaaaatgattgtgtatttaaacacattgtaaatcataacgctctgtgatgtgccttgatagcgagctagagtttttcccttatctttccgaggttgacggcgtacgcctcattaattctttattaaaaggcttaacgcttcattttgacaatcgcaattcttatcaatagagagtacttctgcagtcatcataatctgaatgtcagcttctaactcgtcaaaacaataagtctcactgaaagatgtctaaagttgactggtgaaagtaataggggtgcaccttcttatagctagataggcgcctcgcttattaggtcttgagtccacccaactataatacttagtttgtacattttacgctaagtgttttcacagtcaatatgcattgctttcgtcttcccaggtataacaaagttgatgtctcgccttacgcatacaatgacgtatgatatttcgttaatacatgaagcaacggtttgtatatttttatctcgcagaattttcatttggagttatgccttctattaagaagtctgccatggcttggctttcgatggatgtttgagggtggtatg

SEQ ID NO: 272677 - DNA, 647 bp, Cannabis indica
ctttaacatgtactaaatcatagtcttaagactttcatccatgttagatttttttattaaaattagagaaaaaatccttaaatctaacaatctcaatagtccagggagtatttttaacgaccttaaaagtttaggggacatgatttagtacatgtcaaagttcaggagacaaaaatcctaattagcctatattaaattatatgatttgatacttaatttaattaataactatatacttaatttaactaatagcagtatgataacgaaaaaaaatactaagaattattattgccttctagcacttctcgtgtatagataaaacattactatgagacacccaccactatgaagtgtcactatataattgattagtaattttttataatatttattaaaataaaataagtgagatctaaagttaagttgcaccaataataatgttacacctcaaaaaggtgataggcaccacgtgtacccttttaacatttctcacatatattatatataatataggaaaaaaatttatgtaatggatcaccttaaagtatcattctggtagaccatttatctatttcggcatgaaaaatttttagtttattttttttatcttcgcatatattgtaactatttaagactacttataaatt

SEQ ID NO: 272678 - DNA, 1223 bp, Cannabis indica
ccatcaatgtaatgttttctatacatgtttaattcattatttttaggaaatttatattttagaatgttagatatagaattataatccaacatacatattagtaaatcttgatcctggtaaatatatccaatagatggtggatttgggggaggaggagtatgctcgggaacaattgaaatttgaacatgcaggttagaactagaagtgttggaattggtaagagtgggaagagatgtattggtagtagagtaagggaaagagtactcattgaataaaacatcttttgagatgtacatatgactagtgctataaagacattgatatccttagtgtttgatactataaccaaagaaggtacattcttcagacttaaattgaaacttgttcctattgttaggtcttgtattgggaaaaaaagaataacaaaaaattctcaacttagagtaataagtgtacaaggcctaaaaatgagacaagttattgataatatgtgatggcaacctattaatcaagtaagcagaagcttttacagccagggccggccttaaaaagggcataagacagttttaataatagtaaaaaatgacccttttatatatgtagttttttttttatttatttatgtaatttttaataaaatgaaaatggtggtctattggtcctggagagagcgagaaggaaaaaggactgtcgagaacgatatagaacgactaggcttttgagtttctattttttttttctttagcctttctttactgtgagagacttaaagctactttttggtttggtagctattgggccgcatggggccagggtttaagttttataaacctttatttttttttccttataggggtatatatatatatatatatttatatatatatgtttggcttttagttttgggccttaggcacgggcctagtttgccttaacctagggtcaggcctgcttacagcctcatcccagaatttgagaaggagggaagcatgaactaaaagagtaagagaagattcaataagaagcctatgctttctctcatccactctatttttctcatgagtggttgggcatgaaagtctatgagagatgccatgtgagagaagagtgctttcaaaagcttgaaaactcacaccccaatcagattagagggctttaaattgcaatcaaactcattctcaacccgagtttcaaaattaatgaggcatcagaatttgcatttc

SEQ ID NO: 272679 - DNA, 1164 bp, Cannabis indica
gtttacagaggaggtattaaaaaaaattatgaaaaatttggaaaaccgtgatcatgtgctctgcacctcctgacgcacgtcccatccaactgtcactgacgtcatccctctcttcagcccactttgacatgacctccatccattcaactgacactaacgtcagcccccctcatccactaaacgtgctcaacaagccaaacataaagaaatagaataaaatggaaaaacggtaaaactaacggtatattcaataatttaaaaagtaacgttatattagaattaaatggaaaaaaacgtgtccacatgtaattttccctaaaatttataatattttaagtattttaaatttaaattaaaattattttatataaaatatttatataatttttatccacctaattttgtatttttctaaaattaataaaaaaataatttgttaagtaataagatgttatattaaaattaacctaggaaaccaaaaaaaacaccgttaaattaaaaattttgttacatagtaatattttgtatagaattagaatagatatttagcgcattgttattaagcaccagtagtatttagtatcttctagatgtgtcgtcttataattggctaataatattctctaaaagttattagttaaattgatatataaatggtgttaggtctaacatttctcatatatttatatatagagaaagatttgaaattattaatggacaaacaaatattatatattaaagtttaataggtgtggatatatataataaatatatataaatgtgtgacatatatatatattgacgattctaactgagagcttggcatattccaaagtgcaatcggagtaatcattttctgatctatctctctctcacaaaggaccaatatcttaatcatttttatttatttctccaaaaatattcattaatttttcatcaaattgttgtcattcgggtgatttaattaattaataaaatatgaattaatgcattaatttacactttaatatcaaatgtggagacaaattctaccaactaattctaaaaagtactagaatataattaatatgttataatttttagggtaaaatttggactgcaaaagttactaattaaattttttattttgttaaataataaaatggaccatgtactttctaaaat

SEQ ID NO: 272680 - DNA, 7327 bp, Cannabis indica
attaatataattattccaaaacacttaagaaaatacaacatatttgagactaataaaagttataacaacaacaataagtcaataatctttttaaagtttcacttaaattccaataacaatatagatttacaactaacaaactttcagcaatagattaaaaataaaacaaacacaaactttcaactccaaatttcaatacacatgtatgggcttgggtttgttgctaagaagagagaatttgtgaagagttatggattttgccttaagatttatgagtttgggttgggctcatatgtatgggcttaattaaataaatataaaaattaaaattttaaaacatgcggtgcggtacggcatgaatcgcgatttaataattcaaattcgcaaatcgcaccgcaccgcgcggtttgggaaaaattcaaaccgcaaccgcaccgcgaagaatttcaaaccgtattttttttgcagtgcggacagtttgagcggtttgatgtacacccctaccctaaacactataagttaagctagtatctttttttactatatacaaaaactaattattttttgaattgaagatccaaatcggtgtacaatcaagttgtctttagggtatggcgattgggttgcccctcggcctcaacccaatagccctctccatctctttttattttaagttttttttttttatttaaatattagcccataaaacccacacaaactttttgataaaaaattatttgaattacattttattttgtactaaaaaaatacactttatttaccaaataaaatacttatttttaaatttaccaaataaaatataatgagctaaacattcgaagatcataaatgatattattacgaagaaaaatagtgtcttaacaggaaaaaaaatggtgtaaatgattattaatttattgtgacaattttattaaccactcctaaaaaaaccacataattaatttgtgtacaacattctataattattgttaatcaaaatttgatgatgacataaacataattactgccacaatgttttgtttctaaagcaaacttacactaataaaagccaatatttattattaattaaccaagataaaatcataacaccctctaataaaaagtaatcatatattttctcaacttaaataattagattaattggtaataagtttaatgagaacaattcaaaatagaattatttatttattattaaaatgtggataaataataattggtgtattcacaatacaccccttttaaaggagatgtattgatgcatcattcacttgtttcggcatataaatttttctaaatttcttaaagttttagagaatatcttaaataattataatatatataaccatgagaaaaattgactaaaatattattttgagtatcaaaataaacaaaggtgaatcggttcatccttttaaagggttgtatggttgaatttttcaataataatacataattaataatgataaaaaaagtaagttaattgaggagagggggttgcttacaataataagtacaaaaacaaataagaccatttttacatactccaaatccacttggctctaatttagaacattcttcattacaactctcatcaccacattttgtcaacttcaccaccttttgacacgtgtgctctggtatcctcaccattccttcactcaaaaatcccaacaattcaactgcacatacaaacataccatattctaattccatcatcatcaaaataacattcaacaacaataataaattcataataattatattactacttgaattaatcttataaaacatgttaagaccatttggatttcaacaatgtataattttattcataaatcttcttcaaacattcctaacaactagcttatatctaagattgtctctatttttatcggacctaaaacaaaataaaattcaaataagtctttgaaccgtttctctaacaataatttttctagagtattaagattagtgttaaaaaaattaagaaaaagaaactgggaggccctcttgggttaaggggccttggactactgccccggtcgccctactctgaaaacgatccagcttataataaagagagagagagagtaataacctgaaaaaagaagcaagagcaatagatgggaggaaatcttcatggttttagtatccctttgtaataaacttggccttaggataaaatcacctaactacttcaaaattggcaaaatgttattgttattgcctagtcatataacaagacaagcctaacattcttaaagctaagctatatataatataatagaatagaatttctattggaatggaccaaaaggatggcaaggaataaaaatgtaaaatgtatttcttaagataattataataattaattaattaattacacctcttctctacttacttagtaattaagatttcaccatatatagtcacttttgtgtgttaataagctttttggcacaatcaaattccttgcttggctcatacttttcaatacttatgtgttaaattgttataaactcattgctatatatccctaaaaaataagaaataaaatttatttaaacaagttgtctaatccatttaaggacagtacatactaataaagaccagagtcagtaaaaaagtaacaatcttaaaagaagcttgtgcagtagtataggcaaattaagactaaatgaacaaagagaattgtatcatctatatataccattatacattcaccaaaacaaatatatgattagtaatgtgttttaactatgagaattgggtaaaaatatttgctttaccttcaattgaattcctaactcataaaagaatataacaaatgtcaagaaaaatcactaagaggctcttttgacttgggtgcctctctaagaagaaaataatgggaaagaaaaatcatgagttcaattttaatttggttctccatacttctccgatcaccttcttcggtccaggatcctccggtcccttgtctcgttgtcctgatgtgaaatacaaccaaccatcccagaacccgactagggtggtttttactcggaatggaagttttccaatcactgaccactcctgtaataaacatagaaaggattacacatcaaatcaaacttaaggctgtgtttggttgaaaggaataaaaccacaggaataaaatggaatgaaatttatcttttcttccatttcaaaatgaatagccattctaccaaaatagcagaaaagacattctgatactttaaaatgcaaactaaacaaatgaatagaataaaaattgattcaatttcattccatttcgttacctctaaccaaacacaacctaacattctagtactattactacgaatcgcttcccatagaaattaacaaatccaaattgttactaacaaaagttatgttcttgacaggggttccatcatgtttttaagataacttctatctaaaaatatagttcgacgtgaaaagaagatgaatctgaaaagttacaaacgcgaagaagacactgccaagcgaaattctataatgtgtgaagcgattacactgtgaccctatgcatggttctgtaagataagtaagtaaagattttgtaatagataaaatgagagtattaccagcttattcaagttaaattggaaaatttctccaaccaaaatcatctttttggttaaagggtgcttatcgcttgtgcctccgagaaggacaatagaattgttgacaatcacccaagcaaattcgatatgggaatctggtttcggcattgggggtagttctttccacttcatctcatcatccaacatataaacatcattatatacaacctgcattaacactaacagttcagtaaataaatgaatgaatgaaaatttcctatcaaatgacaatagttacaacgataaaaaaggtgcacaaacttcgttacctcattccttcgagaacacttgaaaataggcgatccgggttttgccataaagtcaccttcctgaccaccaattacataaagtcgatcattaactacaacgcaagccctacaaaagaaaaaaaagtataattcagacggcatttctttagttgttgtaatcatttatgtgtccatgaaaaccatttcaattcttcatttctgtgtaaggaaaccattttcaaaagaaatttcatctgtgcattgcattcagacaaacctatgaggtcctccgcgaggaataggtatttcaggcctccattcggtttctaacgctttaccatccttcacagcaagactccagtgctccagtgcaggggtatgtcggttttccttactacctcccatcacatggagtctacctctccatagttgggttgcaggtgcatacctgaaaagtaaacaatataaaccattcatataagggagaacgaacttagtcggtttacaataatttacagagactaataaactccaatacccagatcacaaaatcaacaaaggcatataactgcatgaatacaactataattaaccatccctgccccgaaaaaagataatgaagcttttcggttaggaatgactttgcttttcagtttctgttgcttgatgatactaacattaaaacaagaaccaataataagttttagcaatagaatacgaatacatgtcccaatatcaacgtagtcgtgattaaagtacatacctaggaactggtaaaggtggcatgtcgttccacttctttgtcttggtatcgagcacaaatgtacgagctgtgggccctctgcattgcggtccatattgtcccgtcacgacataaatgtatctcccatctgttaccattcccagatgtgaatgtgccatctcttttggcatatcaaaccttcctccccatgtgttgtcagaataattgtaaatatcgacatgagaatgcacctgtagattgtcaaccaacgaaaaaagaagagaagattaggatccatgactgtttgtaatgagagaataagaaaatacacaatcttttccgaaataaacacaaacaagcaaacatcaacaaatatcttccacttcaaaatatgaaaactctagcctaacaacattatacaagtctcaaatgcatacattcatatgtaccagcatccatagcgaaagaatcaatgtagcataagcatattgttctagcataaatcagtatgaaaccatcgaattgcatttattaggatgcattgccccttgaatctaatcatgaacatgtaatatcctgtattagtagaatcatttagttcaaatgtaagtatccatttgttaaatttcaatagcaagtatttgctttatataatgtattggagttatttatagctgatcgtgagacattgttttgtttgtctatatcgttttctaaacatcatagagcttttgaagacagaagagcagcataaaagttaaaaattgaaggagcaagacaaagttctcacaagatcgatggttccatatccggcaaacacaaaaagaaggttttttatttgtattgcagcgccatcaagacgaggtacaggtgcaggagccatcttttcccattgtaattctggtgcaggcagatccgcataagttgctgaaagaattctcccggaaacagtttcattcttatatctgatagttttttcctgtaagcaacaggaatatcagtcattagttatgataaacaaaatgaaataaggactcaatgatggattcataagacaccaatggcattagttaactaacaaacaatgaataaggtttcataattcaatctaagtgaagaaccgtgccatcaaactctataatgtagttcaaaaatacactcttttcccctcatttgatcgggatcaattgaaaccgctccattacaggaccatatattgtccaaattataatattttgtcataactgtttctattttagattttgttgaactctcctggttacgctctaatgaaggttagttctttcggatcaaggagattgttaatgaagttttgtgagctgatcaacaaggagtccagactcatcttcgaaagaagttcgaagaaatctaccgagtaggttattcaattcgaagttactatagttgtaatcttaatcctagttaccgttttcaaatgttatcttttgcatacattcaaactcatattgttgatatacttaatctatcaatttaatagattttctttctgatttgatctaaagtttattaagcttgttagtttgaattgttctaaatgacacaattaacatttgagtagctaaaccactttcaaattgaaagatcattaaaacttagatccaaacataaaatcctaaacaaaaatagctataacatcaactcattccattacatttacaaccaaaatacaacaaatcaaatccaatcaaagctctcaatttactcaagtgaatcattatccaacgaattcacacaaaccaaacaagacctagttgagaatcaaagtgaattcttcagaaattgcaaacttgttactgttccaaataacacaatgaacttcttgagtagctaacccactttcaatctaaagatcattaaaccctagatccaaacataaaatcataaactaaaatacaatccaattaaagttctatactttaagcttaaaccatactcagtgaatcattacccaacgaattcacacaaaccaaacaaaacccaattaagaatcaccaaaagaaagaacaatgagagtaaagaagaagaaaaaagaaaggtgttacctttgggggcaatacaatggtggtttggggtttatgttgagaagtccattgagaggaaaaacgaggtgaagaagcccagaaaatgtcggcaaggaaagcaaaggccaaaagggttacacatatgaggagtaacctcgttgaagtgtgctttccggtgaccctaaccatctcagatatcaatcaatgaatgaattctcaattttctgaaaatgaagaaaggaaaagatccaatcaaaaaataaaaaatgaaaaaagcgtcgacagcaggattcgaacctgcgcaggcaaagcccaacagatttcgagtctgtctccttaaccactcggacatatcgacaattggctactaactatcaatttagaaattataatcaaataaaatagttcattggatcacatctgctgcatttgtgggtgggcatcatccaatccaatccaattacaaaaagttggatatccaattacaattggattggattcgatgttaaaactaaaagttggattctaattggattggatcggttattgaatgtcaatctcaaaatcaaattaaaaaccgatttaattcaattacatttatatata

SEQ ID NO: 272681 - DNA, 918 bp, Cannabis indica
cagcaaggggcggatacccttgcataagtactttagggatgtggtggacttcttcggcctctgcccgacctagattactccaaaggccattaagtatttgtccgctctgttcgtcctctacgcttcccagggatgggatgctccttctccccacaaggtcgcttggttctttgacctgaagtctacccccgagcaaggcaggtcggggtatttttacttctctcagccaggctttaagtggttgagtgggacggacgacaaggccatcaggaaaatagggcgttttgttgatgagtacttcatggtgaaggatccgagcatcacccgaactcggtttcagcagattccaacatatcaccgtcctcccctcactcttgctcttatggatagagctcaaaaacatgcccggttgccgaggaagacaggaatatcatccagttgacctccaatgagaatctagtgcagtacgggctttacctagaggacttttctcctaagtccgtggtggagaagaaggggaaatctgatgctgcctggttcgagcgagctaataaggaggatgagctcattcaacttaagcgagaggctaagttgaagggaggtgccagggccaagcattatgctcaggagcctatgaatcctgaagatgaagccgaggctgacgctgagcaggtgaccccattgaagaggaagaagaaactcccagccacgcccaggcctgttgaacatgcacttcgcataagggacctatttcacctgttcggccatctcatccctttgctggaaaagagaaggttgttatgtctgagataaagtcgatgtcaggtgatgatggacttttgactttctgggcgggcagtcactctgcgctttacttctttttcagcttcttgactttcatgtcttgtattttctgtt

SEQ ID NO: 272682 - DNA, 1009 bp, Cannabis indica
atactttattaattgatttcattctctgtgtgtggccccgtggactaggagtgttcgggagaacactgatacgacgtacaaatcttttgtgtcaagttatttaattttctgcaaatatttttatattctgtctgttctgttttgtcgctgcaaaattggtttctgcagtaacataattacattctgcttctgcaggcgtatacagttttatattttcgaatatatattattgacatttgcaaaaactcggttttttagtcgcttttaaccccttcaacaactactgatcaatagcggtaggactctgttcccaacattttgcggctaagaacagctcatcattaatgagtattagcgtcggagaagggtcccattcctaataaaaattaacagcgacaggactctattgctattgctttttcaagtctcaaattctgagactaactagcatcattagtggcggacgttaacatcagatttcgctgctaattataattgtttatgtttttttttattattacacattttagcatattataattaattgaaataaaaaatatatataatttaataaataactaattaattaatttaaaattaactaatgttaaatttaacatataattaaaaccaatacaaacattcaaactgttgggaatacaattgcacgatcatattattttttaagtaaattattatttaacataaataataattttctataatatgttttctaaaatcttagaattatatgtgtgggtttcagaatacttacagtggttgtagcataacagaatataacttctctcgtttaatgatctaatcctcgttcctctttgtcataaagtattaccagttattgaacctaaatgtccataaactcaaatttgtagctaatttcatcacaactttcctcagtgatctaggtgctataacaaaattatatgggcaagtgttacaacactatagtgtctcaagaaatatagtagtttagagagagagagagaga

SEQ ID NO: 272683 - DNA, 585 bp, Cannabis indica
ccacattgactcgttatatttgaaatgtgattaagacacacgaggtttagtactcaaattagaggatattgagagtttgagagagagaagattgggaggtagagagaaagaatcttctgtagatgaagaagattcttgggtgcaaagtgtcaaagttgaaacactttgtgagaactcaacaggaatctcgtctcgactgtattgtacctattcttgctcaatcaataaagaagaattacggcggtgtttcagaattagagtagagccatagatcacatcgatctatcgaacttgagccattatagaatcttggtgttgatttctttattttttacagttattgttttctagttttacatactatgtttgcttctgtttcttattcgattgttgttcttgattgttaatcttgtcattgctaattgtttgaatgcttaaagtttccatcatcttgattctgcatcattagtcataatttttccacaaatcagagcttggtaatcgatcaagatcgcataatcaagattcattccactgtaaatcttgaagaaacttgaatgtcacaatggcgagatttgaattgga

SEQ ID NO: 272684 - DNA, 3334 bp, Cannabis indica
agtatgatgcatcaatttaactaagtttctaacaaatataactgaagcaagacaaaagccagtccaaagcctccatagtccatattatccctcaaattcaacataacagtgatcaattgaaaaaccacatcaaataattgacagtcaaccctaaacaagcacgagcgcacacaaacaagggcaatccaaaatgtgatgataaatgagtggataggacaagaagacaaaaacaaaagcaataaaagtatgtactatattcaatttttcaaaagagaaaacaaagcaagagggtctttcttatcttgaagtaaaataatttaaaaatagcacaattgacactcagatatagtacaaataatggcaaaatcagttctagccagcaatagagagctacatctcgataccttcactttctttaaatcggtgacaagaagagaccaactaaaatgtgttataagccattgagtacaaaggatcatactttttatttctgttttctgcacgattttcttcggtgacaaaccggcagcattattcacagatttctttgactcttgttgaggtgccttagatttatttgatgcacgtatcttatcaaataatccatcttcagtcagaaatgccgtactacataaggtcaagcaaaaagaaatgagcaggtatacaaattactatgaatatggaaaagcatagtgttgtctatgaatgcaagataacaaacccaagctctttagctttttcagattttcttcccccaatatcttcatcacatagaagataattctgcagagatactatgttaatcaaacattagctgtttaattcaaacccaatcaaatgtaaatgaaaaataaggtcaccgttttcttgctgacggatcctgtaacacggccaccatggcgtttgatcaagtcttctgcttcttctctttccaaactgttagcagagaaagatgttaaacttaaatacattctgaagctaaagaaagaaagaaaaaaaaaatgaattaagctgcagatgatagaacagcaaagactttcacccatctagcaacattctatttgaaataccatttaaaaatagaaatgacctgcataagttatagtttaacagataatacagctactgtagaaataattattttcaagaattctacaaaatgaaacagcgccaaggagtgctgattcaagtgcacaagttatatttataaatataaatatatatatttatacaaatacaaactagtcttcaaccccataacagtttgcataacggacttttaaacaaaaaagcagaaaactacggaatgcacataaaggccatatagtctgtcacatttccaaaaaaaaatctacctgtcaagtgtgccactaattacaaatgttaaaccagttaaacaatctggagtaccttcaggaacttcctgaaataaagaaaataggatttaatgttagagaagaatcaattttaacagcaacaattcacaaagcaaatttaaccttttgccccttgtttggaggatcttttctttctccaaagttcataaagccacctcgtccagcacctctgcctcttccaccagagggtgttgcagaggcacctcttccaccacggcctcttccggcagatttagaaggggttactacatctttaatatcatcatcatcaccatcactttcaacaacatttgcaggcttctgtccagctccccttccaccagatgatgttgccgaggcacctctcccaccacggcctcttccaccagattttgatggtagtacgtctttcacatcatcgtaatcatcgctttcatcaattttcacaggcttttgtccagctccccttccagatccactctttagtttctttcttggggtggcatcaactgagtttttcttagagtcgggcaatacaaagtcgtcgtcatcgtcgtcgtcgcctttatgaactttttttgcaggcgagggtttctcatagtcatcgccatcattttgagactttcttttggctggaacctcaactctctctttttctttctcagcgaaatacttactagtctttctccgccccgaattatctttctcttcactcaccggcacctgaaataatattaatacattatactacaaactgactactgggaaatcattcctcaccaaaaaaagaaaaagtaactggtcgactaaattgtgacattctacactcctaacaaactcaacataagtgtcgtcaactgaactaatgaacccaccaaacttgttaacatgttcattacaattccactggcacataactgatttggctactaataaaattgtaaatattgacacttcagttggagaccaagcaattcaaattttcacttcccaataataagaggatcaacattaaaaagtctattcccctttaatttagactgcgttgcttacaatagagaatatacaacaccaaaactatctcccaaagaagctagcttatattatccagaggaaactaaaacacttccatacgaagttacaaaacaataaaaggtaatgcagcaaaaaccttcacacccacaaatgggataaacaacaaaactcacctgcttgtccttgtctagctgggttttaacctgagaagatttctcagaagccttagaaggaggttgagcagatttcgctggcttggctgccgcatcgccatttcccttgtccttgtcatgcgacttcataaaccacttcctaatatctgactgtgactttatacagaaaaaaaaaaataaacaattctcaccatcacataaaagaaagataaagaaaattcaaaacacaaacttcgggaaaaccaaattatagtgtttcagacaataatatataggtttcaagaaaacaaaccatttcccaacttaccattgcgtgggttctacaacacaatcacaacatgtattcctgcgaaacgccaataatgatatgagtcaaaacatatttcctataaaagcctaaactaagatacgcaatcgaatattgattcccaaaggcataaagaaaaaaataaaataaaagagagagagaaatttgaacgtaggttacagttgaaagggacgttattttgtagtggagagaagagtatatgaaattagggtttaagaatcaagtacgggtagggggtgggtgagtagtgggtaacggcggtgagggtatctgagtgtgctattacaaagtacgaagacttcttcattacaagaatgtcatggaggtttttggttgtttttctccataacctgtgggtgagattatgagaatgagaatgagatgagagggaggaaaactgacctggacctgaaccagaacca

SEQ ID NO: 272685 - DNA, 937 bp, Cannabis indica
aaattcacttatgcatatactcctaaatttcaaattaattacacccttgacatacttcaatttattttcatttagctcatgaaaccatagaatgcaattaactaacaattaaaccactttatgcatgctaattacaatcatcaatccactaacccaaaattccatatgcttgcaatacttactattctccactaatatagattaatgcacaactaagaatcagaaggtctttctaggcttgtaatgttaggcttacggtaaaggtagttgaaatggtcatttaagctttactataccataagtttctccagtcatctcacccaaaatatttttcacacaatcccaatactcctttttctaattgcatgagatatttttatttttttcaacaaggttgcaacaactttatatttatctcttttttttttctagatttgacactggttgtcagaattttttttttcaagttgttcccaatcaatttttttaatattctctcaatttttacattttttccgcacacatacaacaaacttcccatccaaattcccctaaactaaagatctacttatggtataattagggttaaattgtgcatattcatgggtttatctttttaggctcaagatgcgtagaacaaagaataggttaaggctcaaaaaagggtaactaggataaaattacaaggatggcctgaaaggcacaatcgatctaaaaaattgcctaaatcactttcctaatcatgcataatttattatttcgcctcaaatagcaagcaagtaagttctagattttttcaaacaactttctataagtaaaatttagcatacataaatcaattcaattgctagaaaattacgtaatatgatttcatgttcttttaaagcacaaaattgaaattagtcatgaatgtaatatcaccaagcacacagatttt

SEQ ID NO: 272686 - DNA, 701 bp, Cannabis indica
atagcaatgcatttctgaattcaataaataatagtataataaattatttaaatagctataatttcataattaactgctaatttccaaattaaactaagcgggctttacatatataatggcaggggaaaataaaattaatgataatttgtattttttttattttatttgatcctatctcggcgggctaagtctgtcgagattggtaattaaaaatgctaaaaatcaccactaagaagaccaatcacgacaggctattttcaccaatctcggcggcctaagcccccctttattgttgatcaatctcgacaggcttggcccgtcgagataaacccatagtcaatctcggcacacagattcacgacaggctaagcctgccgagattgatcaatcttgacgggccgggcccgccgagatagggtattttttttttgtagtgacaaaatattgtgagacccattttataataaatcctcatagatagggcattttcaaaaatttctacttttagaaaaatcttataattatatatatatatatattgtaatatatatagataacaagaaataatccttttaatatatagtaaatgtaattatatttgatcagtttgtaattgtatttgtgattaacatccaataatcgattcaatctaataagaatctaacttttaacatctaattcaattcaattgtaattatata

SEQ ID NO: 272687 - DNA, 516 bp, Cannabis indica
ggagtgcatatgattcgacattttaaaaaaattattgtcgtctatgttatagtttttcaagacatcttttaaaatttttaagaaatttagaataatttacaatataaaaacaatgttcaaacaattaattttagacatataaaattaaaaattcacgagttcaataagttatttgaatcttgtcttcgatgtgttaaaatttttcataattgtgcagatatttaaataactacaacatacacgatcataaaaaaaattaaattataaaattctctcaaatgccaaaataaataatgatatatcattatactcttttaaaagggtggattgtaaaattttccaacattaataatgtgatactaatattaactaatttaagataattacaaaatataatttgtggttgtacatttcattactctatataacatcttttgtaaaatgacctattaattattttgttaaaaaagttatcattatacaagataactcaaataaaaatattattttgacaaa

SEQ ID NO: 272688 - DNA, 930 bp, Cannabis indica
ttttcatgggagcaggtttcttgtacgcagctactgactgagtagccatgtaaatgttctccaaatcttcagtcaagacagagaaagcaatgaacttggaagtattttctctaagggcctcttcggctttgccagggaactttccctttttcccattaccttgctggttattgctattagaccttttactgcccgagcttgaattgctcgggcactgggagtgctaaacagatgttccagcagagggagcttgtgagagaccaggcttaagctcaacttctgctcgctgaatggccttttcaagcttgacgaaaccatctgcacgatcgaggaagtcattcatggaataaactagtccgtctctcttgatgtctttccaaagctctctaaaaacttcaatcccccccataattgcggttaatttcccttcgtcagttaactgtgcaactttcgtcgcctctgtcatgaatctgctgatataagctcagagtgttggaattattttactaggatcttagatttactaacataagaaaccttacagtggttgtagcggaatataatgtctccttccactcagatatctaacccttgtatcctttctgtagcagagtatcaccaagatctgagtacgaatctccttctcttgaatctggattcttcacagccttacacaatacgattgagtactacttgatgtgtgtgagcactcactcattcactgtaggcttggtttagaagagaggaagagagagagagggtggtttcggctaaaattagtgaaggaggctcaaatttatcagaaggaatgagatgcgccatcttttccctaaagccatcactacctatttataggaaaccacctagggttaagttagatttaatttgcattaaaataatggaaaaaataaagtggcaatatcttgtgaa

SEQ ID NO: 272689 - DNA, 684 bp, Cannabis indica
atcatcgacaattatagatataactttcttattttttggcgaccacttatatgacccatgttcatccttccactccccatcgtactgaacatagattactattcgagtcattcctgtatgaaaaatagatggttgatattaaaaaatagttaaaatatattgatgttaaaattataattaacaagttcaattttcaactaaattcaataagtgttatcaatgtgtccatcaaagagtttaacaacaattgagtattaacactatcttgaccatgtttggtcgagctagttgagctctattagaatgatcatatctattgaatgtcactcttttagcaaacatcgatgaaaaaagtttaacaattaaaaatataaatagggatcaaatctagttgagctctaccattatgtctatcatctcgactgacaacagtcgagctctactaaaattgtaatctcaactaacatagtcgagctctactaaaatcaccatctcaactgacatagtcgagctcaaccattaatagtcgagccttctgcgattcatcttcaaccttgggttcacttcgcaaaaacgggattttcaactcaaaaactacaaaatagtaataatatggctagtatgatatttttattgttgtttctatcatatatacatgaaaaaaataagaatcaagctaaaaaa

SEQ ID NO: 272690 - DNA, 1478 bp, Cannabis indica
aagtttaattcaagaagttcggaccaccctgtgtgtgtgtgtgtgtgtatggtaagtgggagtggcctaatggcacttttggcacagcacaagtgcgaatctgagatattttggattctgccttttctggactgggagggacggagttggtatcacatacgcacgggtatacccatttctaactatgcgactccttacgttaaaagtcgtcatggtcggattgaattacgaattttaacgattttgttgcaatttgccttttacgacaaatttgctatgtcattatccagtttttggtctattcatcaccatcagtcaaatctaattttgtttgttaataaaactcttatagaaaggaaaagaagaaggtagtaaataaagagaagaaaaagaaagtaaaagaagaaaaaaaaaaagtaaaagttgagtttcacttaaatatttttatacgaacatatttctgatttagtataaaaggtgatattttttttatattttttttaattaagtacttagactaagcataaaaaatcaaatttcttttttattattcgttattagatcaaaatttgatgatttaatatttttaaaattaatatttatagttaaatttgtttgataacaattcatggataatacccattaaaaaatgatcctgatataaatatgtaaatagtattttccattaatggtaattattatttacatatgtcattgaatgtttataataactaactcattaaaaatttcacttatcaaaaacttagtaagacaaaaactcaatcaaggaaaaaatagagcaatacgaaattattccccttcgttttggcattcttagagatcttttaattgacgcattccaatcttgtgagaatcatcttctcgaatgttgatgttagcaataaccttgtgaatatatttgcaagattgacatttgattgaatgtgttggacaccaatatagctattctcttaaaaatcatatgtttagttttatctcccttttagtgtgctctcattttagttgagcgatgcaagaatcttcatagaggactgtttttacttttttatttggtgttaatctacgtgttccctaaatatattgtgtcagtaatctcaatcgtacatattctctacttgcttcatgaattgcaagtttctcaatatgattaaaagttatatccttaaaagctttgtcaagaaaacccatacagtagaacaaaacctaagctaaaaaaacagtaatgcaatattacatatattcttttcatacaaatgtttataattatttgcaagttgcctcgttgaaaatctttcaagaaaaattcagtgggacaaaacttgagctaagaagaaaagagtgtaacatgtacatgtcttcccctcatgcacataatccaaaaaatttgtgttgtgataatatatctcataagattattgtttataatatcatcacttttaaaatatcaccatatataa

SEQ ID NO: 272691 - DNA, 1194 bp, Cannabis indica
atttcgtctaaggcctccctagcctcccggagctcgcgcctggccttggcaacagcctcgccctccgcccttagtgcttcccggtgcttggcttccagcctatccctctgaaggacctcctctcggatcatcgcctccgcctgggcttccctttgcttagcctcttcctcaaacttggccttagcaagggcctccgccgcgcagcctcctcttggaacgcccgcctttcagcagacaggtcctgcagggtcttcacgacttcgtctatgtccccaaattcggacaagacaaagccgtgattgactaggttcttggaaaggcggccggcctctgcagcaagctggaaaaggaggcaagagtgagtaaaggccttaagaaaaataatgagaaaagaggtaaaccacggaatacttaccacagtcaaggaatggctgagatcctgaacttgaaagacggagttcaaggatgcacaagcagcgaaccgtttaggcgcgcaccgggttagctgggagacgaactcgccggtcatctccgcggcaaaaggagccaaggtaggacctaggaaacgattgaaccagtccgtcagggggtccaggtttagatcccacgggttctggtagttctgatcgttaagggaattttgcatctcctctcgcaaaatcctcctcaaggcctccacctcagcatgcccccgggagtattcgtccatggcataattgtacttggctatccgaagctcctgcctcgcctcatctccgggaaccggagtcagcacaatgttaggaggcactgtaaactcctccacctcgggagggatcccagaatcacggctcggggccggagtgtccattctccgcggccgtttaggtgtttcctcagccaccatcttgcctttgcgcttgcggatcagagcaacctcttgctcttcttcactttcttcaacttccccaggaagagcccattgctcttcttgaccttctttagcttcctcaggaagtacctcctcctcatccactaagtcaatagtgtttggaggggcactggaagaagccttcgtgggggtgaccatctgggaagaagttggaggaagagaagcatcaggactgtgggctccggcaagggtggccaagatcgcctccatgggattagctgctgcaacaagagaaaagaattaagtgttaaaatatctgtgaa

SEQ ID NO: 272692 - DNA, 632 bp, Cannabis indica
gtcttctagtgagtttattaatgaaaaataaatgtgtttttttatgctaagtgttggctgaaatggagtgttatgttaatagcttttatttcatttttatcaaaaattacaaagtttaaaaattagaaaaaatttaaaagcttttctctcaacctctctctctcctttcggccctccttgagcagcaaggaagtggagttttccttggtgattcaagctcattttgagcagatttagtgatctctatttgctagtaagctttcttcatctttctctaatgtttcttgaagtttttaaagtgaaatggtaggttgcatgttagttttgggtggctgttgttgctgtgtttatatgttgttttcagaagcttaattaggtctaaaatgaatggattatctaggttttaatgcatgcttgctatcttgtttaaagttatgatttttctaagctaaaactatgatttttgaaagaaatgtctatgttctgttgctgtgatgttgtggatgtttgtaattgtttccagaggctatattatgcttgtttaagtagattcaagctggtttgattgcatgttagctaggtttgctcaagtttgagtttagaactcaaagcttgagctttaatggcacttt

SEQ ID NO: 272693 - DNA, 851 bp, Cannabis indica
aacatatatataagcaatgttatgccgactttatgcttaatctgtcgtgagcctaattgttaagctcaccaaatggttaagaacgttctcaatagaagtacgaccactgtaccatatgcactagagtaccaactccgtacttgtgttggtagggccattattgtactttcgggagttagtgagtgttgtaccacatgcatgacgtaccccctggtactcgtgttggtaacactataactaccctaaaaccctacactgcactaacacccttaaaactacttttttgttagtgttagtggtgcaaacaattactaacatgcatacattcacatatatatttatgctatcttacctcgtttctgtgctcaggtgtgcctttcagcctgagtgtaattgcagctcgacgttttacagggccctatatcacaacatttgtaactctgttgagagacacactaaaatacttttcggggacttaaaatcaaaactagaaatatccctatcgatgaataggatggcaataccataaagatcacaaaaatgcgaaaaactagggttggcaaaactgtcctaaattgtaaactggttccccaaccagaattccagtttgatggggtttcctggggaccaactggtcgaccggttgctacaggttcccctgaaccgctcaaccgattcagtgcaggaaccactaaaaatgtccccaacacttcaaatcaaccccaaacttctcaatattctccagaatgcttgtatacactccaacacaactaattcaaacaataaaacacaataaatggctcaaaaattgaaaacaccattaaagggcaagatttgagttcttaaactca

SEQ ID NO: 272694 - DNA, 654 bp, Cannabis indica
cataactttgtgatccagcctctaatttgggtgttctgagtatcattggaaagcacgtttcgagctctatatatttatctagatttgaattccaattttataattatgtggaagtggatttagggattaatcctatttgtgaatctcaaaaattgtgactaggattaccagcacttggtcaggagcacccgggaatttggaatctccacgtatacgggacatcaggtaagacaatagttagcacgtagagttaagcacggtggcgctcatgttgaatattataaatgtgataaattaagaactgggattagggttattaccctaaagtgaacgattatatggactagggttattaccctagtgattattgatttttaaatgctatgccatgctttatatattgatttaaagaattatgcgttcaaggcataatttggttggactcaataattagaaccgagaagaaccaatttaaggccttattgtaaataaatgtgtgagcgtaacacgtgggtctatgccatatagacgtaattaggcgtgtgagcataacacgcaggtctatgtcaaatagacaataagtgtaatggcattaatattatataagtgaaaggtatattgtgattattgatatttatactgtcttgctgggct

SEQ ID NO: 272695 - DNA, 3285 bp, Cannabis indica
aacacggaactctctcaaaatccttcacacactcacattcaaatcacaaatcccctaatgtgaactggatggagggcttaattcttatttaagagttataaaagatgttggtgttgcctgtggagtattgtacgagtgagggctccattgctcagctcatgttgggacttgggacttgggactgtacgtgtgccaattgcacacatccacatctacatccactgcacctaaattaactgtaaatttcacatatatacacactaccacgtgcttaaaactcttggatatttcctttactgaataaataaacgtacgtggcaatctatgattggttggagtctcccatttcaaaacgcaatacattatgacactgaccaccaccgtacaagaatgataattgagtgctgagatggaagctacgtgtcgtaacagaaagggccactgtatatataataataattttttattttatttttttaataatataacaataataattttttttaagtacttatacattacacccctaaaatccttaaaaaaaagtgtctaatatgtgcatgaattttttaacttagattttttttattataattatttaagatattttatataattttaaaaaattattatttgaatttaatttttagattttgaatttttatgaattttttaatattttacaaaatttttttaaataattataggttaattaggatttttgaacttttaagatcgttaaaaatgtcccctgaaattattaaatttaaaaacttttttccaattttaataaaaaagtctaacatggatgaaagttcagaggtcatgatttagtacatgtcaaagttcgagaggcatgattcaaagtctggggagcataatttagtatataaacaatcacagaaataataaaattaaatgaaattagacgaaagtctttaaatccaaccatctcaatagttcatgtgacattttttaacaattttaaaagttaaaaggcataatttagtatatatcaaaatttaaaggataaaaattttaattagccataactattgtaagtaactatgaaaaaaatttaattttttaaaatacaaaaaccaataaaaaaatacagcagaaaatcttttgtgcattataaaattttcctattttgttttttttgggtagacatataacaataatatacgcggctaagaaagcaccaatgaaacaataagtacaataattttatagactgaaaaaacaaaagacaggcagaaagggacccggcgaggaggccataagagaaaatgacaaaaacagaatgtccattgtggatttatttttattgtattaaataaattcttggattttaaaaataaaaaatcaaaattgattgataaatattgtaatttttattttattttttaaaaaagaataatttcattaaagaatgcataaagcacgatacaaataaaacactcttataatttggaggtctttgtggggcgggcagtgatatttttagatatttttttcaaacttatttaaatgaattaaaattttttgtagaaaaaatcaaaattatttatatttatacaatctcataccttaataaatacagaaaaataattaaaaatttaataaaaatataaaattatttactaaaaaaatattgattttttattttttattttgtaagggatataatttgatagttgttaaagtttatgaggcaaaattgttaattgataaaaacatgttatcattttaataacaaaaagactaaatttctgtaaatataatagttcagaagaattcttaacaagccgtatattttaagggccaaaatcaatattgtcaaaagtttaagaaggaaaattgctaattattcaaaaatgaaagaataattagtacttaaaaattcatttttttccagtattaaaattaattctaccgttcaatcaccaattgcatacctctttagtctttattgtataacatataaaaattaagaaccaaactagttagaatagttgaaataaggatcaaatattcatatccaacagtaccaaacaccagtacacgtaaatagattagaacgaatttaaaagtgcactgaaatatagaattaaaataaaatgatcccacacagaaaacaatatatatgtcaataatatactattatgtatgtgagaaatgtttcaataactcaacatcatatcattttgtttcaaatctttttgaatgatctgttaacaaaacacaatgtaatattgaaaagggttcttaaaaagaaatggggtgcacttttataaataggttgataaaattaaaacctatattttaaaaaattatatttttgtaataatatggtgcggtttaaactataattattaaattctaaactgtaaatcaccgtaatgtgacgtttggcaaaaatataaaccacaaccgcagtgtgaaaaatttcaaactatattatttttgtatggtatagtgcagtatagataatttgataaatacccctaattaccggtaagcatgaagataagcctagcaaccatatacttgaggaacatctaatactaaagttaatcaagcaagaaaatgagcagtattagaaaagttgacaaatattgtattaatactcggattttgacaaagaaaaatggattgatatagataaatactttgaaattatttttgtattttgatgtttaataagaatatctgatgtgagagctaggcccgttttagtcgtatatattagccaatggacatcctattttgtccctcatgaatttagagtcaaaactaacaagaaatacatcttcaaatatggagcctttttggtagagatttttacactttgtaatgggaaatttgataaaacaggctaaaatgtaacacatggtcttaaattatttcttcccactatacacttataacaaaaccaaaaaacctcacattcatctctctctctctctctctctctctagccaccattttgtggtttttttctccttgcgacatgtggcaccaactcaccttttatagccaatcaactgatgacacgtggcactctaaagtttacttatgggtaattacatttttagccacatgcaatttgtaataagtttaattacacattagtccttttaccttcttataaatagaagcttaggttttaagaattcaagagaatttcagagtttcagacaaaaaatccaaagaaagtgcttgaagcgctcagtgttagtttaccgcttttcttagttaattttttttatgagtttctaa

SEQ ID NO: 272696 - DNA, 743 bp, Cannabis indica
tatttgttttttgccttattttttccttttggtagaaaaatttagtgttctggtctccttcttgtagccattgtattctagacctttgtttccagtacacttcctctttaaatagcaaatcattcaatttttcttccatttctcccaattcctttgaatatgttgaaaattcttgacgattatgcaactttgcaatctggtcataagtctccttaattttctcagttgaagaaccaaatttaacatgactccataaagagagattggtggagcatctttgaatgttacagctaataacacttatagatgatgtcgaggaggaagaccaattttccttgatgatgctttggcattcagattccttagcccacatattttcaaatcggaaccgtgatattttcctcataatcttcaaggaattatctgttctttcttgcatatttactattaaagctctatgatctgaatgataataatctaaatgggttaaagtgtttatgggaaacatctaagtccatacttcatttaccattacccaatctaatctttcctgaattagacctccatttgtatttttggcccaagtaaaacactctcccctaaaaggtaaaggatgtagagcacacaattttaatatattttgaaaagcttccatttgtgaaggtcttctcatgttccctccttccttatcttgattaattaagatttcattgaaatcctcaactaccatccatggtccagta

SEQ ID NO: 272697 - DNA, 521 bp, Cannabis indica
gatcttcagatcaagtgtagtatatttgactcaacccaaatttctggaactgtaagtctgtggtaagctactgctttatccaccattacttccttagtgttcataaaacactatgcaacactatttactatatgcattactcatcaagggatactgaaattcttactgcttataaagtagatctgaataaacagcagacatatctctcattcttttaaagaatgaaatagagataatacagtgtagaattttcttcagtcgaataactttctggtagtgtcaaatttacaaagttatatatattcactgatggagcttgaattattatagatgggtttttacactcttctagaataactcccccacccctagagtaaccaccatctcgaattctttatgagttggtgtagatatatggactactaatgcatgcatccttattatttaacacataggtcactttgataaatctttcttgactgtcccttaatgttccttgtttgattacatctcagaaggct

SEQ ID NO: 272698 - DNA, 526 bp, Cannabis indica
aaaataacagaaattagtactaattgcctttactattttggaaaatataggatccattttgacatttaacaaaccagagtgtcaaattagtaatttttgcaaaacacaaggtccaaaatggtatttatcccttaaattatttaaaatatttgtatcaaaattccttataatttaaagttattacacaaatattcttaatttgaaattatttattttagttttattttttattttaaaaatgaaataaataatagctcggtcttatacatatcattttttagggagtaaatttttaacctgctacgatacggaagtatagtaaggttttgtaattgggcttgtattagagtcactgtcattatctcatgagataaccagtaggaaacctcacaaaagtttcagtccaaatgtcactgttgttatctcatgagataaccggtaagtaagaaacctaacagcagtttcaatttagagttatggctcttctttcatagcagttatgtctgctttctcactttcataatgg

SEQ ID NO: 272699 - DNA, 1147 bp, Cannabis indica
gaatgcaaaaatctcaaagacgagatcaaaaacttaatccgattgggacacctctacaagtggatcaagaatcggttgcctcacctcaacccgggtcaggcggctggaactttgccacaagtagcaccagggggtgcagcaggagtattggctccagttgctccccccggagatgctcagcatattcccggcctgccacctagacctaacgggagagtggctatgatctcgggaggaccccacatcggagggaccacccgcaaggagctgaagcggtacgcaggggccgtgaaacacgatgaggtttggaagttactcaactcccagctcaaaggccccggctgatggatcaacccattacattcacggaagaagacgctaagacagtgcgttttcctcaccatgacccgttggtcatagagacccccattgccaataaggtggtggccagagtcctgatcgacaacgggagttccgtgaatttgctgttcaaagaggcctttactgcaataggcctgacggaccgagacctctcaccaagtggttcccaactcacggggtttaatggaacaacacttatcccaatgggaaaagtgaggcttccagtcaccttgtgcccggacacgccccagagcactttcaagtactgcacgttcgtggtggtggactgcccgacagcctacaacgcaatcctcggccgaccggccttggtggactttggcgcagtcacatcaatacggcacttgtgcctgaaattcccaacccaggaagctgggatagggacggtgagaggaaatcaaggggaggcgaggcaatgctataacgttgctacccacctacccgtgctgatggtccgagaagagatcagtgtgcgacctcgactccaccaaagtactccggctaggaaagagcctagatccggaggaaaaagaaaaaataataaagacactgaagggtgccattgacatttttgcgtggtgccacgaggacatgactggcataagtccccacgtcattacccatgtcctcaatgtcaacccggacatgctgccggtcgagcagaaacgacgtcacctcgactcggtgaaggccgaagccttagagaaagaggtggacaagctataacaagcggcatgatccgcgatgt

SEQ ID NO: 272700 - DNA, 949 bp, Cannabis indica
tccgatctaaataagttgggtcgaatctaatgtaacggggcgaggtagggcagatccttacttaatctggatcaggtcggatcatagttgaatcagatctgaccccacccatttagactcctaaattcaacaattatttctcttttaaaaatccatgagtaatataagcctagataagttaatatttgtcccacaatatatgttggtcccaatttgtactaatatctattatgaaattagggtattgaaattcttatttttaaattttttatgaaaataaaataaaaagatgattcatataccatcaacaagtaccatacacaatttatttcttaaaaagaaaaataccacacatcatttaaaacgacatgtaactaataacttacctttcatcaatttcggtatttattctactataaaaatttattcttacaaaatgtcggtatacatttgaatcttacaactcaatgctagaatattgcgcaatcttaaaaataaaaattaaaagaataagaaagtgctttttcggaaattaattactggttggtggcacgcgaggccggtggtcaggcaggcaggggaatattgctaatcaagctgtacaataaaatcacacgaaaatggcagacgacgtagcccccacacatatgcatggactctttaaaatattatcccaaatgcgcaatcgttcgtgcgtatagatttgttgaaattaaatcaaattggataaaatttcaagtctgcttttgcagtcaatctaccgttagttttttttatatataaatattataataattaatcaaatatttacggcccagttaaacctattccaccttacatcaatattttttgtcatactaataaataagattgagattctgtatggtattgagcttcgtgaaaggtaaaagacttttttaactgtgtctggtcgccacatcaagtagag

SEQ ID NO: 272701 - DNA, 1099 bp, Cannabis indica
ctctctctctctaacctcttgaagtttcaaagtttcatgtggaattgcttgattcttggtttgattggaagctaaattttggggaaatctttgttcttgccttgttgtgattttgaggtagctttctatgagcttaaccttgttttaattgctaaattttatgattaaaaagaatgttcttgatgatgatgatgataggttgcatgatagtagtttctttgattagtttgagcatgttaatctcttggtttgagttgttgagcatggattctgattatagggtattttctagtagaatcatgtgttttttgggatattttcatagctggaaatggtttgagttgttggaaatgaactcttgttcaagagcttagtgttgccatgattgagcatgaattttgtgatttttatgcaatctgaattgggggtttattgttggattttaatgcatgagtatgtgttttaaatccctagtgattgctagtaaccttgaattatgatttggaagttttggttatgattttgactgagtttattgttggaggtttatcccgtactcggtatggacactatgaattccttgtgatgtcttttggactcactaatgccccggcgacattcatggatttgatgaattgggtgtttaaagactacctagataggtgtgtgattgtatttattgacgacactttggtgtactctgagtcagaagaagagcatgagttgcatctcagagcagttttgcaaaggttacaggatcacaagctttatgctaaattcaaaaagtgtgaattctggttatctcgtgtctcatttttggggcacatagctgataaagataggatcatggtggttccgggcaaaattgaagctgttcgggattggccagcaccgaaatcagctacagaggtcagaagttttctgggttgagcgggttattatcgtcggttcgttgagggtttttcacagattgttgtacccttaacggagctgacctgaaagaactagaagtttgtttggactgatcggtgtgagaaaagtttcctgtagttaaggcaacgcttgattactgctcccgtactaactcttccttcagata

SEQ ID NO: 272702 - DNA, 765 bp, Cannabis indica
tttttttttttacaaaaattacattttgaaaaataacccatatttatatacattttttttcttattttcctaaacaacattgaagctttagcatgtaatattctatgagcaccaaagataatttttctaaccaattaaatctttctaaattgacattaaatattataattaaaaataatatccatgtatgtaatattttttgtagttcaaaatatatactattacttttcacatatatatataattaattagtattattgtatatgtagacagacactgaaactgaaagtttagatagaaaataaatgatattatttaatgcatgagatagaaaataaatggttgttgttgaggaattgtagtgaagtagacccaccacaaaatttgattactgaaaactctgaaaatgtaagacatatacgacattaatattcattatatataatattgtcgtttacaaaattaatagtcaatatttgcatacaagtcactactcacactagtactcaaataaaattttcattaattagtaattttttctcctaaactttcacttgtagtaaatcgtgtccctgaacttttttggccattgaaaattccccccgaactattgagattgctaaatttaaagacttttttctaatttcattcaattttactgtttcatgtactaaaccatgctccccagactttgatatttaccagattatgcccctcaaactttgatatgtacaaaatcatgtcccttgaactttcatccatgtt

SEQ ID NO: 272703 - DNA, 690 bp, Cannabis indica
tacaaactgctaattcatgtataaatcagagatgtctcaaaaaaattagataattaactaacaaaattatctatgaaagattcaaataacaaaaaaaaaatctcttaaagaatataataggcaatccacatgcgagttacaaatacaaaatcaactttctacaaatctccctagtgaaaactcctctaaagctatcaacatgttcacataatttattttaacgacaataaaagctcctacaaaaatgttaaaaaagaaataatgagaacccttataaatcaataaactaagtaatttaacaaataccaaaaataaattgcattagaagaaaaaatatgaaaaacttatcttattcaggcactccaaaagtccttatcaaactgtgtgtgaaaatcaataatcttctaacaaagaacaaaaccaaacaagaacaataccaagaacagaaaaattacggttacaaaatactcacaagaaacttaacaatataccaaaaataaaactaaacaaagacataacaattgtatataaatatatgtataaatacacataattaattggaggagatttcaatggttacatcaaatatgtaaccatgatggttacatttactcttattcgttagatcattattagacggtggtgattaatttaaaattttactaaaaataattaataaattacatgtaa

SEQ ID NO: 272704 - DNA, 604 bp, Cannabis indica
aaagcttgagattcttttgaagagtaggtcaaaattttgcatctgataccatattacaagagaattagggaaagaactctgtttttattatattgagaaaattaattatttacagagtgaaggaatggcatatatataatatgctcaactaagtgtacaaccaactaaccgactgtaactgaaataacagactaatcctaacagactaatcctaacaattacagttacttcatcagcaacacccatctctccggattctgcaaacccagctgtgccagacccacgacagaccaaagttaatttgcccaacaagaaggccgtgaaatggtccactgggatggctccgggcgagtatggtggaccaccgaccagcactaaacttcgcaagtacgggggaggtgaaggagaagaccctataacctctgacgagtttatatggaacaaagactttatgagtcgcatgaataaattgtttgatgactctgcttctccacctcaacaacctcctgttaaggtctcctacttttactcttaattgctctttttgtaactgttaagtgatcaagaagaattgattttattgcctaatattatcaaatagagt

SEQ ID NO: 272705 - DNA, 507 bp, Cannabis indica
tcagctaaataaaattacaaaaataccctttcggggttagcggatattacaataacttttataaaatattactaattaatcgcaaatcaccacttaaatactactggtgcctaaaaagattagaatatatatatactagtagtatatgttataataattacaagtatataagtgatacatatagttaggctgtaggtaaattaataatcaattatttttgtagcaacttaatttaatttcctatataacaatgatagatcctccctaacaaacgtgatacttgtcttcataagatgtttcttatatactcaaattattacatgtatatatatgtagatacatttgatatatatgtacattataaaatttgtttcatgtatttttttaaaatttaatttgtaagcctcttaaattaatatacattaattatagatcgttgcataaatttaggatttgatttcaagaccccttacatatatatacgcactcagctcgtatcttaatagt

SEQ ID NO: 272706 - DNA, 564 bp, Cannabis indica
agaaaaagaagaggaccgtgaacaggaccacctagaaccgaacacagaccttgtctcagacctaaactgagactggaactcgagctcggacacggtcgtgtacccagaccgaagctgagaccacacctggacgtaaatcagggacctgatccaaaacacagacttggacctagatagggattcggatatgaagctggactcggaccaagacccagacaaatttgggtgcagacctggacataaacccggacacaaactcggacccgaactcaaacccacacatagaatctgacccaaagctagacccggacccggaccaaaactcgaacccaaaccaggttcagagccaaggacttagacccagaactgaatcctgactcagattgggtccggaacttgggactcggacacaacctagaccaagatcgaggacgcgaagtcaaacctggagcctaagctggacctagaatgaaatcagggcccgaacccaaactcagacaaggagtcgaactacgacccgaacacaaaccgaaactcgaagtctgaattgcaaatggaactaga

SEQ ID NO: 272707 - DNA, 796 bp, Cannabis indica
agctctaatcagctagtttttcgttttaagatgggccatcacattaaagatataagagaaaaactagatgacataagagccattagcaataactttcacttaactaccccgtccaatagaaaggagagtttctagtgggaagtagtatgagggagacctactcatatgtgagggaagaggaagttattgggagagaggatgaaaagagagagattattcaaaaattggtggaaatggattttggggaggatgtgtcattcattgcaatggtagggattggagggttaggcaaaaccacactagctcaatgtgtttttaatgatgaaagagtccaaaaacattttgaaccaaaaatgtgggtgtgtgtttctgatgtttttgatgtgaaattacttgtggggaaaattttgaagtcttataccactgggagtctagaaaacttacaaaatgaactgagaagtaggctaagtggaaagaaatacctgctagtgttggatgatgtttggaatgagaatggtgaagaatggggtaagttagagatgttgttgaagtgtggaggaaagggtagtagagtcttagtaaccactcgtagtgaaatggtcgctagaataactcagagtacagttgggccaattaaagtgaaaggtttgagcgaagatatgtcgtggtccttattcaaaagaatggcatttaagaaaggtgaagagccggtgcagggctcaaaagaaatggagctagggatggaggttgtcaaaaaatgtaagggagttcctttggccataagaacaataggaag

SEQ ID NO: 272708 - DNA, 448 bp, Cannabis indica
tcttatcaaaaaaataaaaaataaaaaatctcaaatttcaaatattaaggtttcagtctctctcaacctaaattatgtgatcaatttttcagtttgattcagtctctatatctctgtcacaaattcatttctccaatccacttgttacagttagatttctctttgatttttagtgttttgattgttatttttttactgttatgcttatatgtgaaaaagaagcaacaatctcaattaattgataaactattttaatacttttttataacaatctcaatctctatattgatggagataattttaacgaggagcaaaatatttaatctttaattttataattgttactatattttaaattttttcaaagattgcaactttattaatgcaaatcagctattaaaatagcttccaaaccagtagggacaaaccccctacgggaaagacggtc

SEQ ID NO: 272709 - DNA, 1054 bp, Cannabis indica
aaaagaaacattacgcaaagaacttaacaaattcttacaatcactaacaactttgccaaataaagaaaacataaccatagagctacaggcagcttcaacaactaaaaggtaatccgtttctaaagtcacataaagccatgaatgatctttgatccaactcaatgcctcccggactccaattacttcggccaccactggagaaatcgcgccatgaaacaactttgtaccgccttcaaccaagaaaccactggaatctcttgccacaaaaccaactccataggtagaagaatcattaaacatagccgcatcaacatacaccttaatactattaacacttggagcactctaatgctcagccccatcccccagaatgaattcggtgaacaatagctcattgtttgaattttgagcaacaccccattgattaaggtagtttgttgcagatgcaacgatgccttcgatctccataaccctatcttgccaaactttatcattcttagcattccagattgcccagcacaaagccaccagtaagtttgcattatccaaatcaagaatttcaaactgatacatgcaccaacccaaaaaagagaactcatgctgcaataccgtgccaatacccacccgattccacacagctacttcaactggacacaataaaagagcatgttcaatggtctggagccatattgcagaccagacaagtgaaattcacatgtactcttttcgattgcagctgtgtcattgttgggagacaaattttcgttgcacgccataacaaatttttcattttgggtgggtttttagcttccacagcttcctccaaaacctgtcttcagaaaaacatccaacccaaactccccattaagttgctgcagaagtttatatgcactcttcactgaatataacccagaaagatcaagcgaccaatttaaggtatccatcattgatcgagatagaacagggatagactgcaccaacactctatcacgaggcagtagaaaatcactaagaatgtcttcctcccagcccgaaccgtcgatcgtcatcaagt

SEQ ID NO: 272710 - DNA, 1300 bp, Cannabis indica
atcttttatcaagtataacctattttcacatcatttttaattttgttcactataccattaacagaattagagtgaagagaaaacaaacaattgattcgattcctccaaaaatgataaatcgtggctgtgtagtacgagaccgaagcttttggacagaataatagtgattgttagtaaaatatatgtagtccaattttttattaaatataaaatatagcatttgaaaataattagtaaaatctgaccaaaacaaataatcacaaaatttaatcatcctaaagagaaagagtacaaaaagtggagttacacggctgacttttttttctttgacaaatttacgtttgttatagaaattgacatatagttacatggctttatcatgttttaaatgcgataggatgaaaaaaatatgtatcatcatcattcatacattaattttattttttataaggaaaaataaattagaattcgttacgagagtgtacttatttccaaggaataataatgtctagatcttatttacacctcatgctgttctgttctccagaaataatataagaaagaaaataaatgtcaagttactgaaaactcctctgtcacccatagtccacgcggcatttctgagaaaaaataaaataaataaagaatcacaataatgttgaatagtttttttgtgaaataaaaaacgtgataacaaagtgcctatatatagtttttgttttttaaaaatgggagcataaattattgaattagctagtagtcatattatgcacaacctatttcatgaaacgtataaaataattaaaaaatttgtaatacaatgaatttgaatgagtacgtaaccgtcccccaacactattcaatacccatttattaaatttatacgaaaaatattataacaggtagacataaataggaaactttaatgactaaaataataaatattatatttttgaaatccagtcgggggttgcatacttaccaaatatgtataatatttgaaatttgaatttctcgatattaaataataattaccatttttctgcaaaaaaataataaatgaagaaaaataactttgaggttgttgtttttaatcattatctatatctattttcagtgttttcagtacataaataaattataattttgtttttttttttcttcataatgatgttaatataattacgaatgtttaatttttcacaaattcttagaaaattttagatagcttaatagtgaattagcaatttttcattcgaattttgacatatatcaaatcatgcttcttgaacttttttgg

SEQ ID NO: 272711 - DNA, 763 bp, Cannabis indica
tattattgttatgacataaggtccggaatcatcgattgtactccaagaaggttagccaacacacctgaaccagaacttgaggtaagaaaaatatattgtactacatagtatgttgtattgtaatacaattaataattttatgaattgattaatattgaaatatggttaatattgttatataatgaaaagattgattggttaagcaatgataatgtaatgatactatgaatgtgatatacgggctcacttgattaggtgatgcaatactcctggcgacataccggacgtaggtacgggcatcagtgacatatgagtattgagtgtaggtacatgctcacttaattaggtgatgcgatactcctggcgacgtgtagatgcgagcgttagtgatatgaaaattgccaggttatggcataaattgatatcgttgtagtaggggtgtacgtcggtcggtttggtcgggttatagcatatttttattaacccaatataaatatcgggttgcaaatatttaattgtaacatgcccaattaaaatttagaaaaagtttaacccgcccaataattttgtcggtttggtcgggttaacccgtccaaaccgttctttactttttttatataattattagggaccggattttgtcccgttactgtacggacacggattgcaatccgtgatgtactgtaaccgtcggatgggcagttactttgatccaaaggttggggttcatgtaggggttgatgtaggggtatgtagggttaaa

SEQ ID NO: 272712 - DNA, 475 bp, Cannabis indica
cttcaaataagcagctatagaatttaccaagtaaatttactgtcttattaattccttgttgcatccaccatagaacttggaattgcactatcagttatatagttatccattgttattatcccaataatcaatgatcctctatagatgatttacattgtataggattaatctacaattacaaccttcaatgtattttgtccttaaaacacttagccacctataaatgatgtttcagtgaactaaacataatcactgaaatgagtactcaaccatttatctgttggaattattttaccaggatcttagaattactaacaagtatgttatttaaagataccacttgatgtgtgtgggcactcactctttcactataggctcggtttagaaaagaggaagagagagagaagagaggtttcggctagggtataggaagaaggctcaaattttatctaaaggaatgagatgcatcatcttt

SEQ ID NO: 272713 - DNA, 646 bp, Cannabis indica
atgtgagatataatattgtataaaattaatatatatatatatgttatgatatatatggacattaaagtatatatgttacatgtatatgagatatgtaatatatgaatttaatattgatattatgtgtatgattacatatgagatgttgattagtaacatacatattatattagttggcataaaattattatttaggagttataatattatgtatgggagttatatattaattttatattaatatatgagttacatagcgtgataataatgttgatagtaataaggatgatgacctcgccttacccatttgttatatgggggattgatctaattggggcattacccaccaggcgaggaggagctaagtacgcagtggtcgcagttgattcttcactaaatggactgaggtcgagcctttcgtttccataacctgcaagaaagttctcgactttgttgtcaagaatagtgtctgtaggtttggaattcccatgaagatagtatccgataacggaacccagtttgatggcgacttgttcactgagttctgtgagaggaacaaaataattaagagcttctcgtcagtatccagacctcaagcgaatagataagtggaagctgttaataaaaccttgaaggatactattaa

SEQ ID NO: 272714 - DNA, 1082 bp, Cannabis indica
aagatatggcttgattgtgaagaaatagtgttttggggtttatttgttaattaagagactttatggagtctaattaataaatattataaatgacaattttatttgatagttattttaattattaaataaatagttttggcatttatagggttgaagttgcaaaaagtggtatttgtgaaaaataggtaaaatagttgagaaaaatggcaaaaaccaaatttgtatggggcccattaagtggccggccatatgtgctaattttcactctatttatatcaattttttattcttaataattcaaccctaaccctattggagaatagtataaaaggaaggctatggtctcattatccaactaatgcctccaaagctaaaaacctagttttctctctaggtttgatgagacctcttccttcttctttctcttaaatttttgaaacactgtagcctctcttcacaaatgatttcaagccttagtgattgagtgcgtgcccatgttgggctttatgccctaaataaaactctatttcaatgtaatctctatcatttaaatatcaataaagagacagaagtattttcatcacttatttaatgtgtcatttggttcatgttatcatttatatatttatttgatttatatattcatccaaaccttatcacattaatattcttgtttattgtgtcgtcagcataatggaaaataatcaagattatgtgattaaatatatattcctagatttatcagtacacagggttttaactgatatgataatctacaacatagtttacttgcaccttggataagtgctatgtcctttccagggcattggttgaagtaaagcttcggttggatgcatggagtatgcattggaagcgatcaacattaaactttgattagatatgataaatttaccgtaatatctattcaatttaatatcacctagctgatcctagatcaaatgatcttaatcctgacatggttaaattcaatctcaagggtactattcatgttctttgatttgttagttaagcttgctttttggtcagggtgatatgtgtttgaaattattttatcaggatct

SEQ ID NO: 272715 - DNA, 724 bp, Cannabis indica
ttatcaaccaatggtcagatcgttctgttgtagtaccagcccttgcaacgtgtagagtacaaaaccctaggtgggcaaagggtatgcccttacccacatatgtgcctataaatacctctattttttatgaacaaggggtgaagaattctacttacaaaaactctatcgaaattcttagagagctttcttcttcaagagaaacgagaggaatataatcaagcttccaataagtagacctagaatttatctactaaattctctaacttattaattcttccttgtgccactataattttggaattgtactttcaattatagagaacgctctatatattctaagatatagatacgctattaattatccatgttataactcaatcattaaagatccctatagatgatttacatctagtaaggaaaaattaattgttctacccctcaatgtattttatccttaaaacacttagggcttgattggtttgagatttgaaaataattttatgcttttgaaaacttaaaaggtgggggtccacatgaaaatacttgattggtttggtgtgttttcaaaaactaaatctaaatataatttgaggaatgctaattacaacctcctattacaatcttttagtcaacctccacttccgaaatcacatgccaaaatatttttttttttaattttttctagatagcagtattcgttatagttacagtatcatccctgtaa

SEQ ID NO: 272716 - DNA, 599 bp, Cannabis indica
taaaaataaatagtactcaatgtagtaaaaaaaaaaatatagaaagagataacactcaaattatagttatgttatagagagagtagcagtcatttaatgaaaagtcttcatttgtaaaatagataaaatataaattgccacagtcaatatgtaggactcataggagtcattatttgtctcttgatgttgcgctcaaggaggttgataaataggtgaagtcaacttatgactcaatgtaggaattaactaaattgattgtgaagaacaatgagcactcaatataaatattgttaaatgagtagcaatctatttgtaaaatagtgttcaataatcaataaacatagtaatggtggtagcagtcaatttcctttaaggataatgggcatgctccaaaattgtagcacacaacatatggacaatgtccttcggattggaaatgttatcattcatcttatttagttttggatgcacttttttcttttcagtgttgtaatttttattttgtgcctaggaagtttctagtctgtgtagactcgttagcaaagagtgctagaatttgtagcctatcagctagctttgttcaaggggaaggaatcccc

SEQ ID NO: 272717 - DNA, 5073 bp, Cannabis indica
acactcttccaaacaagcttatccctgtccaatccattgacaatgtctatctctatgattaactcccctaagctcctcccaaataagtacatgacatacctctcattccatctggtcttagattggtttaaaagatcggccacatatctcaggtgtggagccttctctctaacctcctccatagtgcttcggaactcctcatagctcatccatggaatccatggttgccaccataagttgatatcccttccattcgaaatgatagttgtggttccttgctgtatcaaagttctagcttcaagaatccccttacaaacactagagtctccttgtttaggccgaacctcccaaaactgctcccaagagcagaatttttctttgaatatcttgacccaaagcttgtcctcattacacgccatttcccacgctaacttagctacaagagctttgttcatgtctccaaatttcctaaaccccaaacctccattttgcttcggtcggcatagagtttcctaactcttaggcgcataaaacctattcttttcttgaccaccagtccaccaaaatcttcttaccatacaatccatccgatgacaaaccttcttaggtaaagtgaaagtagacagagagtaaacaggtaaagccattgccacagccttaatagctaccaatcttccagcatgggacaaggttttcgccctccatccttcaagtttggacttaagacgatcaataagaaaagagaaatcattactcttattcttagataaaatcagggggtttcccaagtaaatccccccaacctctgaccctctcattagaagaatatcttcaatctctttctttcttccactagcacaacccttggaaaacagtattgttgattttgccttgctgcataattgtcccgaccactgctcatacttttgaatacattcacttaaacacctagctgcttgcttacttgtacgggcaaaaatcattgtatcatcggcaaacatgaggtgggagatcggagtgacaccacgggcaatagatatgcctttaatatctcccctgttttccgcccttagcagtaatctggatagaacatcatgacatagtaaaaataagaacggggagatgggatctccttgtctcaagccccttgacggtttgcatctcttgagcggttttccattaaggagaatcgcataagatgtgctagaaacacataacatgatccgcttgattacctcactcgagaatccatgagcacggaggatggtcttaagaaaaggccattcgatccgatcatatgctttgtgcatgtccattttgatagccattagtccccctttactcttgttttttcgaacagtgttcaccacttcttgacccaaaagagtagcatcggcaatccaacgtccaggaatgaaagcggattggaacggggaaattaccttatccataatcattctcatcctttgcgacatgattctggtgataatcttaagggcaaaattacacaaactgataggtctgaacaattccactttctccgcattcaaaactttcgggatcaggcaaatatagttgaagttcaagtcagggtctaggaccccattacgaaagaactcttggacacagctgatcaccttttcccccactgtttcccaacagcttcgaaagaaaatcccagacattccatccggccccggcgccttcaacgggtgcatttggaaaacttggtttcttatttcttcattcgatggcacagcacacagggacatgttctcttccatgcttatggttggtgatatcaatccttccaagtcctcaggaattgtcgggttggaggatttaaaaagatcagagaagaagtccataagaatgtgtcccttgtctctctcaagctcctttcttcttccatttttgtcgtgcaaggcccatatatgatttcgttttcgacgaaccatagtggatgcatggaaaaatttactattgcgatccccctgcatcaaccataattcacgagatcgttgtttccacatcagttcactccttttccattcctccgaaatcttttggcggaccaatctttcttcatttatccaaggctcaacatccttttgagattggatccacatcagccgatcctcgaggatctttattttggcatccacatctctgaatcctttctttctccacccttggagggcatgtttcgtatctttgagaagtagagccaggttatcagcccctcccctattcagattcttgtcccaggtttccttgatcacctctgcacacgattgttccctgagccaagcttcgtagaagcgaaaaattctagaaccctttccttttttcatcagagtatccagtataataggcccatgatcagatgccacaattggcaggtttctcactcctccatgaggacacacattaagccacccagtatccacaactactctgtcaattctttcccggatcaacccccgttaaaccttttgttttgccacgtgaacttgttgccacagaaccccaagtccaccccccggtatcatctagaaaggattgcagtaattcaccatctttggccctgaattttcttcccccagccttatcttcttgacaccgaattacattaagatcccctatgatcgcccacggatcatcacacgcagtcatatagctcgtaaattcctcccaaaaccaacctttttcttcatcgtagggtgtcccatagacagcaagaagtctccagaactcatggctttgtggttctaaaactcggcactcaaaagccgaattatgaattcgttcaatactaacattggcctcttccttccataacaaacataatcctcccgccaaaccattcgcaggaatatactccccattatcaaaacccaactcctttctaacagtatccatttgctctctaccaatcttagtttccatcaagaaaatgcagtctaccgtatacttacttgtccaagcccgtaaggcttgtgttgcctcggcccttgccaggcctcggcaattccacgataggataatcattggggttgggggggcatggtaagggccgcctcctcgcccacatgaaaatcctgttgcacttcaatatccaccaaagtaagtctctccccttcattccctcgtgccacttgagttttatttcccacaccggtttcacctgtcgttgggttttcctttgatctactatctttccttggtctgcccttcctcttgccgtgggagctccccgtcttcgtcctttttccggaggacaagttttcgtcataccttcccactgcaaaaattggtgagttagcaggtgagaaagggagactggtattactttggattaccggtcctgggtcgttaatcaccttccctgaggtatcaataggaataattggtattgaggccttcctctttttttggccaggcccagcaatgatttgggcttggagcccatcctcatcactaacaatagatattgtttcacctctctgtaggtccagttcattgcccagtaagagggccacagatgtttcaaggcccatgttcttttccacctccactggtgtgggttctgggtgctgatgtggtgttcttgatttgcaagttttttggtgagggtgttccagcatttgggccgaggatggcccaacattgggcataagggataaaatcactccatcatctccagggtgtttctccacgttggccattgggtggtccccaatattcgtacaagaccgttgcaccattctccttgccgtctgacattccatgctgtcaccacaattcctcgtacgacatgtacggttctgagtagaatcctccccacccaagcattgtcctttctccggcccccttgtatctttctcagccccaccggaatttctagctctgccgtcgttttccccgttcagagacaaattcttgagtttagtagtcattgtttcagggcaaccacctcttctactccccgtcgccatatttctcgtatcgaaacagctccgaaccgatgagcctgccttgatccatacaccatagagttgaacagcctccccaatgggaggaaaagcaaattccttctgcctccaacattccttttcctcatgaaacagatatccacagttgaagcagaggaggggaattttgcaatacttgaactgcacccactcctttcttcccctgttgatacttagatggaatcccgccggtattttttgaattaagtcaatctccaccataagtttcagatacccccgtctggctataactctaggatcagctttatcaaacttaacatatgttcccactttggctccaatcaccggagcattctgcaccgcaagatagggcgttggaaggccatgaatctcaacccataccctcgccaagttcatatcactccttgccaccttccacactccggccattctttaaggtttaagacttggcctcccaagatccacggtctcccttcaaacacctgcttcaaatcctcctcaagttcaaagaaaataccccatagacccagttcaagtgttttcatccaccatttccctcggagaacccatattccattcaagatttgcttaactctgttctttggcagaggaagtttgccaaaacatttggccagtgctcctttcctccccatttcctcagagatctccagttcagaaaccaagtccaccagctccatggtggattcttccagaaatttctgtctcatcaactccattctttcgtcggttctctcttccactggagtagtaccatccccggtgattggcgatatactctccggcacattcctttggaccccttcagccctctccatagtcgtcccttctcctcgtcttccagtttccttagtcattcttacacttactgaaaaccttcaaagcacaaaggcaaagacacacagtcaatattggcttagccaaatctcatagagagaaaccctgatatctcttttactttaaaacttcaaattgtaaaaatttgcagtcaccaattgcccaatttttatctatttaaattactaatatatatacatac

SEQ ID NO: 272718 - DNA, 2196 bp, Cannabis indica
agacctatttgtgggtcccacatgcatatatagacataacactaagaaaaaaaaagagagagttgagcctcactccaaatagtctcattctcattcactctcatgagtccccacactcaaataattgaaccaatttcttttgttggttatttcaatataaacctttcataataaattcaaacaagtctataatataattaaaagctcaaaaatttcatatcccatattgagagatttttctttcttcttattaatatactagcactacactactactactactacatgcatggaaatattctctctatactacttttagcctaaaatataatatatttgtagttgtaatagtatatatatatatatagtactctatatatttgtttgtaaaaatgattagtgagaagaagactgcaaatgccatggcaggcaagacagctcaggcttgtgacagttgtcttcgaaagagggctcggtggttctgtgcagctgacgatgctttcctttgtcaatcttgtgatgcatctgtccacagtgctaaccagttggctagtagacacgaaagggttcgcctccaaacttcttcctttaaaggaataagcaaaataagcgaggaagttaatgactcttcttcccctgcttggcttagggggttcacgcgaaaagccagaacccccagaagcaataataaaggaaagaaaaaagatgaagaagtattgccttttgttccggaaatgagtggtaatgaaggagaagatcattatgatgatgatgatattccattattgaattattatgatcatcaagatgatcaacaactactttatcaggttccgatctttgatccatttgcagttgagctttgtaatccaatgaacactattgatgatcaagataatgatgatgatgatgaaaatgatcataaccgtcaaaatcatcatcatcatcatcatttgatagaatcaacagtgactcatcatgttgatgatcacgaagttttagggtttctaccatcagagttagagctagctgaatttgctgctgatgtagaaaaccttctaggcggcggaggaggagtacaggaagaatattgttgtgagcacgaaattaatgggtttggagtaatagaacttttggataattgtaaagaagaggaggaggaagaagaagaggaggagaaattgaatatcaaagaagaaaatgaagatttcttcaataatattaaagaaaatacttataattataagttagattatgatcataattataatgagatggaggaagagggtaaaatagtaaattacaatgagaagaagaagaggaagagggagatgacaagtgatgtgagtcttagtctaaatttgaattatgagggtgtgatagctgcatgggccacccaaggatcaccatggaccacaggcattagaccacaactcaacccggcccatggttggcctgaccaccatcatcttaattatatggtaaattttattattggttttatttttatgaccactaatattttatttcatttatatatatatatatatataaattgaattgacacatgatgatgatatttgattagaaatggaaagttttgaaaaataccaatcaatatattttaaaaatatctcaattgatatatctctttctcctttttccctagctatataggtcttaatattttttgagttatttaaatatattatataagtaaattattataaccatgttttattgtattgataaatcttattttttttagatttataattttgttgcccataatatcttaaagtcgtctaagtttatggttttttttccgggtgagactagagtggtttcctgaatttttaatgttatttctaagtttctaaaaaaaaaaaaaaatcttattaatcccttatatcaactcttaaaacaattaaataatgttttgtgtgtttttaaaaattagttggaaaaaataattaatttaatttagacattattttatgtgttcattaaaagtgtgtttggaagttaggtcttgtttaaggtttaataatattataaagtatgtttggatataagatagtaattagatatgaatttttattattgtatttgacaaaagatagtgtttacacaataaatttcaaacacactttcgaatcgataattctaattaatcatatttatttaagattgaaa

SEQ ID NO: 272719 - DNA, 797 bp, Cannabis indica
tttgtaaattttttttgaataatgaattaaataatcaaacaatacaaacaaaaacaagcaacaaataatctggaaagtaggctaaaatctctttattttaaaatttaaaatatatatcttaactagaattaaatttaggttgttagagaatatttgaaaaaattcaaaaatatctaaccaatttttcaaatttcatgtttattcaaaatttaaattatttaaatttctaataagataatataatataatatattgaatttttttaaaaaaaaatagatattcgtaatattatattcttagtcttataatttaacaaattaaatattacaaaataaactatttgaaaaataagatatttaatggttagaatatttccaatttaattaaaaaaacaaaaaataagtttgaaaaaattttatggttagaaaccctaaaatttctattcaaacctaaactaaccaatttttaaaatttcatgttatttttgccaaaattaattttaataaaaaaaatgtctaataagataaaatgttaaaactaacatattcctaatcttataattttaattaataaaatatatttcaaaaacaacaaatttgaaaaaaaaaaatatgatatggttagcaaattttgaaatttaaacaagattattttaaaaataatattttaataccaaaataggatcattcaaattttatataaaaaaagtaatatctgatcttataattaaaataaataaaataatctaaaatttcaaaactacccataaggctacttttgtgagaaatcaaattttt

SEQ ID NO: 272720 - DNA, 703 bp, Cannabis indica
gatgatgaagaaaaagatagaaacattgtttttgtgaaaacacatgtgatgagagcacataatcgattaccatatcagataaataaagatggtaccagccatgtttgaagctgttgcaggacagtagggtctgtctagagcatgctggttgagttgttgactgagtagtgagattagttgctaacactaagtggacagatcaactgaaaccgaggtgtggggtgcatcatttgtgacttaaactagccgtagcttgattagatgttgccttccctttttttttctttttgcccccataaccaagaggaaagccatacatgaagtaacatttttcgaccaaatgtcctagttttccacagtttgaacatgaaggtctaggtttcttgtttcaattgggggattaatggaggttgagggcttaaccgatgatgcaaaggagggtacatcagagttgcctaaggttctttgatgttcttcttgaactatcatggaaaagacatgtgagaggttcggaataggctcattgagtaaggatctgagcacaaaccaaggcatatgactcgtttaaaccagtgagaaattggaggacctggttttggctatagtagtcaagaaatgccttcatagccccacaaatgcaggttgtgttgggttgaaattccttcaattcatcccatagggattttagtttagtgaaatagga

SEQ ID NO: 272721 - DNA, 1550 bp, Cannabis indica
gttaccaaacgacaccatagttagtggggcccatctaatggtcggccactatagggtttaatttgctattatttgatcattttttattccatgtaattcaatcctaaccctaagtgaaataatataaaaaaaaaataagatggtctcattatctaactaatgcttataaacctagtttacattctgtcagacaactagagttttgagacctccttcttctttcttcttcttttattttctaaatctcatagtgttcttcataaatttttgagccattagtgagtgagtgcatgcccacccatagcaagtctagtactcaatcatagtgtgtatgactgtgaagaattcaaatacttgaaggagaatcgggttcagatcttgataatacactacgatagaaatgaacaaagtttaatgatctgagtgggaggagtcattatatttcgctgcaatcaatgtaaggttactcaaactttatgtgtttgaattccattatattagaaattcatatttaggatgttaataaacattcttgtcagtaaatctagatgtcggtaagatatgttccaacaactggcctcatagccataataatgatttactttcaagaaatatggatttaaaacgatgtatgtgtgatttagatgtgattcatgttgatatatgtttttattgatgatggattgatgtttaaaaactttttacataaaatatttggattcatgatctagaattattttatttggatagtatagaaaaaattaagcacttcactttttcacaaaactgaatatcgattttatttgaattagttatgaatttttgaaaattgcaaaaatcaagaaggggaagcatccccaatgcgtgtgcagacacacctgtgacacttggtgtcacacgtgttcggacaggccttgtcccagaaaacacgtacacgggttttctgaataacctactccacgcgcggaaaccctgcatgcagggtagatgtgtggtcagcctcgattaagagcaccattggacgcgcgcggatggtatgcataccatccgacttaaatccaaattttttttcaattttttaatttttccataatttttaaaggaattaatttcgaattttttgtgtaattttgtatgtagaatttaatttttcattatttttaaaatctaattattagtttgaatttaattatttttttaattagttttagatattagtagattttaaacctcaaaagataatatctacatccttttttgttcagttggttatcttatttttaaaatttgattattatatcttattattaaatttaaggtcagatattttatattcattatttaaataatttagtaaaatgaccttatttgaaatttaaaataagatatatttttttaataaaataatctagataatttaaaaactaaccagatattttgtcaactttcaaaatttgttattttatttaaattgaattataaaattagataaatgatattgatttattcattttgttttattactacatttaattttattttttaaaaaa

SEQ ID NO: 272722 - DNA, 863 bp, Cannabis indica
cacaagattgtagaggttcggatcccttatatataggtaattatctactcgattcccttttttgttatattaattgtgagataatatcgtgtagatcactaagaaagacaaagtgtgtaatgccctaaatcatagggacgccacgttgtgtgctcttgaaacacaatttactaatagtagattaagtatttaatcaaatctgtgataatagtaaaaattttaccaaaatatgactatagcaatgatcaggataacatcgctaaaaaattgtttcgggcatcccctatttcaaaagttttacaaaaaaacaatgtatacaaaagtaagtcaaaatacacatcaggtacagtccaaaataattcctcacaacccaaccatacaagttggataagtcgatatgtgcatttttcggacaagattgtcatctcatgattgtcttagttttctcttgcccttacatgcaccgcaaagtacccgtgactcacaaagactcactacaagaaaaaggcgttttaccggcgacgaagctcgtcggtaagagtaagaggaaatagccggcatagttttttcggtgacattttgtgctgacaaaagatgccaacaatggttcatcggcatatcaccttttgctggcgacttcagtagatgcgccagtaaaagtgtttacactgccgaattaaattttctgacataagttcatcgctgcaattatatgtcggctgaggtgtccttatcgacgttttgacagcaagttaatgttctggcaaaacttttgacgcaaatttggctacaattctccaatttactgcctaagtttttgccggtgtattaactctctggtaaatctttttaattatttaata

SEQ ID NO: 272723 - DNA, 1111 bp, Cannabis indica
accgtggccgagtccgagtccgagtccgaggtctgggtcggggtccaaggtccaggatccgggtatgtgaaaaaaaaaagataaaatataatatgttagattaatttttattttttttttaaaataaaaattacattttgattgttttctattttctagtattttaaaacttagttttaaaaaaattggccaaatgactcctatttaatttttaaaagttgttttttatatttttttcagtttttaagttatgaagccaaacatcccttaagtttcgtgtattggtcattgacttaataattactatttttttttttaaattggagaatgtactatttaatacatgcctatgtatgacattatcctcaaggatttatgaagaagaaacttgatgaggagtttgctaagttcttggaaattttcagaaaaatcaacatcaacatttctttcatgccaaattatgttaagtttatgaaggaggtgttgacaaagaaaaagaaatttacggattatgaaactgtgagcttaactgaggaatgtagtgcaataattcaaaagaagctgcatcaaaagcttaaagatccaggtagcttttcaattccttgtgagattggcagtttaaaatttgagaagtctttatgtgatattggggctagtataaatttaatgtcactttcggtattctaaaagttgggtattggtgaagtaaagcccacaacaattttgttacaatttgcggatcgatcattcacttatccaaggggaataataaaagatgttctaattaaagtgggtaagttagtatttctagctaattttgtagtactagacatggaagaagacaagaatatgccattgatccttgggcgtcctttcttagcaactggtgatgcacttaaagatgtttgaagatgccatttaaccttgagtgctaatgatgaagaaatcaagtttgatatttataagtcttctaatcaagccaatattgagaatacatgcaatatggttgagtcttgtaacttcaatgaagataatcgagagactaatcataaagaaaagacaaaaaaaagcctcgagataaaaagaaactaaaggaggagttttcaatagg

SEQ ID NO: 272724 - DNA, 760 bp, Cannabis indica
atctgtgtgaatcaattctaagacacttgaagctctattggcacctaatctcttagttttggtatgttttccttgacacaacctacacagacattaagatctatgaagtcaagagactctaaaatgtcattagacacaagatgctcaattctacctattgagatatgacctaagcatttatgccataatgacattgaattttctttatttaatttgtgtttagtaccgcgtgattccacatgcaaggtttcattagaggatgcaattgtttctagcaaagaaagattgtcataagcatttaaataaccagttccaaaaacatttaaatttaaagaaaaagtaaactgattgtttccaaatgaataacaatatccaaatttatcaaacaaagaaacagaaactaaattctgcctaaaagacggtacaacaaaagtgtcttttaaattcaaataaaaactagttctcaataacaatctaaaatgtccaatcgctttcacatctaccaattgtccattgcccaaaaagatgtatctttcaccatcactttgcttttggtagcttaggcgaccctgcatagaaacacttatgtgagcagtagcaccagaatctatccacaaagtgtttctaggtactgaaactaaattaacctcaaaacagaccaaagcaagattaatacctttctttacacgccatatgtgatatcttgcataatctttcttcacatgtcaaggttggttataaaagaaacaacccttagaat

SEQ ID NO: 272725 - DNA, 570 bp, Cannabis indica
tctgtaagtgtgcttttgagcttgtcgaaccaggctctaggagcttgtttaagtccatagagtgatttgttcaatttgcaaacccaatcttcttttcctttttcctcaaatccttgaggttggaccatgtagacctcttcttccaaagtgccatttagaaaggcattattaatgtctaattgtcttatatcccaacctttggaaacagctatggttaggacaattcttacagtggaagctttgataaccggactgaaagtctcaccataatctatgcctggtctttgatgaaaaccctttgcaacgagtcttgctttcaatctttcaatggttccatctgctcttagttttatcctgaagatccacttgttaccaattaaattttgataggctgctggtggtacaagaacccaagttcgattcttcttgagagctataacctcggtgtccattgcacctttccaacctgggtgtttgagggcctgttcaactgattctggttcagcaaagctagatacggctgttgatgaactgagatatgttttaggtcaaaaaatgccagcttttcct

SEQ ID NO: 272726 - DNA, 837 bp, Cannabis indica
gtaaccgacccatccacatgtagtctccagatcggtttgtcttcattattacttggctgaggtgctagctcggggttcctttctagtatgctttcttctttgcctgtgcattctaccacgaagtcggccaagacctggcctttgattgttgttcggggttggaagttgatttcgtactgacccaattctactgcccacttgagtaaccgccagaagcatcaagcttttgaagtatttgtcgtaacggttggtcggtatatacccgaacaggatgagcttggaaataaggcctcaacttccttgttggtagaatgaggcagtaggcgagtttttctatcaacggatatcggccctcggcctcgatgagtctcttactaatgtaatagactaggtgttgtatgttgttctcttctctgatcagcacggcactcacgacatgctccgtgacagctaggtatattcccagctcctcatcatccagaggcttagaaagtacgggaagttttggaagttgttcctttagatcttggactttgaagcattcgtccaggtcgtctatgtgcccccagcctttctagatttgacgagcatgtcatccacgtacacttccatatttcgcctgatctggtctttaaacatcttgtttaccaatctttggtacggagctccagcatttttttagaccaaatagcataactttgtaacaatagagacccatatctgttcgaaaacttgtatgttcttggtctggcggatgcattttgatttgattgtagcctgaataagcgtccataaagcttaaaatttcgtgccctgctgttgcgtctacgagctgat

SEQ ID NO: 272727 - DNA, 978 bp, Cannabis indica
ggatagcaacaataaccctaacaaagagttggagcttttcccatgtatttttgaggttgataatgtaaataccattgtttctgctattgaagacataacgctccatctgacaatcgcagttcttggtgacaaggtgaaattcagtagtcaacatcatttgaatgtcagcttctatctgagagagctgactcgacggagtagtggatctcattgaaagatgtttggagctgattagtgataataccatgaacatgccttcctatagcgagatgaatgccttactatttgttggattcgttcaactgttatgcttagtctgtataatgtatattatatgctaagtgttccaacagtctacatgtctcgtcttcatctctttatacatagcaaggttggtgcctcgctttgtattactaatgtcatccttataattgtgtcttctgacgcggaatagtttctcgtcaacacatgaggtaatagttcgtatatccttatcccgcttaggactttacagtcagcaagttataaatatactctatcaactctgcatttaatgagttattccattttaatatcctttaatataattaccattatattcgttgattcatattcttcaaggttgacacgtgtcctcctcttaagtgccacccaaattttgggtataacaattgccccttaaaaagttctttttaatgaaaagtactttttaaatgattacagagagtatttttgtcataatcccttttgaaaaaacgcatgtcctctaattttggcggttttgtggtttcggggtacatcagcatttaatgaccatcttttccactttcttttttaaattttacccggtggatcaagtgtctccttaatctgacggagattaacccaaagaagtaaaaaaaaaaaaaagaatcaccttttcaatacctttgccatttcagaaactctaaaaaaatttcaagcttttctgcaaaaaac

SEQ ID NO: 272728 - DNA, 1303 bp, Cannabis indica
agtacagaaccaccaaccctagtatcagcctatactctgtttaagggattagggcttaataagttacttgggtagcgtgtctaattatttagggcgttacaatttggtatcagagcgccaagtttcttttaaacttcctgtagaccggccgaacatgtacattcattgtcagagacaagctcgactcatggtgcagtaagtattgagagtaaatactttactgtttgtgtgatcatttgtttaccgctttcaattttaggcagtatgtaagcatctagagtatttatgtgttctgtgatgccatgctttaactgttatttgattaatgaatatttgtatggggtaaatagtttagttagggtttaaagcaataagtgcataagtgtggtattggtgcttaactggctggggttgttgattacacgggtactagtaatggaccctctttaatcatccagaccatagggcgagttagtagagcctggggctacccaaaccgatccaccggcatcgcctccaccttcacagaatctgggggataatgcgagggttggttatgctaatcctcctgctgagtagcagcagctgtttcaagaaatgcgaagtgtcatactttgttcagaagaagagttacgacgattaaggcaaccgactgcccctgtcgatcaagtgttaccaccagcacctgtgccagtggtgggtaaccaggggtttgttttgtcgcatcgagactcggtatttgagcggttcgtggagctgcaaccttcgaattttcaaggaggtattgatatattaaaggttgagcaatggatgaagagaggactaaatgccacaatcagtcgggacttgaaggttaccacttcacatgacactttgtacaagacagtgatagagctagccttgattgctgaggaggctgagcaatatgtagaaaaagagaggaccgcaaaggatgccgtcacggcatcaaattcgcctgctagtggtaacgtcggtaaggggaccgacagtggcaaccctgatcacaaacgaaaggcttaggctctcggagtatcatggggtaataaatagaaagcatcggggaaattgaggtggtcgtcaaggtcacggattctctttcaagtcatatcatgaatgtccaaaatacaagaatcatcatcagggtgaatgatggaccaatgataggtagtatatttgatatggattatatgaatcggacgttccaggattactagaatagatgtgtgatgtgtttatcaatgacatcttggtgtaatctgaattagataaagaacatgagttg

SEQ ID NO: 272729 - DNA, 818 bp, Cannabis indica
tttctttaattttcttatttttcttatttcaaaatctatcaaaattatttatctaccaaatagaatcataagtctaatttagtggtattcagttcaattccctgtggttcgacctcacctgcgtgagtttactacttaattacgtgcacttgtgtattgttcataattatcgtgacaagtttttggcgccgttttcggggaattgtttaaaaattgatattacaaaaattagattaaattctactttggttaattctttctgcttattgctaatttgtttcttttagattgtctatttcaggaattgaaggtgtatgcgacgtcaaggacaaggtgacatattgccggtggatcttgaaattgagaagacctgtaggggaaacaaaaaaaacaagaggctaagaaaagggtttcagcaactgctgaaacagaagaaatcatggcggataatgccaatggcggtaacattggaggtaacaacgctaataatggtggtgccattgaagatcaagcaaatggccgcagtctcagagattacattctcccaactcttacgggggttcaatcttgtataagaccacccatcgtagatgcaaacaactttgagataaagccagccatactccaaatggtgcaatcatcagttcagttcggtggactcccatctgaagaccccaatctgcacttgtcaaactttatggagttatgttagactttcaaagtcaatggagttagtgatgatgccatctatttgagaccttttccattctcgctgagagagcgagccagattgttgatctccttgccaccgaattcta

SEQ ID NO: 272730 - DNA, 1379 bp, Cannabis indica
aaccctaaaaaatgagaaataaaaagaaaactgcgattggaaatgggaggaggcgattttgagacctaaaacgcagtgaagagcggctagaggagcaaagtgaagatccagagtcattccaccaacagtttctttctttcttcctttttaatttctttatgttgaattctgttttggaatggttatggatttgaacatgacctaatcttccatttagtgaagatgatgaatgtttgttaagtttgccctagttaatgttaattgccattcctattcattttgattgtgtattatccttatttgtgttaattccatgttaaagcttgatcaccttttgcatgtctatgatctcaattcaaaatctgaaaagtgagaattgagaatgctaaaatttggataacctaagttttttgtagaacgaaggtatttacatgacttttgtgactttttagattattgcttaatggagattttatgcaattctaattaagagattaattagggagcatgagatttagaacctagaagatctgaaaagagctaggttaattagaataatctgtcattcataacaagaactggaatagtaattaggcattaacaattgggtaaacctatcaacaggattctcttccctatcttctcatttctgactaatttttattgtctctttcagcttcttgaatttttattcgattattgaacttgaaaaatattgatttgccaaatagaaacatagatttagtctagtggctctcagtccaattctctgtggttcgacctcacctgtttcagcttactacttgatttcgtgcacttgcatattatttacaaaattcgtaacagtaaatgccatagtcagcaactctcattcttggatggcacccatttacaactttttgagctcgggagagcttctcacagacaaagcttcctcttggaaggttcagtaccaggttctctattatgtgatcatggatgggaagctttagcaccggggactgtcaatgccatatttgaggtgcattgctggaatagaaattagcactgtaatccatgagattcatggtagcttttgcagagatcacacatccagacccagtttatcaaagaaaatcctttgccaagggtatttttggcccacagtgaagaaggattgcatagggtatgtctagaagtgtgagaagtgccagagatatgcaaaagttccacgtgcaccgccaactggaatcacagtcatgagtatcccatggccttttgcagtttgggatatcgatttagtaggatccctccccacgagaaaaggaggagttaaatatgcgatatttgcagttgattacttcactaagtgggttaaatatgcgatatttgcagttgat

SEQ ID NO: 272731 - DNA, 988 bp, Cannabis indica
tacaaaatagaaagagatagacaaaaataaaaatcatgtgaaggacaatgattccatttttaactacacacactactgtctgacaagtgtgtacaagtttgtaagtcttcccttttcaaataataaaaaaatcatgattcatatatatgtcatgtaacttgtttatttttttcacaacatatggtaagtatggtttgtatttgagacactgagtttttattatctttaaagcataacatgattattatcctttctatgaaacatggaaacatacatgcattagaataacttgattttatgtataaatattttagtttcttatctctttttattttaaaaaaatgatattaaaaaataataaaaaaagggggaagtcgtgtgacatgacttataggcgtatttttttttttcaattgtctttctttcggtaagtgttgatttattttttgtttagtaaaattttgatgagtttccttttataaatgatcccttattaattgtgttttatgagattattggccttgtttttttttttttcttatttcagcacttattacaaatgttgctgggaaatcttatttaattgctcatttgtttcttttttcattattttttccctcttattctcatgtggcctcattaaaaaattttaaaaaagaaatttttttttctacaaggaacggtttctttgaaagttagtcgacaccttgatttcttctttacgttctttggcctttgagataaacaaaaagggagagtagtaggttttaagtttttggtttgtgtgttcaactcggccctttttccagggggagttgagtttggtttatgtgttaaacttttgttaaagaagttagcacagtattttgtgttattggtgtgtttttcagtgagagttttatttctacgattttgctaactttattttgcaggtatttaaaaattaaaaaataatttgattattgaaagtgccaaaggaggagattgt

SEQ ID NO: 272732 - DNA, 631 bp, Cannabis indica
ttttaagaccactcaagttttttgtactatattttttgatagttttgataccttttacgacttatgtatcttttatggcttttgtacaattttttatggtttgtccctatttgtttagggtagttttgtggtatggtcaattggcaagagaagtgattccttttgtgctcatgatttctacttcaacgactttttcgcttttaacagataagtatttcaagttttatgtccttaattatatttaatatggattgatttatcattgttctttcatattatcttttttcattatattgagtggtaatagagtttattttttgttattttgtaggttattttgtggagggtctacaattacagggaatttactcataactttaattttaaataaaatttgtttgattttgcttttcagcaggttatattagggtgctagtatattgttactagccaaagggtaatacctttggctagttatttttagaaattttgttgttttttttttattattttagtaatgttgagctaatgatatgagttgcgtgttaattttgggaaatttaattttctatacttaaaaatgttcaaattttttttttaaaccaatacattttacactacaaaaaatatg

SEQ ID NO: 272733 - DNA, 743 bp, Cannabis indica
ataatctttaaataatttgcttcgaattctaaaaaaataaaaaaattaatgattttttttatgtgacaaaaggcaatataaataataaatagtttaaaagggtcatttctctacaagttttgaaatgaggacatttactaacataatcctataatttagggccatttgctataatttttttgaaatgaggacatatactaacataatcttatgatttggggccatttgctataattttccattttaaatcccatattgtgtattcagcccaattttaaaaggtatgtttgtaatttcctaatattttttgccaactgtttattttcatggatttttttttttttaaaaaaaattaaaataaaaatcagccttgtcttttcatcttctgcatgtaatgagtacccctatttcatctaccatttttctttcatttcaaagttctttcttctaactggtttgtgcatcctattttagggtttcttattctttctttttttttcttcttttcattgctattcatctcttttaattctccttctattatctctgttttgttcttcttcttcttcttcctttatcttaatagtttttttcctccttatttcgacggcatcgtcctcgtcgtaggtcatcggcggtaatcggtttgcattttcttttgtggtgtggactggagttgctataaggtgtgttcatattatattttgatttttttttatatttttgattagtgggtatcttag

SEQ ID NO: 272734 - DNA, 904 bp, Cannabis indica
tactatatgaggtggactaattatatgttgacatgtgttaacattaattagtccagtcaacacataagaaaatgatagtgttatctcaaaaattactatggtgacgtggcatgagacaaaatgatacatggcataaaaatggaaagctggtcgatatatatcatatacaaaaggatggaagccggatggagtgattggaagatagggaagtgcaatgtactatgttagaattgttgaatcatctaggacaactctgttggtttatggtactaaatcaggtacgcagcggtgtaaaagttttatgattatcatcgtactatattcttaggataaccatatgtatatttaatgagaatttagaaatccgagacgttgatagagaaaggaagccaaaatttttttaaagtaaaaataaatgaaagatttacctcttaaagcctatcagggtatcctcaagtcttttcatatgttgtatccttaattgatctcaaaatactcacactatagtcttctagggcttccaccacacacaaggactagtgtgggctaataggataaagagtatatgaagttcttcttcaattctcaatacatgagcaagaactattatatcacgataatagagagaaaagattaatcaaattaatcctttttaggcttactgttatctgcgtttctgtcattagacacgtagaatctaggtcagcatccaagggccatcagtgggtctcccaaagaagacaaagtgagccaagcccaattggataggttcatctaggagcgtacctcagctccgtgaacgtagacccttccaccattgacaaatcattcccagaagcaagtttgttactatttaccgagttttttgacaactaaatatttttagagcttaagaaagtaataa

SEQ ID NO: 272735 - DNA, 1157 bp, Cannabis indica
agttggatagatcgcatgatagttatgataaagggtttaggaaccctactacctggtgagaatttagcatctaccaaaaggtggattcggtctatgccgatcagaattgagaataggagttgagtgctgagttatagaaatgggtttagttgattttgatattatacttgaaatggatttcttatccaaagtctcagccagtattgactgtaaacagaagatggtgatcttccagccctagggcgaggaatcgtttatttttgtgggatcggttcaaggatctccggctccagtgatttcagtattaacagctagagaattgttacaagatggatgtttagggttttaggttgtggtattggataccacattgcctgagatagtttggctagagggtattagagttgtttgggaatttatagatgcttttccccatgaacttttgggtttagcaccgtagagagaaatcaatttcatcatcgatctagcacttggagcagaaccagtctctaaggcatcttatagaatggctccagcaaaacttaaaaaaaatgaaaattcagctttaggggttgcttgacctagtattttcacgacctagtgtgtcacgctggggagctcccgtattgtttgttaagaagaaagatgggtccttacgcatgtgtattgactaccgggaattgaataagctaacagtcaaaaacaagtatcctttacctaggatcgatgatcttcttgattagcttcagaggaaaacgctgctctcaaagattgatctctgatagcgctatcattagtatagaactcgagaggagaacattccgaagatggctttctgcactaggtatgggcactatgagtttttggttatgcacttttggactaaccaacgctcctgcagctttcatgtttttatgttacggaaatacatttcagatgtcaatcatgtgttaagttatgaaaagtaaggtggaagaagccacctaggagttggagtctaatattagacaaacattatagtgttagatctcgaaagataaatattgtaattgcaacatctagctattcatcgattgatgacaccttagactagtatttacaatatgaaacaagaagattgtataaataagattactttgactctcgctaatcggagc

SEQ ID NO: 272736 - DNA, 1360 bp, Cannabis indica
tcaatccattaggaaagtcagagttccacaattacagatcatgtttccagccatccacgttattagattcctgaaatagaagttgtaagaattagttttttttgagaaactttaacgagtgaataaaataaactaataacatgaacatgagttcatgattactcaggatttaggccaatctactattggtcatcattatgatacgaaattaggtctttataataaatgatatgttaataaagacaactttattcatactgttccttgtcatatataatctatattatgtacagtaccttcactttgatgtcatattacatccgtaatctgaatcgagattaattgcattgaagaacgggcatcagtaaacagtattagcaaccattgattaaaaattctatatttttaatatgttactgactattttattcatagctaaacggtcttaattttctgtacagctacaagccacatcctcatttatgaataaagaattttttgatatttaatataaattatttaataataaatattaataatttaacattcaatgtatatatcaaaatattcaactctttattaataactagaaatatttttatagacttttcatagcataaacctcaataagtacaccgttttttatgtcacttgggagggggttcactatttttcatgctcaatccatttccaccaataaaactctaaatccaaaataccataaacctattttcggccatgaaaatgaacttgaaaaagtttcaaaaatctcaagaaaatgagattgatggctgagaaaaataaagttccaacgattcctactatcaaaaaactcaatttttcccattaaacactcattcgaaaattattgtgtcaaaaagaattttgaaaaaaaaattggtttgaacccaaatgtaagtcctagaataaaatgagatggctctaaataccaattgttgaattttgatacacaatgagcatgttattaacaataaaacatgctcatatcatccaagattaaacatttaactttaagctttaactttataattagtaaatatacctcatttaatatttgatgttaaatcttgaaccattgttgatttcataaatctcttaggtctacatacacggagaaagactaaaagcttgagtgtaatgaatactactattgatatcactcttaacaccatagtcacacccatctcataccttaatcacaacataaagagcacaatctttttataagaaattataggccaattgggtctacatgctcaatgtgagagaattaattgtcttggcctaatgagctgaccaaagacgttttagagtatgtgttgaaattattttaccaaga

SEQ ID NO: 272737 - DNA, 2366 bp, Cannabis indica
acaagaaacagaagagagagaaaaaaaaaaaaaaaaaacaccaatctactcactctcatctcatatttatattcatatatatccttatattacatttttattattattaatactattaattttaaatatgtttttaatttcttccccaacgatcgaaataagcctggtgtgtatactcaaatattaaattgcggcttcttaattattaactttattcccccagagctactataatatatattttcatatttatatatcttgttatgattatagttggcttaaaatgtgttagacccaatatataattgtattaataactttttttgtggtacttaatagaactttaaggtgccccttatatatatagcatatatattgcttaaattaattgaagtattatttttgatataaaaaacaacataaaacaatgtatataaggatgtattgtatccaataattaataagaacaatagggaccattttattatttagggatccctattatttaatgatgaaatggacaatcacatcaatatattgatttatatatctttccccttcttttcgtttcactttcaacttattattattattaatgttgagcagaaaaaatagagcattcgaacttatatatatgtgtgtatttaatttatatgaattggttaaaaaaggtgtgtgcaataaattacatgcaccaaatatattaaatatgtcatgaaacacggagtcattatattccttaattaatattataaattagggctcttctctctaatagttcattgaaacccctggttcattttagtatcatatattcatactcctccaaattccaatgcttaatttaatttgggcctcatttaatttctggtaatttcaactccccactccaaatcataaattatgggcccggcccatcaacgtattattattattatcataaatcataatcatgctcctctaaataaatgtctatctatttcctttatgatattagagctcatgatcatgctatagttctctccaagataatccttatgggcctaacaaattttattgtcactagacttgtacatacaaaaaataataatatagataattaaaggtgaaaacaaaaaagataaaaggaagacacaaaatcaattttaaaggaattttaaaattctttttaatttagaattcattaaacgtattcattgtcaattaatttgatagggattttcaaaattaattcttagcaatttagagatgtataaatatataaatgtgtgtatattcattacaaaaattctttggataaaccgtttgagtgttataaatagaaatttaaaatataaatgcatgctctaaaattctaattaatattaaacgtttgagtgttacaacttttctttttaaaaaataataataattaagagcacaagcattttttccaaatataaattttcattgttctgtctttcaccctttttattccaattaatcataaattcgtcaaatttaattttggccagtaaatgaaattctcatatttttgtttttaacatgtcgtaaatttatagatgagtttattgattggccttactctctttatcttattaaagatgagtattgctattagacatcttacagtaaattactgatggtccataaaagttcacttttaaaaaaagaattagatttctctgactattttaaataatggggtaaaatattctcgttaatctctaagaccgacgtctatttccaccatcgcaaaattagatagaataggcatcagtagaaaacgttaaaatttttccctaaggttgaaaaatcgtcaccaatattgtgcatcaataccaacaaattgtagtatcagccacagtggaaaaggctatactcttattgtcgataattttgcacagttggctatatcatttcgtagcttttttttctaatttttaattttagcaaaataaataatatatatcaacattatataatttgcaccccaaaaattacaaacttgttttaattttcaaatctttacaatgtgaacaattaaaacaatatataatacaaatataaaaatctcaaatctatatacacaatagataaaaacataacaataaaataataatggtccttcgtcttcttcggcgaacacttgagatgggagtttcatttggctttaagagccctggagagccaagattcagctgcagctctgccgaaaccacaatctcgagatcttcgatgatctgtaaaatacaaaaatctcaaaaatacataaatcccaaaataaaaataataatgaacaagttattgagattaattatgtcaacccaagatatgtttccgagagggagtgaattggaaattta

SEQ ID NO: 272738 - DNA, 743 bp, Cannabis indica
attcataatacttggcgggtctggaaactagcacccgccccatacaagttttttggctcacccgaactgtgccccatctcacatcataatttcaggaatacctatattatagaaaagtgtcatttttgtcattgaggcccatttgatcttcattgagcacactttcttctccctttttacccgtcccactactatccacgtgacccactcttcttctttacacatcaacaaaagaaagaccctcatttgaatctccctccacaatattcacattaaactcctccatattcggctccctcatttcatgggattttccattatcgctaattgaaggatggtcaactccagcatgttgcaatctcattgatggtgatccctggattatctcagcttgtttatctcctccaaacgtccttagcaacactggagaaacagtcggcccaaccgcaccagtcgaggatgacccctgcttcgtccccattcagaccaaagccaccttgagccatttgcgtaattacgccttctcggagctgctttaagatccaaactatagttcttgatgatttgatctttcggagtgttaaataatttctcacaaaatctctctgaatgaccgagaatgccacagatgaaacaaaaagttggaaggtcttcatatttaaagataacatgacaaacccgacctccttgtatttcaagcttctttttttttcttcaaagggctgttaagtggaattttaacc

SEQ ID NO: 272739 - DNA, 663 bp, Cannabis indica
tccttttacaaccctccacactttagtctcttggaccaaattagaactaggaacatgggcaaagccaagtagggcggtcttcccatgtgaaatttgactcaattctaagttaatagcctgtgttgatgtgttaaacctaaaattacacaagaattatgtatgagttaaacctcatacataaatacaagctttgattgtagtaaaaaatttatttctactgttattgatattgaagtgtagcaagcttctcaatcgtgatagtcctcaatggctcagagatcatggaagctcgactccttgtggataattcttgtgccacaaaatgcatagtgggtcgtgaatctggtctacttctagtacatgacagtgccaagctcaccactaacaccacaacacctgataatcttccggtaggaattaacaatcgttgatctaacatatctttcaataacagattctctgataatgtttctgaccgagctgatgataaagattccaacaactctcttgggtgctttcccatcataatttctaaagctaccactccaaaactatacacatcacacttttcagtcacacgcataatcaaagccaattctgcaagacaaaacaaattttagaaaacaagaatacttaaaatgaatttcatgtaagcactaatta

SEQ ID NO: 272740 - DNA, 1082 bp, Cannabis indica
attgacaaaagttgcagggattttctctagggggtcaatggaaatcgaagtaaattccatttaccctcttaggaaaaaatctgtctcccgaaaaagtttggaggaattagcttccgagagggaaagaagtggaatgttctttgatagccaaaaacatttgggctaagtcggagaaacaagataatctttgggttaagtagattagttccatctatctaaaaggtcaagacttctggttgctgacttttaaacaggatagcagctggtatttcaataaaatcttgagactcagggagatcattaaccgagatgctctcttgggggcgggtaagaatgggaaatttaaagcaaaaatgttttataattctcttatctctgctggaatttctgaatatgcgcctactatttggcataagatgtgtgtgcacaagcatagattcattattggcaagctataaatgaccaacttttgactagggatcaccttagtagagtgatggagatcactaataagaactgtcatgtttgtgtgatgaatctggagactcacaaccatgttttctttgagtgtcactttgccaaattggtgatgactgagataggtagctggtttggtttgaatatttggccgagtgacttcgatcattggaaggactagtgttcgaagacgataaataacttgttggacaggttgatgaatgatgtcatggctgctgcagtgtatttcttatggtagaataggaatggctgctggtataacatgtattgtcgggctcctgattttgtgagcagggagataaaacatgctgtcaagtatataatcctgagttgtagttttcatcatttgaaagggagggatttgtacattattaatgtaatcaagagctggtaactgttttttttttctcgtgtagcagctgttttgctttggcttgttttttgtttgtcttttgaataaaaatatcatcctttttgttaaaaatatatatagggatatgattttgtcccgtgatgtacttttacggaatgtatttcgtggtacattagatgggtctcagggtacattaaatgagtgtcagtgt

SEQ ID NO: 272741 - DNA, 1730 bp, Cannabis indica
aagataagactaataggaaaaattaaattagcttcaacacataaatacgatgcattaaaattaattaatgaatgaactccttataattctaaccccatttcttaaaaaattattaattcttttatatttgtatcaaactaagatacattagtttttgtttttttttttttttctacaagttgcaaattaaagaaaaattaaggagtttggtgcattttgatttactaatgagatatcttttctgttttttaaatcttaattgttttttattatctactatcataaattttatattattataatattgtataatactaatatgaatttaaaaattaattggtgcaaggatagtttcctaatagcagactcaaataataaaaacagaattatttttccattttatatgttacatgtacacaaatttcattctaatttttcaatgttcattcttaaatagagataaatttttttaatggaaatgaatgagtttaaacatatgatgtttaattatttattatttattttttaaaaaagaacataattatgagtatttatttacaactaaagctaactcccatcattttttttataaaaatctaaaatatgtccaaagaactccattttttttctctcctaatttttcaaatttatttttattaactaaaaaaagagaataatttatctattctcttcatttttttaatgaatattttgaatttaagtttcatttattttttttttaaataaataaaattgtataatttattactagacgtggtagacaaattgttaaatcctatttatctattttctctatttttttaattattttctattttttattatattaaatgttataaatattaagttattgaaaaaaaatttcatatataattttaaaataaatatctatgccatgggtataactactaattgtgaatatattcggccaaaaaaaatttcatcaattaatacttttacgctattttttttccactctcattcatcattttttatctatcatgatcttatagatgaatattattaaacaaaaaattattatttttatctattttattttttctcccactactagaaaaaaaaggaattaggcattggtctataactgacttcattaaagatagttcgaataaatttatagttaaaaatagttgagttgggtagactaagctccattgctgatatatattcttattttttaatttttaaaaatcttaatttttaataataaatggtccaaacgaatattacagttaagagttttaaaatataaagggtctgaatagaattttaatttttgttatctttagcaaaaatatatggccaaaattttagcttcctctattttttttatatatatatatatctattctatataaagtgtgtctatataactgaaattcttggtttatgagaaattcatgggttgactttttattttatttaataaaataataaaatattatttatatataataaaacaaatcctattaatatttgaactgatatttagcatatttcaactctatataatcacaactataactctagaaattaaaaatatatatataaaataaattaaaccttaaactgcatatacaattagtttgttgagagagatcaggaaaagaacgaattatatattagtaaagaaaaaaaaacctaactcttactggtaaagtacaataggtaattcgtgaaacttttat

SEQ ID NO: 272742 - DNA, 864 bp, Cannabis indica
aatagaaagtaacaaaatactcataaccacctcgggctttgacatttagggctccacagacatctaaatgtactaacccaaggggttgtttggcacgctctccctttgcagagaaagaacgtttggtcatttttccttctaggcaagattcgcatactagtaattcacccaagacaacatttttcaatggaccgtcttgggttaacctatgaagtctatcatagcctatatgacctaatcgtaaatgccatagataagttgtatcatcattatcaatctactttcttttatggttttaggtttagcaatatttaaaaggtcattgttaagtgcgatttgtatttccaatcttaaaacataaatcccttgtcacatgtgagcaacacataacttaaatccattacgagaaattgtgcaaacagaactcaaaaaattcaatttataaaattgtgtttgtaaaaatgaaacactaatcaagtttctactaaaattaagaataaacaaaacattgtctaaaactaaaaatttcttctaaaacttgaggtgggctcttcctttagcttggaccgatactaactcgccatttccagctttgagcttgaactcctctacattcaggtagtcccaagtttcaagcagctgcaatgaataatccataaggatttgtcattctctaaaacacatgattcaaaaaatgattcaaaaataaaagcactagcttcaatcgaattgtttagaagtctgggacatcgttcttcctgatgtcccttctcattacaatttgaacatggaagagtactaccatcaattttacttgaagaagcagcattgttagaagcttcatccttaattcttttcctctta

SEQ ID NO: 272743 - DNA, 532 bp, Cannabis indica
caactcttcttttgccaaacaaagtcattccgcacatgctaaatagcccaactcgccatcgccacttcctccatttcaactttgtgcccctggtgaaaattcccaacaaccagctgctgaatgttgcagccctagccccgacgtccactatatatgttgcgatgccatgcagcatttgcaaacgagcattccaccagcgcatgttgaatagttttagtactagagttgcacaaagggcagttggcattgataggaacatgacgcttttagagttgaaaaagagttggaagcacacccgaagcaactcgccataaaaaattattgatcttaggagaaatttttaatgaccaaagccgcttccgaaaatcaatattggcatctcggcaccaagcacccttagattcttataagaatttatatgcacttttaaccgaataattctcacgtctcaagttgccaactcaaaccatcattagcggccgaatcactaaggtgaatggacgaaataatttcctgatcacgggcaacaaac

SEQ ID NO: 272744 - DNA, 1156 bp, Cannabis indica
aaaaaacaaaaaaaaattaaagtgagactacatatgagaaacgagttaaggttattttccacccttgacagtcattcttaatttatattactaaacgtaatttcagtttccaatcaaactattaatccgcagataaagctgaagcagtcaattatcccaatctccctattgtatgttgtaaagaccacttatgattaatactttggagtattaaataattagggtttatgcatgagatttaattaatatttataaaatacatattgtggaaatatatttaagttcatatatgttcattatgctattttatgttaattacttaatttctgtgtttgtgttcggaagctgtggaaagcgacgttgggcctttagagagtcgtattttgtatgttatagcattgtgctatttttggggtattattgtaggtttaatagtattggttattagtttggaaactttgatgattaaggtgccttagaaacccttttctttaagttattagtaattagttaagggatgattattccttaattcttttgttttatatttcagcctattaattaaaagtattaataataagaaaagactattaccccttttactcttgagttaagtagaaagcctagaaaacttccatttttcctcaacctctccttctctttctctcgattctcctaggagcagctgagggctgtgaattttcaacctaccatcaagaattctagctgaatactaagattccgattcaaggtatctctccttgttctttcttcatttatttttctttagcctaagttaggttttatgtgtgaagttgagctttatgttgctgtatgaataaagatagtttgatttggtattttggagattgtttgatgttgtttaagctaatttgaactgaaattattggttgaattgaggtttgggcaaaggttgagcttaagaactcaaacctagctctctaatggtggattgagattttgtgtgaattgttgagttctattgcttggaattggtttattatagtgtatacaggtatattggaaggttttagaaagtttgggattgttttgatttaaggggatcgatttttgggttcccagctcagaaccggtcgaccggttctgggaagccattagaaccggtcgaccggtt

SEQ ID NO: 272745 - DNA, 1299 bp, Cannabis indica
ttgtttcaatttatacacttgacctggacctcttcgactcagtgcatctgccactatattttccttcccagggtggtaaaggattttgtctactctgcatttgtattttaggatttctatctctctatctttttcttctactatattatttttggatcctccttcttcttattcttatttttcttcttctatattgtgttcgtgggttgccttttgttcttttttttcttcttcttcttctcttttcagcagtaataggagcttcttgctttgttcagtggtcatcgtcggcagctcctttcttttgggttgtgtgttgcttaagtgtgtgattattaatagcattttgaggtgagtgtcttattatctttttatattcccatttatttatctattatttacttattgttgactttgtttggttgatattgtgttgatggtggtattttttttttgatcaattagttgagaaattcattactaaacttgattttgtataacttgtatgctccttcaaataggaaggccgaattatctatacacatcaaaaataaaatacacaactatgctaaattttcaaaccattctctatcactacttttaatattccttggcattacacaagatattcgatttttcacaagccatattgtttgatactgtaaatgttgaaatttaacttcatttgagttataaattttatcattttggctgaaccatagatggtatactaatactgccactgccgaagcaaaaactgtgtgtgtgcattgtctttaagggtttgtggctttgtggattttgtatttgcttggggtattctttgaatattagagtgtaatgttttacctacctccatttttgtttatttttatctatgatttctctccatcttttgattatttttgttattcttttatagttttgattgtgtttttgtctccttaattttctttgattcttattttctatttcaatttgtggtttgattttttttttttgctagtggtttcgtttaatgtgattatttctggcataaatgaaatagccatgaagtatatgtactgtttgttgtgaagttattaggttattatgcaatcatataaaatttatatgttcgaaaatgatttttatagttggtattatttttagattatagattttgcattgtgatttttttaatgaaacttattaaaatgcttaaaggaactctcatttttgagcaagcataaatgcctaaacagagtatgccgttagaaataagagtattaggtattcatataaatttatatgttggaa

SEQ ID NO: 272746 - DNA, 1003 bp, Cannabis indica
gtgtgtgagtttttatcttagttcttttacggaacttaattttttctcaaatttttaattagttaataaatatagctggtttctttatattttatttaagttattgtgtgttattatttgagtttatgtgttattatttgagtttatgtgttattatttgagtttatttattttattatgtaaccgattcttttcatatttatgccttaatattttttagaattaattcccatttttttttaaaaaaaaattataacgggttgtatgaggtattatgtgttatgagatattttgttgtggaactaattttgtctttaatatatgttttaatgtttaagtaattgactttctctttgttttttatttgcaattagtttgagttattgcatgttacttttttgttgttcattatagctgattttattttagttataatcattttgagttatttcgtgtgttattaatttttattcattataacactggtttgatttattttgtgttattttttttattcatttatatttcaaaaccggtttatatttcaattataaactgagttattttgtgttatttatttttatccaatatattataaaattaattctatttttatttatactaagacatctacttttagtgactttttcaattacttttttggcaataataacttttctaatgacttttccagaaaaactcattattaaagttttatcaaatttatttattatattttttcatatttcaaactttaattattttttaatcctatatttttttacattatttatttttgtcatataaaaaagtgaactctattgtatattcccatatttatccaaaaaaaaaacccctatatgtagatttagatagatatgggcctttggcaaggccggcccaataatcaaagcctggatgcacagttgtccacgcgaatttgaccccagacctcagagaacagttccatccttatctgggcatacacgtcaccatcccattt

SEQ ID NO: 272747 - DNA, 775 bp, Cannabis indica
atattttgttgtctaactgcttcttttaacctttatatgcagcatatagatacaacagtccatatgctaaggaggccacgcttcatctatccattgaaatttttgctgaagggtatcattctctccacatatgtgaccactatcatcagcagtgcatggataaatcacaagagtcctagaaaaaactttgtttgggaggattatatcatggagtactgcagaggttatgatcaggtattattttagtaagcttttaaagtttcaactatgattacaagtttataatgttttgttatttgtttagctattctccataattacaagagcaattctatccgagatgggggtaatgagttcatttacttcatttttcatcttcgcacacagaggcattgggtggctgttgaagttgacatagagttgtagaaaattaacgtgtaggactgtgattctcgcatttgtcattggaacaacatggcacatcctaaagacttaggaagaactattgccatcattaatctatgcaacgagagatttttcaaccaataattagatcatggcgttaactacgaatgagatcaaggagcttccgaagatgcattcatctcgagccacccacgacttagttctaaaggcaaaaataagatacacagcgataaaaaagtactgtagtaataaaatctgcttcacattgtactaacttcatattttatgttgcatttagtggtgattgtggcgtttatgccattgagtacgtggatcatctgatgatgca

SEQ ID NO: 272748 - DNA, 1716 bp, Cannabis indica
atgagttgtttcaagatcactaagagtactatcaacagtcttcataggatggctgcccaattttggtggggttcatcggaacaaaataagagaatacattggtgtaaatggacttacttgtgcaagcttaaggacaaatggggtatgaggttctggatttgagattattcaactaagaacttttggctaaacaaatttggaggtgtatctgctatcccaattccttgtgtagcaaagttttaaaagcttgttatttctctaacaaagatattatgtctgctaagtgtgatgctcatgcttcctttgtctggcgtagcttaatatggggtaaataaattattttgaagggctatcgatggagggtggaggacgtgaatatggtgagggtgttggaggacccatggctaccgagacctcatacttttaaggtctacgataagccatttcttcctaaataaatgagggtggtagatttattacttgctgatgggtcttgggatacagacttcattcatacactattcaataaggatggtgcggagcttatattaagcatctcgagtaatgaatggggccttgaggataaaattatgtggcatttcaccaacaatagagaatactcagttcatagtgggtacaaattggctattgcaattcgtgaagattcttttcaatctgactcatctagaactgaggcatggtggaacttattgtggaagcggagaattcttccaaaaataaaacattttgtgttggaaatgttgtcactcatggcttccaacgaattatgttttatccaagcaaggcattcaagtgtctcctctttgcacacactgttctaaaagaaaatgagatgatattgttcgtgtgttatggggatgtcgatatagtgttatggtgtggaaacaatgtggcctttggactcttcttcgtgacaacaggacttcagacgtcactacttttttgagcaatatggctaaggtttgtgactccaatacctttgattttttttttttttctggttgttgcttggaacttatggaatgtccgtacttgtgtgaaacatgggggaatctatccgagagtgggcgatatggttgactggcgtggacaatttttaaaagactttcaggatactaatggaggacaaacaggtattggtttggctagggaagaggggaagtggtgtaggccgggggtgggttgtgtatatatcaatgtggatgcgagttaaaagactaatgaaggccatgctgcacttagctatgtggtgcgaggaaatgatggtgcagttgctgttgcagctgccaaagtggtacaccaacaactaacgcctcttatggttgagctgatagccattaaagagggactacaagtggggatacaacggggttatcgtaactttacagtggaatttgactgtctacgagcaatctaactgcttcaagaaaaagaagatagttgtcgcgacattgacgagctgctacaccaaattagagttttattgcaacgtcctactgtttttggtttattttttgtatatcaagaggccaatcaagtgtcttatattttagccaatcaaactttgttattcaaagttagtactatgtgaattgaggctacacctcttagtgtttgccatgctattcggctggacgatttttttcttgtggaactttctcttaatgaatgcattctcttaaaaaaaaaaaaaaa

SEQ ID NO: 272749 - DNA, 1124 bp, Cannabis indica
aaacaacaactttgtgtggagaagcttggagagtggggaaaaacaattactggtaacttcagaaaacgtatcaatgcgtgcaaaagagagcttgatttgttgaagagtcgaagggatatggtttcggtccaaaggtataaggagattaagaagcagcttctacacatcattgcccaaaaggagacgttttggaagcaaagagccaagcaattttggcttaaggaaggcgaccaaaataccaagttctttcatgcggctgctaatacaagacgtaaaactaattccattcaacagctaaagaatgatcaaggagtggatgtctcttggaattcaggtttggaaagtgtaattacagattatttttcatctttatttagctcttctcgtactttgacccaaccagttgttgagtgtgtggaaaggagagttacacccgagatgaatgaagcttttttgctccctgttatggaggatgaggtgcgccaagcaatctttggaatgcatcccgataagagcccaggtccggatggcttaattccggctttttaccaaaagaattggtcaatagttggatcagatattgttaagcttgttcagcgtttttcacaacgggaaagtttgaaaatgagattaacaaggccaattttgttctcatcccgaagattagaaatccggagcgaatgacggacttacacctattctttgtgtaatgttttatacaaaactattactaaagtaatggcaaactggttgaaaccggttatggatagtattgtctcgcattatcaaagtgctttcataccgggaagactcatttccaataatatcatggtgtcttttgaagtgttgcactacttgaaaagaaaaaggcgaggaaaagaaggattcatggcccttaaactagacatgagcaaggcctacgatagaatcgaatggagttacttggaagccatgttagtgagattgggttttgatcttggttggattaatctgatgatggaatgtgttcggtctacttcatatatcattgttcatggtgacaagaagatgggtccgattactcctcaaaggggaattagacaaagtgatccactttcaccttatattttcatcttatgtgcgga

SEQ ID NO: 272750 - DNA, 1566 bp, Cannabis indica
atgagcgctctatcatttatcttcattaagccaagctcaaaggaattatcgtttcacttttatgtccggatagaagttatagattccgtatccatgattagcgctcccactcaattgaactaccatgtccttaatctatatgtcacgagaagatccattgatcgactttaacgaacagattgaagaacacaaataatataattgaactagaacctaaccatctcaggattgagacacttgatctaagattaactatgtgatattgaattgaatagatattacagtaagtttattatatctaatccaagttcaatatcggtcccttctgaagcatactacatacatacaacctaagcttactttaaccaataccctggaaaggacatagcacttatccaaggtgcaagtaaactacattgtagattgtcctatcagttaaactctgtgtactgataaatcataggaatacatttaatcacacattcttgattacttttcactgtgttgacaacacaataaacaagaatatcagtgtgataaggatttggatgaatttataaatcaaataagtaaataaatgatcacataaaccaaataacacattaaacaagtaataaaattaaatttgtttctttattgataattgaatagaaaagattatattaaaatagaattttatttagtacacaaagcctatcaaacgctttttccactttcactccataaaaaattacaccatttacataaatatataaccctaaacctagatgtgcatctattataattgttttgataggtttcgacaatcaataatattgaatccaaagcatgagaaagtggctcagtaaaccaaaaagaaggtctctttctcttcattcgtttttttttttcaatcagttctttttattacttttctaaaaaataatgagtaaactatgtatttatattatattaattaaatttttattatataagatttgaatcatacggtggttgcaatatattttatcgtcttcttttaattaaggaatggatggaaaaaaaaaataattggagttaattttttgtggtggataaataaaaaaatatggtatatcaaacttatttataacttataaaaggatctaaataatgagtctaattgctaaagactttgattattttctaaataagaacaagaacaacatttgtttgtgtgaaactgggcttttattctatgttagatgggttatttattttatattattaattaatgaatgtaacaaattatatatatatatatatatttgaaaataagtgtaattcaaatattaatcaaataagccgttagactggcggacattataaatatattctccggtaaagaggagattggaatagagcagtacaattggtgggtaaaagcccactttaaccatatatgggcaatatgttacaagacctgctaatatcaaaaaattacaactaataaataaggagatgacttcatacaaaagagacatagtctcaagagcccaacacctttccattgagcgcattgatagcgatcctcgagtcactctccac

SEQ ID NO: 272751 - DNA, 557 bp, Cannabis indica
attttattttttaataatataaccaactttaagacaaatttttaatacgaacagataactaaaaaatttaactaaatttgtcataacatctctagattcatattattattaagttttattttgaacaaaaaattagttacaagatcttatttgtacaattttgaaaaatatagggttcattttgtcatttaacaaaacagaatgtctaattagtaacttttgcaaaacatacgatccaaaatgatatgtatccataaataaataataatattataacttaaatatttttattagactatataaaaatatattaaagttacttttaattttaaatattaacgtacatttttaacgatactattaataattaataaaattatatttattatctatttttttaaaatatatataatttaaatacattatttttttttcaaatgtactaaaatatatagcacttcaataaagatgttcttagtaattaaatattccttgatggagttagtttatattccaaaaagttatttattatatagataaaagaattaaaattaata

SEQ ID NO: 272752 - DNA, 579 bp, Cannabis indica
ctacatcatgatgaggacgaactgtgcgctgtagtaaatctcgcgttcgatgaacaaaggcgtatgttcgctgaatggagagataaagagatggaggcattaagggctcaccatgcagagattgaaaatcgtagtcggcaggctaccgtgctaatacgaaaagcctaccaaactataggtcagcagccgccaaacgtcattcccctgggtgaaacaggcaaagatcaagcgatgaatgcttctcagaccacaaatagtaagccgcccaatccccggtcacgagttctactcgtgggccaagcggtaggcgggcataccttgtctagtaattcatcgcgagaagtcataccttatggttccaaccagataaatgatgccattccacccgtcaaccaagtgaaacaatcgatgaggcagccaggcacttctgtgtttgaaaggttaggcgtaacccatgacctaaggaatgatctgaacagaagaaagggagtagacgatcataatattacgataatctcgcagcccggaatccgtactcaaattcccgctcagaaagatgctgatgtaattcaaattgac

SEQ ID NO: 272753 - DNA, 910 bp, Cannabis indica
ttattgccacaatccttttgaatgcacttcatgaacctgatttcagaaacaccttcaaacagcgaactcccttcgtctttgaagtgtgtgtgcttacttcctcctgaagtaaggcttgaccaagtcttctcctgaagacctctctcttgtttaatcaagtgttctaaccaaccctaagacagagtaagaacaaatatgaaaatactagaacctagatgaacaactaggttctcataaaaagaactctctcttcaaaaatgagaaaatgtaaaaaatgaaagctagaagagttgattcgaatggctgttctataagttttatttatagagcatagaaccctagagacagccacaaagtcgaatccacagctatacaaaactttcctaaataaaaccctaatttgcagcatcagaaacagattttgtcgcagcaaatcagaccagaaaaggaaacttgccaaaaacgtgtccgatcatttattgggttttgatacctgctgttgacctcgctttaagccaacgacagtgagtctaaattgtaagcgaaaagtagtataatatagatacgatataatgaaataaatagagacacaagagtttttatagaggttcggccccgagcagttctgtaatagcctactctgcttggttcgtattgacttaagaacaaagaatacaatgattcctcttcttagagctcttacaataatatctctgaatatgatttcttagataaatctttcgaccccctgcccagtgagaatgggtcactatttatagagctataaactgtggggaagaagtttcccttctaattacaatagatataattggcaagattacacattagatacagaatacactgatcaagggattgttggaaattattttgccaggatcttagatctact

SEQ ID NO: 272754 - DNA, 933 bp, Cannabis indica
tttagttaattattttattaaataaaatgtagaaggtttgacaaaattaaatagcaataatggagtgtatttttgaaattggaattgataaacaaagtggaaatttaagagataatataagaagaaatacaaatttttcagaaaaacaaaacaaaacaaaacaaaagttcagatgggccctttattattgtgggccctgtgcaattgatctggttgcacagcctttgggccgaccatgtcaatgatgtgttactcaacatgccactaagtttctaggaatacacacttcaagcgactacttacattttgaatgaagtacccttgaagagtgaaatgggcacaactcactttaaaacatttccatatttagagttgtcctgctcatgttcttaaactcaagactcgaaaagttgctcccaaaataaaagagtgtatgtttgtgggttattcagaggaaactcacgatgcatatttctattgtcatacagtcaataaagtgttcgtattgcaaaatgctacatttttataatatgattatatgaaaggtaacaaaccatgcaagtggtcatcttggaaggaagacacaataggtttggttgtggtttggatcaacaaaacgtcaaacaagtgggcaactttgtccaagaaaagtacaaggaactcggcattaaaaggagaactggaagctatcctccatgctcttctttaggctgaagagaactcttgtgccaaaattctagttctttttgatgcccaagttctcatctcagctttggcaaaaaaatcttgccttgccttgtggagacttcgttctttatctttacgtgtttgagatatgttagtatttttaatgtttgtcaatttgctttaattaatcgttactagcaataagtgctagagcgtctagccaggctgttggtattgtaatcgggg

SEQ ID NO: 272755 - DNA, 918 bp, Cannabis indica
gagtagagaacctatcatgtcagtcaacagttgtactggatcttctacgatcatgaaactttcaatgaatttcatgacgtagtatccacactatttgtcatcgggttgttcaggacagataggagtcatccactaggtaggtcgatcaggttgtcctatcatttggttataattggtgaacgatctacacaaaaagtaaatttaattagcatatataaatttataaataaagaacacgcttacatattaggatgtttgatgtagaacttacgtggatatgatcaagttcagatcatccggtatgtcatcgttgcctgaatcaaagtacgccaccgtctgcgtacttggctggatgagtacaagcatccagtgaaacatttcccatataaaacatcttcttcgagtattttaaatacatagaacatgttctctcctcacaaataggacatgctttgtaccctttcacactgtatccagaaacatttctaaaaattgaaaaatcattaatggtccacattaatatggctttaagattgaactcttctttcctaaaggcatcgtaagcagaaacaccctcatactacaatcgactcaaataattaactagaggggctaagtacacatcaatgtgattggcaggctgtgaagggcctgatatcaacaatgtaagcatagtgaacttcctcttcattaccaaccaaggcggcaagttatgcatgttgggttttgtgccctaaataaaacctatttcaatataatcagatttactaattaataaatattataaatcattttatgttgcatggttcacatgatttatttcatgattatatttaatatataaattctattaagtacagaacatatgtatttgttcatgattatagtgttatcagcacagtggaatataatcatgat

SEQ ID NO: 272756 - DNA, 2275 bp, Cannabis indica
ctcgataaacaagtaacagtcaccacaactcattccttagccgttttagaatcctcgtacccaccttccgccggaatattccgtaaagatcttattccggtcattactccgatcttaaactttcatgttaaaataaattcgccatttttaatcaatgcttacccatatttcgcttacaaaggtgacccaaaacaaatcccattagaattcgttcttttccaatcgaatcaggggattgttgatcctgataccaatcttcattatgataacatgttgtttgctcagatcgatgcagtttactctgctctaacggctgttgggtataagaaattgtccgtacatatttctgaaacgggttggccttctaaaggtgatgaagatgaagccggagctacgccggaaaatgctaaaaagtataatgggaatcttttgaagattattagtcagaaaaaaggaactcccatgagaccaagttgtgatcttaatatttatgtttttgctttgtttaatgagaatatgaaacctggtccgacttcggagaggaattatggactgtttaaacctgatgggactcccgtttattcacttgggattactaagagtagtagtacttcttcctcctcgggaaatagctccggttctggttccggtgggtactctccgattagctctggttattttccgtcgagttccaactcttctagtgctgggtatttgtccatttcctctgctccgcttccggtgagtcttttttttttcgccattttttgaaaatttattaattgaattatcatataagttttcaattttgtgacattacagaatttttatggggatatttagatagagcactgagcactctttttttaattttttatattttaagttaaattgattttttttttttacattcttaccttgtttcatacctgaaaaatagattaaagactattttttaaaaaaatataaaattatttttataatttttttttgagtgctgtctaataccaatattatatcaatattatttagtataataatttttggaaaatatattacctcttaaaagtactatataccactagtggttactatgaatgtttataaaatttaatacaaatattgtttcccctcactaaaattaataaaatattgtttttgccatttttgcatatattgaaagttaatataaatttccaaaaaattcaactttagtgacattaccaattttttttttctttgtcttattatcgtcatattgataagatttgtattatattgttatgatcatttcatggccaccgtcgttatcaaactaaactatattattttgtcatttttagcttttacagtgtttggtttaagacattttagaaatttaataggcctaatgttgttacccaaattcttgttgatataataagatttatgaatcattttcatggctatctttatcagagactaaaagtagtagtgataaattttgacactattttcaggacaaagagaggttgattttggtgaagatgatgatggtgactttgttgatgtttttcattggtttactttgaagaagtgtggcaacaaaggcttgaatttgattattaggtagtgggcgttagaaaagtatggagctgtggaaaaaatagtgtgataaaacagaggcgacttgggaagtagggaaaggtaataatataaagaaagaaaagtttatattcctttctttgtacgccattattattttttggaatcattatcattatcatgatgacgatgatctttaggcttaggcatatgcttcatccgacaaactgcatatttttttggcatagagttaccaaaatatccatctctataagaccatctcaaattggagttgcccttgagtggtctttgcttcccatatgtgtggtttaattcttgagatcacttttatataaaatgttactaatgttgtactttaggctcatctagttcagaggcaaaataattttttcttttttaactgatatactaaattttagagtcggtcaatataagttgactacatgtgaagtgagattatggtagataacttttagaattaccagccattatagaatttttttataaggaaagtatgctaaatttatgtggatgagaaaaaaagaagtaatattttaaaataacttagtgttgcttttaataactaaaatgttaacatagttcattatttttacttttgtcaggatatcttaataggataatagcaataataataataatattaagatta

SEQ ID NO: 272757 - DNA, 1006 bp, Cannabis indica
tagctacattataatcactcttagtaaatttatcagtgggggcttttctacgattttggcctataatattattaaattaaaaaatttacatttaatttttttaaaaggcaatatttttgttcgtgggggctatagcccccacatcactcttaatgggtccgtccctgcccacctatggtcacttgagttagcctcaagtggttaaaatatatctatctatcaaaaaaaattaaattatattttaaatattatgaaaaaaaaattatatgaaaaattctaagaaaaagtatatatatgagttagaaaaaattataaaaatgaaaacaaaataagaattaaaataatatgagaaaaaaaaatttaaaaaacattaatagtaatttttataaattatttaaacttatatttttttataataatatagtgtatttataattttataaagtgcaaatagaacttctttaatattatttgtctgacgcaaaaatatattgatttatcactagtaatgataatatggtaatacttttccattccatatcttataataattttatgtaggacggaggcggaaaactattgtgagggggctaaagtgtataaaaatattttaaggggaccatttaaaaaaatttcttaataaaaataagaaaattatatttgcactccataaattaatgtataagtataatattttaattttttatcctattttgtattaaatttaatatttattttcatatttttaaaagatatttataattatttttttgtctatttaataaattttatataatttttttattttaagtttttggtcttaatatataacatttatttttatgtgcacatatttttaagaatataagaaggaaggaaaaaaagttatgaaaaactggtatataaattaaagatataaattttatataaaataaaaattattaaaactaaatattatgttaaattaaatattatctaatatctcaaccaatattcattaatttaa

SEQ ID NO: 272758 - DNA, 575 bp, Cannabis indica
gtcttgatgacaggaaatctacatctaggatgatgtttactcttggggtggagcagtggtttggagaagtggtaaacaaaccacaatgtcagactctaccttggaggcagaatacatagctgccgcggaggctgctaaggaacttctctggcatagaaagttcttcacaggactcggtgttgttcctggaatggaaaaaccactggttttgctttgtgataacactggagccatagcaagcagtaaagagcctcgaagccacaagagaagtaaacacatagaaagaaaatatgacatcatcagagagtatgtggcaagaggggatgcactggtggagaaagtggacactgaggacaacctagctgatcccttcacaaaagtttttgcagggactgcatttgaaaaacaccgactgaatttaggattaattgaaatgtactgattattttatattagtgcaagtgggagtttgttgggctttgtgccctaaataaaactctattttaatgtaatctttatcatttaattatcaataaagagacagaagtattttcatcacttatttagtgtgtcat

SEQ ID NO: 272759 - DNA, 1737 bp, Cannabis indica
tcagagcaattacaggttgtactttctctctctctatgtcttcaggtctggacaaaaaatgaaaccagtagtagccttttatactgttgggaaaggaaaagggtaagtagactcggattgatgagttggcaggtatatgtcttctattttctgttatttcagttaggatctttttaattgtaactgtattgaggttgttgtagttgtgcaagttgcttttctttataaccgacttatggttaggaaagttttagttggattattccaacactattatctaacaattggattgtaccaataatacaatatcaattatatcagattatactctttgagtcactgcaaaactctaatatttttatgaggtgacatcttttataaaataagacccgataaaattatatcatataacatcttgtaatagcagtagacactttttaacatttctctatatttttgtgtcgaattcaaaacttgactcttttgactctctatccaatggtgctgaataccacagcacattcaatacacgataaatgagactcacatgtatattaaatacacactaacacccatatcaaaattcttccctccaacagttttttgtttttcttagattattattagttttgtctaccacagtattgagactccattaaagccatgaccccatgtaattaaatatataagacacattgttttcaactagctataaatacagtaaggacttgattttttcaagacttttaagctatagaccaacattttattttccctctctttcttttatttattcatatatggcattaattatattggtatgaagtatgagcctatagtttagttataataaacttattaattaaagttgtatgtatagttagttagagcttgctaaatattgcatatatatatatatatatttatatagttggtatgtaattgggaaagggtggatataccagctctatcttccatactaaaagctcctaattgctagttttaactcaattagttgtacttgtatctattccttaataataataataataataataattattattataaataatttaataactgtgaagacagtatatagttggcaataggaaatttggaaagtggatgtgttataaaattattcatggccatgaataatgatatttcacttagactagacattttgaattccagtccaaatattaatattaatatactgcaaaaacatttattattcagttatatgattccatatatagcattaatgattgataacaccattaaatgaacatcagttttgtttttctgactgaatgatcacatatgctaaggtgaattgttattaagtagaggtaattgtgcaccatgcatgtttaatattataaatttttatgtagaataaaattttaaaaaattataaaaatatgttaatatagaaaaaaaattatttttacgagttaaatttttattttaaaaaacaaggatttagtttttttttagttcttttatagattatttataatagtcatgaggttagttttttttttggttattttatagtttattaatagttgattaataactattgttagattgatttatcattgtttttagtttattttgtttttattttttttacgttaaatctatatttttattaaataaaaatttaaaatcgtaaaattagtaaataatatatatatttttttgtaaaaaaaactactttaatattat

SEQ ID NO: 272760 - DNA, 540 bp, Cannabis indica
tttgacaaagcaataattctattttttctttcttcaataaaaatggctgctatgatttttttaggctgaagactattaggttttcattatgagaagaaatgaaataatctgtcgtaatataataatcaagaatgtgatttaattattttttttttgaaaaaaagggtaaattaggtattataaaagattcattaaattagaaaaaatagcttcccgtgtttttttttaaaagcccttcctaaaaaagctggtgagtcattgcttctctagaaagctcttttaatttaaaaaagctcttctcatattttatccagatatatctaaaagtagatttgagacttcaaaagctcttctaaagccatgccaaacaggccctaaatcaatttgaatttagattgggatttgagagttttagagaggcgaaagatcttaataagaccaatttttatatgctatggagttagggttttaatttaacggtagggttaacttactattaagtttaacaaataaaaggaaaataattgttaaactaagaat

SEQ ID NO: 272761 - DNA, 1318 bp, Cannabis indica
attaatcaaatgaaagaatataaaaaaaggtcaaaagccaaataattaaaaatggaaaaaaataaataaataaataaactccaattaaaaataccaagttttgtatatactacgagtacgagtgtcaatatttcatcataagaatgattcaaaattgtgtattaagtctataagcaacaaccaacccaacttagtccaacaaaaacaccatcaattttaccattcaaaataagagacttcaattacttttcgttttgaaagtaaggactagtgaagaaaaatagaatggaaaaagagaaaggaaaacttggcataaaaaaaagcttaattccccattttttttccacgtgattaagaaatggaagcacaagcacaagatttcatttaaaaagtttgaacatgtcttctccttttgcccagaccttttagatatcattatttgaggtttgagataatatctattatctacatagtactcatttttgtactcacaaattgcacacacaacaaaatcatagtcactattatttaaatttgagaaccaaaagccttttggatatcattatttgagatatcatttgagatttggtatatatcatagtatgcactagaaattacatccacacattacacacaataacttaatagttttgttaaaccaatcacaattatttaaattgggaccaactacttaaaaaaaaatagtatcacattaatatgtaatatttgaattatagatgtacatatcaatatcattaaacatatatcaataattcctactttgaacgttacctctacattttagtgttaatgatccaataaactttctataattcttttgttcttttggtcttatattgataagggagagaaagcaagtcatttctttaatggcttttgaggtataagtttacaatgatcttttctcaaacaaaaaaaattaatttatggaaaaagcaatataaagtgactagttacctccttacggtaactggttgtcttaaagatatctaattgctggttacttaagagtatctaattacccttatttacttttttcatatttttcaactttttcttaaatttttttagtaacttttttgaaaaataactatatttttacataatagtataaaaatacataaaatttataattttctcttttataatcccattgagtggtgagattgagatgtttaaaagctattcatagtttttttataatgctttccagttttagtttagtaattaaaaattgtaaaagcttttatttttgtttctttcgattagttctttttaaataaagatgaatttcatt

SEQ ID NO: 272762 - DNA, 1190 bp, Cannabis indica
ccaagtgtattcttggatagaggttctactgtatatatataggcccctcctcctacacgtactgtttgtaattattatatatattcacaatttcaatctaaatagcgagtgtacatatagacttttacaattcaacttttttttgtttctgaaattttacaattcattctgatatataaattgccaaaaaaaaataaattaaatccatgttatatttaatctgaatattaatttcctccttctgacagtaaccacgtgaatataaaattgaagatatattaaatttattaattttgtaactttaaagtaaacagaggttccttctaaataaataaataaaacagagattcgtatattaaataaaaaggtataagtaaccaaaaaattatgtttgatgcagtttatttcttaactttgaaaattaatagtaatagtcttcaatattatagttttctaagtctattataattagtcctgttcagattataattttaatcaaaaataatttataataaaaaactaaaaaatcataattttttgccctttatttttctttcttcagtcttcttcacacatctccaaccacaccctaatttctctttgtcttcaatctttctctctctatttctcttcctcagtatcaaaaccctaatttattttttcaaacttttcatctctctctcggcactactagctaggtcgaacgacattgggacgaacaaatgtggggaagacgataggctggaactctggccaatgggtgactgagaagaagcttcagatctcgactcaaaacaccttcatagtcgccccatggttctctctctcctgctctatttctttcactcatcagcgccctaccctcctccagtggctcgtggttctcaattgttctaattcgacgagggctagagatcttggctatgggtgactaggaatgagctccattttcaagtatatttcttagattttatttgtcttgtttttttttttaagtgtaatggagatccaactggttctctctcttatttattcttattttgtgaatatatatacatatttatatatatgtaacgtccccgctttaagtttccattgggctcttacacctacagaatgatggctcttatatacgagtacgtcactttggcagcttaatggaatgacgactgaccctataaaccagcacg

SEQ ID NO: 272763 - DNA, 5410 bp, Cannabis indica
aaaagaaaaaaaaaagacatcaacagttataatgtgacaattatttttttttgttttttttttttatttttttgttttgctttgtttttactctttggagatattatggcactctttaatttgttcgattgctattaagtactagtgatgtcaatatcaccacgaggtgtcttatgaatagtttatgattttttatattatttattaagtaaagatatgtgagactcgatatttaattgtacttgtatagcaactcgtggttatgtttggcactattagtgctttttatcatttttcttttgccatttatttatgtttagggtcagtttgttacaattatgatgtgggagaaagtagttgtagcagtgttatgaggaaaaacagctgcaactgagttgtaggaaaaaaaaaaaactaagctgaatatttggtaaattacatattttaaaatattgtgaattgttaataatttaaatataatagtaagtatattataatgtaatgtaatgtaattaataattacaaatatataaaagataaatttttaaaaatacaattttttatgtttaatttataattttactacttaaagtttttatttacaaaaaaatacttttaaattacaaaaatacactttgctcaacaaaaaaacaactaaaaaacaacaagcaatcaactttgcgataattataaatcaactataaataaactatagaacaataaaaaataaaaccaaaaaaataaccatgaaataattattatgcaactataaattaactattaaagagaaaaacagttgattgtttttactgaaaaggtatttttataaataaaaaaatgttcgaagcgtaaaaaaaattgtgttgatgtatttttataattttttaaaaaaaatttttggtctagtaaatttttctatatataaaaacttatgtaatataaaatttacattttttatatctttatttattattatttcccaatgactttatatccatttgatgaaaagtaatttagaaatataaggtatttttaaattattttttattacatgtaaaaagaaggaaactttaagttgttaaaaactataataaaaaaaatattttcttaaacaaaataaaaaaaataaacatttaaatattatgtattttaaataatttaacttttaataatatatgataaataagtaaatatattttagttcaaagcaatttattataaaattttttaatcaaaacaatttttttgaaatttgaattatattagcattagtttttaactgtaattattttataaatttttcaataaattctattatttttccatgccataataataatttattaaattatttgtgtctaaacaatatcacacataaattaatttatttaactcataaactagatatatgtatacacagaatacatataaaaaaaaattcacatgaaggttgggaaatgaagtttaaaacaaaagatgataagctttgtttggtacaaaaataaagaatatgggaaataatatgtataattgaagttgactaaaatatcaagtttatataaatatatgtattttggtcaggaaataacaagttagtatatatatatatacaacaataccaagtttattatttttttgaaacaataccaagtttatatttgattccactatatctgtgttataaagtagcaggacaaaagagtgactgaattgtggataatacatccaataatgtccttctttccccttgactttcccaccaaacccaccattaatttaaaataaataaataataatcgaccctgatagttgctctgagttacgatgctgtcatattgagttgtgcttttcgtggtggtgacaggctagaagtcacagctacaaatattgaaatgattttcctctgataaaatccagttgaattttgtctcttggagtcatattagattctttttcaaacaatttttaaatactgatttctagttaaaaataaaacaatacctcaaatataatatgattatatgtctatgatactgagaaaagtttgggatcacaggaaaagttcacacttcaatgggataggattattttttatctttggaaattatcacactagaaagttacagtacaaagagaattaaagattacagaaaatgatgagttcctaccataataaaacaggaactatgaactctccactcccatgaaaattctattacactacttcccaatgacaacaggagcaggtaaaaatgagtatatacaagcacaaacctattgttctatttacaattttaaagcttctaatttctaacactccttcagcaccaaacaatgagcaaaccaagagggggaaaatcaggttgttttgacagtttgtttcttgtttcaacgacagcaaaggtgatcgtcttcctcaaactcggaaacacctaacatggccaaagctaaatgactcctcatctcgctatttgtttgttgtgattgagagtaacaatcaataacgcatccattacccagaaatccagacttcttcctcttagatataaagggttgttcctcgcctttcaaaattgcaataatctcaccaatggctggcctgcgcgattcttcactagttacacaggcagcggcggcctcaatcattcgggctacttgattcgaatttttcaacgtgcatttgacccttggatccaacaactctccaatggctccttttcctttacacaagagtggttttgcctagaatatgaacaatcagacatttagttttaccaacactagtcctcgtcatagatgttgcaaaactacatttggggaatgaaaatattttctaaaaaaaaatgctgccaccaccttcgaactctaaatgcagaaaagtcattaatggctaaagcagcaatacaatggacttgtttaccaaatcattgctcttttttttttctttctttgctgaccaaatcattgctagcagcataaagatggcatatcatattcagaagttcaaatagcaagtgaggataaacaaatgaactagggtgaaacataaggggttctaatgaaattattggttccctcccacctctgttgtgactccctaatctctagtattagagccaacagagaaatagtgtatgaaagaataattatgaaaattgaggcgacacaccctcatatctttcagttctagacaaactcaagttttaggatcagtatagttaagcataagttagttgtaagtttgggaattaggtagacttatccttatcgcaacaacagtacaactctctctcaacgttaatacaatcttataagaaaacccatcacaaactaaaaaataataaaaaaaaaaatggtagcttgaatcacacaaaattgattttctccacttgataagacagttatttgaacttgtctacttaaacatactatatcgagaccaggatggaacaccaactagcatttcattagacaccaacaaccacacaatgcagtcatggactcgtgggactaattacttaccacctataacctaatatgccaagatgaaagatgcagcaacatagtcatttacacattacttctcactagacacgaaaagtatggtcttgctaagaattgtttatcaaatgagtgggtgaccagacttaactaataaaataacgttttgagtggaaaaattatacccaaaaaaaaaaaatgaaagcaactactccattagaaaaaaaaatgaatatttctaattcagcagctagataagtgattattgttcaaacacaagaagcttaaagaaaacaattaatgaaaagtagaataacctacccataggaccaagttctcctcccctggtggccttcttgcttcaataggctttcggccagttatcaactccagcaagactacaccaagagcataaacatcggttctgtctgataccttcccatgttggaaatactcgggagccaagtacctgcacattttattttcaagttaattgcacaaacaaaagagaacatgaactttgtaaaaaagaaaaaaaccaacaaaacagagtttaaaaaaaaatgtaatgaaatcatacccaaatgttcctttgacagttttgcagagaaaagggactgaaggagcagaagtccatgttgctagtccaaaatcacacaactgccattacaaagatgtaattcatcaataagagtactatacagattgagtcaggtgaaggagcaattgaaaccagagggaaaacaaagacctttttaccttaggtgtttttctggaagaaagtagaatatttgagggtttaatatctctatggacaacacatctttcagttccattatgtaagtaagctactgactgagcaatcccagtggcaaccttatatcttacagaccaagaaagtgttgcagaacccttgattccccttttcttttctgcatattttcacaccataagtcaattgaaaaacgacataaaattcgaatgaaactccattaaaaaggactcaaaagagcttaccgtgcaagtggcactccaagcttccaccggagacatacttatataccaaaaacaaaccttcctctggatctatacaaaacccaacaaggggaacaacgtttgggtgatgtagagagctagcaatcatcaattctcgacaaaatgcctttgaagattctttatcttccttgtccaatctcttaattgccacagaagtcctcaatagcccaactcttcctctaaacacatagctcaaagcccctctacccaaaactctacctaaacaaacacaacaccgaatccccattaagaattcatcagagagactaaatcgatatgaaaaactaaaacaaacccataaaaatacctttggagaaacatcgagtagccgtgaggatttccccgtagctgaatctgatcaaggtattggccaccggagatatactcctctcaagagactcaattctccgccatttgagctctttcgctcgagattcacaaagcccattatccaaattcaccattagaacagttgcagcaatagacgaactcatgttcatggaatcgagctcgacctgagagcagaagctgaacctgaaagacgagtgaaccgaatgtgggtcagcattcgtaagctctgcaccaacacaaccaccggactccgctagcagccaagccttattgtgttccaaattcttgtctttcttcttctcttcagtctcctcgttgttgccggagattcgccggcggcgagatggaagaaagcaagccaaaccagcgagttcccacgccatcttcttcaaaatggacttgattttcagctcattgtagtcacagtaatggtcttttgattcaaagaaagaggaagaggtagaagaagaagaaccgggatcgattgaagcattgggaggct

SEQ ID NO: 272764 - DNA, 1209 bp, Cannabis indica
taaataaataaatatatatatgaaatacattcaatggatagaaccgatccaatccaacatccaatggatgttggatcgattggatgacgaaattaattagattggatcggatggtaaaatctaacatctaatatatgattgaatcggatctggatagttaaaacatcggatgtgatccaataaacaaccctacacaagggaaaatttgtcactttttttttcaagttttcaacaccgacagtaccatccatcattaatgagataattgctttggtttcagcagtactgtctccatgccaagtttagtacacattgaatgtgacgaatgtgcttagctacatgtttttaatttctttcaatccccattgaataacataaatatataatccataaagattatattagcggccggtcataagaatattatttttcatgaagtgccaaatatataaaaattgctgaaatatagtatattttacaaaataaatatttgtatagtattaaaaattgtgctaaatttaatccataatttaaaaaatatactaaaaatattgctacaaatatattaaaagaaaagttaaggcaagactacaaagcactggggtaaacatcccgtttaccaaataagcatgtgaacaagctaaaaaagaagtatccataaggtaattaaagactttttgttgaatttaacacaatattttgaaattaacaatttaacattaattattttatttaaaattaagttaagtgatatatgatagtatttaaaaataaataaatattaaatatatttttttaccacatttatcctcatatatattattatataatttttttaaatattaataagttggcaaattagaatttttgtccctcaaattttaacatgtaataaatcatgttcaaatttttcagacatttaaaaatagccccgatctattgagatttttaaatttaaagacttatgttcaatttcgttcaatattactaactattgattgttcatgtactgaattgtgcccctaaattttgatatgtaccaaattgtgccctttgaactttgacatgtatcaaatcgtattgcctaagctttcatccacgttaggcgtttagtaaattcagaagaacgtctttgaatttaataatctcaatagtactcaaaaagaagtgttaatgacctaaaatatttggaggacacgatttggtaca

SEQ ID NO: 272765 - DNA, 642 bp, Cannabis indica
tttctcttttcctcaatcaaaaaaaaaaatttattatttctcttagtttttttttatttttcctctaacatttagatatctctcttacattttagtgactccgaaaaaggacgatcagtgttaaaagaaacttttttattccttttttatattttgtaacaaaaagtaataaaatttaaaatttaataaactttaacatatcaagtaacatcataacttaacttaaagtcttttgttattttgtatttaaaagttaaaatatagtatactaataataaatttatttaataaaaagaatttaatatgttaatacaaaaacttataaagttaccaaatagtatctaaaacataatagaattagttacaatatgaaaattattatatatattaattttaaagttgtcatcaaaataagcaatgtatgagaaaaaaatgatcttgaattaatttttttctaataaaatgtaactaattgatatattatttacatcaaaagcaaccaaaatttctgaaatttgcaaaacactgaaatttttctaattgcttttttaaaatttgcaaaacactgaaatttttggaagcgatgttttttatttttttcgattttcggtaatttttttatttcggtatttatgctgacgt

SEQ ID NO: 272766 - DNA, 917 bp, Cannabis indica
taaataaaacatagggtaccaaacttgtatttcaaatcttgcattgaaatggtctttccttccatttcaaaatagaatagtcattccactaaaatggtggaaaggtcattccattataatgatattccaatatttagaatgcaactaaacaaaaaaaaaaaaaaataggaataaaaattgttttttttctattctatttcacttcattacctctaaccaaacgccacattaaggattaatttgctaaaaaaaaacaatgattacatttcattatgtatttatcttatattattcgaaaacagaatatgttgttgtgggctaaaattattttatttctttaataaattttagttacagatttatcccattattaaaatcttatggggttaagatttgatttgttcgtattatggctaaaatatagacgtaaaggtattaatttataaattgtaacagatatatacttgagaaaaaatatacattaatgtacactatatttctaaaaaattattataaatgacatgaaaacatgtaaaatataaaaggtcaacaaaagactaatatctaatagtaagggcttcaaattggcatttaattgggaggaatgaaaatatagaaagggaatgagaattggaataggaatttaatgaattaaaatttaaaatgcataaaaaaatgaaaaaaaaaattattaaattttttcaaatggaataatcattccaccaaaatgtggaatggtcattcattccaatactttaaaatgcaaccaaacaaagaaatagaataaaaattatttcatttctattttctttttcattatttttaaccaaacaccaccttaaggattaatttgcaaaaaaaaaatgaaggagtatttcttttctccttaattacatttcattatgtattatcctatt

SEQ ID NO: 272767 - DNA, 3790 bp, Cannabis indica
agagagagagagagaagcacgtgacagagatagagagttaggagttaaaaatttaattcctatttttctctacttatttcagttgcttactttctgttaactggttttttacgctcttactatatatcctatatataatgttataaataaacccttctaattttttatttaaaataaaaatagctaatttgatttaaattagaatttaaattcaaatataaatatctaataaccaaataataaatatcagttagatcttttattttaattattatctttttaattaaataattatccaataatttattaaaaaataattagttaatttaatttaaattattttaactaataaaatatttaaaccaaattaatcacgggcctttatatgtcaccctacacgtgtggattgggccttcaagcgtgggccatactttaaggtccaaaattgatttatcaatttcactataaataagatttattatttattttaccaataaataataattagttaattcttattaatctcttttttttacaaggactaaaataaatataattttttctatgataatatattttcctctttaatattatttaataataatattatatttagctaattgttatagttttatctaataaaactaaaaagttaaatactattaattatccaattcataattgtcataattaatcaaaataataattttaccaatttctattttgccctcaagaatttatttcccataaaaattaattctcactcaaaaatcatccatcaaataaaaacttcccctgtacagtgttgtatagaggcgactcagggaccatggatctatatttcaaaactccaataaacacttgattattatcgatctcagcaatagaataattcatttattaattctattattactccattaaatatgaaattgcgctatttgataatatagaattatatttatagaattcttacttgtaatctattaatataatcaatataagaagttcgcccttcaattattagttcataattagagttggtggaaatactattttacccttctagttatctcttgattccttatgtaccattaatttaatgtgaacagttaacctataacttattatagatttggatccaactgttagcactctcagaatttacactataaggaaactaatatacgatttgttaggttagcttggattccactattgaataacatgtttcaagccactcatgttattaagctcccaaaatagaagttgcaagaatcatcttctctgagaaactttattgagtgaatcaaagaacttaatgaacataaattaagttcatgtatactcaggattcagactgatctactaatgatcatcagtgtgagatgaataactctttcatcgtaaatgacacattaatgaaatatgtttattacatatcggtccagtcatgcataattgaattatacataacacatttactacatgtctatccatatataagatctgaataaaattcaagtacactaagggcccgttgggtacgaatagttggattggattagacagactaatttgtcctatctagtgtttgggcatgttagaagtctggataactaatccagctgacctcatctgtctgggattttttatctcatccaacagggtgggataaataatcccatgcaggtgagacttttttttttatcgtttttttaattttaatttaattaatatattttaaatttaatatgaatataaagaaaataattatcacacatttatttatacatttttttatcaaaaacttattcattaaaattagtaaaaatgtataatcttgaattattatacataagttttcaaaatttagaatattattaattaaataatagttacttaaattgattcaaaaaaaataataataaaacaataaaattatatgttatttttaaattactaaaaaaattatacaaatattataaaaaattaatatttatattaaattagtgatttaattagtgtttaagataaataattttatcttatttaagtatttttattttattattttaattatatattaaatcaaaaatatgataaaatattttattatatatttatgatatatacttaatgatataggatatattattttatttcattttataatttatttattttatttttttgctgtgagttattcattttaatttttttattattatatatttttattttatttaagtttttcttgtactttctaaaaagaaataaataaaatagtccagtctattcttaaaccaaacacagaattactttcagcataatccaatcttgtcctgtccaatccaatcctttttagtctaatccagtccaatactgtgtaccaaatgggccctagaagtatagtgtatagtaaaccatactcagtagttccatattaaagatttccattactttaatacactaccaacttaatttatttatgtcgcataatcttaattctcttgtacatccttacaagactataccttctccaaatatatacataatttttagatttttaataattactcttataattaatgtattattattataattttatttcatatattctctaatatattattcattaattacttgcttttagggtataaatccgaacaaaagatgcttcaccgaaatctttggggtaactgttttgtcttgtctccttctagccttaactttcttttgttttatcatcatctaacactattttcttgtcttcaagcttgtgttagttatgcctacaccatggataacaaacataagaaggtatcggagctttttgagaagcttggggtcactgaagaccaggtgtttgctctgaaggagcatgttatttctcttgagagtgaggtgaccaagcttgaagaagcgaccaaagatcccaagactcgagaaagtgctttgaggaagaacttggtggctgctcgaaagaaaacttttgatcttgaagaatcttctcgtgatgccctagataaggagactgttgtggctaatggtctgagagaccaagtgaaggtcttgaagaagaaagtaaccacccttgtatttcatgtccttcttgatgttaccttctacaatggagccaagttgtttagatggaaaggcttccttgacacataggtgccagacttcatcaggcggtgtgagtagcattttgatgtagaaactctcaagaaaattgacttaattatgaatggtgatgaattagttgttggagaaactttaggagttgaagcctataaccctgagcatcctgacttccttccttctgctagtgatgtgcctcctagggagagtgaaggcagggaggaagctattgttgacatgacaggcttccagaaccttctttgagtgtgttcttctttttggattttagcatttagctttagtgtgttagttggtcattctcgggtggcctttcaatgtggctaactcttagtaaaatgttttagaattttgttttatttaaattagaaattatttccaatttaataaaaattttattccaatacttattttattaattttactttgtccattaccgcttgaccgtataacatttacacggtacaccatgtcttaagaaacttaatgtaaagaccgcttagtttaatttggaaattagcagttaattatgttgattatgaaaattatttataaatatttaaataattatttatactattattattgaattctgaaatgcattttatgtcatttagttattttc

SEQ ID NO: 272768 - DNA, 699 bp, Cannabis indica
tagcacaatattaatgttggcagataattactctttaaataacctattctattaacctgtctataataatttttttaagggaaaccgatacaggttaaaataacaaaggtaacaaagttacgcaaccagaagaggattttcttccatctaaaccattcattatctataatatttattataattctaatgaaacaatagattaatgagaattaatctaattattatttattgttaaaataaataataaatattatttgtgataaaattaaaaaactcaattttgtagctttaaaacatgacccacacgtgttgggcttagccccacacgtgtaggtgacatgtaaaggcccatttaatttttgttttgattattttatttataaaataaatcaaattaaaaattatcttttattatttgaattaaatatattaatgtatttaaattaaaaagataatgtaaagtaaaaagatagatctgaattatgtgtagttatatgatattattttgaatttaatttttaaattttaaattaaaataatattatcttttattttaaaggattaaaaagaatttttaatattaatatatatgatatatagggagatagtacggtactaaattataactgaaactgtgaaatagaacataattgaaattcaattcaatttcagtctccccctccctcctccctcctctct

SEQ ID NO: 272769 - DNA, 1107 bp, Cannabis indica
tttttttgtttgttttctggttttaggtgttgttgttttgtttgttttggttaaaattatatttttaactggttttttttatatttttttattgtatgtgttgttatatgtttttaactagttttcacgtttttgattgttttttcaaccgattttttttttctgttatgttttgttatttgtgactttctttaactcttttattttttaactcttttatgcaaaagtaatattatattgttatatttctatattggaaccggttatttttaaattgtttttaaagaatcaatgttataggtgagtttttttaacttgtttttatgttttaactggtttttttatgttatatattgttgtatctgttttaattttgttttcttctagcaatgttaattgtattgtaatgtaatgtaactggtttcatttaatttttatgttttattgtgtatgttaggtttttaactggtttttttttgtttgtttttttctggttttaggtgtggttgttttgtttctattggttaaaaaatattttttttaaaccgtttttttttttctgttatgttttattaaatgtgactctcattattttttttttactttttttaactggttattttggttatggtatatatttgttttgcctgttatgtatgcgtttcatatggttgatcttaattttgtacattgttttaaccggttatttattttttatatttgttcattaaaatgtcgtgtaatgtttatataccattaatccgtatatacatgtaatgtctttgtataatttgtttttttttttttttctagttttttcgttttcaactttaattagcattgatttttcagattatgaaggttaagaattcgatcagaagcaattgaagaaattacctgaagaggatcggagctgtagaagacgatcagaggtcgatgatcgttgctgaagctctgtcttcagacgatcgactttctgtgcatgttgattgcgtttgagatgagtagaatgtgttgaagaactgtccgcagctggagaagacgatcggaggcggcgatcgttgctggttttggagacacgtgttgggaattattttaccaggatct

SEQ ID NO: 272770 - DNA, 506 bp, Cannabis indica
acaagtgttttccagtttttaaacgcttccaagaaatcatttttgtgtttcaagagaaaaatccagacctttctactatagtcatcaacaatggacatgaaatattggttacctcctgttgttttgaccctactagctccccaaaggtctgagtgtatgtattcaagtacacctttggctctgtaattgctattcgaaaatttgattctgtgttgtttttcctgcacacaaatttcacaaaatggtaagtttgcatgtgtgtaattatttattaaaccttgcttcgataattctaccaatccttgttcaccaatgtgtcccattcgagcatgccaaagctgagtttcagacacatgtttgtttacaattgcagcataggcaggcatgattgtttggccatttagaaagtacaatccatgccttttggtgcccttcaatatcagcatagaccctcttgtgattctcatgactccattccttgttttgtattcatatccctcatcatc

SEQ ID NO: 272771 - DNA, 1098 bp, Cannabis indica
ctgcctttggcagcgtcaaacttcttcttgatagtatcctttagggttttattaatggcttccacttgtccattttcctgaggcttggatactgatgagaagcttctaataattttattcctctcacagaattcaatgaatcaagtcgccatcaaattgtgttccattatcggatactatctttatgggaattccaaacctacagataatgttcttgaccacgaagtcaaggactttcttgtaggttatggatacaaggggctcgacctccctccatttagtgaagaagtcgactgctaccactgcatatttagctcctccttgaccagtggctaatgctccaattaagtcaaaccccatatagcaaatgggtagggcaaggtcatcgttctaagttcggttggcggtacgcgaggtatatgtgaaaatctctgacatttatcacatctcttgccaaactcatgtgtgtccttattgatcattggccagtaatatccttgtctaatgatctttttagaaagactttgccaacctgcatgatcctcatagaagccttcatgaatttctctaatgatttcgtttgattctgcgggaagaacacaccgaagtaggggcattgaataccctcttatatatagtttgccttcgatcattgtgtagcgaggcactgtatacaaaagttttcgtgcctcgtttttgtcatttggaagttgcccgtcaagtaaatagttaacaataggcgtcatccatgtttgagagctatctatcatctcgacgtcttctgtttcgcatacacttggctcgctcagcatttctaccagaaccagatttagttcgtccagatcattctgcgaggccagttttgctaagacatcagcgttggagttctattctctcggaatttgttcgattttaaagtaatcaaatctttccaagttcttccgaaatttctctaaatacctttccatttcaagcctttggcttggtatttcccgaggacctggttcatgatcagctgtgaatcaccatgacagatgagatttttgactttcaaagcctctactatctttaagccggcgatcaaggcttcatactcag

SEQ ID NO: 272772 - DNA, 752 bp, Cannabis indica
cttgaaaaaaaaaaggagagaagctggtaagccgttagcggttgaggtggatcttgaaactggcaaagttgttggcactgaagcaagcaattatcttcgatttatgggccagcaagtaaccatgttgtgctcagggcatcatttaaatttttctgatgtaccccaacaatgtaaggatcaagtgctcaatcgaataagagtgagtgatttttaattattcatggttgtaattattgtatatccttatttgtaaattaatataatttttaaattattttattacacaatactattttgatatcgatgggaatccccaccgagacctacttatgttcggagatggcggagaggtatagtgagcaaaagacattcacacacaggcattttaaacaacattacaaaaaaccagaagactggaagcaagttctgggattccctcctgaccacttgaataccgagacttggaagccgatttgttaatttttgttagcgaaatttttttgaatccctcaagtaaaaataaagcgaatcagcatcaaataaaatatccaacaacgtaagacacaaaattgttggcttccatacgccacggaatggtatatattaattctttaattgttaattatattttttatttataataaactaacttaattgtttatgttcgtataggggggtcctcccggagagcatgtagttgaagcatggaaggaggttcatgtgaaaaagccatctggcactttcgtgaatga

SEQ ID NO: 272773 - DNA, 2843 bp, Cannabis indica
ttgtcaaattagtggagggtctaaaatttgatattaagagttttattaaggacaaaaagtgaaatttccctgataaaatctcatatttaaaatgagaaattcatgtaatcaatggaattaatttgtacaaattagtggagggtctaaaatttgatattaggagttttattaaggacaaaaagtgaaattttccttataaaatctcatatttaatgtaattttcaccttattgaaaaacagaatcaaacatctaattaaatttttttcccgctctgctgggttcggctcagccttgtccctatcttcttccctcgctttcgaagggttcccgttttctgggattgaggtgatcgcctctgccatggacgaaatactgaagaaaacccacaatattcaggtcacggatgaagatgaagaatgggaagtggataaaagcttgtcaatcacgatcgcaagatacaatctgaggggtcgcctctgtactaactcagaacacagtaggggattcctcaagaaagtgctgggagggatatggcgattgaaggatgtcgaatggaatatcaagatcaaagagaagttcgatacaggtcttttcttaacttttacatttgcatctgagtcaattcaaagcagaattttatctaaaatgccatggtatttatctaatggggtgctaatcttggggaaaatggaaaattctaatgaatcttggatgaatgatttaactagctttccaatacggggtcgggcatggggagttctgattgatcttttgactacaaacaacacagttcgaatggcagccaaggcaggggaagtgatttgagtgcacaattcagatatttccaagatggtagcagatcgcttcttccgattcggaatttggatgtctatcaacaaacccgtgtgtcctggctttcctcttccctgggaaggaaagaaaaagtggatagcattccaatatgacgaattacctttcatgtgttttaagtgtggaagaattgggcatagccataaagattgtcaccaagatccaatcattatcctggaggaaggaaaagagggtactgctgcgtatggaaaatggctaaaggttgataatggggtccgagaaggcatacaaggaaatagacaaggaatggaaaagtacagtactctagaagatactatgaagcaaccgacaaccattaatggaaggactactactatttcttcttctccttctctagttactatgggagatgtaagaatcgggagtatcaatcaaggccacttacagcagatagtagaaggggggtcaaagtctttactaaaggattatggtttgaaggcaggggacattgggaaagaggagactcagggtaggagtgatgatggaagccgaggaaaacgtcgaatagtggaagactatggagactcaggttacgggaagctaaaaaaatcggccacgatcttgtccaaagaaattcaggatcaagatctctataacattccagtttcctacgcacaagaagcccatgtattggatggatctacgccctttgtagtgggaagctgttcgaaaaacatcgcaaaagaaaatagaaggaaggtagcagtgaagaaagattccaaggctagaaaagggaagttggaaaacaaagtggctggcatttctcctatgggggattcaatagtcactcagatcacggaagaggcgaaccctgatactcagggtcgcctacaaccatgaatcttttgatttggaacgcccaagggtttgggaacccttggacggtgcgttccttaacttccctagtgaatcaatacactcctaaaatggtcttcatttctgaatctaaaattagtaaagtgcgtgcggagtccttgagagtcaagttggggtttgttgggtgctttgcggttgaagcccgtgggaaaagtgggggtctcattttattgtggtctatggatgtagaaacccatgtactttccttttctcctttccatattgattctttcattagaattgaggatggccaatggtggcggtttaatggtttctatggcgacctggatcctagtcaacgatttcaatcttggaagcttttgaaaagaattagccgaatgtattccggaccttgggctgttggaggggattttaatgaaattgtgagccaaagagagaaaatgggaggccttcctaaaccgggttacctcattaacaattccaggaaggctttggatggttgtcaattacgagatgtgggttatgagggaagtgattatacatggtgcaatggtagaaaaaatgatctcatctttgaaagactcgatcgggtttgtggtaattcagaatggtttgacatgttcccttccacgaaagttcgtcatttggattgtacaaactcggatcattgccctctactactaatgggctatgatccccacttaaagatgcataacacgactagatggcgaattagattccactttgagagcgcttgggctgaggatgaagagtgtacaaaaatagtgcactcggcttggctacaagacaagccgattatgaacacttgggagttaaagactcggctgggaaattgtggggtggctcttcaacaatggaataagacaaagaagcaagagatgacaaggcacttaaaggaatatgaagataaaatctctttgctatcccgaagtactaatgctaaggattggcaacaaaagccggaattggaaaaaaaacaaaatgtttggcttgacaaagaggagaaattttggaagcaacggagtagagctttatggctgaaagaaggggacaagaacacaaagttttttcataggaaggcgagtaatggaaa

SEQ ID NO: 272774 - DNA, 2203 bp, Cannabis indica
gtgaagaccaaaatcaatgatgacatgaaattggtgaccctacatttagggatatcagttagatccctactttggttagaaatgcaaagaaagaggtccaacactttgtccgatttcttgaccagagctcaaggtttcattaatttagaatatgctaacacacaagctccaacaaccttagataatgtcagtaattcaggtttttcacaacaccttccagctccattgattgtgccacttgagacccagtacaaacacctatcgtctacggataagctgccttaaggtacgagcccacacatgtgttatttgttttttttttttttttttttttagttttggtagctacacaaattggatgcagcgtcgttcctgaacataacaaacaaatcaacaaatggaagtttcaaaatcaagcataagccggtcgcagagtaagagaatagaaaagagtcatagccagagtgaagctaaaaaaaaggacgaaaagcatatgatgcccaatatacgtagtatataaacttgatcgacactcgtgagaatgtctataaggctacttgcaatacgattcattacagaagcctccttcgatgtacaagggaggcaagcataggagggatcccaacaagatgtgcgagtaccacagtgatattgggcatactaccaacgagtgtgataattttttaccgaagacttcttcatgtatattgaagaaaatttgttccacaagcctaaagctttctccttatttgagtcttctctcaatatctcatcacttatactcaataaaattgcactgtgtactttggtttcaatgtcatacctcttcttcttattttcaatggctttgaaagctttctcatccaaggcttctgaaataccttgatggaccaacaatgctttcctcttgattatccaaaggacaaaatcattaactccattaaacttgtatactttgaattttgagctagacattcaaactcttcttgatgagttctttgaagaacacctttgattcttgaaatgttgagaactttctcctcagctctgataccaattgtggagtctcaaactcctaattacaagaaccaaaccaaacaccaagaacaataacaaactaatcaatgaatgataaatataaactagaaacaaaattcgaacataagcatagatttgaacacaaagtttacatggttgggctacacaacatgggtgatcataagcttaatccacgggagaaagcaaccttgaataacttttcgtttgtatctttattaatgccagaatagaggttacaaaaaaggaacaaagtccttaactcaatggagacttgctccttacacaaaacctcacttgagacctctcaatcaaacacacgagaatgtctatttacaaccctccagctcacactttttctttcataatttctcaactgaacacaatgtatgtgactactatttatagtgtttgcacagaacacactaaataactaagggcataactgacttaactgtcaaatagttaaattagttgaggtgtaacacaattgttaaaacagttgataaaaccagttatttgtcaccttaaggtatctcttagcatttttctataataatagttgcacttaagtacaagtatagttaaatattgaaaaaatatgggtacttcgatgcaaattttaacacacttgtaagtttaccctaaaaaaatactattataattcaagtaattttgtctcaaataccccaaagttgtaagtacccgagttactttgggtactgaagaatgcaatatggcaatacaaacataatctttcctacttcctagcacccagcagagacttaacaagccttttcaatttgtaggcattctagagcaaagagattctatggccggtcagcagcacagagagggggactagagactggagagatagagaaaaagtaaatatttatatgttattaaaatattaagcatatcgacgttattgtatatacaacacactttcttgttttgtttaatgaggtatatagtatttatttagaagagcaatttataatactgaaaatagaattgaaacatactattttatagaccagtttgaggactaattttgtagaagaaacaaaacaggaagaaagaaaccagttgccaatgtgactaacttaaaaaacttacagataaacccgtacttcaaatgaaa

SEQ ID NO: 272775 - DNA, 3836 bp, Cannabis indica
tactaaaccatgctccccagactttgatatctactaaattatgtctctcaaactttgatatgtactaaattatgtcccttgaactttcatccatgttagaatttttttactaaaattagataaaagtccttaaatttaacaatctcaatagttcgagagaaatttttaacggctaaaaaagttcaagagcacaatttagtacatgacaacattggacggaaaaattactaattagctaatgataaatgtaggcaagacaaaggcaaagaaggtcgaccacgttagcttttagcattggactgttccttcctccattggtgttggtgtgtcagctaagctaagctaagccctaagccaagagagacgatgatgaactcattggtgagaccatggacgactccttccccttctttaaccatccaccccaaccttacctctaccaccacacatctcactctacctaactcatattctctcttctcttcttcttcttctccatctcgtcttttttccatggctgctgcttcttccaatcaaactgtttcagcgccaaaatttcaaggtggcaataaagatgataccgatgtctttcagttgattcaatctcatcaggtacgtttcttcaaaaagacatattttaattagcagaattctgagaaaatgagtttggttatattttatttgattgcaggaaaaggctgctcggttacctccggttgaggagattcgtacggttcttgaccgtagtttgcgtggaacgctctctactatttcgcaggtctggtaatttctttgaagattgggtttgaggagagaagaacagagtggaattgaatgattctgagaaagtgaagatagaatttagagaaagagagaatacgatcactaatattgttgtaattgatagaattatagaactttaatcattcaaaattaaataaaatctaattttttcttaatataaatcctaattttttactcatcattcatacttgttaatccaataaaatagctagcatagtatgagagtttcggaattttcccttttatagtgtatggttttaactcatgatgagggcagtagctagctccatagtttgctcccctcatgaggtttggtgttttaacacatcaatttccttttaaaggtttcttctttgcctggaaaatgtgtagatttgtcttcaagttctttaactttttactttgatattatgcagaaacatgatggttatccatcagggtcaatggttgactttgcatgtgacacagatgggtctccaattttagctgttagcagcttggcgtttcattcaaaggttctacttctcacttagaatatctgattatttgatgattagtttcactttcttagtcacctgaagcatttgtggatagttagaggaaatgttctgattattaaccaaaatttgttatacaagagtaatcctaattgcacttaaatatatgatttttaagataaggcactagtcttaattctatagacgcccgatggaagtgtgtagataagtaaacctagttgctgggatgttgccaatcttcaaattttatctctcatatctgggcaatttcttgtagcttttgttgaatttttatatggatgttggcgagaaataaaaatcatgaatgtattaatttctctcacaatttgaagttgattgcttatggtcactatttcagattattcactctgcaaatggttaatatttgtgtgatatgtaaaaccagtacttagtaagatcattttgcctgacaattttcgctcttttactttatttagtttaattaattttcttctttgccacaggacttagcagctaatggtaagtgttcattgcttgtggctagagatcctgaggataggacagatttagtgattactctgcatggtgatgcaattcctgtaagtattatacttataaagatgctattgtctcaagttatttgaattgcaagactaagactattctcaacaatttaataggtctctgaaattgataaagcatcggttcgcagtgcatatttggctaggcatcccaatgcattttgggtaacttatgctcccttattctcaagaaaaattaacattttgtcacaccatagcatatgttgtgacaatttgtatattcaaatcactaaatcactactcacatctgaaggttgactttggggacttccaattcctgcgaattcaaccaaaagttgtgagatatgtgtccggggtcgcaacagctttgctaggatctggaggttcgtacatcataactacatacgaaaggactggccataatttccactcttttaaattacacaagaaacacatgtttctaattaccgtttccctttcactcaactgtcgcatgaccttttatgttctctgcacctactatgagttctgttatttatcttcatattatatttcttaattttgatttcagagtttagcagtgaggagtataaagatgcaaaagttgatccaattgctcagttttctaagcctgttgtggtattacttattacctttaataaatggtgacatcttcttgtactgattttagtgatttaaattaaaaatcatcttttgctagactcacatgaacaaggatcatgaagatgacacaaaagtcattgtgcaacattcaacatctattccggtaatgagatatatgcaattaaatttgaaggagattcttttcccctctttcctctgtttataagctatgaaaattcatgtggaatgtatattcctcatcgaagtgagagtctattacttagtcaaattaggcacatccctagcatgtaacaattatgttcctagatttgttgaaataataaaaataaaggaaataaaatacatgactaaattggatatacatgaaagttgaattttgatgtttcacaggttgactttgcttacatgctggacttggatagccttggtttcaatgttaaggtatttttgagtgttagccatgtgttccagatttcctttttcaaacttataaatcatttgtcttcttttaattgcataaagcttattatcaagtaccctacaattttctgtttccccatttcgagtgtcatctcttcatcagtttgtgagggtttttataagaaaatgacaaatgtattttctctttcctgttgatggcaaacagttataatcttttatatttatatttaatttaggcgggttatcaaggaaatactttcaagcttcgaattcctttcccgagacgtgcagaggatcggaagtgagtcttctttaacaatgactatctccccccctaagtgttatatcacattaagcaacaacagtttaaattataaatttagaatttcagtgttgctgtcattgaagtttgcttattctcttacctttctaacttgatatataatcaaaatcatagtccttatatttacaaaatgaaaaatgaaaatagattttcaaagaatctaatagattttgaatctgatttggttggtccacccaagaaaaggaaaagaaaagagagatcaccgcaaatggcttatcttttgattgtatttttaatgttccaacggctatttattatttcatttcatgttaaacatgtcgatctgttatattttcagggacgtgaagacccttatagttgaaatgctacgtgctgctaaatttcaagttgattaatctataacagaattgaagatctaaaaggtatgctaatctgaacctctagtgatcattttacgtttagataaatttcgttcaattgtgtacattttaacctcatcttacttgcatttgtgtatatgaattttttttttttttt

SEQ ID NO: 272776 - DNA, 648 bp, Cannabis indica
cataacacaggctcgtaacatatcttccagtatctaaattgtcctttcacactgtccatcagtctgaggatggaaagttgtactgaatttcagtttggtacccatagcccgtcgcaaactttgccaaaatttagaggtaaactttagatctctatctgaaactatagactttggtacaccatgtaatcttactatctccttaacgtacaaatcctcatactgatccactgtaaaggttttcttaactggtagaaaatgtgcaaacttcatgaatcgatctaccacaacccaaattgaatcaaataaattcgtggttctaggtaatccaaccacaaagtccattgtgagatcttcccacttccactcaagtagtgttaaaggctgtaacaaacctgccggtctctaatgttcatccttgatctgcagacaggttacgcttcgcgatatgaattctaccacattcttcttcattccactcaaccagaagtagggtttaagatcttgatacatcttggtggtgccgggatgcaaggaatatggagcggtatgaacctcttcaagaatttcatttctaagtttcgccctatttggaacacaaaacttggtcttgaataacagcatcctgctatctgacactgtaaaatctct

SEQ ID NO: 272777 - DNA, 538 bp, Cannabis indica
caacaacaacgcatatggtagcgagggaagtattcaaatgcgaaaggaaaaaccgaaaatgtctacaagaacataacttttatcggttcttacctcatacttgcaacctagtgtccaccatggtgattttaaagctccccgcgctgcatctttagcttcactagtccgaccaactctatacagtgtaaagaaagagatacttagaaaatgagctatggactcgggttgagaagttgaaacacagaccgaaactagaaaggtaaaacggcaaaaaagtatagaagtttcctacgaacttcagcaaaacctctgcgttgaacacaaagggccgtgcaaatcctggaaaatgctcctttttagtgtagaattctccagttaccattgctgaaacatggtctccttgctcgaaatgtcgctttactttacgctctaaaacatcagggaacaaaccaacctgaaaaaatgatctatttattatgacattgtattaagttttttcattggattgaattgaagtaacaaattaagaaaagaaaaa

SEQ ID NO: 272778 - DNA, 3081 bp, Cannabis indica
acaaaataccttaaatccaataatctacaataattcaagagactatttagaatgaaccttaaaatcagagaaataattaatagatgtagagagagataaaaaacctaattaaactaaaataaaaataaaataaaattacaaacgatgctttgttcaattaaaaacacaaaaaataagtgggtttttcgaaggaagaaaaagcacatataactggggaaaaaaacgatcttttcaatctatagtcagcagaggctgaaagtggcttttcggctctcagtataatacgtagttcgtgagattttcagtgtactcacccatgcgtgtacagtgccggagattatatataatatatatctcttacaattttggatagaagtgattgacttgaaagttccatccattgtgtagcaaaatatttatttatttatttttgaaagcaatgaatatatctttcaaataataaatccacttgtctaatattatacgggtttaacagtgattagtaattttttatgttatttattaaattaaaataggtgagattagatttcaaattgtagtatgatatctcttgtaatgcttaacatcttaaggtgtttttttagcatttctcaaataataaactatagtcatacaactactaaacattccaaagataataaagcatatacatctaatttatgtgcaaccttatgaccatcaaatgaacatagattagagatattcctcaaaatttggataacatacttgctacaaatcaactaacaatgattcaagatcattgtaaaaagaatgtctcttagaaacacaactaatacactaaatatttgtttcaagcgcatagagagaatcaattcaagctatatatgtgatagttagagtctcatgatccgcaagggaaaaatttgggacctatgcaatccgacatcgcttgggggaaggtcaagtgtaatgattctgagactgtgtaagtatgagactacacagttaaataaaacttaaatggattgataatgtgatttttgtttggaaaattatagcaaatgcatgaccaaatcatagcactatgtaagtaaatgtcttcatttcaaaacttgtagagaaatgacccttatacactatttattatttatattgtctttttgccacgtagaaagaaaaattaatattttttttcatattttgttagaatcaaaagcatattacttaaagatcatggtgtatctatattagttttgttaaaatcttttatattttaaagttactcgaggtgaattacttgagttgaaatacattcctaggcagaattggactgggtacttttattttagccaggagggcatcagtggcttgtcggtactaatgacacaaccatgtcaaaggttggaggctatgccagaagttacttgatggcatgcaacataaagggcatccatcagttttttcactgttccaacctatagttggccactccccacattgacattgagggatagggccaaccatattctgtttctcttagcaactcgatgcaacatttgcacactggcatttgaggagaattttaggaagtatggtttgtaccattctggtgggggtgttgttgcttcaaataaccctcctcaggaccctggtaatgctccctttaggaatgagtaaaaaaaggaagagacctgctgttgagagggaaagggcatgtctgctaaggaggcttctttggccaaggtggcccagacagagaccaggaagaaccatgctctgcggcggcgtcttgtatgtggggccactgttggtgatgtcccaattttgatcaagcctgagaggcaggggcatgcaagacctgtctagcctgtgctggcggacaaaggcaagggcaaggctgtcatgactgaagatagctccagtgagttctcttctgaggatgaggggcctttaggtggcactccttgggtagatcatcatgaagaaattgacggtagtaactcttttatttttgcttgcattttatatttattacttatatactgacctcgttgtttttcttttgcagacacggcctttagactaaaagatttgatgaggcaacgatcgagcagcctctctggcgggcgtgctcagtccaaggttgctatgacggggactgcctcggatgtgacctagacttctttgccgccacctccttcaagcccacctccgaccaatcagcctgtcattcgcaactctttgcccaggacaactcctcctcctcccaaggcacctggcaagggcacccagagacatagtcgggcagcctgctccagcaagggttatcattaagatacaaaaaataacatgtataattaattagtggccgcaattttacaagaatatattgaaaagcagtctatataaaagaatagtgactatttcaaataacaaataaatgtatgttatagaaaatgacatatacattttaattattcaacccgcattctattaatagtattctttctcctaaataataaatataatatttttttttttttaatttttctaagtccaaagtcaaaacataatttttttattatactaaatattatatattacatatatattatgtgtatagtcacttcaattaatattctatgtatagacatacgtacatgtgctaccatattctatgtcattccatgatgttatatatatagtaatagtacctttataaaattatgtaaatataatgatgatgatgatgaagaaataactatataaaactatttaaaatagtttaagtcaatttttaagtcaacattgagttaaaaaaatctccttcattgaaaaatcatcaacttttcttattatattgtccataataaatagaagtacctttaacatttagggatatatatttagtgaagaagaataagaattgaaactttgaaactattaaaagcaagaagaccttcataaatatatacatatatacactcaataattgagtataaattataataaggctgccaacccactctctcagttgcttcatcattatactgtgcttctctctatggaagaccatgtgtgcgtggcttgtgacgtaat

SEQ ID NO: 272779 - DNA, 568 bp, Cannabis indica
ccctgggtccagatccggatcccaatctcgggtccctgtctcttcccatttcgggtgtggggtcacgagcttggttctagattaaagtttgggtcttggtcaggtactaggtcccagtcctagttctgtttccaaggtccctatccttattctgggtccacttcccagttattttgtgggtttgggtcccgttctaggttggggttccagtcctattctcggttcaggtttaggtctctgtttgggttttgatctgggttcgggtttggctttatgtccatgtcctggtcctagtccaagttgggttctggttccatttgcgattctgagttcgagtttgggtttgagttcaggtcggagtttgagtcgtggtcagagttttggttcgggtctggatttcagtctaggttcagatcaggctcctggtgtgggttcgcaccctgggaggtctaggttgggtccaattcccaagttccaatcccgatctatgtttggattcagttcttggtctatgtccttggtttttatcctgttctgggttcgagtttgtgtccgggttcgggtctag

SEQ ID NO: 272780 - DNA, 703 bp, Cannabis indica
caataaaacttgtgactaaaagtgaaaaagttgtggctaattataaacaataattccaatgtgttgtggataaaaagtccatatctaaaggtatattagtcacaaaaattacaatttgttgtgactaaatatgtttttagtcacaataaaagtaaattagtgacaacttgtatctaaatactatcttttagtcacaagtaactttttgttgtgactaaatagttacctttaatgacaaaaaatgtatattataactaaaaggttgtcactcaaaatgacatttttttgcagtatgttgcagaataaattacactatataaaaaaaaaaagaaattattaaatattaagtagtagttatattagtcccacccacctaacttatatatttagatctcaaatattaaattttctcaatatgtaattaatagagagtttggtcctattcttctcaagttaaaaaaaaagtaaagcttaattaaggttaattaataaggttggctaaactagggacaggaaaatttagctatataaaaacaagtttgaaaatttttaaactataatttgatatacttaagataagcatattgctatgggacatcaatgtacttagtaccattatatatgaggtggcctctatgattacactataaaaaaaatcttacttttagtcacaacaaaacttatgattagaagtaaaaatgtt

SEQ ID NO: 272781 - DNA, 617 bp, Cannabis indica
aattatttaaagagaaaattacattctatacccattttttattaccccattttatttttacctctccttttgtagtatttaatttatacccttttttattgctcatattcccattatacccttacgttttaaaataattattggatattttctctagaaacaatggctcttctccaccaccatcgacgatcgatcccctagccacctttcctcctctccaccactgtcgaagaccggagtcgtgcgcaccacctgcaatttcagccctctgccttcatcgccctttcttccttcgttcctccatctctatttcattcctcttcccccttcattccccgatttcaaaccagtcctctgcctccttcactatgtcttatcttcaccagactgtctctctccttcgcttccttttcatgctcagtccccaatcattgatcttcccttcccttgacaggtattatatatatgtatattctataaacatatgttttttatattgcataatcgattaattttaatttgtaaagttagtaattatagtgaaatgtattgcattagaaattattttctgttaagttgtgattttaatagagactctctacttgtggctgagatag

SEQ ID NO: 272782 - DNA, 596 bp, Cannabis indica
ttttcttcttaaagattgaattttgatgaaaaaaaaaagtgtaatgcatgcataataaagtgatgttgttgctgctgtgatgttgttgttaaattctgagatttaaacatgttaattgaagttaattaagctacttgtggtgcttgatagttaggttgtttaaagtttgaatttcttgttaaaaagcttgagttttcaaagaaaaattgaggttttggtggctgtagtgtttgcatgagttaggttttagtttctgcagttgttatatgcttgaatatgagtttgaatcatggtttggatgcatgttagttgttattaaccaagtttgagtttggaactcaaagcttgggctttaatggtgattttcatttctgtacattctgggtggatttgatgctttagaaatgttctaggggatgtttagaacaggtctggaagttttggtatggtttggagttgatttgagcaaagtgtgaaattttgaatttctgcctgcgaggaaccggaattccggacggggttacaaaatttcccagaaccggaattccggttgggcaaccggtctaccggttggggaaaattcaggaaccctagtt

SEQ ID NO: 272783 - DNA, 2153 bp, Cannabis indica
ataatgtagaaaggttatcagatgtaaataagtggttagccgataaattccaaatgaaggattcgtgagaagaaaactatgttcccgggatcaaaatatatagagatagaaagaagagaacattagcactttctcgagcaacttatatagataaggtgctaaaaagattttcaatagagatttctaagaaaaagcacttaccgtctagacatggaattattctatgcaatgatcaatgtccaaagactcctcaagaggaagaggacatgagaaagtacccttatgcatcaacagttgggagcttgatgtatgcaatgttgtgtacaatgcctgacatatactacgatatagggattgttaatcgttatcaatctaacccatgtttggaacactagattattgtaaagcacattctcaagtatctttggagaacaagagatctcatgcttgtatattccagtggagagttaaatcctactaaaatatactgattctgattttcaattagacaaagatagtcgaaagtcgacatctgggtcaagatttactcttggtggaggagctgtagtctggagaagcattgagcaaaccagtattgcagaaaccatggaagctaaatataaagcagcttgtgaagcatctaaggaagttatatacaactctggaaatagttctagaagtaaaaaaactcctaatgcatactgtgacaatagtggagcggtggctaactccaaggaaccaatgagccacaagagaggcaagcatattgagaggaagtaccatctactaaagaatatagtagagagaggtgatgtgacggtcttgaagatcgcatcagaacataacctagtagatctatttaaaatgatgctaccaacatattagtaatatgggactaagggagatgcctaattcgcttttagggcaagtgagagattgttagggtttatgtcctgaaaaacctgtaaagacattttctaattattaaataaagagttgaacatttaatatatgtatgaatgttaagttattaatatttattattaaataatttatattaaatatcaaaaaaattcttattcatatatgaggttgtggcttgtagctgtatagagaactaagatcacttagctatgaataaaaaaattcagcaacataccaaagttatggaatctttaatcaacggttgctagtacggttcactgatgcccgaccttcagtgcaggtaatcttggtttagattacggatgtagtaaggcatcaatgtgaaggtactgtaaatagagattatatatgaaaatgcccgatatgaataaaactatctttattaatatgtcgtttattataaagatctaattcatatcataacaatgatcaatagtagaccgacctaaatcttgagttatcatgaactcatgttcatgttgttagtttccttgattcactcgttaaagtttctcagagaagatgcttcttacaacttctgttttgggaatctaataatatgaatgactgggaacatgatgtacaattatggaatcctgactttcctaacagattgaatactagttcccttttagtgttaattctggaattagattgtttttcaaaaattcagatgggatcttgaattatacgtctactagtgatttagtaatactaaagaataaataagtaattagaagagtaaaacgatgatttgaccaaaactaattatgaaccaacacatgaaggactaataactgaaattgatataaattatatcaatgggcattgtcgttaaactcagtaaatataattctataattactaagagttcaattccatatttacagtggagtaatcatgaattaataaacaaggggttatttagttgatgagactcaatattttagtttattggaggttagaatttataggtcaatggtcctcgaatcgccaccttaaaatactgtcaagggtaggggttgagagttgtataatgatgttcggaaaaatctattttgaattggcaaaatagtaattatttatttttgtaataaataaataattttttcaaattaatttaataggaaaaaagacaaaaattgttaagacaaaatttatcgagatataatttgtcaagacaaaagttgtcaggacaaaagatacta

SEQ ID NO: 272784 - DNA, 2525 bp, Cannabis indica
accataccatgacattaacccatctgagtctaggttcgggtatggtttcgggtctaggatccgagtatgtgagcaaaatataaaatatatatgttagacaaaaaaaattatttttgaaaattgaaaacaacattttgatgttttctgttttctagttttttaaaactcaatttttaaaaaacaatttttaaaaatttttgaaaacagtttttaaactgtaaagccaaacaaccgatttaatttaaaactttaactctccaataaagtaacaatcactcaaaattggtacagactattaagcttttgtctactgaaagtttaacttatgattaacttttgttaagatttgggttcacctatttatatattgataaagctgactattacaattacaatgtatttcacctttaaagtggttgttacaagatttaataagccaataaatgaacacttggaacattaatgataacactcaaattaaatccaagagtatctttagaatatataaggaaaaatgacattacactcttagaatatgttctgttatgataaaggcaccaactaacacattacaaactatgcaaaataccagaaccatggcacatttagatcaagataaaatagtataaaccaaaagcaagcaattctaatggagaacaaagaatcataagcactgaaaaggccatgcatttcttctagtagtagctttaaaaaagacatctgacataataactcactttgttcttatataaaaaatgtacaaagcaggcatgaaaggtatttcaattcttcacattaactcactttgttcttatacaattctctcttaaaaagatgtatctcccaatattccaataacatggtacacagaatcagaaattattccacataaatttggtacataacaagtgttcaaataacttagtaaagacacattcaataacaatgatttagaataacttaattctgaaagaacaaaatgggaaaaaagcatatacgattttgagttgaaatcacctgaaaatcattgcttgacatgttccaaataccaattataggtatcaacaagtccatccttgagagaaatatttgggttccaaccaagtcccagaagcttggaactgtccatgagcttcctgggagtcccatcaggcttggaactatcccaaactaggtcaccttcaaaacccacaacctccttaacaagctcagctagctccttaatggtgacctccttaccactcccaacattcacatgctccaatccactgtaattctccatcataaaaacgacaccatctgccaagtcgtctacgtgcaaaaactcccttaaagggctaccagttccccaaacgacaacttccttagagctcttcaccttggcctcgtgaaacctcctcatcaatgccggtaatacgtgagaattctccgggtggaagttgtcgtttgggccgtataggtttgtgggcatccctgcaattgcgtcccaaccgtattggatccggtaagcctgacacatcttgattccggcgatcttggccacggcgtaccactcgttggttggctctaatggaccggtgagaagagcttgttcgggaattggttggggtgcgaatttggggtaaatgcatgaggaacccaagaagagaagcttctggactccatggcggtaagcggagtcgatgacgttggtttgaatctgaagattgacggcgatgaaatcagcagggtaggtgttgttggcatggattccaccgactttggccgccgcgaggatgacgaatcgaggcttctcggaatcgaagaacgaatcgacgtcgttttggcgtgtgagatcgagctcggcgtgggttcggaggactagattggtgaatcccagagcttgaagcttcctaacaatggcggacccgaccaatcccctgtgtcccgccacgaagaccttggctgatttgtctgagaggaatgagttcggtgacgccgtatctgtttcagcaaagaaaatggggtttcgaaattagggtttttgagatctagaagtatagaagaatcacatgaatctagttagagattgaggtacttagtagttaagttagaatgaaaatgtgggcaaaaacaaagaactggaaagtttagtacattcaattatgcaaaattttcaagttgaagtaattttctcaggaaacaaacagagaaatagaaaagagaagaaatataccgttgccgacgcctcccattttttttttttttgaagtgaagaagctctttccctctgtaattgccgatactggaaaagggaactgtttttaagtttcttctcactcatatttcttcattttaaccaaaaaaaagaaaaaaaaagttcgttgggccagatcatattattgggccataatgatgtgaagttttaaaccccaattaatagtggtgccataacagggcttgaaataggggtaagttgaaaaatgcctcttttattaatcaattaatcaaatttacctctaattttatatttatttgaaacatac

SEQ ID NO: 272785 - DNA, 528 bp, Cannabis indica
ttttaaatctgatcataataggaaatatttaaaattagaaatattcaaaaagtggaaatatttaaaattaggaaaaattaccaaattgaaaatattttaatattggaaatatttcaatttagaaatatttaaaattagaaaaatgaattttgggaaataatcccatgaaaaaattggattttcggaggaaaaaccccaaaaatcgcaattttttgggttggctgccgaggaggctgcacgtacagcctctagaggctgcaaaatgcccatacgcgcgcggagcaagggcccccagccaagaaaactcggcgaatgcagggtgcatgggcggcaattgtgggcgctggcagggtgcacacggacgtgaggcacgtcacacgtgcgtgcaaggggaggctgatccgaaggtctggtgcgcatgagcacaaccatcgatagccttgaatcccaattttccgaaattcatatcttttttgtttctcatcggaatcgagttccataaaaaataaaattgcttaatttttcaca

SEQ ID NO: 272786 - DNA, 783 bp, Cannabis indica
gtgcttttattatgaacattgctgttagacagacgtgcctaccacccttaagacgtctcgccttacaattcgctagtgatactctttaaaagttattatattaaattatatgggactcgatactaaattacaccaatagcaatattgacacgtaaaagggtgcttggcaccactgataccttttagcattcttttattatctatcttgcactttgatttaggctgaatttttttagagagagattccaagggaaaaggataacaaaattatgaaatatgtttaccatgaattcttgtaaccctttctttatgaataacaattatataaaaaagtttcttttaataaaaattattcacaagataattttaaacttaaaaagcccttttaaagaaacttctaccttctctcaaaaggaattttagtttttttttaaaaaaaaaggtattttttttttctttttttttttttctaaacacttttaggaggtaattaatatgtatattaaattatatgttataaaaatgaaattttttatataaagatatctaatggatttcttattagcactattagtaactgaaaaaaggaaaaacaaaaacaaaaaacgttagattgaactaatgtcatatgtcaacaataataataatattatttttataaattagatacaaataatatatattattgtaaacttcacaagcttaaatgttatttagtttcaatgtgatttaagccgaaaacaaaaattgagcccactatatcatcatttagtgagacacatt

SEQ ID NO: 272787 - DNA, 1694 bp, Cannabis indica
gaaaacttagctaataattttttgaaatactgataattggctacaaataattgagaggaagagaataatataataaaaatattcttcgtaaacagtaggaaaaaaaaaattacagttatatgtatatattaattgtataaaaaattaaaaattaattagacacataaagatgtaaccacgaaaatctccactacttcaacaaaccacccaactagccattagtaactgctgcatgagtaaccacccaactagccataagtaactgttggatgagtaactacccctgattattagtgacaaacaagaatcacaaaaatattaacaatcgcattgatttggtcacgcatcaacaacaaacaaacaatatacaaataaatattttaaaaaagaatataatttttaatagagatatgcagtgctctaaaagatctttgagagcaaataaattataaatacataccataatcacgaagagaatatgtatttttttttgaatatatgaatataagaatttaagaatataggtaggaacgaaaaaacctggaccttcgatgctatcataatacactcaatttgattacataaacctttccctttatatttggtctcaaacctacgaagccaaggaataaatactctgttacagaatcgccaccattgccatcttctcccacacgacccagcctcgcaccattcctttagctttgaccgagatggcttcacgataggggacttcttaacagtggaaagaattttatgtgttgacggagattgcttcgagttcgaatctatcgtgggcctcaatgagacgagatgaagcggtgggtggtcttcgacaaggaaaagagaaacgagatgaaagggaggaggtggggtggtcgtcgatgagacgagatgaagcggtgggtggtcttcaacaagaggaagatagagacgagacgagagggaggaggtggggtggtcgtcaacgaggcgagagaattgagagagggagacgagagagcggagatggtggtggtggttcgagtcccggatcctaagattttatttatacaataatagcccattgatagggagtttacaaggcatttattgagtgtaatagactttgaatgagtctcaatccttgaaagttgtagctattactactcattgtactatattgatagtgccagcacgtgtgtgaaccgttatttggagcatgagaaaaggttatgtcagaatagtggtcgtgataatccttaaggaggtcacacctttctgtcgtgagccttttccttagattttttaggatcatggtagaggtgtgacatgtatacaccctccggaatgatatacattgccagataactcttcaatttccatttttggatgaactcttggacagtatctacatgattcggggtcccttgagagaccttaagtagcttctaaatgctttgagagataccctgtagcttctgaatgttttgaagcatacctggaaggatatgtcctatttggattatatgttataattcagatacggtgttcgaatttgacaaacacttagcgagtgttgttgcttggatccttcttagtgcctattaggaaggccacattttacctaggcaaaaacgcaaacagcaattatattttatatttatatatttttgggctatttacaaaaatatgggaaaatgaatatatgtttt

SEQ ID NO: 272788 - DNA, 1409 bp, Cannabis indica
aagtgtgagtgtgtgtgattttggttgtaaaatttccaaattttacactggccacgctcagtacgtagtaccaaaagaatgtgtttttcatggttttgtagtttgtagtagctttttttcaacttaattattattactatttactgccttttcccccaaacacgaaccaatcaatacaatcccactggacttcaaagttgacaaggtcgctagatttctgaaatgactatcatgccctttgacattcattagatgacgacaggagaactggggcccacacacctactccctcattgacaaaactacccttatccccctgacatcttcctttcattggctgattctttctagctctgcccaacaccttcggaagcttctatattttctcttgtgtgtttcccaagttcattggtttggaagtggcaaagagttataagctatatttggtttttaattaatcaaaattattataataatttgataagaacaagaattaaacaaaatcattggtcatatctcagtttgacaccttaaccactactcatggagcccactttgtttaaaggtcaaccggatgagagaatcaggaccctttgatctgtctatttcaacgaatatacatctacatagtggacggttatgatcgcagtttgtttaaggataataatgtacctaaaggattaattatgttaattttgaattttagagttgatcagtcgtatatgttatgttctagaagttaaaaatttatattgcagatattaccaactttttccgttttaaattacctaactattttaacctttgaccggacgattgagattgtagccttttttttgtaatctttttggtatagcttacaaacaaaaatattactgcaatatcttattacactaactttttattttattattattctttcttctttaaaaaaacaaaaaagaaagaaaagaaaattgataaacgtgaaatgctttgtagttgtacaactaattttatcattattttttctaaatgatgtgatttatggtgtcattatcatactagaagacagacataaatccgggcaagaaaaggccttcacgtacatacatacatggcatggataaagttgcatctctcttgtgtttactatgtgatgatttccttcacagcgtaatatagctggaattctttgtaatttagttacttatttggtattaaaatatagagtcaaatcgcttcttggaagagttcaatttcgggcttgaaggcttattgtggaggaaaggaatagaaagccatgaatcgtgaaatacaatatttatgccttcaaataatacgttccaataggtaaaagacagagatttttattaatttaatttaaccttaaagccattaaaaagtcaaggagggtaggcatgtcattt

SEQ ID NO: 272789 - DNA, 1220 bp, Cannabis indica
taaaaaaaaaaaaaattgacagagaaacataacttttcaaaataacatataaatatatacatcaagtatgcattactacaataatgccataactcaaaagatacctaagtgcctcactatattacttttcgtttggtagagagaccaatattttttttggaataatatattaatttttctaaccaatcatcctattttcatgacaattttaatccaacctattattctcatatatagctagaagacaaaaagaaaaaggagtggacactcttggaaataaaaggaaaggttatacaattattacaatgaaaatggtatctaggttcttagtaaaatgtaggatatagacaaatctttggttgttacacatttattaaatattatcttagagcaagagagtaacatttattatattaaaaataattacctttctttttcaaacttaattattagagagagaatgtagaaaatttaatagaccacttaaacatgagatggctgtaaattaagcatgtgaacaatttaattgatatagttattataaaaaaaaataataaaaaaacattcctacttatttattattatgttgttttcactatcactcgttatacttttgttctaaatttttttagcatgtttccattataatatacgtgtggtttttgtaattttgtatataaatttatttatttatttattataagttgagattcgaatttagaatattaagactattttttttgtaagtatagcgtaatagtataacaatttactaatattttagagtttttgaattcgaatatatgtcctttctctttttcctatcattccctaactagacctagtctcagtggcttttaagactatctattcaatcatatattttatatgatatattatgtgactcagcttattgtttatttggtagagtatgtgtttaattgttgagattacaatacttttataagttaaagattaataatggtgggcatatattgccccaatgaagaaattctaagaaaactagatggatcaacaagtttttacttcaaagagctagctaccaaataaaaaaataaaacaaaggttaccatctaattatttgcttggcatgaggaggattgggggcgtttgaatagctcaaaacatagcttgtgttgggaaacaatcgattcttacagatgcattacaccatgtatgattgcacactcgaactgaat

SEQ ID NO: 272790 - DNA, 709 bp, Cannabis indica
ttaattacagatttgactgatattttacaacaatgatcccctgaaatcgtgggattgtattacatcccacgtaaaataaatgcaggttaatatttgaaaatcacacaactgtgattggtatgcttttactgggtcaatgtaaatgtgtattaaatacgttgtaacacatattgttttgggacgtctcgctgggaacatagcaacaataacattggtagcgagctagaacttttcacatgtctttccgacgttgataatgtaaatctcatcgtttccgcgcttgaagacataacactccatttgacaattgtagttcttggtgacaaggtgaacttcaacagtcaacatcaattaaatgccagcttctatatgagagggctgactcgacagagctgtgaatctcattgaaagatgtctggagctgattagtgaaggtaccatgagcaagccttcctatagtgaaatggatgccttgctgttagttattctgatttactcgactgttatacttagtttgtataatgtgtattatactctaagtgtcttaacagtctgtaatacccggtaaaaatatacaaatattttaaatttgatttgttttacaatttgtgtgagaataagtattttatttatatctactaatgacagatttctaaacatagttgaaattgtagttagtctcaaggtaaaattatggtgtttttacgaa

SEQ ID NO: 272791 - DNA, 652 bp, Cannabis indica
ttaattataattaatagtaataaataaaaaatttgaacatttatatatttattaatatttataacactcctctttaaattgttataataactgccttattaaaaatctcaccgaaaaaactcagtgagacaaaactcaatcaaagaaaaaatagtgtagtatgaaattactttatcttattttagcatttattgagatctttcaattgatacattctaatcttgcgaaccattttctcaaaagttgatgttagtaatgactgtgaataaatctgcaaaattatcacttgatcgaattttttgaacattgatattaccattctcttgaagattgtgtgtgaagaagaattttggtaaattgtgtttagttctctcttttaatgtaccaacctttaagttgagtgatgcaggcatcattatcttcatagagaactgttggtacttctttattggatgttaatccacatgttcctagaatatgttgtatcatactttccaaaataacctttagatattcattttagaagatgataagtagtggtagataaaacaatggtgatatattgaagaaaactgaggttctctactacaaaattattttgtctgtttaaaattgacatgcaatttgcagtagtggtttcaaattgattgta

SEQ ID NO: 272792 - DNA, 647 bp, Cannabis indica
taaataaactctatttcaatataatcttttctactcatttatcaacaaagaaacagattcatttttattacttatttaatgtgttatttagttcatgtgatcatttatttatttatttgatttataaattcatccaaatccttatcacatagatattcttgtttattgtgttgtcagcacattagaaagtaatcaagattgtgtgattaaatgtattcctataatttatcagtacacagggtttaattgataggataatctacaatgtagtttacttgcaccttatgtaagtgctatgtcctttccagggcatcggttaagtaagcttgggtttgatgtatggagtatgcatgggaagggaccgattgaacttgaatcagatatagtaaacttaccataatatctatcaattcaatatcacctaattgatcttagatcaagtgatctcaatcctaagatggttaggttctagttcagttgcattatttgtgctcttcaatctattcgttaaagtagaccaatggatcttctcgtcacatatagattaagaacatgtcagttcagttgagtgggagagctaatcatagatatacaatctatagcttctatccggacataaaagtcaaacgataatttctttcgagctt

SEQ ID NO: 272793 - DNA, 1041 bp, Cannabis indica
gttaactcatttagcactaataattcctcagtttggctctaatcttagtttgtttattatgttgtttttattcttcactacctaataccctaatacctattattccttgtcttcttctttctcttctctcatgtaagaagaagagtttcatttcaaaataatgaatcaaattcacttttcaatttaaaccgttgataagagctaatctaataattaattcccataagggtttttaaaattaaagttactcaacacaaatttcttagtcaaacccatgattaataaataagttatctctattgtaccttttatctttgtgttattatatttaaaacgtatcatattattattcatttcattggatcctagcataaaaccccaaaaagcatccaagagaaacgaaaaataaagcctacaaaaaaaaaggggtaaagagtaataaatggctgaaaatgtttagccaaaaagggagaattgaaaaggaaataacggccatataaattgaaatgtgcttaataataatcatcatcatcatcatactactttctattgatattagacatagtatgtgaaagtattaattacctacttactaaatccaattatcgagtttagtatcaaactttttaccattttgatgaatcaactctagaattaattgaatgacttaaagtaaaaagagatagcaatttacaaatttcacttaacctaaaatatatattttaggcggctactgttagtgggtaataacgggtaataacttcaaaaatgtatcttacaattaccaatccgaatacaaatcataatcattacaagcttttataaaatacaatgaatctttaccctaatcaataaaatcccttggttatatatatatatatatatattccattatggtaatgacgagttcacttcaatacttctcttcaatctgaactcccttcagatctaatgataaagacgtagctaaaatctctttagtttgaactcgcgatcttcaagttttgatctgcaactttggatcaacaccacaaaattcat

SEQ ID NO: 272794 - DNA, 679 bp, Cannabis indica
ccgctatctcccatcggcatatgttttttgaactgtcccatacaacactattgtccctataaacacaaaacatgcccataacatgccgcaaactagctcagtcttaatctcaacctacgcccctacatattgtccatctacaccttgcagcaagcatgcaagtctttgcactaaaacccatctgtcgtagtgtttcccactatattcacacaccaaaactgatcaagtacccttatttttcaaacatctgaattagtggcctcccccacttcaacatgggaaaaacttctctcttagaggaatatacctcaagatatagctcacaagctacccgcatactcatatatggtccctccattctacatgtcactttgatgaagaagttgaagtaatgcctcggtcattctgactcttctagctcccacgatgtactaagttccaatgattcaaccctctggccatcatgcaaactctagcacacttctcaaccttcgcaggctcatgtgactactacgtctcactggcacaggcctctggcttccactcaaactctagcaccatctcaacgcttgcgctcggtctccttagccctgctggcttcgttgatgcattcattccacaactcaacatctctatcgatgcctttgtgtgacttacacccactggtgctttaacaagc

SEQ ID NO: 272795 - DNA, 1051 bp, Cannabis indica
ctaatgaactcgtcgactcaatttgaatttaaataaacatttctattcatttattggtcgagaaaaaaatgtctgttacagtagtaacctacatcaaagctattatcctgatctgatctgatctttagcttagcataaacaaaacaaattgcagaaaaaaaaatcttactttcaatggtggtcatctgacgtgagtacttgataattttatccgaacctttgggcgttgtccgcctagaaagccattcacttaagagtaaatgttttttttatttcgtacttgatttggtcatccgacctcgtacttttactggttgtattttttgaagtgttccccattccaataccttggtactagaacaagtttcatcttttcgtcatagtttctcgatttgtatgcccctgatttagaacttcaaccgcttgatatggtcctttccaatttggtccgagcacacctgccatactgtctttggtgttcaaaaatacccttcttaggaccatatctcccataaagaatttccacgctctcacttgtttgttaaaatactgatctactttttgctagtgggctattagttttaagtttgatgcggttcgtttttcttcaagttcatcaagtgattctacgaggagtacatgattggcttcttggctatatgttaatcttctgtgggatggcggttcgagttctatgggcaacatagcttcatatctatatgtcatggaaaatggagtctgtccggtcgctgttttcttagttgtgcggtatgaccatagaacttcaagaagttcctccggccagtttcctttagcatcttcaagtttcttctttaggtgtccttgagtgtcttgttgactgctttaacatgatcatttgcttggggatgtgcaactgctgagaaacgttttatgatcccatggttcgtacagaaatcagtgaaggactgattgttaaattgtttgccattgtctgagactatctcgtatggtaatctgaacagaaaattatgtttttcacaatgaaatcttgcacttttttggacgtgat

SEQ ID NO: 272796 - DNA, 1275 bp, Cannabis indica
aaaatcatatttagttataaaatttatattataattaaaagattgatactaaaagtagcccactacaaaaaactatactactgttagtgacaacattttaatcacaacataaatattttgtgactaaaagtgacatttagtcacaacaaaaacttacttgtgactaaaacatagtatttagttacaagttgtaaataatttagttttagtcacaacaaaatgtaatttttgagagtaatacttttagacacagactttttattcgcaacataagaatgataatttatgattagtcacaacttttttacccttagaaacctctaattaatttgtgtagtttctaattgaaactttaaggttttagttcatcatcatatatatagttgtaaacaatttatttattttacagagaaatgtacactgcgtatgattggtatcaagaagtttttccagtatactttggtataattaagttttgacaaaagaaagttgaaaacttcaaaagagtactagtgttcgggtataattagggcgcgcaattaacatgtataaatagtataaattggtcgtacatatatcatgaatcatatattgtgtggccacatattatttgatttcctcctaaactgattttgacagccatatattcccattaataaaaacgtcattggaaagacaacatacacataatatatatgttgatgaaatttgactataaaatactgacaatcagcacttgtaaggctgccaagtggctgtcttgccacatatatatccacatcaacgtgtctgtgtatatataacacagttatttatacctaattgttatggcatatggacatttttgatgaatttatatcactagtcatttttaggccatccaatccgaacctttgtattgtgttatggactttaactaaaaattaagaaagtaaacaaattcgatgaaatatcctatccaattacgtaaacaatcaaaacaataatactttcatcactatcattggacatatatatataaatatatttatataaaagaaccatctttttatctcataaaccatcattacaagttactaaaggtggaactataaatttcccttttcatgtagttggagggtcacttttgggcatggcatgagaagttagtatctttatgcaccctcgcaagtgtttggcttagtcatcaagtcactcatcatgtttatcccaataaaattcggtaaataggaaaaactcatcataagcatcgaattcacctatttacactatagt

SEQ ID NO: 272797 - DNA, 535 bp, Cannabis indica
cataaagattagcttaaaacgagagagtgaattaactgtaacctttgtttccataagaaacaacacatgaggattttgctctttaacaagcaaacgaagcttcggaatgcattcgggttccccaaaccccgagcattccaactgacgattttcatggtgaaccgcgggattgctgtgcaatcaccgcgtagttgtcaaacacatcagtggaatccacagttgcagaaacggactgatttaaaccagcaacttctgacaaggaaggagcaagtttcagaattgttagctcgacatctcttcaaagtttgtctcatggagtttgtgtcaaattgtcttttgaaaactctattcggatgatcattttcttgaccaccaacattaagcttggaaacaattgtagcagtaggagcagcagtgaaaatagccttcgaaacagcaggcaatgttacgggtctcaatggatgaatggaatgttgaaatgaaggaggactgggaggatacgaggcaaagatattgagattagtggcactggagt

SEQ ID NO: 272798 - DNA, 4877 bp, Cannabis indica
cttttttttggtatttaattagagagaaaacaattataattctacttgtcaatcaagtggtcaatagcttaacagaacacagttacggtaactaaatatagatcaatggttcaagaatagaatgaagttatatgcatgtagaaacagagcactagaaaatgaaagtttcagtttcaaaataaataaataaataaaagtttcagattcttgtcaaccaattaataaataacataacacatcgattaactaatactaatgaaagataaaattaagaatagaatgaaatgaaatttaaaatatatatataaaaaaattaataataaaattattaaatttttctttttgcaagaataatttttttttattttaaaataatataatcattctattgaaataataaaatattttaatactttaaaatgtaaccaacattttgattgattttattaaatgtagtatggaaatggttcacgaaatcctaaaactcagagtctgtagtagcaacctaagttaaaaactcagcctaattaattatatccttccatttcataccacagtagctcttccaacagaacaagtatcctcttgattttttttttcttcatttaaaggttagagcattaaatgacatcaatatcataacttatttacgacgacttttgatcaatgtattgtccaacagagcatttaaagccacaactgcctcctatacgtatgtgtacttgttataatctccaccctctgactaaaatctatgtgaaagatcaatatctgcttaatatgaactcctcttcattaacctgagctccacactcactggctaattcaccagagtagtagccaatacgtaccatgaatttctctgaaactctatgcatctgttcctttctatttctcctacccttctcttcctgcctttccctcaataccattacctcaaatcaaccactcaaggacggggaccttctcatctcaaccccggataaattcgcacttgggttttttagtccggccaattcccgaaaccggtacgtcggaatatggtaccacaaaattcatgaacaaaccatcgtttgggtagctaatagggacagtcctttaaatgatacctcgggagttcttgccattgacagtcatggaggccttgttatctatggtaataaaagcaggggctctcctcattggtcagccaatgtttcggtccctgcagaaaataactgcatggctaagcttttagacattgggaatctcgttttatttcgaaataactctgcacagactcttttatggcagagttttgatcacccaacaaacaccatgctccctttcatgaaacttgggctgaaccgtgtcactggagtggacaggttcctgacctcttggaagtcagcagaagatccgggaacggggaacaactcattcggcttcgacccgacagggtatccacaatggttcttaaatcagggtggggctccacgttggcggctcgggtcctggactggccgtggatggagcggtgtaccccaaatgactccgaattttattttcaatttcagcttcgtgaacaatcaggatgaactctccataacatacggtattcgcaacaagtcgattctgtcgaggatggtgcttgatgaatcaggaaccgtttatagatccacgtggcaagaacagaatgaacggtggttgaagttttggtccgcaccgacggagacgtgcgatacttataagctgtgtggcccgaacgggatctgcgacccaaccaacacagacaggttcgagtgcacgtgcctacccgggtttgacccgaagtcgccccaagactggtacctgagagatggatcaggcggttgtgtgaagaaacaagtgctggggcgcaagtgtggaaatggggaagggttcttgaagctggaacatgtgaaagtgccagatacatctaagacatttgtgaatatgagtaggagtttggtatcgtgcgaacaagagtgtctgaagaattgtaattgcacggcttatgcgagtgctgatttgattggtgggattgggtgcataacatggcatgggaatttggtcgacgcgaggacttatcctaatgcgggtcaagatttttacttgagagttgattcgatcactttaggtgtaaatttacttttttttttttttctgacaactattcgataaaaatggcaaactgcaagtactaattacatgatatttgtttgtttatgtgaatatatgcagctcaatattcaaagtcaaagtcaaagaattcttcctccattagtaatattgggaaggtgggaattgcgctgggctctgtagctttgctctttcttatttttcttgctgtatattggtggccaaaaaagaaaggtacattactcttcttcttttgatctccaatttatacttcacctgaccaagatcataatttttattaaaatcactaaacttggtatgaattatatgatgaaatagtttagtatgtttcttcttttctatttaatttaaaagctttaaatataatattttttgtggattttgtgtagacgaaatttgaaaaagataatactcttctacataactgggtagaagaagtatatatatgtttttaatatttgtgtgcttgtagacatgaaactctgtgcttgtctattctttggtaatgctattgctgagcatcactcatgtttacatgtataatgacagaaaaagaagaacagagcaaatatctttttgatcaaagtccaagtcatatttctggaaaaaatgatcttgttgatgctacaaattcagagttaccattgtttgatataaaaactatagccgcagctacagacaatttctcaattgataataagctgggagaaggtggttttggctcagtttataaggtaattaactatcaaatgcacacgttattttctcaaattgtataaaaagcacaaaaagcttttcactttgacaatgacaacttaaaattaagtatattttttccactgtacataaattagtattggttgtgggtttcagggtgtgtttgatggaggaaagcaaattgcggtgaaaagactatcaaagcattcgggtcaaggaagtgaagagttcaagaatgaagtgttgttaattgcaaaactccaacacagaaaccttgtaaggattctaggttgctgtgttcaaggagatgagaagatgttaatttatgaatacttgccaaacaaaagtttggattttttcattttcggtatatgctttgttttcttgtcatgtttgttaagttctactaaaatagatttatttctttatttttaatgaatactacttataattcagatgaggagaaaaaaacattgttagattggaagaaacgctttcacataatttgtggtattgctcgagggatgttgtatcttcatcaagattcaagattaagcatcatccatagagatttaaaaagtggcaatgttcttttagatgcggacttaaatcctaaaattgcagattttggcatggctagaatatttggaggaggcgaaattgaaacaaacacaaatcgagttgttgggacatagtaagtgtcccttgaataaaaagttattttattatctcattaattatatttaaacttttatgattaaaaaaaataacaataaaatactcatcatgtataagtactattgcagtggttatatgtcaccagaatatgctatgcaagggcgattttcaatcaagtccgatgtatatagttttggagttttaatgctagaaatcattaccggaaaaaagaacaccagctactatcatgaaaatccagattccaatttgattggacatgtaagttcggaatagttttgtataatatagttaaacttggttaccatcacacaattgtataagatgtacaacattattatgacaggtatgggatttatggaaagaaggcagagcattggaaactatagactcaaccatcgatgagtcatttggtggcttagcattgagatgcattacaattggattattgtgcgtgcaagagtacgctgtggatcgaccaactatgtcagaagttatttttatgttgggtaatgaaacaacccttgctgatccaaaacaacctgcatttgtatttaaaaaaggttatgctaattcaaatggagacccatcaactactggaggaattatctccgtaaacgatatcacatgtacagtaatagaagctcggtgaatctttaggtaaacttatttatagttgtttatataggttgttacgtgcacgacttggtttatttatttatttattttttttaattaagtaatagatttaaattgttatattaaataaatatgtaatttatttaaataaataatattattatattaaaatattaaatgtttgatataaattaaagttttaaataaaaacatatattagcaacaaactttttctattctacttgtttgttgaataaaattagatgaactctataattaattgttttattatcactctttgtgtattattttcaaacattgttctaaagatgtagtgaattttgacttttgtgtaatatgaacttaaatttttacatgatataaaattcacttagaaatatagactttattattgattcattctgtatatataaactagtactgcatatgcattctatagaaactaactgctacgaattctgagtattattgacaggaacaaattcttgttttatgtggttaataattaaatatttaaaagaattagattaaaatacttttataaaattatttttataatttttacttttatatataataatatataaaattaattaaaaatattttattaaataatagtaaactaataaagaaaactaaaagac

SEQ ID NO: 272799 - DNA, 2525 bp, Cannabis indica
gaacttaaatccattggttaatagcgaacagtacaagtacataaattggctttttatagaatgttatgtttcgattctgttgtctaaggctgtcatagaatacttgtttctgttgacatcacaagataacttcggtttctttagttctgttaggacattttatcattttgtttcttaaacataagaatcataacactaaggtatctacaggagtgtttagagtctttaggggatagagtcaagtatggggtggctctatgggagtttgataataaagattttagtggctctatgggagtttgatagtaaagattatatgtgtgtgtgtatgtgtgctttcctctcttgtaagaattgtatttcatggtctttactattttacagagtttgatgtatgaaaattaactaccaccattattgataatgaccttgcagagtggtactactattacggatcaaatggaccttttacgtgaacaagtgaaaatgttagctggagaggtggctttgtctacaagttctctgaaaagactgtcagatcaagcagctaacaatcctgatgattcacaaattagggtgagctgctgtttgatgtgttgttttcaagtatcaatctaatttccccacctccctacgtaattataaagttcgtcttcgccattaggaaaaaatgcagaagttaaaggatgaaatcagtgaaaagaagtttcaaatacgaattttggagcagagaatgattggatcatttgagatgattccacacacagacagcattgagttgtcacaggtaatttctattggaatttcacttgaacaattgcacctttttgctttgtctgtaagaattttcttttagttcaatgccttgtattttagtctttgtattgttgctgaacattatggatcaatcaagactggttttccatgatttcttctttggaaatggaattggtaaatattgttgttcttcctgatgtattcctttcttttgtgtagactctgtccaagcttactacacagctaaacgaaaagacatttgagctggaggtttgttctcatgtttactttatagctatttaaatgataacccaataaaatataagaaatgcaaaaatcgtttactaagtcaatgtctctctcttgattgatcattcaagatcaaatctgctgataataggatacttcaggagcaactacaattgaaggttaggcataaatctgcaaggtccgttttccttttttctttgagttgcggattgtttatcttgtcttcttacttttatcagctatcagagaatgtggagatgcaagagactattcttctgcttaggcagcaactcaattcgttatcagataaaagtacaagtggtttaagaatcattgctggcaatggtcttacctcagctaatgaaacagagctcggagaaaatagaattgcttcatgcggagaagcttatgccgatgaaaatacaccaactagtgtcatgagcttgaacagagttttatccctcgaggacaaagactgcaacaacagtacattttataattcccaagtttatgttcaggttattcaaaatctcttcaattaattctttttcgtaacagtagaacttaatattctatcttatttcattattataaatgtgtggtcccttgcggtcagctcagtcagttgagtttgctaatctgtggctttataacaggctgcagagattgaggacctaaagcaagatcgtgtgcgattaactgaagaaaaggatgagcttgaagttcagaataagaaattagtagaggaagcggcatatgcaaaagagttggctgcagctgcagcagttgaactcagaaacttggccgaggaagtaaccaagctttcatatgaaaatgcaaaggtgactggcgagcttactgctgcacaagagcttcgatgccgatcagcttgttgccagaatccagcatcaaataatctcaagcaaaatagtttgaatagaggtcgaactgattcctacgctagaagaccagacgatgatgttattttcgaggagttggagaaagaacttgatgcaagatgccaaatggaagctgcacttaaaacagccctatctgaaagagataaagtagaagatgatctaaggaggaggcttgatgacgcgaaacgtcacgaggaagatttagaaactgagcttgcaaatatgtgggttcttgttgcaaagttgagaaaacccaacaataatgatgaagagtcatctgaagtgattcattcagctgatacatcacaagcaagagttagaaatgggtttttaccatctaataatggccattctgatatgtatgatgaaatcagcaaaaagtcaacaggtttagaagatttgagagccaagtatcagaaagaaaggagaaaatgcaagcagctagaaagccatatttccagattgaaggtatgcacaaagcaaaccccctttcgtactgagccagatctaatttgataattaatattgtgtagcgtcatgtttcttcagctatataga

SEQ ID NO: 272800 - DNA, 6017 bp, Cannabis indica
atttaatcaactattacattaattgagaatatctcataagtcaaccataaacataaaatatattttttaattttcttggttgtatatttttatgatgaaatcatataactttgcgtatatatggattcatcccattcgaaataagagttgagatttcactctccctacaaattgtttatctttcctacaatttagtaaagtttgtgttaatctcaatagctagtctatcaaatttttggaaaatattttcttgctcttctttttccttagtaaaattttaagtctaaaacataaaagtgaatacttaaagaggaaaaaacttggaagcgaagcatgaaatcttgagtgatagattttgcttctactttgttaaattcccatagcattttagctcgtggaagtcctaataattaattgcactagtttggaccttagtgggatagtttaaatagacgaagtaaaatatatagaaaaaggcaacccaatctgaaaaaattgctgatgagaagtacactcattcacacttctttaactattcttttatgcgtagtgagatcaaacaacccatttacccaaacgattagtcaaaagtccacaattacagcatatagaatgtgtaccataaataacagtataaaccacaataaataaggccaaccaagaagcaaaaaaaaagtctttgaatgcgttccattttcattcaatttggcaagaaacaagagctataatacacacacacacaacagagcttcatcaatcaccgttgttttttttaggcaaataagttttaagccgttgatttctgtagagtaaagtctacatcaataccggtggattattcttggtggaccaatttgtcctttataatgctgaagcgacccagccacttcaaacatgtggttggtcgtatatgagttggagcttaccacatagatagactggtccaattatgcaaataaccatgtgtgacccattgaagagagacacattaaaaaatggtaattcaactcccttgaaaccaaaaaatgtcttcgtatctatcatttcatttgaaaaaacaaaaataaaaacattcaattaactccctataaaacctaactccatcaacttgttctagtaaaatcttgacaaagaagttcattttcaaatggttgttaatctaggaataataaaatctgatatatgctatataaagatcaatagtcataaactaggcatccctgtccaccgattttatgatatttttattaccaaaactaaaacaacacaaaatttgaacttttattccagcaaaaaaaaaaaaacaataagatattacactgaacatgtccattggtctgaaatgttattaatatttgcttaaacaacaaagtacgtcatacttaaatgagcacttagtttaatagtatgctccacttaagagggaagatatggtcaacaagagagattttttctttttcttcttttaaatgagaatgattttttcttggcatgttgtgatgaagggaaaactttagaataagaaataatatccgagaagaaagggagttgaactttgtctggccctcgaaagacaggctaaaaacaacaaaacttgaaatgtgctctgtattactcccccatatctcccaccactccacatatgttattttattttcatacaaaacaaaggtgtcaaatcctaatgtctttagctttatcaaaaataccatacacgtatatgatgcatacacaaaccaatacatgtaacattcatattcatagcataccttacacacatatatacatgcctatatgcgcaagagacaagagcttgtttgtggacaaacacaatactaagtacactttggattaacttacttgttgacactaataaataaaataaagcacaaattagcatcagaattatattgtgtaggctatatataaatctatataacatacatcatacaaagaaaaaccactcaaaagaacaaaggataatgatatggtatgggatggcatgacattttggtaatgtctcacactctatagcattagagaataatataatactacaattaaaactttgagccattctttttttttttttggctccaatatacttaaccattgtagtttctaagtagtaaaagaaaaaagatattttaagcaaaagcaaactctttttcctctttttttttctttatttatttctactgaaaacttgaacctggagtgtaaatggcaaggtctggccactcatgtcctcctccccaacagttggaatccccattttgaagactcaaatagctctctgaattgctactgctctgcacctctatccccaagctctgacccgaatcagaattcagctcaggacccgaatgtacagcttccctcacccgccccattttggcacccgacccgtttgggtttatcccctccatgacgcctccaaattgcccatttgacgtgagcagtgagctgaaacttcctgggaggtctagcaaccgacggtcttgatcaacaggagaaccgtaaactcgggtcgattcgggttgtggatccgggttctgggtcgatgagcttgtgagggatgaggaagatgttggtgtggatcgctttggattggaagatttctttgtattcttacggctcccacccccaaccggaatgttcctaagagcaccccctttggtccagtacctccggcagttcttgcagaagtgacgaggctgtgaaagattatagttattgtagtagcagaatttggtgttcatggactcacatcttggacatttcagagtttcttgctctggaaaattggttttgatgggctcgaatgttgcagggtcttgcatcttcaacacccccaaaagataaaaaaaatgaaccttttttttttcctttctttttcagaaacccagacaagaaaagagtaatagagatacaagattggtttttaagatcttttctaaagtgggtttgtatcagattaaaacaatttcagtgttgagggcttgaattgggattaaatcaaactcaaattcagaacagagaagttacttttccagaaatgttttacagaggaaaactcaaaaacccatcagcgaatattttgagtttttttttttcccttgtctttaaatatgggtaaactggattgtgaatagaagaaagtaaaatgggttttcagtttcgaaaaaagttttccagggtttttgacagaccctgagcttttcagtggtagaaaaaggtaaaagcagagcttaaaagtgaataaaaaggtgcaacttttctctgttctctttctcttttttgtaactcagagacgaaatcaagcacagaaacgccactcttcaaagcaaattaacagacttacttactgccaggctataacatgttcgagtttcatactcaattccgcacaagataaaaccgcgtagccaaaagcaaatccggaaaagacaactctttttttttttgccctttatcactgaatttcttaactgaaaagcttcataaaaagaaaaaactcaatcctccttttcctccttcttctcaactgggtttcccctcaactgggatgagaattagagagaactaaaaaaaatatattaaaaaggaataaatagagataattagggtctggagaattgttcgatggagatgagctatctatttgtgtccgcgtgaaagtgacgaccagacttcaaatataggaagaaaatctctctcttatgcttatgctagttgtagtagttaagtgagaaactaattggaccggcttagcttttatggctttttcatacaagaatgtccactaatcatatatattagtttaataataatatcaaaatatattttttattggaagcttaagctcacactattatatattagtaaaccgtaattcttagattctctagagaattcaaatagtggctgagtttgtatttttcctactaactattttattttaagtagaagaacatcaagtcaacttctatgattaaatattactacattaaccttaaacatttgtttaatttaagaaatcgatatgattaggagaaaaaacaatgtgatacataccttgttagttaagttaactaatatataattaatagaatattttgtggaagtaatattagttttgtcgcgttgccaaaaagcaagcgaaaacaactttcctttttcaaagaaaattatgaaaaaaaaaatatcaattctcattaattgatcactattttcagttgattatagtattttgttgtaatagtattatcttatcttatcttatgatattatgcaattaatttaaaatttataatgttaacatgtctttgttagagagtaattattagcagcatgtcattaattaaaatgtcaaaaaaataaaaataatggcattacttgaaccacgctattcatcttgactcttgagtaaaataatagtagtaatggaaactagtggtgattaaacgatatcttaatgaaaagtttgacactttttatccttgaaaaagctaaatgaaagttttaccaaaccatcaaatctcaatcaaagtaaactatgagatttaatttctatagggtttagaaaatctatgattaaaaataattagacatgattgtttgtccattattttaactacacaattattatttgcttcgcacggatgatgggtggaaataaaaaaactctattcatctttaataaatcaaaatattgatataaaaaaaaacaataaaaaaaatctcaaaatatcaagtatgccatgtcggctcaggaactgatgaagcctaatacgccaaaattgacaattaagccaagccgagagagcccattttaagccgcaaaccaagctcgcgtgcgatcaaagcaaacgttatcataattaggcattattttaatcagcaaatcagaaccgttaactttttacttaacgatatcacaaccgtaaagatgtctcatcctataatcggaggaggaatcgtagcgttgggttccagtaacccgtagccaatgcgagctgtaacacgtggcagaaccccaactctctatagttctgggcgagagagagaaagccaaatgtatgagtttagatttttaggaagagcttcccttcaggttattatttactgagccagtgaacctgaacgcagtgagtgagtgggtcccatttagactttcctttggttttttcttttcttttcttttttagtatgtagtttttgtattttaatttgactactttctatgctgaagagccatttcaacaagtctgaatagatttttattttgtattttactgttatagatatatatattatgttttccttactacgcacgtacgaaatcgcgagtgggtgtgggggcccaccactcgggaaaaattaacggctctgattcattattgatgaagataaatcaatctttcaaatccattttttttaatcaccaaagaaatattatttttaagttcaaatttagtaattaattactaactataatataaattcaatccatattgtcaacggttagcacctaatcaatcacctattattatcaattttaatttttaatttggacactccaaaaaactttcaattttttgaaaaatttctacctttgaaatttatagaatatacataaactactatttttttatacattaacatttttataattagagatttttttttatatatttttactgtattaaaaaaataacaagaaaatcatataaaaataataaaattacaacattcaaattccaaacaatctcaaaacattaaaaaaaaaaaaatatacataaataataaaaaattaagcaacaaaataaaaaaaaaaaaacgtaaccacataaaaatatattaaaaaatcaaattctaaataaaatcttaaaattttaaaaatatttaaaattccgtacaaccgtattttatatattttaaaataattcttttctgctttttgattttaattttttctaaaaaaaaaattaagtagaaaagactactaaacatga

SEQ ID NO: 272801 - DNA, 1382 bp, Cannabis indica
atgatctttttcgcgtgcatgccctcttacagcgaggtggacgccttgctatctctcactttaattcacccatctgtttatacttagtttgtataccgtacattatacgctaagtatctctgttgtcattatatctcctccacgtaacgaggttaatgcctcgtcttgtacactttaagttacatggtttctcatcggggcacaaggcaacagttagtatatttttatctcgcataagactgttcagtcaaccgagttgtaaacatactctgctaattgtgcttttaacaagttattccatgtcaagtgtaattatgattacgtgtttgagttctttattcttcccagctcgacacgtgtcttcctctgatgtgctcgtcgaatttcgagtataacatgaaacttacaaggtttttgaaaagtcgtgtgagtacaaggatgaacccctgttatccagaagaatttatccttgaattccttcttgttaggaagatcaacgataatattgcgatcccccgtataaatttcgaggtagaagaacccctagaacaattcttcctcgttggacttgccttgagagtgtacatacaagtgatttcgtacaactcaagaccttcccatcacagcatatggtataaagatcttagagaggctaaaatcctataaccatttggatttagttggaacgaagcaatccctacataatcacaaaactctttaaagtagctgttcaagggaaggatagccctagcacgtttgtgttcaatgctccaatccttgatttttacaaaatcacttgtactacactctgatttactggtgaggtgactaggtgggaaatagcgcttctcttgtttcttagctatgcaatcggcatacaaagctgtcaccttatttaatactacaagattgtaaaaaaaaaggccagcatatagggccattgaggttactttcgactcaaaaatttagccttgaattgcacagtgggattttggggcaattcgggttttcgagcttttggtggagccataatatgaaaatcaaaagtacctagcgaaaaagaaacattaacaggggtaagataaaagggctcgggcaaggcgacttcttgtaggaaagaacatttacccttgataatttgtttataaattgacttaatcaagcagaaacgtctagcctatttaattcctcaatatggtcacgaatttccatatcattctcctcaagttttattttagggattcctaggtttggcttatagggtaggaaaaaagaatagtgaatcgcacgatctaaaaattatgagttttcaagtgttgagttatatagatttattttttcttctctttaaagaagaaaaatacattgaaaaaaactccaca

SEQ ID NO: 272802 - DNA, 2562 bp, Cannabis indica
acacactaagacacttatatattttgttaaaagattcacaaaatttccaacaggggctaactgataaaaagttgacacatcacaagatgatagtttagattagtaatacagatgaaaaatcctccattcactatttctaacaattttcaacccttccagcaatgagcaaaaaaaatagaaacattttcaacactgatattccacattttttggagacaaaaacttcaaatggaaagggaatcaattactctttctaacaaataaacatcagaatttcaaccaggtggccatttcaactgtctccctccaaggacatgcaagtgcaaatgataaactgattggcctagagagagtaaacagttcattaacatattggcctaggaaaatttagaatggttggatagttgggtaaccatgaaattttaagaaatcctggcacaacatttaagtggaaagaaaaataataatggaaaaacagataaagatggttcagtgaggataacttacaggcatttggaccattattgatgactacacgaaacccatcaacaataccttctttctccgcaactatttttgcagcatagagaagttgacccagtatttccacctgccttggttcagcctgacaagaaacatatagggtgtcagcattttatacgccacgtgcatatcataaacttgttttccctcagcaataagaaacctgcaaacatgtcaatgtaattatcaaaaatagcacaagaatcacaataattatcatttcaacactggaaaattggagttgtgaccaatacaaatcatgaaatacatactatgtgcaatgccaataaaagttgccagaattgattttgcacctggacaaaaagaaactgcaacctggatgtcctacagcacaacaataactactatggatgctttggtttcaatggatgagaactttgtattgagacccataaagttccatcccaaaactaattattaatgggtgcagtaacctataatgtttccaaatctatttgatgtgggacttttaaatacccatcaagatgatggtagttattttctagcaccaatcttgaattagtacatctttctttttcttgtgacattggaggagagagatttgaactcaagaatcagtaagtctttttaactcaacattcttgttcttgtcgatagtgtgctcgtttaagctgataactacatggcactgcatctcgaaacttattgataatgagtgaaataactcataatcctaaaattgtattagtaattagtgttcccacttttagttgatgtggaaatttttactatgtagctagtagctactcacacaagcaataggaagtttttattatatataagaaaaaaagtattttataatctaactaccaaaaataagagcatgaaggtcaatactagttcagcaaacatggtaatataactaaaaggacatactgtaacaaaagtcctttgggtatagctaatgcttaaaatactataaagaaagtaactatatactatcacttctctcctgctgcgaatgttatcaatccatgtaaaattaatatcacaaaacgacactgttcaaaaccaaattctgcttcattttattattattccaaggtgtattgaaagatattaatatagtatgccttacagaaagaaagaaaaaaaaatacatgtgtagccatgtaaccaatatgattaattgaatgctcattttgaacaaaaacaaagacataccttacaatatctaatgaaatatagttgcataagcagtttgtaatttctttaaaaaatattgtagtaattgtacattgttagtagtaccattgccatattgtagatatgactaatgagtacaatttcacttgagaggcactattcatagttgcaattcagcatgaaaagaaagaacatttatttgtaagtttctgaaggaaaaagaaaagacctttccaagctgagttagtccatccctcaactttggaatgactaatatatgaacaggagcctgtggattaacatcccggaatgccaagaccttatcatcctcatatacaacacttgctgggatttccttagctataatcttgtcaaatctgaaagaaatgagaaaacaacagagctgctcagttattaggatcaaatatgcctcagcaatgaagctgctgaagctccaaacttcgtttttttaaaaccattaatggaaacgctgcctttataagtcagatatgcatcttaaaattctgtcattcgacatcataatggttcatcccaatttaaactactcgtaagaaatcttccaactttccgaacatgttggagaatctcctgcacaatcaaaatctgccactaatgttgacttctaagttggatgcctattaaaagatcccattataatttcaaaggtaaatagcatgctattacttgaacatgagatcaaaccagtttcacaatggcaaaaggaatgatacatggttggagctccactgtcagcatctactgcagctatctcggcagctgcttcttcattgtttatagcattgatatgac

SEQ ID NO: 272803 - DNA, 1254 bp, Cannabis indica
ttatgcataaactgacagactttattcacgctaaaggcaatctcaggtcttgtgatggttagatactgcaaagctccaactatagacctgtaaagctgaacatcttcaatcggatcacttccatatgcagagagcctttgtccacttgtcataggggtcgagtttggcttagcttcctgcatttttgccttgcagaggagatctctaatgtatttagtttgagttaacatcattccttggtcagtgtacaacacttcaatgccaaggaagtagtccaacaaacccaaatcctttagagaaaactcattgtgcagctgagttataagagatgctatagcagattgatcacttccagtgaccaatatatcatcaacataaaccaagatgatgattattgaacttggtgtgtgttgaatgaacattgaatggtctgccttggatgagacaaatccaagtttggtcaaacattgttgcagcctctcaaaccaagctctaggggcttgcttcaatccgtagagtgccttatgaagtttgcaaacaagatgaggagctgtgggatcttcaaacccaggtggttgtaacatatagacttcttcttgaagattgccatttaaaaatgcattattcacatccagttgtctcacacaccatccattgcttagggcaagagttagaacaactcttatagtgactggtttgacaactggactaaatgtctcagtgaaatcgaaaccaggtgttggtggaaacccttagcaacaagccttgctttgaacttattcaccgagccatcagcattttctttgattctatacacccatttgcaccctatagcttgccttccaggaggtaatttaacaagtgtgtaggtcttgtttttcttcaaagccatcatttcttcagacatagcattgttccaatggccatacaataaggcctgttgaatgttctgaggaagtttagacacaataaaggtctttggcttgtagatccctgacttggatcgagtttgcatgttgtgttttggttgctgagctggtacttgtgtgggagtgtcactgtgtgcagaagcatcagtgacagaggtaggaacaattgcaggagctgaagaaatattaacagcagtaggaatagtagcaggaacagttggtaattctgggacatggcctgcaacctgttcatgaaaataatgctgctgtatatcagcagttctgttaatgttagaaaccaggggatcaatatggcattcttgag

SEQ ID NO: 272804 - DNA, 1279 bp, Cannabis indica
agaaagagttattactctcatttaaaaccgttgttaggtttcttacttattggttgcttaataaagcaatgatagtgacattagaaactcgctgataatgagggttaaggatgctttataaaatatcgattttggcttgttttataagacaaatagtttgttattagcatttgatacgctttaaataactacctaaactatatgttacaatgtatattttgtgttacataaattttgtgctatatgtgatgtttgagtgttttgtgactcacgagttgctatgcggtgtaggttaggggaaggggaaactagacaacccatgagtcagcggtctcccagcaatgtacatatcaacctgccatattttggttcttagtggacatgatctttcttttgttatattttgaatatgtaataatattttgaaacaagctagtttagttgtttttagtaaaagtttgtaactaaggggatccttgaatccattaatgttttgaaaaagagtttaagttacacttaaattaattttctaaaagttttaactaaatcacacttttcttcctaaaatcattagtttattattataaactaaattataaaaacacacatgttgcgaccttacaggttagggcgctacaacatagtattagagcaacaaaggtttaaagatcctgaagactggtttaatatgtacattgattgtgaagactcgttcgactcatggtattgtagtaagtgttaattgttaattgattattggattatttgtcaattccttgaaatatttgtttacctgaaatgtataagttattagaagagcatgataagttttgtaaataatgatgttatgtatatgtaagtatggaaatgcttattagaactagttttggtttggatgttctaaatgttggaaagttatggtcgtagtattagattatgcactttaggcgatccggtagggttaaccgtgagcttctgggctcgaggctggccgtgagggtgcgaatcttctaccaccataaaactgggaatggatgtatgctgcgatgaaagagaccatctagcagcaaggtgatcagatcagagagttgagagagcagcaagctcgacctactcataatcctaaccctaatcctatacctccggcacctctggctgtgccaaaggacatggaaaataatttatagtcgttgtacgagcagtttagaaagcagaattctctagtgtttgaaggtggtgcttacccacttaaggcagagcattagatgagcatgataac

SEQ ID NO: 272805 - DNA, 1241 bp, Cannabis indica
cgtgttaaggctttggtgaaccttagtgtggcttttaaccctaggaaccctaaaaggaagccttatgagactttgagagccgtctatggtgatgactactacgtttgtagatttcaggtatatttgttaatatttgttattactttcaatttttctccattttatacattttttttagttttatgattaatcttgtttagtgtattttagaattacatatacctcgttctttgattgtgtgacccataattgtgcaaaagatgaaattttttttattaatgtacttacattttcatttaatattttctaaaagtgttttattaatggggaattgcctgtatttttcttttttttttctttttatatttttataaaagttgttttgttttgaggttatactaatttttatttgtttttattttaaaattatgttatttttatttttataaataaataaaaaatcaattataaaaatataataaaaaagtataaaattataatttattaatccagttcaaatatttaagaaaatgaaagtcatattattaaattcaaggcaaacaagacttaagtaaattaattttttaaaaaataattaataaaatggttggttagattagcatatataccctttgatgatttattttttatatatatatttacataacttttactgtttgacatgaaatgatgtgacatgggcaataatatatgaagataaaaagggggactctttttggaaatactgattatacaataatgcaggaaagtggagaaatagaaggtgaatttgcccaaataggaacccaacaagttataaaggaattctacacatatagaaatcctggcccacttatgctccctaaaggcaaaagttttccacactcaaaagatgccaaaactccaactgagttgccttcttggttaacccaacaagaccttgattactacacaaccaaatttcacaacaaaggcttcactggtggaatcaactattaccggaacattaacaggtcttaattcttatatatttttttactatagttttatatgcataagattcccaatatatattaacatgtaaatgtgtgtgtgtatttgaataattaatgtagaaattgggaagtgacagcaccatggactggggctaaaataaaagtgccagtaaggttcatagtaggggatgtggaccttttatacaattcattgggagttaaggattacatacacaaaggtggatt

SEQ ID NO: 272806 - DNA, 862 bp, Cannabis indica
ctcttttgttttaatgaactttatagtcccttattcaggaaggtcgaacttttacccaaaaaaactaccaaaatatattattgtttcagtctctagctttttaatttgttcttttttaatgctcttttttggatttagtctttcttttaattgtgtttgacttgatactagttgtttctcctttcgttctaagttattttggactcgaaatttgtagtttgactgaacttttgtaccaagttttctctatgtgatgtttaattaatttttcctctcttttgaggcatattctatcaaaacacaatatatataatgtatgaagaatttttttttaattcctgagttgtcttgtaagagtaccatatcaaaagtgaaatttgtagtgaaactgaatatattaactgaccttcattttgagagtatataagcttttgtgagctttgagtttgaactcttaaacactcaacattagtagagaaagagagatgggaagttgtttagggatattgatatactttggtgaattggaagggaacccacacatatttgtatttatatatgaatgagtaagtcacactgatgagtgtgtgatgactgtaaatttcaatttcattaggtaaccattaaagacaaggccatttgtaaagtttagaaactgcaattattattattgttattatggctattagcataataatctactctttttgttatattatccttccgatactcggtaaaaatttcccaatccattttctttattttttatgtcttctttctactgaaaatttagaacatatattatttaatgagcttttatctaaattcaaatttaaaatattacttaatatacttcttaaag

SEQ ID NO: 272807 - DNA, 599 bp, Cannabis indica
aattaactctaactccaaataaccaccctatgttgcctgttatttcataataacccacagcatagggtctccttataccgtcagttaatacttccccctacagcgtcgcctagaacaacgtcgatagcgaatttcgcctaaactaatgttgaatgctcctaagaaccacctctaaagtctagttttctagtagtgcaagcaccacaaaagatggcataatgctattagtgcaaatcaatatcaggccccatatattttggtttactaaataatataaaaaactgttaactattcgtaacgcgtcatatcagtatgaggttgggtgctataaggtgcctaataacattgcttaaacacaaatatgagatttttcaaaatactttacaataatatgactgaccttaccttatagaaaaactcaaaaataaataaatttcataaaaagtgaccaaacctttttttaaggaaaaattgaccaaactttaagggaaatttacacccattactgttttttccaatttttttttcgtttgtactgtgacacggtggaatttacttttgtactgttttttttttttggcagtatactgcctttgcaa

SEQ ID NO: 272808 - DNA, 1282 bp, Cannabis indica
tttcgagaacgtatcgataacccattaagaaatgtcttccctaaccttaggacatccgtgtcaagaacctatcgagaaccagttgagaaaggtcatccctgaccttgagacaatggcgtcgagaacccatcgagaacgtattgagaacccatcgagaaaaatacgaatgcacaaaatactccaaacaacgagatctcacgattttaacaaaatttatatcaaacccaaaaaagcaaacaaacaaacaaacaataaccacatagatctaacgaaaatatactatacatgggacaaggaagtttacacaacactctcaaacaaattttttaacaaaatacttacccattaatctacaatgagtgagtggttgggcggatccgccaagaaaaaaagactattgacactacaaaaatcgtgccaagaaactttattttttgtgccaatgtacctctagacacgacatgtcgagcctaaagattcgtgcctaaaaagaatctatgggcaccacatttaaatatcgggccacaaaataatatttaaataaaaaatattaatatatattatacataaaacaaatatataatatatcttatttttacaatatatatcgattgaatttatagaataaaattataaaatataatgtataatttttataatctgaacgtttgatataaaaaatattatatcccccataaaacaaatatttaaaatttatgaacataaactatatacaaataattaagaaaaaaattatatgcaaatatctactaaaaagatgaaaaatattattacaaaaagaaaaaaggaaaacaatagtttatgaagatccttgaatcaccgatcggaacacgacccatgtcaaagtcttgaaccaccattggatcctattatgcctcatcgaaaacccatgcgccaccaaatcggagacgccttgaacaccgatccaccattgtaatatcgtctcgccagacatccaccgccaccgagcgtttcttgtcgaactgtgacacgcgctccccaaccacggggtgtaccatgcttaaatcgcttgagagagattacatcgaggaggtgtgacatcttcgtaggcgttatatataaaaagaagtgagtgtataaaagttataatgaaactaaaaagagatgagttgtagaagaaaaagaaatagaaaggggaagaaggtatggtgaggcggttagggttttctttgagagttagaagagttagaagaaaagaaaatgatgtatttgttataaatattaataattatgtggatgt

SEQ ID NO: 272809 - DNA, 3319 bp, Cannabis indica
atacaaacatcagtattaccaaactattcatattttctgtttaatagaacaaatatcatattttaattttataaataatctaatatattaagaagaaaaaaattggcataagcattactcatcacaaagagaatgttcaaaattcttcaaatctcctctaatgtaaaaaaaaaaagtgaaaagtatctaaaataactttaagaatggttaatagtaaaacatatagtgaaggtaattttattggttgagtgattatagacataatgctacacttctcatcataaaaaaggaggtttgaaaagagtgaaatttaaatctcttaatattaaaatagtaataataagttggctaattaagatttttatccctcgaactttgcatgtaccaaatcatgtcccctggacttttaaggtcgttaaaaatgccccatgaattattgagattgttggatttaaggagttttgtctaattttaagtaaaaaaaaaaatctaacaaggatgaaagttcaaggggcatcatttagtaaatgtcaaaattcgaagggcatgatttggtagatatcaaagtctagggagcatggtttagtacataaacaatcactgaaatagtaaaattgaacgaaattaaacaaaagtccttaaatctaacaatctcaatagttcaggggaatttttaatggccagaaaaattcaagagcatgatttagtacatgttaaaatttagagggtaaaaattctaattaacctaataagtttattagttgaatcattaagttttagtcttttttttatttttttaaatcagaattgaacataattgagtattaaattataaggttatactgtaattaagtagaaaacaatgtacacatgcagctctttacctaccaaaaggcaaaaggatagtagaactagagtggatttctattcaaatacgaaagagatttgatttgaacaagaatatgctcatctttactttttactttttacacccacacatattggatgctaagctatcacatttatttctcatcttagtggaatcaaaatcagtgacagatacgtttatcttaattactagaaaaatacatataatctgatatttatactttatataatacatgtatgtaatttcattatttccatttgttattacctgatgaggggatctccataggagatggccatgattggacagcattagttgggttggatgtaattgtcagatttcaattaacatcaattcaaggtagtgcctagttggtttggtatggcattacaaagtttatattggaatgacttggctacaatgaaatgtttggtgaacattatattcaattaaaaaaaaaagagggtggaattctggcatgcatgaattgtgacttgtgagattcaacttcaaatattggtttcttatttttatttttcacaatcatgtcttgctctactgccccttaaaggaaaaatataagagttgggtgattataatgtgtaatgaataaacatcaattactaaaagaaagaatattgagtttcacacttacttttatttatgtatacatacatatatttggtagacctattcatttcacactataggataccatgggtggaatatttaagaaaacaattggtcataataaggtggggtttaggtctctttagtacagttgatttggacacaacttaaaaaaaaagtaattgattttttattttgggttttattagccttcactataaaaataggtccagtccagcatgtctgctcttaggatgacaatgatgttttcggccatgccttaggaatgatggaattagaattattttaaaaactctttaccaaataattgaataattttccagcaagaaacaaaataattgaataattatttattgagtaattgtttgttccaatctaaaaagaaatatatcaatccatttctgttttgaacatgaataagttatagccatttttttgaagtgtcattatagttgttaggatattatgtaagtttattggaaatattaattgtttagagtgctgaatctgaatttaaatagtttgttgtatgtgtgcatatttttttatttattttttatatgcatgtttaataagttgaatttttattttaacactcctctacatactttggtctcaacattttaaattctttaaaatttacagaacgtactaaataaatacaataaatattttcatatagaagtagaattataatttattttcctgccagaaagtgatacatccacaataaggaattttccttattcatttagattatgtcgtaaaatttgtgataagattatgcatattacatgataggaagagaaacctcttcaagtctcccaaagtaaatacttgctatttcattcaacaaccaaaatattgaaattacaaaatgattttatatagccctcttaaacaagcaagcaagaaattacaacaataatagaatttagttggctcttgagccacttctcaacgctgctcgagcatcacaaaatcctggagccatctcggctcacacgctcaggaagctctcaatcaatgtttagagaagcttctaccttcttgttgttgattgaagaataaggctaacttaggctattcttttggactgcattgtctatcaatgtcttcactctttggtatcatattccagtattaatagttattgggctttctatatgagctttgctaacactatccatttcctcaaaaataaccttatcctcaaggttaggaatttcataaacttgcacaaatgattcatagtcttcccatgtgacatcttttggagtactcaaagagaatttggcaaactagtttgacattgattagcttaattctagtggctaggataaccatggaaaccatcagttgttttttggtgacgctcaactctggtaatgggtagtacagtatttcgattggttgttgccataaaacagtttcaaaagagacacgcgaaaggtaagatgaatgcggctaccatgaggaagtgctaatgtgtaagttgctggtccacgacgagtgtggcgtgctgcccatggcacacccacaagggggctattctgtaacatgagcataccttggcgcttgatcattagtcaagtcttgcaccaagtacctaattggagtgggaagacttttgtgattagattttctttttgtaattccattgatatatgtatggagagctaaaatcatttatgttcttggaaatctcttgaaaccccattaagctctttagggggtgacttggtgacttatgaaataccttgtcaccagcatgatagg

SEQ ID NO: 272810 - DNA, 735 bp, Cannabis indica
aaaattacattatataataaaaatttacaaataaatgttttgtattacaataaaaaattcctataccacaattatggtgtatatatttttctaataaaaacatataaaattttataatctaaatttactatataattgatgattcataattatgccaatactataaactatccattcataatatatcaacatatacataaatgcatataacccaacacagtatttaatttatgtaattgtggagatgactctgatactatttgttggtttttaaggttcatataagagtcgcaatagaagcacaaaatatggattaatgtttaaaaaaaatatattgaattcgatatgaaccttaaacctagaattttaacagaatataacataatttaaatctaactacttggaataaggatattacttactgatgcttattaggagatccttgtatcttttcgtataattgcttgatcatatccaatccaaagctttatgggctggatgaagaatacataccaaatcttccagatcagtgtcaacactcaggataagagtggacttataaatttaatgtgatgaatgaatttttttgttacagtgtgtgtactcaattcatgaggcgctataacttaagattgggaaaatctcacaaccacacttagtagtgtgttaagtgtagagagagtataaagagagagagtcgctaaagagagttagagagatagatagatagataga

SEQ ID NO: 272811 - DNA, 663 bp, Cannabis indica
gatgaactcccaaataatccaaaatcagcaaaatttgagtcgagcggaggagactctgatgggttctatataagaactaatttcccaatggcggaccagactgttgttgctgttgaggaaaagattggggttgctgctgctaaaaattttcaaattgctgttgtgacaaattttggaattgctgctgcgaagaaggctgttgttgttaaggaggttgttgttgctgttgtggaggagcggcataactctgagaagacgaaccaccaggcgactgcgactgactatacatttgaataaagttctcaaatcgtgggttatataaatgagctcgttgttgaggcgtcaaattacctccaatgtggcacgcatagttcagaatatttctgccacagtgctcatcatttcagtagttggtggaggaggcaccgtcgactgactttgagtgaatgacttctttcctttgcccttgagccttttacccacgcctctttgatagtcagatctttcgcctagaactatttccagaacgtcgaactgataaccagtgtcagattcagtaccagatgtatcgctctgggattgtcgttcaagtcttttcctatcaagctccttcaacagttcctcctatttaaataaaaattattagaatatataatcaatata

SEQ ID NO: 272812 - DNA, 1264 bp, Cannabis indica
atagacctaatccaccttttggagataactaactctccgccaggtaatagggttccaaaccctgattcatacctatcacacggtctatccaatttactaaagattctggctgccacataggaatgtgtggccccagaatcaaacagcactgagtaaaatgagttattaactgagagctgacctgttacaactgaagggctagcttctgcatcagcctgcgtgatggcgaacaccctagctggagtgggtctcgtcggagccctaggtgcctctggtctgagctggggacaatccctcttgtagtgtccgggcatgcaacactgaaagcatccctgacctctgcactcgccttgatggtgccttttgcaactggggcactcaggataagaaaaccgggtctcagcaaaaccctgatggctgcctctactctggttcccccaaaacctcttgtttttccccgagccaccggatgcagtggatgttctcctcttctggtccatggccgaaccactacctcccctactaaagcctgaggtaggaggggtaggagccccgccactcaatggagtactagccgactccaacatacatccaactgcgccctcagctcgcagtgccttctccaccatctcagcataggtggtcttgtcgtcggtggggatcataaggtcatgtttgatcttcacatttaatccgtccagatacttttccttcttgctgaaatcagttggcactattcccgaggaaaacctcgccaaccgatcaaactgggtggtatactcagtcacgctcatgttttcctgctgggtcaggtgggtgaactctttcctcttggcacttctaactgcctcattataatacttcgcgttgaagagttcctggaacctttcccaggtcatggtggtgacatcatgaatctgagacaccatgtcccaccagactagagcgtcttcttggaactggaaggtggcacacaccaccctgtcatttccggtgacacccataaagttcagtatcttggttatcaccgttagccactgctcgactttcatgacatctggacctcccagaaaaaccggaggtgcttgcttccggaacctttcatacaagggttccattctgtttgccgctactactatctcggcctaagtagcaggggcgggtgccacaggaacttctggcacaggcactgcaggagccccgtgctacctcaatctctgtatctctagatcttgctcctctatcctggcttgcatttcagcaa

SEQ ID NO: 272813 - DNA, 891 bp, Cannabis indica
tgatgtgttgccaaatatttgatcatataaagctcataaataatctgaattggtctacagtagtggctttcatgatagtatcatcactggtctataataaaagggaaatagaagcatatatgactaagtactaaaactgttacaaatctcataagaacatgttaaaacaactagttgtgaatgtgatcttattgttgttgttgttgggttgaacttgaataggtggattatgtcgatctaatggaagcattatctttccaagagaaccagctggaacaagcttgagattttcacagttacagatctcaatcatgaatccatctgggtcattaaaaaacaattggtctataacacttccattcttgtcatcttctactgttcttttcttgcactttatgtttagctccttcagttttctctcaattgcattcatatcttcacactgcatcaatatatttaaaatcacattcaaacatatataacaattcaaaaatctatactacattttggaagtatttcgatacacctctatctgtttcggtactcaaaacaaatttttcaattttttcttacaattttttttacccattaagcaagttaacctatcaaaaagtcaagcttaaaagtattaagggattcaaacccaagtgagaaaaaatcccaacaaaaagcttctttaccactacatcataccaaaatttatttaaaattgtaatttttcaaaaaaaatcaaatattttgttactatcaaatttaatttttgaaggcactattaatcattcaaattttttgaaaattccaagatgatataaaaatagttaattaaaatttttgctctttaactttcaagttttgaaatgtaaatggcgttagttaaaaattctttcaaaa

SEQ ID NO: 272814 - DNA, 1306 bp, Cannabis indica
cttttttgtgagaagtgtagaatcactaaacaaatatgcataacgttccatatattgaacagatgttttctgtaataattttatattctacatgacattttatatgaattaaattaaacaaatttttataaaaataaacaaaatgatacgataagtcttatagctataatctaagcagtcataacaaaaacaaattggaatataatttatctatatacaaaaaatataaaatggctatatgttgcaaaaatggtgtccttttctaatttttttttcatacaaataataataaaaataaatagaatttatcccctaaactattactttcaagtcatgttctctaaattttatattgatttattattttaaattattaaatttataatttaattaaatttatacttgtggcattaacatgacacatcagcaccaacaaaatattatgtagcttgtatgttagctatgtaggactaaaagtaaaccataactcaaaaactagaatgaataaaccagaggagatttttaacaagctaaaatgttcaaggagcataacttcaaagtaataatacttgaagaagataaatcctattttgataacttcatctctcttgttttccaaatgagtaattgaaaaaagattacaaaacaatatattaaatttgtaaattatattaaaagaatccatgataaataatgtaattgagagtgctggtgacttaattatatgtataaatattatcatatctatatatgaagaatgaattaactatgtattgagatgattaaatatatatatatgtatgcagatgacagtgacatggacaagtggttataacataaatgaagctgttccatttgttgaatggggtcttaaaggagaaacccaacaacgatcacctgctggaactttaacatatgatcgaaacagcatgtgtggtataacatatatattttctcatcacttattataaaactatacattatacatttaattattataaaactaaactatacaacattaatttgatctttttttcacctaaaggtgcacctgcaagaacagttggttggcatcatcctggtttcatacatacaagttttctcaaagacttgtggccaaattctcagtaattaatctttattatatttgtgcacttcttataattactttgtttatttatttaattacattttgtatgaataattttacaggtacagttatagaatgggtcatcgtttagtgaatggttcatatgtatggagcaaatcttactctttcaaatcctcaccatatcctggacaagac

SEQ ID NO: 272815 - DNA, 609 bp, Cannabis indica
ttacataaaaattaaaataaattaaagcaaataaaataaagtaaatatacaatgtaatttccttccattcacactccatttaccagagagaaattgtgacaccccataattctaaaaatagcttctacaaatagtttttttttatagatggttaagttgacttaatataagttcaacttaactataataataatttgtgtgaatggattgagaggagatatttatatgaattggtgcgatattttttcctggtgaactagtgcaatattttctctttcctcgtgcaatttttttctctctccagtacgtcgaagaacctgctgcgataacccagaagcttctacgaccaacaacgacaacccacaggcgagtcgagacccttctattcgtttcacgtcgatcggcgccgccaatcaacgacggccaccgtctaagattggttcgtttccgtttgtttccgccatcttgaacgtacgagtctcctcttatgtgttggaacatttctgtttgtttttgttagttttttgtttcacttaattcccctttgattagtttaattccattattgtttttatggagttagaactataaggagtactttctttattt

SEQ ID NO: 272816 - DNA, 1255 bp, Cannabis indica
ggactccgtttgggacgttctttatatcattggaaagctcggtccgagctctatttgattatctgtgttttgaatgccattttttatattatgtgaaagtgaaattagggattaaccctatttgtgaaatctcaggttgtgtgacaaggattaccggcagttgatcaggagtacccaggggtttggaatctctgttattctgcgacaataggtaagacagtagtttgcacgtagagtatgcgaggtggcgcttatgttaaatatgatatatgtgagtaattgtaacagagattagggttattaccctaatatgagcggttaatagcctagggttattaccctagtgatataagttgagtaaatgctatgccatgctaagtatatgattatattgagatttaagggttatgcgttcaaggcataattaggttggactcggtaaccataaccgagatgaaccacctaatgccttattgtatttagtcgtgtgagagaaacacgtaggtctatgccacgtagacataaatagacgtgtgagagtaacacgtaggtttatgtcacgtaaacataataggcatgtgagcccaacctgtaggtctgtgacacacagacacatttaaatggcattactgtttatattatatgatgagtatattattgttatgttttatactgtcttgctgggcttagctcacgggtgctctactgtgtaggaaagggtaaagctgtgtttgagcagccatgagtgtaggagctggacaaggaatgtacatgttcaggccacactagaccaagcgggttggggtctactagtgatgtattttgagactctgttttgccgcttaggtcgaccaagggaaaagaacttgtaatagtgttttgtaaatacttttgggatcccaacttttgtaacttttaaattataaggtttaaattattacaagttattttcattccatttattaataaagtttaatttctgcgcttattttactagtaatcccgattaggggattagggtttcataagtttattgggtagcgtgcctaattatttagggcgttacaatttggtatcagagcgccaaggttttttaaacttcctgtagaccggccgaacatgtacattcatcgtcaaagacaagctcgactcatggtgcagtaagtattgagagtaaatactttactgtttatgtgatcatctgtttaccgctttccattttaggcagtatgcaagcatctagagtatatatgtg

SEQ ID NO: 272817 - DNA, 1309 bp, Cannabis indica
tcaatatccagagctattcaagttagaatttgaagacaaaaactcttttaacggggggataattgtcatgaccttatggattagtaaaggcaattagcgttaattattgatatttttataattatgcatgaatatattatgttgtggatcccatatgtagaaatgggcattagacttataatttctcaattctgaagattttattaaactctagaggtattatttgtattatatatgaaatatgcaatttttatgatttttgctcggtgacgagggaaaatgtgatgggtggccatttgagtcacatgggtaagtctagaacctttttcttagtgggataaatattggagataaatagaataccaagtttgagcgggattatggtttttaaacattttaccccaaggcttgaattatcttaagtttaagcaccaagggcattttagtcatttggtaaggggataggtggttggtgggttgtgtgacacctagctagtttattttcagcatatgattaatttaaaaattaagctttgttcacttagaagaaaaatagagaaaaaaaaatcaaaggaaattaagaaactcatcaccctttctctctcttgtgctcgaccaccacacaaccatcaggagaaaccttaattcatcttattttctagagttttagcaaagattcaagagtatttagtgaaggtaaaccctaaaaatataggttttgtgttatttaagctttacatgggattttatcttgtaattttgtgttattgtggttgttagggttattggtcagtttcttggatcaatttaagttagaattgagttcttgcagctggtttaggggtttgttgtggtggatgcacaagtttgagtttgaaaactcaagcttggttcatccatggcatattttaattttggatgttttctggattctattgcttggattatattatttgaggtcaatataggtgttatgaaggttttggtgaagtttggacatgttttgataaggttttggattgcttggggaaacctggtgcaaactggtgaaccggtttgccaggtcctgtaagaccggttaactggttttgggacaggtttcccgagcaatccaattcgttgatttgtgttagtttcagagccttggttgggtgattccttgttacttagggtattgtagtttcagtcgtctatagcagaacctttcactgcaagaaatgtcacttttactagcacagttcgctactgcgctggtaaaaggtaaaagtaacttttaccagcgcatttcgcaaactacgctggcaaagag

SEQ ID NO: 272818 - DNA, 3290 bp, Cannabis indica
gaaagaaaaagacttgtaataaagtttgtaaatatttttgggatcccaactgttgtaaagtttaaattattacaagttttattttcattctgttcattataaaagtttaaatttcgcacccttttgatttgtaatcctatttaggggattagggtttcataagtattttgggtagcgtgcctaattatttagggcatttcattgagcatcattcttctggccttttcttgcttcttctaggggtttcaacgatgctagagggaattcatagtaatgttgtcttaagatgggttgcattagtgccttaacaatgtctccttctatcgtatgcacaccctacctcaagcataatgttgtaattaaggcactatgaggtgttcctgttttgtcttcattttagagacatagtttatattcctcaaaattacccatctaatgtcgaatgtcatctttgtcatgatatcataaacaatgacacaacactcatagtctagtgttgaggcatgccacgttagcataattctagagttgacaaaataagtccatgctttggcctccggattgagttgccactgatatagaaacgtttgattctggttcccctcaacatgcaatctggtcccctcttgcccaagaattattgcaatggcatcatcagtaagggttcccttcttagtgctaatcttctcttgtcttgctcttctcccagtgtgccaaggttaaaggaattgttaatagtatctactgtgattggcaaatgtactcttctaacatagactttgttattatctcctctatagggataattggcaaagaattcatagaaaatattataattagcttaacccacatgctctgcagcacacaacttctaccattgtcttctctcaatttcacctctaatggtctcataacctcagtcccttctaaaaggttcttcttgaaatttaaagcccctcttccaaagtacactcctctttttcaatttttcatatctttttaccgcatcttgattcacaaatctattcacatgttgaggttggtcttcttagggattaggatctcgtgatgacgatccttgcatattttattgggctcgagacccggttctcctagacgcaataccacataactagtcaaaataataattgttcggtgtaaaaaaattgggcatcacctcccctatacttttcacttcccccaaactaattttaagcagcaattcacccctaataatctctaatagtagcaatatcgaatatcaaattctccacaaacaaaattatgccaatatcacacaatccacaagcaccaaactttagtgggaagaaaaatacttacttgtatgataaaagctttgttgcacttgaagtagtcctcttccacaaagagatcccaaaatagatgatgaacacaatgttttttaggtttgtaacttttctgaatttttctaaaaatttttgggtgaattgaagtaatgtgggtgatttttgatgaaattggtgaacgggttgtgtttgtggatgattataatagagattgggtgaacaaattttaggttgaaaggtttgagaatggtgaattttagatttttaggctggctgttcgtggagaaagaggaagaagaaaatttaaggttttgaaataactggggggaatggcatacgtggggggaatggcacgagaaaagctttcttccaggttttttaaatggtgcgcgttgtggccggtgttccctatgtcgtgacctgcctttacgtttcatttcccctttttttctctattaatcctaggggccgcggcccggtcctcttcatgccgcgactcgcctctattcttgttgcttaatgtttttttcacctttatgcctaagcactaaattgtcatgcctagacactactaaaaagttgaaaattgactagttttcacaatttccacagttctacatatctttttctaaaccaaattctaaaattaaaattaaaatttaataaaacctaaaaacaagagttgtaattgtttctaaaaattgcagtaaaaataaaaaaatttgggatgcctcccaagggcactgtcgtttacgtcatttaaccgaactctatttctctaatcagagaggcaccaattggatgacggacttggcttcatcaatgtggccacccaagtaaagcttcagcctttgaccattgaccttgaaagtctctggtttctctcctttgaattccactgctccatatgggaatacttaaaccactgtgaacggtccagaccaccgtgatttcaattttccaagaaaagcttcaaccttgaattgaagagtagaacttgctgtccgggttgaagatcttttctaaccaagtttctggtatgctactttttggtactttctttgtagatattggcattttcataggcctcgttgcgaaattcatccatctcatttagttgagcctcttttctcctgctgttgccaagtccatattcaaagtcttcatggtccaaaatgccttgtgctctaactccactagaagatgacaagtctttccatacccaactatggtgacataccaataggtgtttcaaatgttgtcttataggccagtgcatcatccagcttctttgcctaatcttttcgtgagtgttgaacagtcttctccagaattaatttcatctcccaattagaaactttagcttgtccattgctttgaggatgataaggtagtgcaaacctatgacgaaccccgtaccttgcaagtaaagctttaaatttcttgttgcaaaaatggcttctttcatcactaatgattgctctaggtgttacaaaccgagtgaaaatatttttctgaagaaatttagcactattttaccgtcatttaagtgtgttgctactgcttctacccattttgacacataatccacagctagcaatatgtaagaattgttgtatgatgacggtaaaggacccataaagtcaataccccacacatcaaatagttcaacttccattatacttgtcaaaggcatctcattccttcttgagatatttctagttctttgaaaatgatcacatgcttggacaaatttatgagctttaaatagagtaggccaaaaaaactcactttggagtacctttgcgcagttcgatttccactaaaatgtcctccacattgtaagctatgatagtgagttaatatagagaacatctccttttttgacacacatcttcttataatccggtcagcacaatgcttatagaggataggctcctcccagtagtagtgtttgacttc

SEQ ID NO: 272819 - DNA, 511 bp, Cannabis indica
aacttaaagcggcatgtctgccatcaaaaagttgccaggcactttgaacaaatgagtcaaaaagagaaaattcttcgtaagaggcttagtaatataaagaatattccttaacaacaaagatcctatagcaagcatgttcagataaaactaaaaaggtctgcaccaagatacaagataacaataaaggtgcatacaagcctggcgagtacaagaagaacttggagttggctcttctaccaaaatacaggaatggagaacagctcggtaagtgctctcactagccaacttgtatggtggttcctctaacatttcactgtgtaggaattcacaaaagctagtacccatcactcttcagcgatggcctcccatcactctttagtgatggcctttgcacggtaagccctacagaggtaacaaaatataaaagaaccagtacccattacttttcaacatggcctcccgtcgctctttagtaatggctctacttgaaatctcaggtaggggtagccaa

SEQ ID NO: 272820 - DNA, 1023 bp, Cannabis indica
gagtaaccttcttttctgttgaactggcttgaagttttcgacgttgatgtttaatgcgtgacttatcacggtggggcttattccttccatgtcttcgtgcgaccatgcgaagacatcttggttttcccttaagaactggatcaaaacggatcttatgtccttaggaagctcttttccgattttgactaatttggatggttgttcggggtctaatgacacttcttctaattctacaattggaccaacccctgtatcaatatccccaaaatggggatcaatgtcttcgaccccgttttgggcgagtcctcattggtgagaactacttgttgtagctttgagggatttggctgctttctcattggttgtgatggataggttgtaacactctcgtgctactatttgattgcccttcaagaatccagttccacccttggtagaaaactggacgaggaggtgaaaggtagaagtgaccgctttcaagtcatacagggttgggcggccaattaaggtgttgtagggagatactacatccaataccacaaataatgccatgatagtgacactcttgggggctattcccactgtcaatggtaacttaataagtccagccggcgccataccatttcctttgaatccatagatgagatgttcacagggctccaaatcctttgctcccaaacccatcctttccaatgaggacttgaagaggatattggctgacgaccaattatcaatcattgtcctcgccacaatcatattggccatttgtacttctactaccaaggggtcgttgtgtgggtatcgaacgtgtttggtgtcttcttcagagaacgtgattgactcatgttcatatcgaggttgcttgggagctcgctcctggacagccaacacatcgtcactcggttcatgtcacagagatcgagtgtatttctcccgggattttctggagttcccagcaaggtggggtcctccagatattgttggaattttattttaccaggatcttagatttactcacaagta

SEQ ID NO: 272821 - DNA, 1296 bp, Cannabis indica
aacatttcaacactacaagggatcaactagaattccattatttatcacttagccaattgttaactaagatcgacattgtttggaaaggagttagaaaattttgagctatttctctttactatagaattggaaagcaaaagctatggccaagatcaacaaaggcaacaaaaactgcaacatctttactacaaccccagaagattggtctgattgatgaggaattggttgtggtggcttgtagttttgcttctttggaagagtagaaatgtcaacctctcccacataatacttttccatcagttcctttgcactgtcactgtggcctacatcttcgaaatcatcagttgcatccttctctgcaacaagttggagcataatttcattccacagatttattggaagtgaaatgaacaaagttgaaaagagattgatgggcattaattcatacccgttgcttgttgtaagatttcatcaccaccaggatgttcttccaaaaatggagtcacatcataggcctgaaatagtttagttgttcaacatacattaatacgaaaaaatgagtaacttgaagggcagtgcatgatttgtgtaaactatcaaattgaagcaaagagttaatgttaatgaaatatgaaagaaataaataaataagggcataagaggggttgattagtttgaagagaaaccagaaacacgcatttctctgttgtttttactaaagttcatacatcaggaataagagtacattagaataatgtttttagataaataatggtgatgctttaaaatggtatccaaaccaaaattttgattcataagtttcaatgtatttgattcataaattggagtggactataattacaaactgtaaaaatggcgatccttgtataattttgtgaacatagatgtcaagcttggtggtccttagagccaattaggccacatgtctccaagaatcagaaaatagcatcatacacatcaaataatcttctgtaataacttttgacactactagctatgcagaaaaaaaaaaaaaaaaatcactatagctttgatatcttttctcatttacaatacctttactaataatccaagtctctatcacatccactatacatatacacaaaatttattttgtttttgtgtacaagatttcgactttaagctaaagccaaggcaacaaaaactacacataaaaagaaagagttatagcacatgttaccagcaaaaggacttaaaaaagaattctatataaaaatgaatagagacaatcagaaagcaatcgatcaattgtgc

SEQ ID NO: 272822 - DNA, 673 bp, Cannabis indica
tgaaagcataaacatccaataatcaaaaaaattattggcccacaaagtagttcataacatcaacaagtaaattacatataaatataatctcaaatgatagaataagaaactcccactaacccaaatgtacaaaagattataaaatactcatatcaataaacacgtttattaaacaacatagcacttaatcctttagttagaggatctgcaaacagcaacttggtcttacaatattctatcataatgtctcattttttgaccaagtctctaatactgagatactttatttccatatgttttgaagcactactaatctcattattttttgaaaaaaatacaacaatattattatcacaatagattagtataggagatgaaacagaatcaactagtcgtatctctaaaatcaaattctttaaccataaagcttgcaaagatgtctcataacatatgataaactcaacatagtagatgatgtgattaaagtctatttaatactttttcaagaaatagctacaccagcaaaagtgaatatatagccaaaaattaactttaaatcatctacataaccaccaaaatctaatcatgaataaccaacaactcgaagattgtcgatatgcttatacacaagcataaaactattcgttctttttgcaaatatatcatgactttc

SEQ ID NO: 272823 - DNA, 1028 bp, Cannabis indica
agatagcaaaaataacaactaaacaggttagaaaccagagaaaataaaaacaaattagaaaaaaaattaattagactgatattgatgatttttcagtccctagaaacgacgccaaaaacttgttcgtttaaaattgatacgcaagtatacacatttaaatcaagtaatataatgataaagtagagtatccttctcacgaggactgattatcaattaccaatgaattaatttatttctatttgatcaattaaaaaggtttagaaaaataaataaagcaaagcaaataattaaaaatttgagaaataaagaatgagaaaaacaaggattattataatctccaactatcctttcttttatttcttaatgcaattacccaatatctcttcttcctattctattgacaagttatattaagtagttcataatctcattaacacttacaaacccaatataggtgaaaactgcttatattcctacggtaaagtttaatcacaaataaagcagcaaacatgacaacacataaaatcatacaaataatctagacactttcaccttaaattaatttgcatccataacaatgaaaacataatcaaatctcacttttttaaaattttgattcgaattcacagataacaattataggtgatcagtcaataatttcataattaaatcaaattgcatggaattgaaataagagaacaagaagaataaattaaataactacattactccataaaagtaaatcaagtggttcacataaaaatcctaaaagaaaattagctcataaaagtcattctaaaacaacaaagattaaattaaaagacataaaagatagatacatatgagaaagaacactaattggaaaactccaaaagtatcttctacttccagtcgttctcctctgctccaattttgtctccaagtttgaattaactgaaaatcgagctccacacctttttataaaccaaaaacagtaaagtttcccaaaaaccgaaaatgctacaacataaggtgtaatgtcgcgacat

SEQ ID NO: 272824 - DNA, 500 bp, Cannabis indica
ttcctaaatctctcatataaaggctccatacggttaccaacaacttgttgctctcctggcaccgcagggaccgcagcaggcggttgcaggggaagctcaacaggagcatcccgttgcctgagtctccgaatctcatcttcttgttgcgcaattctggcttgcatctcagtaaacctttgctcccaatcagccggagcctgaggtggatcctcttggccacctctcggagcacgaccgcggcctctaccgcgtccacgggagttttggggatttctaccaccccgaccacctccggtctcaaccatttcaccctgccttctgacgtttcactgggcgtccattattaggacttagcctgcgaacacacaaggcatgcaggttagacagtggtcaaaatattcttaagaccgcatttagagtttcaaaacatcaatttactcatatatgcaatgtatcttaaatagcttgtaaaaaaataagcttacagaatcgtgagttga

SEQ ID NO: 272825 - DNA, 720 bp, Cannabis indica
caaagattgtacgctccaggtctaaccaccctgacatgtaaagtcttcatccgctcgctctcacggctgctcagccttagccttgcccttacctacacatgcaaacaatatctgtgagtcgacagactcaataagaaaagcataatcataatcataaatataacctgaattataattaggcgcccatacactcaactataatcttatccccgcgtccaatatgctactgagtctagaatgttcgtacgacaatactactgaccataatattagcctatactcggtactctagtcatacttcaggcgtaccgatgtgatagcatcgatcagtatttgagccaaacatacatctatcggtatccaatacaacttacatgtattgataccgctatcgatgtaatctaataggcttaataaacatgtacactaaacatgtaaacacatatgcatatcattatactagtcatacctgatttctgagttcaggtgtgccgagaacctgagtggaacagctgctcgacgatttacaggctcctaaatcacaatatttgtaaaactaatgagtgatgcgctaaattactttttggggacttaaaatcgaaactataagtttccctatcaatggataatatggtaataccctaaatattgtaaaaattggaaaaactagggtaccctaaaatgcccaaattagtagactgttgttggaaatattttacc

SEQ ID NO: 272826 - DNA, 3476 bp, Cannabis indica
agaaaaggagcagttagggaaagctaatattttaaggtgtaggtataatacaggactgtgtgatatttctgtattatgtaacatactaacactgatcaacatgagctacctgtattgtggtgccttgctgtaaaaaaaacagcattaacaattcttaaatgtgtttatagacctgcttttctggcatttagtctaatttgagaaacactctttttacagtgattgaaacaaagcaggtaaaatattggaggctataccagaaagtttgttaatgaaaaactaagttgtctgattgttgtggaggcttgtaacattaatgatccttaaggaactaataaaagtgaactataagtacacctaatccacaagcttgttaaaaaaaaaagagccataaacaaaagaacaagaagtgaacataagaacgattataacaatgttaaatcactagaggatggtcaaaagagagtgtttcatgtgtggctataattctttgcatatgaaacaaaagtactataattcctctatgcaagagtacctgaccaatttctagcacagacaaatgcctcaattgtctcagatgataagtaattgctagatgagttaagaaccacaccatcactgtagaactctgattctgaaataggaatagctaaaacatcttgaactatcatgggcaaaatcttacatttatagggacaatccttccaccaattcaaaacatgaaaatcatcatcatcttcgaaatattcacaagtgtttgccaaatatcgatccactgctgttttcaatccttttctctcattttcttccctcataaacctcatgaatcgtgcattaacagttgatttaccattattgatctccatgtcacttttcttagatggagtggagtagagcattgagtaatgttcatacaaactttccagagtcttcttagctttctttgtcatttcatcagccaaaacatcaccacatatgttatgcaacaacattctcaaacccttttccttgcagcgtggatcgagcaatacagcaacaaacaacaaaggattgacatgatgcatattcacccaatgcttgttaaaattttctcttatgttgtctgccatcttctttgcatgaatatccttactgtcactccaagattgcaactccatgtggatcgattccaatacaaacaaaaataattctgcggtggcacaaacttctttagaatatcccattgatgcattgtagaaagtcttcaaatgatttacacaagtgtgagcaatttcccaatccacacaagtaggagaccttcctccttgcacaaactcgtgaaagtaatgttcatcttctttctctagacgctcaaatgctcgttcgaattctacaactaccaccaacattaggtaagttgagtcccaatcgtttgaaacttctaagctgacaaattcttctgaaataatcttctcttgctcaacacatgccttaaatttttgtaatctgattggagaggccttaacatacttgaccacattcttgattttagtaattgagtcatgacaggacttcaaaccctctgcaacagcaagatctaggatgtttggaaaacacctcatctgcttgaattcacctttaaagactggtgtgattctttcggacaagtatgcaacaactccattgctaaagcttgcattgctaactgtcacagtgagtaccttctcaatattccattccaataaagacatctcaactgtcttgccaatagtctcaactttgtgatttggaacttgacaaaactttaggattctcttttgcgttttccaatcactatctacataatgtgcagtaagacgaatgtaattcgatctttgcttagatgtccatgtatcgatggataggcaaacacttcgaaaagaatcaaccaaaacgttcttcaacttgttcttttctttaacataaaggttcaagcaatcacgtgcagctatgacacaagacgggactcgaaatgtagggtccaagaactcacaaagatgcttaaatgttttgctttcaacacatctaagatgaaactcgccgttgatgagcattctagcaatgagttcccttctacttttagcttcacgagcataatccatacgacaaaactgaaatggggcctcacaatcaatgggatcttcttgcatttttgaacaacgaccatctgagactagtaatgagagagatctagatgcctttctctttctcacactttttggctcacaagaacaatcatgatgagatgcatcaatattggttaaaggggtttcaccagttgtaggttgttgacctatagctggttgagaaattctggtatcattgcaagttgcagaagtcatctacataagtggaaacaaaaagtgcgtcactcagttttatagccaaaatcaaagttgggttttgataactataaaactcaagtctcattacttagataacaaaaaaataaaataaaagaatgaatcacaagaagtagaagctaataatagtagcaaatagatagatagactagcccaatagtactattaaaacgaccttgtactgttgtacatcaccaaatttattaatcttgagaggaaatacattaattttgaactaataaagattattaaaatgaactttgaacacatctgataatatatgaaatagagggcagtagccaaaaatggatatgtagctccaaaatgtcaaattttcacctttataaaccctttatcagcctataagcttttctgtctaaacacaaatgaatgtttctcaacttgttctatatgtagaaccaaaaaaaaaggaacacttaatccagattcctctcacttcattaagtgagattacaagtaaaagactattaatttaacccatgtatcataatacagttcagtgaggattatatattacatgaaaatatgggtttgtaccttaatgggttcctcttctctcgtttgccaaacgaaagtgtgtacccagaaacgacaaagtaacaagcttgaagaaaacaacccaggcaggcagaagatcataccaccgaatttgatagaggaaaagaagcgaccatgaataacaaacaaaggggagggagagaggcgggtaaaggttccctctcaaatatttaatttattagtaaagaatttgtttttattaatataatattttttaaaaaaatatatattttaatgcctaaaattttatttgttttttaatttgtaagcgtcataactacttaaaaatttgagtttataatcaatataaacctaataatattatttagctaagtaccaaatgttaataaaattgtaatttttcttattagtgacttcgttagtatcttaaatttataaccagacttagttttcggaaaattgatgataaatatttctgtccagagccaataatttaaaatagtagaatttacgtggagtatggttttttaaaccttttatgataaatatggcata

SEQ ID NO: 272827 - DNA, 892 bp, Cannabis indica
tatatcctctgttattgtgtgtcctttttttatatattgttgtttcttgatatcagaatttgtttatcctctgttagttaattttttatgtatgcattgttcatttatgtttatttttcatagttgttgtagtttatatgtttaattgattttactattttgttttttcagttatgggataataagtttggtaatgaagattttcataccacacgggtgacttctacttgctcgtttagaattattgaaactatcatttctattttgacccctgaacagaaagaattgtttggacaaactgtttttggagtctttttaagaactccttcttatgttatgcaacaccagttgttccatagtttatttttgagggaggttgtccagccgaatgaaaatgagatgtggtttaatgtagctggtcggatgctaaggtttagcatagaggagttcgctttggtttcaggccttgattgttcgggtcaatgtgacaagttgaggtataaacaagacaaaaacttattgaaggagaagatttttcctggttttaaggaaatacacaagaaggatgttgagaacgcttttattggtaaaaggtttggtgatgatgatgagcttgcattgaaagttgctgttttgtactttgttcagtgttttgtcttaagtgattcagactctaaaaaagtatctgatttagagttggatattattgatagtgggaggtttaatgaatatgcttggggcaaagagtcttattctttatttcttgattcggtaaggaatgcgatatcaaagaatcttgtgaaaataaataaagttgataatggtgagagaattggtttttataggttgagaggtttggcatatgtttttcaagtttggttcaatgaatgtt

SEQ ID NO: 272828 - DNA, 1202 bp, Cannabis indica
agggtttggtaggattttttagtgaagaagaagaagaaaagaaaaaggaaagaaaaaaaaaaaagaaaaaaagaaaataaaaaaataatttttataatttatttatttttataatttttaagttattacaaaaaaagaaaaagaaacagaaaaaaagtaaaaaaaataatttttaattttttttctttcagatttttaaatttttttaacttatttataattatttttaaattaatattacgtacgtggatcactaaaaatttggcatgtgtacacacagtccaacgtgatatttaattgtgctttttggacggaagggtaccgagcaaaacggaatgagagtatagttttacccccaaaaaatcgatttttgtagttaaatgttacaaaacataaaattcaagtagtttagccgtcaatatttctactttaattaaagcacactcatcaactttatctcaataattattagtgttttgtgtagagaaacactatttaaaaaaagttataacttaaattttgctcatttgatggaatattagttttactacattttttttttctatatattaatttgaagaataagtttacctcaattgatgtgagtggtcttagttttatgtaagtactctctatatataatattcatgctgtaatagtctaattctatagttcaatattattatatatcattcatttttttataatgtctcttacttctccttatctcatatttccttatatcttcttattatttaaatgtattaccaattaatataaaaatgtaatatttaaataataaaagtttgaaatgaaataaaataaaaatatttttttttttacatttacttgaaaagataaagtaggaaatatacttcttataaatagttccctagacttatgatgccttgctacaataatttttttttttttgttaacaatgccttgtctacaataaatgagtggttagtttgttccaatatttagggtataaccatctacttggtttctccaaatacaacgagagatgatactacgttggcaagtgtcaatttgattaataaatataatttattgaaaacactaacatattactaaaaatatctaaaatcaatgtatataatatatatatatatatatactagcaaaaagttaactaaatttatgctagtttttttctatgttatttgaaagtgatacaa

SEQ ID NO: 272829 - DNA, 839 bp, Cannabis indica
ccaataatgaatttctcaaatgatttttattctgaaaaacagtcacgaaattacaatatcgagctttcgagaggctcgtctctccaaattcccaatctttcgagaggattggtctctccacaaagagtctactcttatctaattccaagctaagctaaatgaggttgctccctctctatttataagcattggtcttgaaaagacttaggccacctacgattacaattggaccaatagaattaaaacactaagacaactcagcttgtgtacataagagactaagcatttcatttaatcattttgtgatacataagataagtcttaggcttatcaagttcccagatgatatgtcctgtttgtataagttctttgtcagagttgtaatattttaacgtgctatctttttccttccatcctgttgattggccaaataagtagtcttagctttgtgagaggtatgattgagattgtatttttgggagactttaaagtgttttctgtggagtttccaagttttatcgaaagactaggttgtactttgttctgataattttttttactgttcaataagacttttccaattcatcttcctatttttctgagttgtgtacaagtctatcatacttgactttatattgattatacaaaatactatcaaactatcatagcacccagaaacatgtcattggtctatcagaaacgattttaaaaatagccgtggcatgcaaacaaaaaactccaaaggaaattaactacatgttgactatcacattaatatgatcaatgcgataagggaacataacagccgatgaaaatatttcaagtgcaagtattgatac

SEQ ID NO: 272830 - DNA, 803 bp, Cannabis indica
cctattagatttagaatactacttaattttaatgttccatgtgtcccatggcctttttagaacactactttattttcatgttccatgtggcatgtggcctttttagaacactactttctttttttcagcctaagggccttcatgttcgtatcattggcctataggccctctatttttgaatatttctattgtttggccctatttcttttttatcatggattgtgtgaccgagcaggcggtctttaatcctagctatcttcttatggccttgacaagtaagtgtccagatttactttgctaagtcaaactatgcctggacgacttagaggcacgtttagtagcttatactaagcgttaaaatttctctgcataaattcacagtgtgggggatagagttaattgtacaatgcatcgaactagcacaaagaacttatctagagatattttaactaagagtataaccccaaagtgaccaggcacacaagtcttttggtcacatactattcatcaagttttctaaatttgcgttggttctatcttgtgatggtaccatattacgcacgtggaactaaaagagtaactttaagaggttagtctatgtgaaagtagtttagacacaataaatagaatatgaagattgttatttattcattaatttgtctttgttggtgtgcaacttacataaattgaatctacaagcttacatcacacaaattttgcttctagatgtcaagtggctaaccctgcttgccttgtaaagcaaaggccaccatttaagaatggtgggagtgttgggttttatg

SEQ ID NO: 272831 - DNA, 894 bp, Cannabis indica
agttactattcagatcgtattaaattttttcattcgtaggtttgagagagcgatagacaaacacaagtaaacggtagtttaattagaagtaattggtaatatataatacgttgtattttatgttggagttaaaactgttatcgtgtgagggactgagtgcacgtttcacatttgactcctctcaatataaataatgaataattaattaatgaaaacggcatattcattttctgtataataaaataaaaagaataaattttgtattaatctattaatattgaaaattgacagatatccatatacgcgttactgactgagatttgtgttttgtagatacgaagtctaattttttttctttttattttgtcattaatggaaattgaatagtttagtaagatgttgttgcatggggcctaatatgaacacggctaatagtatatatcatgaagatcaatcaacttgtataaaaaaaatatccaatgtgtcggtaatttttggaatatgggcattggccaatgatttccagcaccaaattattagaaatttctcttatttccccccaaaaaattaaactttatttgattgcgacccgtgaaccgaaatctagccgaggagataagaagcatcatttataaatatataatatgtatttgtatagatatacctacatcttaagggcatatcgtgagtaattaagtcacttctcgattccacttggactaatataaagggagaaagtattatataatatactacatatacaactaagtaccccacatatagataaaatacatgaaatctaatggatgttgccaattcatgaagggaatgattgaagaagaggaattaagatactccttttcttttttttcctctattattttctttatcgga

SEQ ID NO: 272832 - DNA, 902 bp, Cannabis indica
gaagtgcacctaccatggggcagcaggcagcagcagcataggcgctcagcaacattgggggatgttagctgagcttgactacgtgatgggcttagatggacgtgactttgcatgggcatgcatgcaaacggttactcagacagtgtgcatggtgacacacgtgaatgacggttatcggaagttacctatgtctatccaaagacatgcacgtgggcttaagtaatctgttggaggacagatgcatggaatctaggcgagggcttggatggctgacacgcgggtgttagttagtttgcatatactatgctgatgtgtaatgtgctggggtgtccagcatggcctaggcggttggggatgtcaaccgcaacctattattgtgttatatagtaggctatgggcgcttgagtcatcagtgtgtgatgtccagcgtgaacattgtgtaatccttgatattgtgtgaataacaaggttgggaaaagggttttctgtatactgtgtgttcttatgcttgtgtatgcattgacttgatagcaagagtgtgttgttgagtgacgctgggtaaaagtgaaaccgtgagtgtgtgtgcatactaacggattgttgggttggctgactagattcgggtgaatctaggccatcgcagggaaaatttgagtgtgagaaattagccttgtgacagttggagaggtcaattctcatagtttttttttaaagaaaaaaatatcatttaaatttattttgtaattccatttaattgcatgactatcatactatatttgtcatcgtatatactttttttgagttttgatcctttatagtttaggatgagctaaaattagattgattattttatgaacacttttaaagcgaatacaaaaagtaattagtgataagaaactaat

SEQ ID NO: 272833 - DNA, 583 bp, Cannabis indica
tttcaaagggggcatgttccacaccaccttcttgatttcctccgaagtcgggggctgacttaaaagggtgttctcaacatcagaaatacaaggctcaataagatcttaaaactcaaagttgaagtgcggattcgtggaagtgaataactccatgaagtgattttagaaatagtctccaatatgatccctcccctcagtccaagaaccatcttcctttttaatagcccaaatgaaatttcttttacgtctcaccgcgatagaagcatggaagaattttgtattgcaatctccttccttgagccaattttcccgagacttctgcttccaaatagattctaggcgtttttcgacttcatcaatttcaagcatgattgatccttccaattcaatgttctccttggtgggaattcgattctgaacatcagtcaagagacgttcaagggcctgaagtttaaattggcaatgtccaaacacttctctattccacttgctaagggcctgagtagtggaatgaagtcttcgacaaatcataaaactgtgaaagccatcaatcgcaatgtttcaagcctcatcaatgatccta

SEQ ID NO: 272834 - DNA, 1396 bp, Cannabis indica
tcgttatgatatgaattaggtcactatagtaaacgacatgttaataaagacaacttcattcatattgggtccttgtcacatataatctctattatatacagcacattcactttgatatcatactacattcgtaatccgaaccaagattacttgcaccaaagaacgggcatcaatgaaccgtactagcaaccattgattaaagattcgcaaactttaatatgttgctgactgttttattcatagctaagtggtcttaattctctgtatagctacaagccacaatctcatatatgaaaaagcaattttctaatatttaatataaataattcaataataaatattaataatttaatattcaagcatatatcaaaatgtttaactctttatttaataattagaaatatctttatagggtgttaaaggcataaactctaacaatctcccacttaccctaaaagcaaactgggcatcttccttattcccctattagtaatatgacccatgaaagattttgctggtagcgtctttgtgaatggatctgccaggttatgttccgacgcgaccttcaagactatcacatcacctctcttcactatattttttagtagatggtacttcctctaaatgtgcttgcttctcttatgactccttggtttcttggagttggccaacgctccattgttgtcacaatagagcactagtggttttttttacttttggaactacttccagagcagtgtataattatttcaaccaaactgctttcttagctacttcacaagctactatatattcgactttcatgattgaatctgcaatactagtttgcttaatgcttctctagactacagctcctccaccatgagtaaatattgacctagatatcgatttttgattatctgtgtctaattaaaaatcaaaatcagtatatctagttctctaccgaaatatacaagcatgagatctctcgttctctaaagataattgagaatgtgctttacagctattcagtgttccaaacctagattagattgataacgattaacaatccctatagtagcatatgtcaggccttgtacacagcattacatacatcaagctcccaactgttgatgcataagggtactttctcatgtcatcttcctcttaaggagtctttggacattgatccttatataggataactccatgtctggacagtaattgtcctttcttggaattctccattcagaatctttctagaaccttatcaatataagttgcttgagaaattgctaatgttctctactttctatctctatagattttgatcccgagaacatagcttgcttctcccaaattcttcatttggagtttttcgactaaccacttcattacatctgataatcgttctaca

SEQ ID NO: 272835 - DNA, 773 bp, Cannabis indica
taacttttgttatttttttacaaaaatactgccaggcggtattttttacttttttactgtgcttttttataagtttcatactaacaagaatactgtttatagctcacactctgttacagttgttacagtccggtttttatgggatttagttttccctttttggcagcctttataaggcctttattcattgtattttaattcattcattcaatatcaataaaacactttccctttcaatccgcaatatggtatcagagcaaggaagatatgcttcctttcatccatgatttttccgatcttctctcgccgtgcttcggtctttcttctccggcgacgtttgatgtccagacttgaagaattcatctcttcaatcaacaagtctatccctcctctattttctttcctgcaaagctcctttaatttcctgttttcctattttccgattgaatcatgtctaacaatcaagaaacagaacatgaagatccaccagctcaattcaaccatggcgataatcaagttcatgttcctgaagtcagaacagatggacagataatgagatcaagaaatcccatagaagacccatccgatccctattacttacatcacggagacaaccctgggaatgttcttgtttcccagttgctcactggacaagaaaattatattgcctggagtcgtgcaatggaattggcaatctctgtcaaaaacaaattagggttcttgaatggcaccatacccaaaccccctgtttctgatcacattctctacaatgc

SEQ ID NO: 272836 - DNA, 3473 bp, Cannabis indica
cggtgggagttaaactacgtctctttttgtaaaatcacctcccctttctttattggatgtatttttgaatttgttagtagacaatgtaattttatggcccataatgtagtcaagtgggctttttcccatcagaggttcagctctgggcctctatcctctatgcccgaaactatattttgtaatgaccgcaagatctgactgtttttaatctaatgtatgcacgcttttcttaaaaaaaaaaagtaaataagaactaagtaacatttaccagctaattaaagaaggaaagaaagaaaaaataatacaaaagagagactagtgaaggaaggattagatgcagattgtttgtttagtctgtatgtttaagaaaaaaaaaaaaaaaaaaaccttttacttttttttttttgtttacattttcttaccaagctaaaaatataaaatatgagcttaaaatacttattatataaaaaaaaaaaaaaaaaaaccatatattttgatttaacatttataaactatgtaacaaataattcatttaccgaacacatataatatatatcagtttcattgtaaattatatttgtcatatttaatctatagtagattatttgtgaaatactgttttaaaaaaaaaaaaaagattatttgtgaaataacaaatagtactataacagtatataaggtatccaaaacacaatataagatatctatgaagtgattttttattggtaaacaaaagttttcattgatctgaaaaaactttactgacaaaatccttcattacaattatctataaattattagctctttccatattacatattaattaaatgtatataacacattgtggtgtggtaacttcaggaaatttcattaactaactacacactagccaaataggtgtggtacatattgaattggtatgtaagaataagaaaaaatgaacaaaaactatttattagaggacgaccccacaaaagaaggtgaagaagccattaaccatccaaaccctctagtccaacagataaggcaaagatagccccaaaacttaacatccatcacacaatttcccctatcacacacacatataacccctttcactcttgacttcatccccccaaacacatagttgatacttcatcctctgaccccagcactacctatggccaccatcactgccgcttcagcagcttccacctcatacttcttcggaacccggatccacaaccctgcagccggagcctcctctggctccaggttccaagcccggttcagcttaccattcggaaagaagaaggcaccaccgcctcctcctcctcctccatccaagaaattttctggcaattctagcgatgatcgcctagtgtggttccctggggctgaggccccagagtggctcgatggctccatgatcggggaccgcggtttcgaccctttcgggtttgccaaaccagccgagtacttacagtacgattatgatggtttggaccagaatttggccaagaacgtggctggagaggtgattggtgtcagggttgagaccaatgatgtcaatccgacgccgtttcagccatattctgaggtgtttggaatacagaggtttcgtgagtgtgagctcattcatggaaggtgggccatgttgggagttcttggggctctttcggttgaagctctcactggtgttgcatggcaagacgctggaaaggtaatagctactatatttgcttattattacaattagtctatatatattaccttggtttaaattaagttaaatctgttaagacctttatatcgctattacgagtcccacttataataataatatgatcaatttttagtgatgattaaaataaatatttcaagagagatcaaaccttaaaaattacccattgaggatgatttttttggcggcatatacgtgtatattatgccctaatcgcgtcgtcttgtgtaaataatcctctaaaaccaaacccctggcgccacactttttccatcagtcgtgtcttcttctcagtcatataatatatatatataaataaaaataaaaaaaaaagaaaaagtgtggtccttcataatcataatgatgacaaggaaataatcagattccgacaaaagatatttcattttgcttttgattttatttgttttctatttagaacgtagcttaatttatccttttgccctttaattttgtcccgaaaagttaatgataaagatgcttattagttattatgtacctatatatgccactacataataaaattaatgtaataataatgaatgaaatttgttctataatagattagcttgtacatatacatagaaatcactaatatgatcgtaagaatatttgtaattaagttaataatagattattaattaacatattaatttgaaagaacaggtggagttgattgaaggatcatcgtaccttggtcagccacttccattctcattgacgacattgatatggatagaggtgttagtaatcgggtacattgagttccagagaaacgcagagcttgacccagagaagaggctgtacccaggtgggcaattctttgacccattgggccttgctgccaaaagcccagaagagttcgagaggcttcaactcgctgagatcaaacattctcgtcttgctatgattgccttcctcactttttgggattcaagccgctgtaacaggcaaaggccctattagtttcactagcaaccttttactaagtgatatatataatacatattatgtatccaacaagttactactctctctctctccctctaattcattcatatctttttctacttcaatcaaagtacgtagtgcactatatattacattacattttatatatatatatgatttttcttgtatttatgaaatgttataatttatctgattttacttatgtataaacatatatattactgttggccagaatagttgtttatacttaaaaatacaatgattaatttccagttctatgaaatttgaatcacgccctactacccacaaaaaaatgatgttgagctaaaaaaaattgttaggaaataatgcacatttggtagctaatattgttttagttactaaatttttttggtggctacttcgtagctaaaactcacttgctgaaagtttttgctactaagatagtctgtagcaaatttgctactaataaatttgtagcgaaaaatattgattttagtagcaaaataattctactaaaaattttttactactacatttcggtagcaaatcaattcaaaattggtagctaaccaagtttgtataattaaaataaattttattataaattgccataataattttactaccaaaatttggcagcaaatagtaaattagtagcaaatacaactttaatacttaaaaatataataattttgctacagaattctattacaaaattaaatttaaattgaattatatgtgattttccaactaaatt

SEQ ID NO: 272837 - DNA, 665 bp, Cannabis indica
ttcaacggttattttttagttgttccactgttattttaattgttctattttgttattttacggttgttttataaaaagacatatttttataaaaaaaaatccatgtggcagtaaaattgtaagcttttgtccaaaatctaatatttttgtaaaagctcctataaattacacttatacttaattcatgaagtgaaaagtattgtcactataaaaaatcttacttttagtcacaataaaatttgtaactaaaagtaaaaaaattgtgactaattaattagaaattattattactatgttgtgactaaaaggtccgtgactatatgtattagtcacaaaaattacaatttgttgtgactaaatgtatttttagtcagaatacttgttgtgactaaaattaaattagtgacagcttgtgtctaaatactatgttttagtcataaataattttttgttgtgactaaaagtcacatttagtcacaaaaaatttatgttgtgactaaaaagttgtcactaaaaataataattatttgtaatgtgtttaaatgtaatttgtagtgtttatattacacttagtagctatcaaatttttttttacattgttttagtaattagataataatgttatgtgatttatcaaaaaaaaatataaattataataataatat

SEQ ID NO: 272838 - DNA, 2094 bp, Cannabis indica
gtgatcaacacaagagttacaaataacaacaaatcgtaactcctctccaagttacaacatgtaggttacttaaaagtgtaggttaaaaccataagttacacatttatttaccatacacttagcactacaaaaaatcttacttttaatgacaacaaattaaactaattgtgactaaaagtaaaaaaattgtgactaattataaattactattcctatatgttgtgactaaaaggtccgtggttaaaagtattagtcacaaaaattaaaatttgttgtgactatatgtatttttagtcacaatacttgttgtgactaaaattaaattagtgacaacttgtaactataaatactatgttttagtcataagtaatactttgttgcgactaaaaattacatttagtcataaaaaaattatgttgtaactaaaaaattgtcactaatatacttattatattataaaataatataacatatacaatgtgaaaaaagagaaaatcctccccttatttttggtacgaaaattgttgatttggaggcgtgtaacatacattaatcattagtattaattatgtgtaaagacgtcaccaaaagatgtgcatgcatatgcatgcatatataattaagcatgttgaagattatatgtataagaagttaacaagagtcgggtagatttgaaagtcggcagatttgaggccctaattataaattaagctctgtggagtacttgaaatgagtaaggtagtacacttgtctattcatcatatcataaagatcatatattatagtgattaccctttaaccctaaacttgacaaaaggacaaagtaaattaataatattaattaagttgaaattcaaagattgtgactaatacacatttttcacaatcacaatcacaatcacactcacaaatcccttcaaatcataaaagagatgcacgtatgtatttatatttcgttggaaacatctatatatatataatactaatatttatttttataataagggattcattcatctgtaacttattttccaaggagaataataatgcagctacctactatagtaacttgggaaaggttgtgtcaaatcgtttcttttctaaccccacgtccttctcatcaccctattcaaaaaaaaaataaataaataaaatattttgaaattgatctttcggagtggccattttaatatctggtctttcaacaagagcaataatttagatgtagaatataataaccttcgactacagtcccttaaattatatgaatttaacgaagtagtccttaaattataaaatttaataattaaaattataccaatataactgaaattataacattatatattctagagcattgatttttttttaaaaaaaaagttctagagcattgatctttagctattttcaaataacttgcagctaaaagagttgcacatttctaattttaaatgggtttcagctcataataaaattctaacaaatctctataaaaccctaatgaaatacaactgcctcagttgtaaggaaacccgaaaaactctaaagaaattctcttcactacaaaaaatagttatttttagtgataactgtttagtcacaacataaattttttgtaactaaatgtgacttttagtcacaataaaaaattacttataactaaaacatcgtaattagatacaagttgtcactaatttagttttagtcacaacaagcattgtgactaaaaatatatttaggctcaataaattgtatttcttgtgactaatacttctaaccacggaccttttagtcacaacataggaatggtaatttatcattagtcacaacttctttacttttagtcacaaattttgtcgtaactaaaacaaagaaatgtcacgataaatcgatattactccattctaatttcttctcaataccgtccaaggaaaatcctgaattggatcccaaattgacgggtaattagtgtgagcttatccatacagttatacactcttcgaataaaaatcttttttctaaaataatttttccctctctggaattttttttttctctccctctttctaggatgaagttgaagaatacctcttt

SEQ ID NO: 272839 - DNA, 553 bp, Cannabis indica
gaattgttaaaattactaagctaatggtcaaatcatctcaattaattgtagatctgaagaactaatacagaagatgaaagaagtattagaatgcaaccaagaaaactttgacctacaactgaaataccaagtaaaagaaggataccaaccgtcgagaataaatgacgatcaaagcctataattctacataaaactaaaactgaaggaacctgacttcacaacgtatccattgtgtgtgaacgtggtcagcaacacaacaacaaacaataatacatccttcttggaaatgagcaactcatcagttgcataaacaaatgcaatagcaacaacagtagacaatctaccaccaatagaagaatcaacaactcaaaaataaacaatccaaggcataatgttggaaaatggtgaaacaatatttgacttcatggactatgcgaaactggtggctgaggaaatagttgcacaactagaaacaacccagacagagaggcaaaaatcattgattatgacaaactaataatcatagatcttcattatcatgaaatagaagaag

SEQ ID NO: 272840 - DNA, 577 bp, Cannabis indica
gtaagtatggtttgtatttgagatactaaattcttatgatctttgaaagaataacatggttatttgtcctttttatgaatattggaaatatgcatgcattagaataacttgatttttgtataatattttagttttttttttattttaaaaaaaaatgataattttttttttttaaaaaaaaagagtgtcgtgtgacttgacttttgagctaagaaaaattggtcatttgtctttcttttggtaagtatcaacatgtgctttatttgataaatttttgatgagtttcctcttaatatttgatttcttattctttatattttgtttaattgttgatcatgattgtttttcagatcttaatttttggaaagtcttagtttctttttgtctttggcccttatagataaacaaatagggggagtatttgggattttaattttgattgcttactcaactgtccaggcggagttgagatttgtgtttgtgttcatctttggtcaaagttagcctttcattttggtttaatgttgtgcttttcagggggagcttttatatttgtttcgctaactttgttttgtag

SEQ ID NO: 272841 - DNA, 786 bp, Cannabis indica
tttttttttcaatttagaggaagaagtagaataaaaggaaaagaaaaagaaaaaggaaaaaaaaaatatatttttatagttaattttttttataattttaaattaattttataatatttaataattaatattacgtgaaccactaaaaattttccacgtgtacaagtgggcaatccactgtggcattcaactgtgatttttgaacggagggatacagagcaaaacagaatggtagtttagatagtcttaccaccaaaaaatcaatttttatggttaagtgttaaaatatataaagttcgggtggttttagctgtcaatatccctattacgtgcaatgcacgtctacttagttatattcttaatttttattttagttatgtatatttttagttgtataattacttttttatgttatttaataaataaaattagtttttattaaaatgtttaatttaagtattctttataaaaaaaatataattatattcaaaatttattgttaattatatttttaatttaattactttaatacttttaattttataatatttttttttattgttttaaaaatgtcatacactttcttttttattttaacaaataataatagattttttttgataaaaaaaataataatagaaagatatttttttaaatatgtgcaatgaatttaatttaatttaatttatacaatataaaaattaatgatatataaacacatttaatataagataattgacatgtaaaaaaaaattaagataattgataaaggagatatggtaatga

SEQ ID NO: 272842 - DNA, 1432 bp, Cannabis indica
aagtgatgatgcttatgatcccactagatatgtactattattagaattggaaaatcgacaactccagcaacgcttagccaagtctaacaaacgaaacgctgagttagaaagagaggctgcagcggccagggtgactcaaggaaacaatgcacagaattaacctgatcttggagcaagaaggccacgaagtagacctcagggttcaagaaccaggaggcaagaaacaaatcaaggaaatcccaaaacacccaggatgagcaacctgggggaactagggatgttccattagatgaacgacaaaataatcaagcacctcgtcgagaagtacctcaaagaccccaaggatttacgaatcagtgaaatgaaaacaatgatgtgccagaggcttctcatagaaacaacaacataaggcaaccccaaactaaggaacaggaaatccatcgtaataacgagagaaatcatgggactcaacctagaacaagtgggttaccaccgagacacccccagcgtccttctcgatttgaaagggaggaggcatatacgtacctaaacagagggcgtgtatctaaccttttctgaaggagaaggcctgtgcaagacgaggcaagtttctggctcgggacactcgaggtctcgggggcaaagtcaactaggaagacaaatgcgagaaggaggtagacctcggcgttatgatgatcaagaaagtatgagcaatatgaggatttatcaatctgagagttactcagatacaagatccgtgagtaactatgaacgaagaaaaccagacttcatgagcatttgaatcgaaggcaacccgatttacgcgagcatctaaatcagaatgcaccttacttacgccaacaactaatgctaactgacagcaagaggatccaatccaatttcgaatcattaagttggaggataagttcaggagataccaggatggggaatacgggaagttacctggttatgactcggatgaagagcccgagcctttccatattgatattatgaattctgaatttcctcagggattcaaaaacccacacatctcgcagtacgatgggacttcagacccagtcgttcaccttaataatttcaataccataatgcgagtctttcttttaatagttgctaggcaaaaactttcgtaactaagtattttgtaaaccagttgtatttttaaaaagaggattccagattatgtaaagtatttacttattcaagtttaaagcttaatttagaaaaatttaaattattcacgtttttctataaatcctttgatcagcataggagtgctcagcattaagaaatcatgataacacgcttaatttagtagggtgtcacaaaaagaactctccttatctttttcaactgatccacgtacgaagccatttaccttggtttaagccacacaaagataaaaaaaaaa

SEQ ID NO: 272843 - DNA, 730 bp, Cannabis indica
gtttggattatccactgctcagcaaggaagacctcgtccgtgcaggtatatgatgtattctgttatgcatatctcctttgggcagatatggggagtcgattccacgtgtcactagcatgtgattctacgtcagagtgcaaaaattgggataacatttgccccccaagtttgtacgggacttccgaagtggcgtgtagacttcatccgagttgcctttacttttgaatggtttacatgtgttaggtatgtctgttcgtgattcgatgtaagtctgaccatgtgtctctttagtttcggctaattaatgctttgacttaattagtgcatcaaaacacggtcttcattgaacgctttgatggttacacttgattacttttgatttcccaatatttattttttgggggaaatcaaaacgtctgaggtgtttcgaaatgattacctcttttcaccagattgcctataaataaggctggaacttcttcataattttactttcatcattttctccactaaacacactcagagcaaaaagaaggaattttctccaagtctgtcctgagatttctattagagccatttgagaagctttgtctggactacacttaggcttcacagtgagtaagtcttcgatcttttctcttttaaccttgcatgtttaatttttgggtttccattaaagaaaatgcatttgttcttgacatgtgtaaaagattcatagaaaatctaggct

SEQ ID NO: 272844 - DNA, 554 bp, Cannabis indica
ataggaagagcatagttggagtcaactatctgagacacccttctaggaggaaacatctagccatccataactcctttccgaaggggggctagctttcctgaaaactccttccacatagacatgatatgcacccagaaagcccttcgagatgacgcctatcattccgcaagattactttcagatggtaaggttagacttctagaaactccctttcaaatattatgtaactttccataacaagaataacttttgaagatctttatatttagaggaactatattacaattttttattttaattctgatgttatagctcttaataaataaatgataaaaattattgagtttttattatttatgttccttatattatttaatatgatatttaagggtatgcaatgatttcaaacatgaaataaactcattgcgtttagtatttgattataattcaattagattccgattcattttttccgtctttctagattttgtcagtgttttatttctttattccacatcagaaggacacaccagcatttcaaaaaacaaaaaaag

SEQ ID NO: 272845 - DNA, 5266 bp, Cannabis indica
ttaacaatttcaatgtattttttgtagcatctgttttttttttttttcagaagacaaattaagttttaaacaacattaatacttgtaagttacaacaagagaaacattaataagagttaggtatatcattgaacagaagaattgagacaagaacacaacaacattgtttacaaagatcaaatcttgacaatggaaaatgtcaactaatcttagtagtcgtagtgggggactactagtttctcttctgtgcatataattatatataaatattacaaacaattcgaccctttcaatatttcctcttctcatattccaaatgatacttgggagagttgactatcagcttactaactgaattaagactcaagatttgccttttaacaataataatgatgaatattaatgacccttttattatacaattaagaaaataattacagactctgatcaattacttttgtgatttcaattatattactatcatattcattaccttttttttttctttatgatattaagggtggttttgaccctgcaaattgctccatcatctcatgcttatatgtttgatcatgcttcacatgttcttggccctacattatgcagaaaacaaactattatttcattgtaaacgacttttcgtagactcttcttccccagctagaagccatgtagatgcaaatggaaactattagattaatcacatgttgaacaaaatgtcaaaaactatatttttatgcttttctctgactcattaatggataaacaagaagattatcagcttaatataataattatcaatgaattgacaaaatcaatagtgatgagacactgcacttcagtagttcaataggatataaatataaaacagccaagttctatacctgtcttctcgtatacggaggcgccaaataatgtgaagaagatgtcttttataatcacattgccttttttttttaaataattaataagaaaagtctttaatttgcttggtagttgagcatgcttgtacaggatatgtatattcatgcataacatttgcaacacaatactcaattccaccgacattctatgtcaacatgtgtatgcatttaacatattttttctaaatgaagaaagggattttaaataatttaaagcagaagcaattcaggcagattcaactgtgattaatgagttgcagatgtaatggttgaatacatataaacaaatatttttccaacaatttcgacattcatgctgatcagactagttccatttggctaaaatatattagaagtcaaaagtgatattaaaggaatgaacttgactttcaaaagttctgaaatttcagctaaaacctcttttaaaagacattggtcttcaaaaagtaatgacattgatttgtcatttgaatgtcaattataatcctatagaagaaaactataaatttgcttaaagctgaggttggtgattggctgcctctttctcttatgtctttatttaagttggtttttctaactttagatgtcacataaaacacaagacaaaataacaattttaattctatgggaaagccaaacaacacaaagtgtatcttattattggattggtgtgagctgatgtccatttattatataatccataaaaaatctgggccctttctaactaatactatgctaactcacttcatgatttgtccaaactaaaatacaacgaaatttctcaaacggttatagtatgtctttgtgcgtgtttgtatgcttatgcacgtaagatgtatgtttatttaattgtaaagagagaaagtttagactgctagagcacctcttttcgcttaagaatggagatcttgataccgaaatatcaggttgagctgctatgttcttcaacgctgttttgtaagagaggtgcctttggtgcactcgattcatcatccaattcgacctgtgactctttggattttccccacattacagagtaaaacccagcaacaattatgattgatccaagcaatctgcatcaaagtgttatggtgaatgtaaatctttctgctcaacagcatgatcgatcaaatactgtatatgaagaatatcaaataagtaagcccaaccttccaaaaaagaaagtatccccaaagaagataacacctgcagcaaatgcaatgacaattcccacaggcttgaacatagatacaaaaacaggccccgttttatgcatgcaccatgtagatacactgacttggaatgcagagccaaaaactccctgtaacattaagtttattttagaaatttttctgcaatagtagagatcactctagcaggttcagcatgcttgagttatattattcaattaccgagtatacaacagccgaaaacctcaatttagatttcaagctccaagcacttaaatctctttccaaaaccaaaccaaatactgcagatagaatagctacaaagaagcagtagaacaaaaccataatcaattctgccgggtattgcttgaggattgatgcctgtaagaaaaaaccaaagaagttggtgttatttttcttaccattttccatgtcacaagggtctttatgattttacctgtacaataagccaagcagaagctgccacacaatcagctgtgagaagcaatcctcccaggacccagttaggctgttgaaagagaagttctgtataagataagttagacgacgacgatgatgatgatgccattgaaagtgagggccctttgtatagagtgacaatgaatgcccctaaaatcaaaattatcgttcctacggatttagcttgactagaggagcttctccaatttaatgattccatcctgaaagatcggttgtataataagaatcaggtaacaatttcggttctatattcgaaaagagaagaaaatcagatatgctaaaggtcagttctacctcaccttcaaattaaatatatttcataactcaatgtaaataagtacaaaaatgcaaaagatatttagcctacagatactgaaataagggaatttaataaatagaaataaaattcgttcattaagagtcctaatgaccttgaagctcttcaatcctccacctgagcttgttcaaatactttaacaacagcatgaccatatttggctacttggaaaacttcttcatggaggcatagaaaagccaacagagcccttcaacccgagacactcatgtacaaaactttacaccaactaagttctcacacactcagttcagctcctgcacagactttacacctagaacattgcactttttaactaatcaaggaatcggaaggagcatggtggaatgtataagagatgactattttgaaaaatggaagagaaagatcaaccacaatgcttgttttcctatgaatcaattgagaaaaactaagttaacaagaaaaaaattaacatagcctaccacaaaacctgcccgaatagtccaaggagactacactattacatttgatagctatgagtttgtgtgaaatttcgactaaatagcgattttggtgaaattacacttaaacttatccgcatttacagaacaattgagaagaagaaaggagcacaattcacttttccttattataaaaattgggaaagatggataaaacaaatacatttgatatgaatgtaagctctaacttgaataggggaggagtaactatcctatcccaagtagacaacactatgcaattgcctatgaacctttctttttctcaaactaagatcactggctttgctttactatcataagttagctaaaatggttccaccagaaattgaagacacaaatcaattaaagccaatcatacaatataattgagagagagtaagagagaggagcataaaccttagggtaaccgcaagtatgtaagtgaaaccaggaataagattgagtaatgctgtgccaagagtgggagaactcaaattaatcccagcataaccaaagaactgagcaaagaaactgcaaaaataacaagttttttcatcaccaaataaagaaaagcaccaaactttaaggctatgtttaaaagttggatttttgtgggaaaagtaaatgttgaaaaaaaaacaccaaaatgtaaatttttaattttctatgcaacagtaattttcttttccacatacccaagtagaccaagcaaaaggaacccaccaatgattgagaaagtaagtgaaggacgctgtgatctgccaagaaaatgggaacaaaaacaaaaagaaaaagcaaagtgagtagtgatattcttattaaaagatggggtttgagtaattactaattacctatgaaagagtaaagaagaagggaggagtatgagagaggcgagagcgttggagtagaagatgaaaataatattgctcattccgtcagacatggcggctttactgaccatcattaacccaacttgggcacactccgccattaacatccccactgttggtagcactggaaccttaaacatcgctgcaaattaagttcttcaatggctatggcggagtaactaacaaccccagtacagtaattgttgtcaaacactcaagccaccgcagtcaacgtagataatcccacatcgcttgacaataacaacgttaaactgactatattaaacaccggaaacgacgtcgttcgagaagctcaaaaaaggtgccgtggccaaaaattaattataaaaaaagtttttttaaaccacatgaaattttttatttatatttttcagtgtttagtttttacttttgttctaaggttgtgttatagttgtttcattgttatttttaattgttttattttattgttttactgttattttattattttgttgttttactgttatttataaaaaaacagtatttttgtaaaaaaaatcgtaacgataaaattgtaaacttttaccaaaaattcagtatttttctaaaaacccctataaaattatattctgattgggttggatcttacaaactagttaatgtcatacttttgtagaaaaaatagaaatatcatattttaagtttaaacaaaaagaagattgttatagaggttcgacacgtgatggtaataatagcatgcttccttttttcttgtactgacttatgagaaaagaaggaagaagttcttaatttttttttcgaaagcttacaatagttttagcagcttaagtgctctcagaaatgaatgatttaagatccctaaatagtgaaatgattccactatttatagggaataagtacattagttaggtttcctaaacctaataagaattaaaatagaaaa

SEQ ID NO: 272846 - DNA, 1035 bp, Cannabis indica
tgagagagagatcagtgaccaagttgtaatgttcaagacgagtttcatgggagaagagcaaggtttgacttcttcaaatgatagatgatcacttcttgaggtgatgccaaacacgacagaatcaagtttagtgtcaagaccgttgaggagttgcagcactagatcttgatttgtcacatgagagctagcaatcatcaaagcacttgtagctgactgagctttgtcaacatattcagagaccgagagattatttttcagtagatgtgagaactgtccttttagttggagaaggcgagctttggtttgacttgagaatcgctactacaacgcacgccagacaatgaacaaagtagtgaagttggttatggatggtagaattggttctgtcatagacgatcgaagccacgagaggaggaactagtctttctttttccattgagcatatttgggattgggagctcgggtgaccagagtagcagggggagaaacatctaagaacagaatctgatccagacatggccagtgaccgcaagaacaacctgagacttcaattagagaaagttgttgtgatcaagcttcaatgttagggaagctattagggagttggagaaaggattctaactctttgttgaattagcagtagcaacgaaaaatgtagcttaaggatcgaaggtgaaagactgcatagacgctagtcaaaggacgaatataccatgtagaaagaaagaatccaagttgtgctagaaagcaaaaacagagaacagagaattgaaatgaaaaacatagattgaatgagtgcattacccaacagagtaagcactagcctttatttatacaatgagaccaattacaatcaagaaagtaaagagagtaacagaaatggttactaagataactgaataacagtacattgcaactaattgttagttacactaagtgacattactaagaagttagttaacttcatgagggagaatgtcccagatgagattctaccattctcttgaagaggcaaaagactaagtgcatgtttgg

SEQ ID NO: 272847 - DNA, 800 bp, Cannabis indica
atagttgactatgtctcaaaagtcaagtgaagcagaccatgccatgccaggtatcttcacctggaaggtcatgtcaagacccccaaacaacgttttggcctcaaggttcttaaacctcgcaagagtaaatgtatatgggggagacacccaagtagcctttgtctctcctatttggggcaaaggcttcggggttgacagttcttcctcagcatgattaatccatgcacgagatggcaacccatcttcattcagaagctccctagcctcattatattcccctaaagggttgtctgtgagcacttcacagtctttgactggcctctgggcaggtcgtgccctttcctcaagctgagcaggccttttcagcctgctcaacaagcctttcagcgtggttggcctgtgtagcccatccccttaccatcagttcagcaatgtagggatcagtagttgaaggggctacatggtaggtctactttgacctagccaagtttggatcatgtccagtataccgtgcaactataacgacaacctcagcctcagagagtttcttcacaaaggataatttgcgtccttctggtagggtgtccaagacacctagctggacaatatatgtctaagaagttggaagaaatttcttccaatctcgattcagttcacaaatgagtcggtagtaggtttctcctccaatccgtttagagtagtggtggtgttgtattttaggttcaggagtagcactgctgacttccaagttagagtaactacttggagagctggctggataattaacagatagagaacca

SEQ ID NO: 272848 - DNA, 496 bp, Cannabis indica
aattaaaaatacactaaaaattaacctaaaaataatactaaaaacaacctaacttagtgttaggaacaaaatttcaaaaatctttattcttcatataaatttcattgacccaacgatctcaaaggttgtcttgtttagtagaaatagctcaaatatactttgccataagagctaaatttcacttcttccgcgctctaaaaccaaatccaccatagcgtttgggtaagcaaacttgctcccaagagataaagtgaagcttattgcaattgcccgagctaccccacaaaaaatcttttcaaagtttatcaatggcagcagtaactatttgtgacagaataaaaataatcatctagtagttacgaattcccaataagataaaatgagttaactaagccctatctgcaaagaaaagatgatggttggcccaaccatgtatcttcttctagatcttatctagaacaccccgacagtctgaagccttccacttagtaggacg

SEQ ID NO: 272849 - DNA, 1208 bp, Cannabis indica
ttcatatttaggatgttaattcaacatacttgtgagtaaatctagatcctggtaaaatattcccaacagtgtgtccaaccttttctaaaggagaagacctgtgaaggacgaggcaagttctagctcaggacattcaagattccaagggcacagtcaatcagaaagtcatacacgaggaggagataaacctcgtggttatgctgatcaagagagtatgagcaatacgaggaggtaccaatctgggagttactcagatacaaggttcgtgagtaaataagaacgaagacagccagatctttgtgaacatttgaatcagagacaagccgatttacgcaagcgcttaaatcagaatgcccctaatttacgccaccaactcaataataaccgacagcatgaggacccaatccaattgcaaatcattgagttggaagataaatttagaagataccaagatggagaatacaagaaactgcctggttatgacttggatgaagagcccgagtctttccattcagacattatgaactctgaattccccaagggatttaaaaaccctcacgtctcgcaatacaatgggacttcggacatcgttacttaccataacaatttcaataccataatacgagctagcaatgtcataatttgcgttgtattttattccccacctcgctgactggagcaacgagtagctggttcaataagtttacctatcattcaataacttcttgggaacaactgtccaaggattttaagaaacaatttcaagcagcaagagacaggcgacttgaagcaccctcccttactaacataaagcagcaactaggcgagtcactcaaggcttacctgagttgatttagtactgttgctactaaagttagaaacttcaacgataatattcaacttactgctcttcaaccagggattacgactgacttttcaatagctaggggcgagctgtgggatgacttataaggtctcccagtaaggaacatcaacgaattcaatgagagagtgcaaatgtttgtgcgcaaataagaagccaggaatgacatgaaattgctaaagactggctcaggaagtaaatccagcactgctacagcaagcaccgtctcgaaaaaggctgacaatccagatggttcaaacaccaagagaaaagatgactctagggaatcatctaaaaataaaaagaaacagaaaaagcacgataa

SEQ ID NO: 272850 - DNA, 543 bp, Cannabis indica
tcaagatatgtatcaaggccagtgtcgagctcaactcacagttctataaggttttaccttttacaaactgtataagttgtgttgtatttatgcgtgaaatgttgtttaaaccctaaatgcggtcttcgaaatataagttttgtaaggtttgttttcagtgtggaactgttaggcacctcaggaaagattatccccagctgaagaaaggggaacctaagcccgaagatgagcctgcccaacattggtatatgctaaactcaggcggatgcatctgccagtcctttagtggtcacaagtcagctctttatcaatagttttacttatattatattatttgactttggagctacacactcatatgtatcaacgagagtacttagttagcttggtaggcctagtgatgtttttgagatgggttcagaaccatgttgcctaatggataattgattatatcgagaaagtggattagatccgtgctaattagaattcggggtagggaactaagtgccgatctaatggagttacctttggccgagtttgata

SEQ ID NO: 272851 - DNA, 890 bp, Cannabis indica
agttacagaatatactacaaagtttgatcgattggccaagctcgccgtgggtattgtgcaaacaaatttcagcaagaaagaaaagtacttggcaagtttgaatgtgaagattagacatgatctggtgatcactaccaacgatgcaaccacttatgcagaaatggttgagaaagccctgcgggccgaaggtgctgtaaaattccttcaggagccctgagtgactccgaatattggtggaatccccacttttcctactcctgtatatggtagggatggtggtgattccaccactaatcagaagaggaaagttactcctgcatctggtggctcagggcagaataagcggttccgtgggaaccaaggcagaggtggacgccagggtttctcttaccctgaaggcccacgttgtaagaaacatcgtctcggcgagtgcaaccggaagacaagcttttgtgtggcatggtgggccatttcaagaaagattgccctcaggcagagaaagaagagcaacagtcagaggcaaaacctatacctgctcgggtgcttgccattacccacgttgatgatgcagccagtccttctgtggtgacaggtcagctccttgtcaacaactccctgtatactgtattatttgagtcaggagctacatgctcatatgtagctacactagtaattgatcttttgggtaggccttgtgatatacttgaaagagggcttggaaccctaaagcctagcaaggagttggttatctttaataggcgcattaggtctatgccagttaggatcgaggatagggagttgagtgctgaccttatagaacttaaattaacagagttttacattatgcttgggatggattttttgtccaagtattcggccagtatagactg

SEQ ID NO: 272852 - DNA, 880 bp, Cannabis indica
cacacgaggtcaattggttttttagcctacccctaagcagagcaggtcggggtacttctacttctcttagccagacttcaagtggctgacgggcaccgtggacaaggatgttagcaagatcgggggttttgttgacaagtcttactttgtggaaggcatggataccacctatactcggtttcaagagattctaatacactgacgtccacccctcacgttggcacttagagatagggctcaggagattgttcaactgccagatgctgctcggaatatcactttgttgaccttagaggacaactttgtggagtacaagctttattcggcagactttataccccagcctgtgaaggggaggaagaagaagtccagggctggccgggctgaaggacctgagcaagagaaggagctcattcaactcaagcgtgaggctaagttgaagggtgatgcaggagccaatcagtatgctcaagaatattctgagcaggagaaggaggctcgagaatattcagagcatgaaaggctgctcaagaagaagaaaaccctctcgaccgggcagaggcccattaaacatactatccagatcagagagcctaatctacttgctcggacatccacccctgtagaaggaaaggggaaagccattttggaggagcaggaagactcttcggatgattatgccccgtctgtgcttgttcaggcaaatgctcctgctagcgtgcagagtacttcatcttgcatttatttttcttgattttcatgccttcatatatcttatactttcttctaactgtgttatttttatttcgtgcaaaaatgactcaaaagatgattgtgttgggttttgtgccctaaataaaactcattacaatctgattag

SEQ ID NO: 272853 - DNA, 529 bp, Cannabis indica
tttatggaagtatttttgtaaataaaatgtcaatttatattttctatgtaataattccatataggaataattacataaagtaaatttatttttttttttctaaaaaaatacatttttacatttttttacaatttttcaatttttcataaaaacaacacgaaaacaacaagaaaactacataaaagtagcatgaaaatcacatctaaataacatcaaaacaataacaaaaaataacatacagataacaaaaaaatcaacgataaattaacaagagtacaacataacataaaaaactatattttgtataaataaaataaaaaaaatcttaaaaatatttaaaatttcgtataactgtatttttgtaatttttttttaatgttgttgtatatttgtgaataatcgctaaattgtattatttattgggaattttacaaaaatactgctttttgacacaaactttacatttttactgggacacggcaaaaacaacttttgtactgcccaagcccaatttcattacttttgtact

SEQ ID NO: 272854 - DNA, 934 bp, Cannabis indica
ctctcaagcctctctctccttcgcaccctatacaaccggctagggttcattgtttttcttcaaattgctgtgttttccagcagctttaggtattttccaagccaaggtaagcctcttgtaactttctttttagtttcttgaattgtaagaaagtgaaattttgcatgatttgagatttcaattgttgttcctgctgtggttgtttgttattgatttcagaagttaaaatatgtttatatgtgttgatttgaagtggttttaggggctatagtgttgattgagcaagctttgagttttagaactcaagcttggctcattaatggtgattttggataataagcttgggttattgttttattgcttggaaatggtttattgggctgtaatatgcaggtctgaagagtttggttaagtttggaatcgatttggttagggtttcgattattttaggttttctgggtaaaatcggttacccaaattttgcagcagggtattccaaaaatttaacttgtcgattcttgctagtttcaggttgctggttggttaactccctactagtttagggtattgccatattaagttgttgtagatagggttttggtttaaaacctaagtcccagctgtgatttagcgagtcacttattcatgttgttatcgatgtgatttaagagcctataattcgtcgagcagttgttccactcaggttgaccggcacacctgaatttggaatcgaggtaagattagtataatggcatccatatgttattacatgtttagcgtacatgttgtttattcctgttagattacattgatagtagtaatagtatacatggagttgtactgattattgataaatgtatgttggctgaaatactgatcgatgttgtcacatcaatatggctagagtatgactagcatattgagtataggctga

SEQ ID NO: 272855 - DNA, 192 bp, Cannabis indica
aatgttgtacgggaagaagtgtcgatcaccactacactgggatgaggttggcgaaaagcgacacttaggcccagacctagtaagagaggccactgaagcggtagaaaagattcgaaatagaatggttactgcacaaaaccgcaagaaaagttatgctgacgcaaagcgacggaatgtggaatttacagtggg

SEQ ID NO: 272856 - DNA, 3062 bp, Cannabis indica
agaatagtattacctaaagtaattaattttttttgttcttatgatttttatttaatgttaaaacttagttaaattaattattaggataattaattagacgtttttttgttttattttttaattaaaaaaataataataaaacagaaagaagcagaaacacatttgcctgaattagaggcaagagatggaatttctattcccatggaagatattgggacttctcgtgtttggaacatgcgttataggtattacttatgtacattaatcaattatatatgtgtgtattgattcattttttgatttgatgaatgtttttgttaatttctttgctctgtttattgtttggttctcattctcaatggagttacaggtattggcctaacaacaaaagcaggatgtatttacttgaaaacacaggtgagaaaagagtactcttataatttcaatataattaattaaagaatagtgttttgactttaattatattaataataaagatttatgcttaatatcattttgattggtaaaaaatattcataggggattttgtgagagccaatggacttcaagagggggattttattgtcatctactcagacgtcaaatgtggcaaatatgtaagtatacatatatacattatattcttacatttaaaaagataattaataattaatacagtatatttgtctcaattaactagatatatgttatgttttattaattattatcttaatttcaatggaaccgaggtgtgcctagctccttgtgatctttaattagcaactcttttcgatattttcttaaaaggtaaagaaaagttagtcatctactcatgaagtacgttgtaagataatattggtctccaaatttgttatgtttttggacaatactcttaattttatttttgtttgcaaatttgaggttatagttaaatttcattaataaattccatgaattgttgtgataggttttgattagattggaggttttggtgttaccagtgcacattttgcaatctaagttgatattcaacgtagacatttgctattgttttaaatttgcaaacaaaagtaaacttaagtgagtattgccttaaaaaaaaatagggttaagtgtaaaaaataaacacaatgaggttaatttctgttaaggctcatgacagttagcctttgacagttaattctgttatacagttgttagctactgttgctgtttgttacagttagttaatctgttttggttggttgttacactttcggttacagctgagtgttcatgctatttactcagcattgtatataaacatgtaatctgctttcagttcaatgagatcttcttttcttctccattctttctctgacttttctctgttcttcattttctttctttagcttttattctgcaactctctctttctggtttatgacatcagttagctatgaatcaaaggtttaacatggtatcagagcgctggcctccgctcaatgctaacatggctactcttggatctggtggtggtaattcgaacaacacttctggttttaatggtggtccagctacacagcctcgaactcaaactcatcaagaacctgtttactttaatcacagcatttcgattaggttgaatgatcataattttctcttgtggaagcaacaggttctggcagcaatcaaaggaaatcgccttctaaagttcatcaaagatcctcctccatctgaattcttaactccagaggatcgggtgcaaaacagagtaaatcaagcttacatcgactgggagatccaagatcaactccttgtctcatggttgctgtcttcgatgaccgagagcctcttgactcgaatggtgggatgcgattcagctcagcagatttggtccactctggagaagcatttcacattacaagtctcctcgaaaatccttgagtttcgtactaaattgcagaatttgaagaaaggaactctaagtctcaatgactatctcttgaaagttaaacaaacagttgatctccttgcatctgtgggagaagttttgagtgatcgtgaccatgtggctgcgatcttcaaaggtcttccaagtgaatacgatacgtttgtcatttctacaaacaccagaactgaacaatatactgtcggagaaatcgaggcattgcttcttgcttcggaatccagaattgagaaatctgggaaagaaattgattttagtgcaaatctggtgtctggtgatcaagatctacaaccagatgctttaatggaagctaatcttgcttggagaaggtttagacagcagtacgggagaggaaatcctcaatttcacaacaattcaagtcaattcaatcaacctgtgttcaggagttttaatcgtggagataattctggagtcaaagctaatttccctcccaaccaagcaaacagatctggtgcaaatctgagtactaaggtgcaatgtcaattgtgcctgcgctttggacacacggcacacgattgtttttacagatttgataaatctttctcagcaacacaaccaggatcaagtgctcagagtaatggattgcagaaaccacaagcaaatttgaccaccaataacagctccaatgactccaactggtatccagattcgggagctacaaaccattgcactcctcaagctcaaaacctggctgtttgctatgactatgaaggacaagatcaaatgtatgtgggagatggtacaggtttgtctataaagcatattggtcattctttctttactccacaacatgcatctcattctcttgttcttaataacttgcttcatgtccctgaaattacaaaaaatctcattagtgtttctaagtttgctaaagacaataatgtgtttttgaatttcatgatgatttttgctatgttaaggacaaagtgagcaatactatcttgctgatgggaatccacaagaatggcctatatacttttgataagactcatcttggacctgtacactcagccccctcctccaaaatcaatttcaaatcattgcagcagccaagtctttctcacaccagcagcccctctgtcaaaaacaa

SEQ ID NO: 272857 - DNA, 506 bp, Cannabis indica
ttaaaatattatttgtatatatattttattaattttgttataaatatgtgtggattggattggatcagttatttttaaatttttcaattcaacccaatccgcacaagtgcggatatccgcactttgaagattgaattggattggatcggctattttatgaacacccctaaattactgcaccacttgtgacaattgataagcttgactaattggcaagttattataattatatttcttttttcatctaattattttctagttgtttgtttaatttgctaactcaaagaagaaaattcatttatatatatttgttagaagagttttaaaatcttacccgaagtgaaattttttatttgtgagaaaagagcctagagattcgcttaattgattttggttgaacaggatgtttagtaagttgcaatttactagaattaattactatttatataaatgctctataagtgtttttgcagtatcattaattggtttgtataaattaatttaat

SEQ ID NO: 272858 - DNA, 1108 bp, Cannabis indica
taaaaaactgattaaaaaagtgttaccaaacgccaccttagtaagtcatttttaaggaattgagtattcaatcaaattggctgtgttttaattcttttgtttaattaggaaggaaaaaggttttaaagtgtatattcatcataacttacattactagatagatagttgaaatgaaatatttgtacaaatgagtgattggttttgttctgatatatatgttagggaaacacttgcattattaccgaaaccattattgtacatgttgaacgaaaaaagaagaagaaaggtttattatttttattattattattattattattattataaataaattatctctttttataagccatttaaaatataaaagaataatttgtttaattaaaataataataatatgaacaataaaaaaaaaaagaagaggatcagtcaaaataataaacaataaacaataaaaataataaacaataaaaagaaaaatgatctctattaaaaaggaagagaagcagcatagtaaatgatttttttttttttttagtttttggaattaaacgtaagagtgaaataaaaaaaaaacatgaaagaaagaagactttgtgcagaaaattgtcatttttaagaatttttccacagtaaatgataggtaaaaatttactgtttttttttttctcctcattctgaatctttttctttttcattaattgattttctccttttatctatgatctactttgacctaggctttttaagccataaaaggtctccaaaagtgagatatataaaaggaaaatcccacttttacatacctgctaaaataaatccaatatttttcttatatttttttatggtacactttgatctaagctttttttagccataaaatatcttcaaaagtgagatataaccatggaaaatatataaaatctcaaaagaaattaaaattgtcatgctgccaaaattattgtgtgaagaaaaaaaaaaattaataatttatgcatattccaatcgtaacttgccaaaaatcaatactcatgtgtgtactcgatttaccacataaaaaaaatagtaaatatgtacattatattagaaaaaagaagaagaagaagaa

SEQ ID NO: 272859 - DNA, 644 bp, Cannabis indica
gtagtaaatcttggttgttatcgcccctttgatttttatggaccttgacatatttttgcacatgcagattattctttcttatcagaaattcaatttcccgctttagattgttgcatttgttggtgtcatggccataatccccatgaaatggcaaaacttggtcatgtctctcttgcttacgtctttttccatgggtgcgggcttcttgtacggagctaatgattgagtagacatgtaaatagtttctaaatcttctgtcaggatagaaaaacagtaaagttggtaggattctccctgggagcctgtttgattttgccaacaaactttccccttttcccattgccttgcctattgttattgttggaccgtttaccacccgagcttgaaatgcttgggtactggggtagcttgacggatgtcccaacagagggaacttttggctggccaagtttttctcaacctctgctcgttgaatggcttcttcaagcttaatgaaaccatctgcccgattaaggaagtcactcatagaatctattggtccattttttctgatatctttccaaagttctccaagaacttcgatgcctcctagtattgcaaacaatttcctgtcctcagtcatctgtgcaaccttagttgcctcc

SEQ ID NO: 272860 - DNA, 747 bp, Cannabis indica
aaagtctagaatgccaaacattaaaatcacacatcatgtaagcagaaaacaattaatttaaacattccatcagtagcataacccttccccacaaaagtaccattcttagtgatggtgtacaaatcagcccaattgtttgagtaaacccaatattattaagcagaaaatcagaaaccaaattctttctcatctcaggagtgtgcattacatctttcagcaataaggtccttccctatataaactttagctccacatttccagttccagcaacaatagtggtgtggaaatctcccaacaacactttcttatcatcagcaacagtgtatgtcttaaacatagcactatcatagcacacatggcgagaggcgccagtgtctacccaccactcttctgatccaccaatcatgttgatctaagagatcatagttgtaaaagcttcttcagtcaagttagcctgcggagcagtgctaggcttgttccgaaactttcgtgccatatgacccgacttgttacagttgtaatacagaaattgtgcggggtcattttgtttatgtggaggcggcttccttccatgttggttcccattatggttccaactttgattattgttacgaggagggttgttgcggttagaattggaatttaagttgcggttctgattcttaaaaatttttccattaggcttcagaaccgctggtgtggacttcttagttttgttgttagaaacaacaagcacttcatctttct

SEQ ID NO: 272861 - DNA, 826 bp, Cannabis indica
acacaaggatgtaatcgataaacactatgatgcagttttcaaagaaatccttgaatactctattcatgagatccataaaggttgcaagagcattagtcaatccgaatgacattaccaaaaactcgcagtgcccatatctggtttggaacgcagtctttggtgtatcttcttctgaattctgagttgatggtaacctgatcgcaggtcaatcttttaagataccatctttccctgaagttgattgaacaaatcgtcaattctgggtaatggatacttgttcttaatcgtcaacttgtttagttcccgatagtcaataaacattcttagggaaccatctttctttttcacaaacagagtcagagatcccaaggcgatacactgggtcgggtaaacccaatatcaagcatcccctgaacctgtaacttaagctccttgagttctcctggagccatcctatgcggagctttagaaacaggttcggctctaggtgccaaatcaatcacaaagtcaatttctcgttgtggtggtaatcccagcaactcctcgagaaaaatgtcgagaaaatctttaaatactcagactacctcaagcccaaatgtttcgggtctgctggagtcaatcacaacagctaaaaatcctacacatccactgtgaagtagatcgctagcccttaatactgaaataattgggatccgaggcccctgaaccgatccaacataaataaatagatcttccccttctggctgaaaagtcactattttttgcttacaatctatactggccaaatacttggacagaaaatccatcccaagtatgatgtcaaact

SEQ ID NO: 272862 - DNA, 1033 bp, Cannabis indica
cccacaaataattaaattcataagtaattataaaattaccaataattagtgctaattgcttttactcatccaaattaaaaattcggtcattacaattatccccccgttaaaaggatttcgtcctcgaaatctaatctgaataactatggatattgagtcctcatatcagaccctaactcccaggtggcttcctccaccttgttgttctccagagcattttgatcaaagcaatgggcttcttcccaaaggaccttctccttcctaacaaggatctcaactgattgttcttcgtacaataagttttgctgtagttcaagggcttcataactcaagacatgagtctggtccgaaacatatttcctcaacattgaaatatgaaatacattatgaacagccaatagcgctggtagtaagattagccaatacgctacttatccgaccttcttgagtatctgaaatatcccaatgaacctacttctccccaaagcatttagtaccctttacaggtgaaacccggcctgaaatgaacatatgtttcccttgcctgaaatgtgatatctctgcgcttcaaattagcataacctttctgcttactctgtgaatttaagcatcggagccttgatcttttctatagctttattgttctctgactaattccaaacctaagtactttctttctccagtgtcgtcccaatgaataggggaccgacatttcctaccatatgatatctcatagggagctattcctattgtattctggtagctactgatgtaggagaatgctactcgaggcaagtacttacccatgaacccttgaagtccatgacacaggctcgcagtaaatcttctagtagctgaattgttctttctaattgctcatttgtataagggtgaaaagctatgctaaacttcagctttgaaccaataactttctgaaaaattcacccaaaatgtcgatgttaaccttggatctctgtctaaaataatgaatttagaagctccatgaagaggaactatctcttttacatatagt

SEQ ID NO: 272863 - DNA, 1048 bp, Cannabis indica
taacctttcaattctttagcaaaaatgaatgacttttcattgttactatttttttttttatattattatattaaaagcacttttaatataatgtaagttataacacatttaaactatatgaatatatagatattaaaaagaaaaaaaaaacgtaacctatcatatttatttttcaatttcaatttttcattaattactaaaacaaaaactttatggttagtaattgttattataatatttcagttttaattttatgaatttctttaaactcattggtttttactataaataattgttagacaaagaagaaatgttgcccatgaaactaatgtgagtaaaaattaattactttaagtgctttgaagaagcaaagtagacatatgaagaaggactaaagtgaaggtggaggcttcttgagttgatgtgcaaagagaccaatattggtgtaagagaagttaagaaatatattatctttctttcttaattttataaagtattttgattagtattaccaaaatttataaaaaatatgttatagtatttaccaaaagttatattgttccaatacctctctaaagtttatataatatgttcatatattatttgacacttggtatgttttatatttttaagaatttgaaattctctcacaaaaaaatcttcaaagccctcactaatcttcttgaatcttttgaaaacaaagactttatttatttcattcattagcattttttgattagtgtttaagcgtttgtcatattttttttaatactccattagaagttttttattgttgtgattataaatttcttataaagaataatatattttggatgcaaaataaatgacatttaattttatatgagctttttaatggcatactctcaaaacatacaagcacgattagacatgaaaagtacagacttctaagcttcggagacacgtttccaaaaaattccgaaggcaacactgaaaaatgttaaataaatttgtattgcaaatattttatatagttgtttgatattaaatttacgtagatctaaagatt

SEQ ID NO: 272864 - DNA, 797 bp, Cannabis indica
ctcccttctgcgtcctcctcttcctctcactcgcggtttggagcctcccagtcctcgcccacgtcctcaacttcagcatcaggagcatgcctggaatgaacaaggtgttcacgagctgacaccgtagactcgctgtcacgaatctcgattgttcctggttcagcgagctcctgaaccatcctctctatatctgcggaggacaacgggcccagctccgcatctccgacaattggggtctcctcttttgagatcgaggttgggatgaagctatcctcctggtcctggtcgccatcgaaagcattgcctctagagccaagcatttggctgtccgacaaatcgctcatctgaaagatagaagatcttttcagtgtggtgaatgtgtgaaaacaatacaagtgaccacccgcataaaaaattcaagatttccgtggaaggctaattcggattctcgtgaaaaaccaatcagccaccaaggcataaaattgcaagtgtgtgattaaatgaatatctcaaaaaacggctaggagttacccagtgacccaaggggcatgcattttttgagcatgaccctgaagttactgggaaacacccaccgtttcgagaaatctaaccaatcacaacctgtgagtatatcacacatatccgactagtggtatatctcaagaaacagctgaggaatctcctatatctcaaggggcatgcctttctcgcataaaccttgggctaacggaaacacctcactatttcgagcaaacctactagtcgaaatatacagttatatgggaacagggaacact

SEQ ID NO: 272865 - DNA, 540 bp, Cannabis indica
aaatacattgagggggtgaaacgctaatgtcctctattttgcccaaaatacgtggtcatgtatgacaacgacacgtggatctgagaggctcaactgttagataaatcgactaagcgcccatttctttggtcttaatagaccccttgatctgattcggtcagatctagtatcaataagtgggtttgtttttttatttttttaatcactttttgccacttaatacctcttaccgaaatagatgtgtaatgggctcttaaaatttgtaatatatatctctctccttctttttctttttcactttacacattaggtattacactctctttttcctctgccatctctgccgcaatatcactatctaggtcagttttttttttatctttctcatttttttatttttttcttcgccgacaacatcacaatcatcttttctcttttatattatatatatgtaacgtttataccatttttatttatatatatatatatgatcataatcatgatcactatcaccatcacatcatatttaatatattgttt

SEQ ID NO: 272866 - DNA, 2150 bp, Cannabis indica
aaaattttaaatccaattagaaaaatctttggacaatatgaaaaagaaagaaaagagaatcaggatgtcacatttgacaaaacgtagaccacaaaagaagttaaagtaaaatgacaatgaaaaacgattgaaattgaaaaccaagttggaaaactatggaaagttttcaaatttatgttcaaaaaccccaaatttaataaacccacaaaccaacaatcacaattttagaaatatatttgttttctttcatttaattggggaaacaaaccatgaattgatcaagttctttctcatccaccactctaacaccgccactaccgctaatcccgagctcggagtacttggacaccacgcgctgcgactgcgaaagctgctcgtcgatcctgggtagctggtcaacaggagtcgcgatcctcaggcacgacacgtgtgccgagagcaactgttcgtaaagagggtgccgcaatatatcggctttgtaccacgcgccctcactctctacatcttcatcctcatcttcctcttcctctctcctgttccttctttgatcgccaatgaaatcgctcatcttgcttccttccgctgcccctaagacatcttcgtttcggggctccgattcagacagtaagtggagaaggttctgttgtctgaacacagagctgttgagccacgtcggagcaccaactccaacggcaacgtcatcttctccggcggatagtgaaggctggtccgaaaaagggttctggtgaaaagccatttcttgaggaagattagtactgctactgttatggtgttggtggtggtgaaacgacatttttttttaatggagatttctgtgcataataatatcgatcgaaatatgagaaaaataaatacgacccagatttaggaagagggtttagagaaaagggtcaaggtcttctaatggagtttgttcaaggagtatgaaagtggtcctgctttagaaaggcagaggagagagaaggagaagaagaagaagaagattgtattttccctttatataattgaaaattacaaattttattttattttatttatttatttattttcaaaaggctattttaattttttaaaaatattagtgataagtgagtcgaggataattggaattaatcgacggtttggatggtgacacgtggtagaattagtccacgatgttatttaagtggtccggttattattaatatttttttattattattttattgggtgccttacttaccaatcagagtttcatacgtacatataataatatagtaagttaatgaaaaataataagtgtgaggtgagaagataatgagcttttaccaaaattcatttgaaaaacaatacttgcctttgtaaagtcaacaaagaattagaatgggatgtaattacataatttttgtatgtttgtttcatcattgtagaagtaattgagtaaattttaattatactttttcaattaaattgtataattataaaaaatatatcatttgtaatattaagtactaaaagttattatttttatgtgtaattattaattatattgtcaaataaaatattaagaattcataattaattactataataatcatgtaaaacctctactatgtaattaaaattgaatttaatttaaagtaattataaaatttgaattatttattagttcaaatataatcatgtaattgagaaatctagaattaagtgtaattacacttttagatatttaatgctattaaattgtgttactaactattttattaaacaagatgttaaatatttatgtgtaactactaccttatatttaaacatattttgtatttcaaaatagagtgttatcactactagaagttttacaataaaaaaaaatattctcaccaaccaaatctcaaaacacaaaagttttacaaacaagaacattgtttgcaaccaaattgagccacacaattattaaatttaggatcccaataccatatgtaattaccattaactgaacaagtgttgaaaaaagataactaataatgtatcttaggaagctaaaattactatgatgtcaaacactatgtaatatttataatttaagcagtgaaaagttatactttgattcttgtaggaaaataatacttataaataattttttaatttat

SEQ ID NO: 272867 - DNA, 1205 bp, Cannabis indica
ccaggcggtgtgggattgcacagcttacccggtatttctccttacagatcacgggactactgactgtcacactccaataagacttctatagactgtaggattttccgtcagtttgccgtcagagagagacagagatttgcatgttgctatgggagttagataaggttttaggtgttgcatattattcttctctagcagaatttcaatgtattttgtttgagtaagatacaaaccagtttcatttcttgcaacctcaatgcgaagaaataaatgaagtgtcccaagatctttgagaatgaagaacttgttaagattttcaacaaacttgttgagattaacattcttggtctctgtgataatgatgtcatcaacatagatcaaaacaagaatgatgacaccattgttgatataaaaaaacagtgaagtattagctttggagttcttgaaattccattttagtagggtgttattcaacttgtcagaccaggctcttggagcctttttgagtccatacaaggacttgtgtagctttcacacatgatcagcctttgtaggatcttcaaagccttctggttgacacatgtacacatcttcttcaagatgcccattcaaaaaggcaatgtttatgtcaagttgtctaatgtcccagtttcttgaaacaacaatactcaagacaattcttactgcaaaagctttaataactataactggactaaaggtttctccatgatctaaacctgctctttgatgaaattccttagctaccaaccttgacttgtacctctagaaggatccatttgcatttctttttatgatgtgaacctatttgcatccaattagattgttggcttctgacctgggaactaatatctaagttttgatcttcttgagagctatgatctcatcattcatggctctattccaccccttgtgctgaagggctccagtcacacttcttggttccttagatatcggcacccatttagcttgattgcggtaggttttgggcttgaatataccaactttttgttaggtttatgccttgaaaagcttgtaatgatattttttgattaataatagagttggatagtttgatatatgtatgaatgttaaattataatatttatattgaataatttatatatataaataataaaaatttcttatttcatatataaggttgtgactttgtatttgtacggtag

SEQ ID NO: 272868 - DNA, 1127 bp, Cannabis indica
gtttgggctggaggagtagaccttgggctgggcctttgagcaaatttttgggctctttttttcttcttttcaaatttactacttttatttcttccatctctcttctttgtcttcctcaacaaaatacactttaattcctacaaaataacaataaattaaattcaaataaaatattttcaacataaaaatatatttcattaatttcatgaaaatattaatttaaacttaatttattttaaactttaagatcatgaaatgtgcatttttcaccattaatcacctatcccaacccctcacgaaataaacctcctttgtaacttgaaaagaagtcctactcgaaaagaagaaggcttctttcccttccaccagttcagcccatacatagagatgtcaccaaaagtaactacagcctttacctccaggaatatttctacaccccagttcttccattgagacacataactttccaaaaggctggccctttcaaaagacctactcctctaattaacatgaagaagagagttgatgacatgctgatgggagactttgttcaattttgaaagtcttcgaaaggttggactgataatgtcttgtcaatgagtgtatgttgatactagcttccctgatgaatcctggacaatgccacttaagcaggatgatgaggatgttcaaagtgcaactgtcatcctatctcagacagtatcagaagatgtgacctcaattcgaaatgacatagagtattcagggagaatatttgtgttcttggaccaagaagatggagaagttaactttattcaaatagctccggagaaggatatggggagtcagtaggtggctaatgctccatgctgtgaagttgaaactttttttttttgcttcccttcagctgtaataaccacttatcttttttctgtgcagacaatatgagcttcatcgctgctatgacatcttgttcaaactcaaagcaaaaaattccagtgtcaaaagaatctaaacctctggtctaggaatttgtttagggtatccttagtgcttctgttgcttcaaagaagaaagtcaaaaagaagagtagcccttgctggaaatattttaccaggatctagatttactaccaagtatgttttatt

SEQ ID NO: 272869 - DNA, 887 bp, Cannabis indica
aagctaagcggtctttacattatgcaactcactttctatatgcattactcacctaaggatatcgatattgaattctttactgcctattaagtgcatctgaataaacagaagacaaatctctaattctatcaaaaatggaatagagataacacaattaagaactttcttcagtttcagtaactttctagtgctttcgaaagcaacaaagttgtttagcttcactgatggagcttaaattattatagatgtgtttttacatccttctagaataattcctccacccccagagtaaccaccatatcgaataggatatgagttggtgtagatataaggattctaatatacacctttatcatcttacatataggtcactttcagagattcatccttgattgtctcctaatgttccttgtttgattacatcctagatggctccaactcaacactaggagtctggttaagtttgtacacaaaagtacatttaacctcttactattggttctcagggacatcgtgttgtgacatattgtcttagtctgaaactataagttccttctagactaagtcatcagcatagcattctagtattaacatgaatgtaaaatacttgcttaagattaagtaatccttagagataccataaaaatttcatgagaactaggggttttgcccaagtcattcgaatagactttgcaaaattctcctatcttatcctcaaaattcttataagtttctatccatatgaatggttagatttactttctcaattgtatttaaaattcctatcatgatcataacatagtaatctatcacaggtatcatccaaataaagatgggtaagaattttaaagttcacccactcagataaggtactgtgatactatgtc

SEQ ID NO: 272870 - DNA, 556 bp, Cannabis indica
tctgctcttaacttgatcaagttccttttccagggtactaatttgttgtttgaaatggaaacctaacttgtggttccaattattgagattgttgccacaagcagattgcgtagccaccgcgttggtaagggcactagaattattcccatgatttgtccaaaaagaaaccagagttttggaccaattaggattggtgagccagacattttcaaagagaaaccttttggaacttcgatgagaggattgagaagattttccttgagagtcaaaaagaagagcccgatgatcagagccaaaaaaacccttgtggtggaggcaagcctccgggaaaatagtcatcaaaggggcattggctatgcaccaatccaaacgctcttggatgtttctctcattagcactgtgattttctcatcaacgtatcacttggagggtcgatcttttcgctccgctatgctagggaagattgctatttttgtgggttagttgggaaacttaacatccttcttcatccacgtgtcaaacctaacattacactttaagatcaagctttattgtg

SEQ ID NO: 272871 - DNA, 1744 bp, Cannabis indica
actcaaattttatttttcagtctattttataatatattaatttatttattagatgtttttggtgatggatattgtagtgttattctgctgcaaatgcaaatagtgttgtcacacactagcctgtgttattattataaaagagtatatatgaacggatgcttgttcataatctttgagttttttttataataatagatttatcttaatgaattgcgttttttattaaaaaatatatatttgtatatataatgccccatataccatgggcgaaggccgagtatcatagataactatacctttagtggtcagtcacatgtattatatgttacacaaatatattaattcccacgaaaaacgtattatgaataatagtacttttaactcaaacacatcatattcacatggtgcaattcaaaacaaagtacgcctactcgaccttgaataaaaaaatagaccagttggagtaagaatatatatattattacatgttcgatactacaaaataagattaagaccacttggattacatatatccctatcttcaaattacaagtgaaattgttacatatacacaattaaattaaaaaagaaaaagaaaaaacgtccaagtgtttattagacttagaaagtaaaatagtagtctagaagtgtttaatagcgtacgcgtgcgagggatagcagagagagcggtagacccaaaagtcaacaggtcaaaccaagaacaaaaatgttaatgaaaaaagtttattattattttaatgtgttgaaagttagaatttttaatactatgttatattaaactattatcttcttgttcttctcattgagttgtgccgcgttcaatcacatacatcatcctaatatatgtgcgtcacttttcttctcacttggattatgatcttttcagtcaaatctcccaatttgtacgtttcctatatatactccttattctatcatctcactcaaattaaacaaaccccaaacaataattaaaaacacatactcttctccatactaatccaaactctctcactctttctcttttgctaataaagtctatccgtatatataattaactacataaaaaaatggatgttcacatgggagatcagttatatggatcagtaattacaagtattgatcatgatcatgatcaattacatagtagtgaagaagatcatcatcgtcaattggatttaaggaaaggtccatggacagttgaggaagataacatgcttttcaattatgtctccatccatggcgaaggtcgctggaactcccttgcccgccatgcaggtactttttacttctttcttgatcatttcaaacccataaataattttcagacctttattatttctagaccaaaagttcaaagctttctggttatgcacgtatgaaattaaattagatttttatcagtgtaccattttccttaattgctctctaaattaattaattaattgttattaacaataatacaggtctaaaaagaactggtaagagctgtagattgagatggttaaactacttgcgaccaagtgttcgaagaggaaatattacccttcaagaacaacttcttattcttgaacttcattctcgttggggtaacaggtactgctaatattgtctaattaatactttttcttttttatttatttaattatattttatttagtgtaagaaatgattatatatctgaatgggatgttgatatatagaatttgttttttttttttttggt

SEQ ID NO: 272872 - DNA, 954 bp, Cannabis indica
taccctctagttgtaaaatatataaatttcatatatagtcaaactaagcaatggttgaaaaaggtctaattttggcagttctattagcatcgatgttggctgggtgtatggccaatagagattggggttctggatttaactacacagattggcttcatagacatcgtagttggtatggtcaccaccatcagaaccaaactaaacaagttcccaacaagattatcgtgggtggctcggagcactggcgcttcaactttagctacaccgattgggctttcaaccatggcccattctacctaaatgacatccttggtaattatataacatatctcataattaacgtcactctctgtaatatataataatcaagatgatattgatttaaattctatataatatgcactgtcagttttcaagtacgatcctccgaaaggcaaggactcacatccacacagcgtgtaccagctcccagacttgagaagctttgtgaagtgtgatctaagcaatggaaagaagttggcgaatgcaacacaaggtaatggagaaggattcgaggtggtgctagataagtggcagccctactactttgcctgtggtgagagcaatggtttccattgcaatattggacgtatgaagttctttgtcataccaatgcttcgtccttggcattcgtaactcatccacactaagacaatcaaacagagcataatttattttcttttaataataaagacatttctcagaacatgtagactgagatatggctgctgagtgcgtgcatagattggatcgttattacttaattaattatttgatgacaccttgtgtttctttttgttaagctaactacttatcgttgttcaattggttttccaaactagctcgaatatattgtcacttatatattttggtatatgtagattgtcacaatggagccctaagccatgctataaa

SEQ ID NO: 272873 - DNA, 861 bp, Cannabis indica
aaaaaaaaattatcattgtattaaaaaaatttgtcaaaaaaataaactaaatatatgtatctgcatctacaaaacaaaacacatataaataaaaaattatcaaaaataaactaaaaatatacactataacaaatgtatataaatcaaaaaacaactaaaaaataattgtataacaaaaaagatattctaaaaatcatttaaacataactaaaacacaacataaaaataaaaaaaacgaatgcacatatatacaacaaaaaaattatcagaaataaactaaaaaaatataccatgtttaatgcgtatagattaaaaacaacttaaaataattgtacaaaaacacacacataaaaataactataacacaactatagaacacttaactaacaatatgaaaacaactaaaagacagctacaatgcaataaaaaaataacaaaacatcaacctcgttgcaatatgcaaatcattcatagattaactcagaataaactataaaatatctaaaaaaaaactctacttttattagtcatgtaatatgagaaagatataggaagaacgttccaaattttgtttgtaagagagagaaaaaatgttaaaactaatatgagaaaaaatgtttatgtaaaataatcttattttatttcaagttaaaagaaattaattaagattttttttacagaatgtgatttattaaaaaaaaatagtataaaatattttgagtgtgagtagtaagaaaaaaaatagaataagcacttgtaatttttatttaaaaaataataataaagcaaaattttgtaaaagagttaaaaaaatattaaaataatgtaaacaactataattattatatttatttatatata

SEQ ID NO: 272874 - DNA, 1734 bp, Cannabis indica
aattcttttattattattaaaaattgtatatatttcttaatttttagcaacaataaatttttagttataattttttaataaaaaattatgatcgcattaatgccactgtatagcatccccttaaatttctagaatgatattgtttccactctaatagtatagcatctaaatattttgccacatcatctatccacctaagcaaacatcctccctttttttttaccatgggagatgctctaatgccgataattttataatactaaatctgtatatattattttacattaataaaatttttgttacacatgtgttcttttctgacattgtagtgtagaattgaaccaccaaatgataaatatatatgtttttacttgtgaaaatcggttgttgtgaccggtttatgtttttctgaattaaataatttttttacaagagggtatatttgtttttctgaaaaaaaaaatgtaatttgatagatataactgttagacctcacggtcattacataaaatgtttatcggaatagaagttaacgggatatcccaaaccttctgtgggtaaacgcctacttagccacattatgggcagcataattacagtccctgctaataaaagagaaaatacaactagaaaacaaattaaagttactattacaaaaagagacatatttaccaataactcagtgagactccttcccattaagcgcattgataactaccctcgaatcgctcttcacaattacaaacttggcaccaatatccttggcagtcaaaatggccaaacaataggccgcctcttcaccacaaagagcatcagaaaagtcaacgcaggatgtctgaacccaaaccaccctaccaagatggttcctggcaacaactgctgaacacatgctatcaaacccaactctaacatcacagtttagcttgatccagtcttgaggtggaagagaccagctcaccttcaaataagggctaggggaagggaaaattgtagtatgtaaatctgcataggaagtacaaatatagtcaatgcacttcttcacatcaacagtatagttattatgtaccttgtcatttcgagtgcgccagctggtatcaactacaacagacgcataaaggaaaacctcctctgcaccaatccccttgtgtttaaggtcccaaataaattttacccaatcccacatacgacttccggtgtcatagaccggataaataccccaaggagatgactgccaggcatggaaagtcacatcacaagtaagaaaaaggtgttctaaagattcattctccctctcgcacaaagggcaactcgcatcctcaagatgaaatcttttcctgatcatagacctgacagggagggcactggagagaatagaccaccataaaatcttatggcgctccaacaccttattgttccaaagcttatttcagagtgagggagtaacctcacagtagggagctctttccatagccagaataagataagcagatttgcaagaaaagcacccattactttcaagggtccataaccactgatctttaccagtgctagagggggcaccacccattactatcaagagaagcaccaatgttaatttcttatcttgtgggtttcaataattttttaaaatttttcatatgtatttttttttttttgcagaaagattttttttttttaatttggttgttgttgcccccgacttttgtcccaatatacgtggtaccaaccagataa

SEQ ID NO: 272875 - DNA, 2677 bp, Cannabis indica
ggaaaaataaaaaataaaaaccacaagaaccgaacaaatggttcaaacttttattgttgaagataaaaatgtgttcataacccaaacattcataacggcataaccttcatgcgaaaacaagagttaacaccgaaagttcctcggtgattgagtggaatatgctcaaggcttgcagaaactatctagatgggcacctaaagagtaacttaactcttcattcgccaaaaccacgtgtcaaaatcgaccaaattatataaaaatagctagggaataatgcaatgcaagaatggcttggctttgctttgttgcgatcctactcttcttcaatatgatacctatatgtacaggctttagaagagcctaaaagatttttgctagacggggaaaacggatccttaatcttctccacctgccccttacaagtgaaggatacaatcccaatatatgttcgggcatgaaatcatgtcttgttagtattcccacaacaggagatctctgcaaataaaaacagcaaacaccatgttaaacacataacccatagagctgttaagttagagagtgaaattgaaatagtcacttacgcaagagatctttggtatcaccagcaagtgcctcaagcctacttctcggaatagtatgagagcctttgctagagacatcgtctccaccaccgtaaaaggcgaagcattggtaaatggatgcaaatctatgaacatttccaactcttcctcggtaaattctatatcgtctaagttttcgtcattgcctgagcctctctttgcaaaatcccctgacgagaactccttgaatgcattactgcctgtcagcgctggggtggtcatgaaagatttcttcttcaacaatgtaataagatgagcacgaaggattatgccaaacaagacaggggcttgggacaccggaggctcgtcgattacaggaaatccattgtgctttgtgcttttgagaatgtgtactatattaccaaccttctcaatcccacgaaaaacctggagcggaccagttacgacgtcgcttactgttagctgcctcatatatggttcaacatgagtctccagataaggtaatccctttgatttcatgataagatcgtatatgtttccattgaaaacatcagccacagtcttggaaacaagaagaaccagcattattaatggtaacagtaataaattattcgtcaattccagaatgatcacacacagggaaacagtcatcctcattgatccaccgaggaatgaagcggcacctaacacagcataaaggccttggttcagattcgagtgtggaccaagtagcataccagcgaaacgtccaaaagatgcacctgtcacaatttcaggtacaaaaagaccagagggagcacaaatcccatagctaaagatgctaaggaaaaagcaggtgacaaaaaatatgagaactgatgaatattgaaactcaaaatcagtgcctttgctgaaaaggttcttgatggcatcatcatttgtattaaatatgagactagccagatcattatagtgaccaggaggacattgaaacttcttgtagttaccagaccggcctattgtaggacaggcctcagttgcatcagatgggcaaggttggcaggatgcaaagaatggtaagccaaaaagaaggaaagatgtgaacacggaaattgcacaagcaagaagaattctgaaaacagtgcctttcctggaaaggggaaacatgaaagattgagcttagacttcaatacagaaagttgtgaaatcataacatctcctagctaaaagaacaaaaaaaaggcttactcgttgattatgttgtacaatctaagaactttgtccaatagaaagttataaaagcttcccaatatgccaccaacaataccaagggcaagaacaggaggcacatcgacaaggtgatatgaaatgtttgctgagtaaacatcaaacattatcagtcccccagtaccaaacagcccacatttcccgctgaagcaaacatcaatgagagcccggagcacaattgcaactacagctgtcgcgaagaaagctctccacagaagagcacttctccacctacataaaaatgcaatattatagtaatagttacgtgcaagaaaagtaataatggccatacaaagttttgaagtagaggcatagaggtacagtaaggttaaaagacaaacgagctcagctattcaggctgttataccaagatgccatctcttcaaaagcaaacagcacaccaccaacaggtgctcggaaagaggcagcaataccagcagccgcaccacatgttacaagatcccgtctgtccctatcattcttgaaaaatcgaagccatttccatgtcaaattatattttttggacccgccctgacctagtattgaagcaatacatgcaccagtatgaaccattggccctgccttcccaacaagaagagaagatgacactgctgttatgctgccaacaatctagacatcaagaaaacagaacccgaagagttaaaagtaatagactcaggactacacaagaattttgaatctatgcaaacacctgctctaagtcacattagctcatgcatttaagtaaatattagaaaaaaaaaagttgccaaaatgacagcataaaaattccaaattagcaaataaaattttatcaatattaatatata

SEQ ID NO: 272876 - DNA, 552 bp, Cannabis indica
actctttaacttatatcatgtttaccgtgcaaaacattctatcctgtggcatgtcagggtgagaatgaatttgtattaccaatttacaatgcatatacattcacagcttacataaatgaataaaaacttgtgcacattagtgtcttgaaactagccttgtccagaaataaaatgagagttatgttgctaaaagtctttctgcatagcatgaagtaaacctcttcttggtcttgtaggtatcactataatgtggccgatgcgaggcttcatcaacatgtagacaagggaaatgaagatgggttgtttatcagtgctgtggcctcatctggaaacctttgggctcttattatggatgctggcactggtttttcttcacaggtttatgagctgtcaacatttttcttgcataaggtattgtaaagaggaccgactactatgatctattgtagaatattaactactgtgatattctgtcattattaaatcatgttgctaggcttttcatagcgagtgtagctcattttatttcttctcaggattggatcatggaac

SEQ ID NO: 272877 - DNA, 1876 bp, Cannabis indica
gtgctcagattgacgtggagaatatgaaagaggtaattataaagaaacatgacaggatagattctcaggttgagaccttgtattgtgttcaggaggagcgagatatttttgctagtgtcaagaggaagttgacgaaaaaaatcctaattctggttggataatggtaggaaggctatcttagctatgttttccatgaaaagaatagggaagactacttgccaactctcagcggatgcagtggagcacattgcaaaagtgagagcggaggtgagggttgaggtggaagctcatgcagagaaggttcatctcagatccttgaacttggaccattcaatcattcttcgtacgttgtggaaacacgaccctacaattctcaaacatctcagagtagacgaggaagagtacactctaagggtggaggccatcgaatcaaatacttatcttaatatttatgacattgatgccactgaggcacctgctgatgaatctggagatgagcactctgcagaagtcatggagatatcttcatggaatggtgttctaggtctccaggaccctccccaagaccaactttaggatctacccccaaatcttaacttaagaccctccttagccttgattttctctcctttttttttttttaattcttcaactcattttggggatttgggccccttttttctgttttgcaagacaatttaactatgccttaaccgcgaggctcttgtaatagatgtagacatttctgccttacttcttacatgatgattatgttagcttctgcttttgcttgtttattgtgccacttgataggttgtcttaggatgcttagagcttctggttccaacagccaaagcttcaagccttagacttcttaaccttaggtcatttgttgagctttggaagcatataagtagcaagtccttcttccatacatcaacatttttaggtgattaaaggttcctttatggtgcacataaactttagctagttaatttgtaagtagcatagaaggagcattatctagttcccggaccaccaaagggatcacagaacttgattcctttttgggtactttaagattaactacttgagtagatgttacatttgaatgcgttaataaagtgacttttacacagaatattaggtttctattttccaagcatagctttattttttctacataaaatatagtattaatccacctgccctaacaaggttcgttgtttgaatttaacaaggaaaaagggttacaagtgtaacaaaattcaggcgaggttgcttaccaagaaacaagaatgaaaatgcatcaacattcagactatatttccctgtcgtaatctcaaacaacaaaactgacttgttgcacaataggtatttttccaaactatgctaaaaaaaggtagctaaaaatgcgagggatttcgggcaagtcttattattcagactttttgcacaaaacttataaaaaatttggctagaagaccagctgacaatgcaatagatttcaggtgacattttctttccaggaaagaggctgaaaacatatcgattgttctggcgaggaaaaacaagctgaatatgcaaccgattttaggtgacgtttcctactaggaaagaggctaaaaacgtattgaaattaaagtgatgtttcccttcaaatttttaaaaagaccagagaaatttaaatataaaaaaatagaaataataggtgggcattgtatgtttttcagggcacatagctaggtatattaccccccaagtgagctagaaatttcggatgtctcaaaattcttggtcacttgtttaaaatatagcttgtgcctggagacaaaaatacaaattcttttgtgaatttcttccatttttatttcat

SEQ ID NO: 272878 - DNA, 4380 bp, Cannabis indica
cccaaattgcatgagcaataggccttacatgtaaaggatcttctataaacaatatacatgatagtaaatctaaatcttggtaaaataagttccaacattattttctttaagtgagagaagaaaactatgatagtcaaaatagttttgattattatatttgtttaattaatactaaaatgataatgaatttttaaattttgaattatgaattttaaaattatgtatcattttttttttttaaaaatgatactttatttgaattttcaattatcagttaattaaaataaaaatttaagaaaacaaatcccctatatagggatatgctacacgcatagggtcttggactatcctatgcatgtacccttctgataatggacaataaatgatttctttatattatttaattacttaataaaaaaacagtatttttaagtagaatgcaagactttatctttattattattactattattttattattataataataattaaatttatatgtaatttttttttcaaaatttaagggacaagcatgttgataaacaattgataaataactttaaatttgagaaattgaaaattagacaaaactattaacaattaatcaacaaaccattgataatttatgagaaaaaaacagttttagaaaattattgacatactatcgatatacaatcgaaaattcatgctaaatcataattttggtaaattatcgatattctatctacaaactattgacattgaccttgacttgcttatcattgacaatatatcgagatactatcaataaaccattgataaatcgtaaaaaattcaacaatcgtgaaaaatcagatctcgaccttttagaccaaaatataacaaaataacaccagtacaattaaacatcacacacatataatggaaacaaactacatactattcccaatgtttaaaatatggttaccaaaaatcttacccattattggggtgaatgattcttgagattgaatggtcaccaccgagagatagagagatagagagttgaaagattatgagagagtgagcttaaagatatgagtgagatagagagggagagccaaaatagggagagagttaacaagattacctattttttcgcctcctgtttctcctagctggtgtctgattagttgagtttgttaggtagtttcgtctgttaagggtagtttagtccttacaggctgttttgtcgattattccctttactctgttttagctctgtataaatacctttgtaatacctttgtatcttattcattcaagtcaataaaagatttcattccattcaaatgtgttttcgtgttatggtatcagagcggggaagaggagcttccccacgatcttgattttttttttcttctcttcgccgtgttcttctctccagcaaaggttctttctacttctctgaagtttttgttctgaacttcatctctttctttcgtttctcgatcagtgtttctttcctgatttgttttcgtttccgccatggaaaccgacaatcaagctgggatccaaggaactaatgacgatggtatttccgctactgttgaagaagttactggaccacatactcaaagcaaccatgcgcaacaaaggaatccccttgatgatccttcaaatccctactatttggaccatggagacaacccaggtaatatccttgtgtctcaacctctcactggacaggacaattacatgtcctggagtagggctatgcaattggctacttctgtcaaaaacaagattggattcttggatggtactattcctaaacctcactcttcaaattcggttatgtacaatgcttggtatagaaacaacaatattgttatttcttggattctaaattcagtctctaaggaaatttcttctagtctcttgtatgatgaatcggctgctgccatttggactgaccttaaggttagattccaccaaaaaaatgggccacacatatacaatttaagaaaaaacctgatgaaccaaaggcaggagaaccaaactgtgagcatgtatttcactaggctcaaaacggtttgggaacagttagctaattacaggccaaactgtgtatgcaatggttgtacatgtgggggtgttaaaaaactccaagaacaccaccatatggaatacataatgtcttttttaatgggtttatcagattctttttcacaggttcgaagtaatatcctcatcatggaccccctacctgaagttaacagggtctttcacttagtaacacaagaagaaaatcagaaagggaactttaattccactgctgatcccaattcgaacatggcattcgctatacaaggagacaaaagtaacagcagcaagaataatgctcaaggaaacaagcctaatccccctaaaagaaaccgacccttctgcactcattgtaacattcttggacatactatcgagaagtgttacaaaatccatggatatcctcctggttttcacaagaatgataaaggaaaagaggcatcggctaatcaagttcttgctactggcgattctgcaaatggaaatgaaggacaagccatattgccacaattgacagcagctcaagaccagcaattattgaatctcttggctggacaacaatcgaataactctaatgctgaagttggcaacaacacaggtaacccaggtatagtgctctcgagtatgtccaattcccatctaagtggttcttggatactcgattctggggctactcgacatatatgttatgataattttttttttcaaagtatatgctatgttggtccaactagattaatcctacctaataatgaagatcttactgttagtcatagtggcactattgttctttccaataatctagtcttgagtaatgttctttatgtttccaattttagatataacataatatctgtgagctgtcttactaatgacagtaaccttgatataaatttctctcctaaccattttgttatacaggatcttgcaaacaagaagaagattggtagaggtaaatccaacaaagagctatacattttggattctcaacctcatgcatctcctattcttgctgtcaaagccgatatctggcactcaaggcttggacatccctcaaataaatgtttgagactcttagatagtaaaataaactgtaatacttcaaatttgcataaagacactccttgttacatttgccctttggctaaacaaaggaaattaccttttaaaaataacatcacctttgctgataatatttttgatttgattcattgtgacatatggggtccctatcatgttcaatctcactcgggttttagattctttcttactattgttgatgatagatctagatttacttggatatatcttttgaagcacaaatctgatgttcatactgtcaattcttgtcttatgttgaaactcaattcaattgcaaaatcaagaagtttagatctgataatgcgcctgagcttgttttaaaaaatttattttcaagttacggtatattacatgattttacatgtgttgaaacacctaaacaaaatgctattgctaaaagaaaacaccaacacttgttaaatgttgctcgtgccctttgttttcaagcacacacaccactcaagtattggtctgaatgtataatgacagctgcttatcttgttaatcgtattccttctcttaacttgaacaataaaactccttatgaattgttgtttcaaaaacagccagattacactcatcttaaaacctttggttgccttgcttttgctactaccctcactgccaacaggactaaattttctccaagagctaaagcttgtatctttcttggttatcctcaaggtgtgcagggatataggttgtatgatataaacactaaacatacttttttttatctagaaatgtgatatttcgtgaacatattttcccattctcaaaactgaatgaggacactagtaatgttgatcccttcattactattattttgcctgctgctgatgtttcaaacgcaccagtcaatgattatccttccactaacattgttattcctagtgttgatgttcctgtgcaggaagaaaattctggtgcacctgacatagaagtcgagcctactgatgtacccaacacaccaaaaattccacataatgcaccaacagtggtgcctagacgaactggcagaactacaaaaccccctgcctatctcagggactttgaatgctactcggttttacaggataaacataccacccctcactctattgataaatacatatcctatcataaactaaccgaatctcataaagctttcattcttgcagtgacctctcttaaggaaccacaaacttatcaacaagctatccaatttcaaca

SEQ ID NO: 272879 - DNA, 676 bp, Cannabis indica
tctatcactaatggctgaataatatttgtgaagaaagactaagtgtttcaaattgaagaagaaagatgaaggaagaggtctcatcaaaagctaggttattagctttaaaggcattagattggatgaagagaccatagacttccttttatactattcttcaatagggttatggttgaattattaggaataaaaaattgataaaaatagagtaaaataagcaacctatggccgaccacttaatgggccacacattggtttaggctttgtcatttttctcaactattttacccatttttcacaaatactactttttacaacttcaaccctataaatgccaaaactatttatttaataattaaaataactatgaaataaaattgttattaataatatttattaattagactccataaagtcttttaattaacaaataaaccccaaaacactatttcttcacaatcaagccatatcttaatgaaaaattcataaactagacatagtctaattttagaattataattgattaattaaaatcaattaactgagtcttacaagtagcttgtctcaactagtatggggaccattggcctgtataaccaagctttcaatgagcagatctataattatcaagtaaattcacaactttattaattcgtcattgcatccaccatagaac

SEQ ID NO: 272880 - DNA, 2991 bp, Cannabis indica
taaacaactattatggtcacaaaatgaccatagatgtatattgtacgaccatcatggttgtatagagtaaattaagtgaggttattttgtaaattttagtatttcacatgtatttttaatttggcaaaattcaccattataaatggataattggtggtaaaactcttttatgttttaattgtatacatttaactccttgttttaatttttgtggctaaactcccttaacttcacttttctttgctaatttgtaaagatttaaatttcactgttaaataccaactagattgtctttgtgtgcacgtatgtatacatcatgttttcattgtgttcgagattttattgtcacatgtatacaggtgtacacagtggcaatcttatttaacaagcgctttaaatttacaaagaaaactgaagttacgagggtattgccacacacacacacaaaaaaaaacctgaagttgatcttcgtgcttgaaaacacatgtcaaaatactttattttcaatttttttttttcatgttggtgtttgttatagttaaccatcatccctctaaattttaaaaagaattctgaataatttacagtctcgaaaataagtttgatattttttgaagacatatagtaaactgaaatatattagaaattcagtttttggtactataagctattcagaatttttcaaaaatttacagagattatattgtaactatatcgtgtacgagtgtcaaaaataaatttgatgttttgtgaacacatgtagtagattggaatatcaaaaattttgtttaccgtgtaaactattcagaattttttaaaaatttacataaattatattgtaactataataagtaggcatgtgatttcgagtgtgaaggttaataagatgttgtaattagcaataatcaaataaaaaattagagtaaagtgtataaaaattagaacatgattaaaaaaagctaactaatattaatgcacagcatacaaagtttaaccaaaaagattaaaagaaaaagttctttcgcccagttaactaaaaacaaactcagagaacgtacaaggttggagctagtaaaaagacataaaacatataatcctattcttaactaattactattttatattggatttatttaataattaaaaacatttacatttacatttacatgatggaacatgcattaggattttcatcgctaaacatggtgactaacttttcatcagatgcgtttggactgggaagggcttgaacgacattcttaacgtaacctgacggtgctttcttgtcgtatgcctgtgccacgtaaggataagccaccaagttgtacggaacataaggccacaactctgctttcttccctgtgctcttcactttcttcaacaccttgtttgcctccacataacccgtcaccgttactttgctctgttttctgttcacttccacttgtttagctcctgtattattattatttttttaattaaaaacctctctatcagttaacatatattatatattcatttttattttatgtgacagcctaaaagattaattgggatatcttttgctgctgccaccaatcaataagtgctgcaacattaatatttataaattttattaaaggatcaaataagtgagaaaactgcaaaattcaaagggtaaacgtgaaagagtagctgcaattaaggtacgtgtgtagtggttgacctagtagtttcagaagaaaagttttatttattgatctttccaaaagtatgctaacacgaaattgtcttcgggctattgcagattatttcctcagatattgagaataagttttgaaaattatttccacgcttttatattttaattattatcattggcctgtgcccaacaaccttttcatgtatgtaataaatggttaaagtccaagtgaaggaaaaaccagtcaaggtctgttaacagtatttcattttaaggttttaatttattaaaaacctttcactttgagagaagtccatgaacatatatggatgtattactatgttatgtataaacatatatgtacatataaagacgtatatggtgttaagggatagaggaagtacaaaggtcggaatacctttcatggaggtgacagcatttttaactctcctttcacagccatcacagtccattttcaccttgatttcaactgtctgtattcataaacaattttaccaaagaaataagcgtttttatatactacttactattgagtgaatcttgttaatttaaatagattatataaatatacacacatataaaagaaaatggttgttgagctttaatacctgcattgcttttcgcttcttccttggtctgtctattgtgaaataatccgacagatggtcaaggactcccattttttttttcctataacgtgatcttatgatctaaaattaaaaatcaagttcaactttaataaacagagctcctttgaaacagggagaaggagagagagtgtgagagaaagtggtttttgggcaaagaaagttaatgttatgcaatgtggattggtcctatttatacacacacattaaaagtttgtataatgagatgattgtttagtaaaattacttagggtacaagttgtggttatattaaattatatagcttagaaaatgacttgtgtccccaaatcatgctattctccaaaatatcaagctggacagttggaccaatcataccacaataacatatataatttaagcaaaactaatttatttaaaatgtatttattaactgttaagtcagtgctaagccgtgtggtttttgttaattagtttgtatggccaggctataagctagtttgacagcttcaaaaaagaagctgtggtcttgctggttccctttctttttttttttcaaaaacgaaaacgcagaaacactgttgtaaagtgctcttctggccccctttgattgtccatctacaaccaaataatagttagcaaaactaaatcaatgatgagaaa

SEQ ID NO: 272881 - DNA, 757 bp, Cannabis indica
tgctgaaacgtcctccgcattgcaagccacccccgacgattggaaaaagaagaggggcgtattatctcggatgccacccgaggtaactcttgaggaaaagaagaagcagatatacagaaagccgagggggaaatatccgttgggacagggacttcttcgaagttctcggattgggcagtagactcaatctcggggtaataagccgccgtcatctgagtcgagcttccctctgatacttcaagctcctccttagccgcctcaaccggtgtcaatatgggaggaaaaatagcgaaaggacacatagccagaggtggtgcaacatcgacgcgagaagtagcataagttccaaggcccaatgcagcttgctcaaaacaaggacagctgcagacctctgaaaaatgcaatggaggaagtgtagtaggctcgaaatcacgaaagctagaaaaagggttcaaggaaagaaatgcaggatccaatggctgcaatcctgagaaaatgttagaagaggaaggctcttttgagtaaggtatctggtttttgggtagagaagacataatgtaggaaggacaaacaaagaacacagtcaaactaacccagaaaactaaaagaaagttgaagaatattctgagatagaaaaggaactcaacgagaagcctatttatacaaaattacatgcaaaataataaccataaaaaaaaagtgggagaaacgaagagtcaccactttgttgttttaaaacacgtgccaactaaagcac

SEQ ID NO: 272882 - DNA, 1618 bp, Cannabis indica
gagagagagagagggaaagagagggaaagacggaaagagagatagagaataggaaaattaaatttgaggggtattttgggtagaaatgaggaatagtggaattgttttgtacaaattaatggagggtataaattttaatatgggatgttttattagggtcaaatagtgaaatttccctataaaaaccccatacttatacaacaataacgtctattgagggcgaaaattaacttgcaacaaaatgagtttattagtgggataaaaaaatgattaagattttgtgtgaattaggaagaaataaatgatcaaactaaaagatcatagaagaagaaaaataaacaaagtaacttttattattaggtaggttgtggacaactctctttcacctttatttatttatttattgaagtgccctttattaggcaagaaaaaatgtctatagataaacagaatcaagttttataactctagttagcaaaaaaaaaagagttttataactctaacctttcttaaatcagaagaataaaaatacaccaaccaaaataaaactaaaaatagtttataaaaagctccataattagtaatgccgtgaatgataaagtacttgtgaataattcttttagaaaaataaagaaaaaatatatttattatgtagaattcagggttcacactcacagaatgaaagcaagatgagtgatggaccctacaaaaaattggttcttcaatcagaagatatcccttgagtcaaaattagaccatctcacatgatgatctatttgtgaagaatactgtagtgaatgccaagatatccttagttgtaaaacttgtaagtaaataaataaatttaaaattccaaaatacactaatgaattttcaattttgaccttgtaattttcttagtgggaccataccaattctgtccacacttacccctcaaatctgtctttttgtagactgcatttgctgccccatatttacgaccctctctcacaggccctataaagattagtctatatatgagcctcaaattactaaatagagagagagagagagagagtttacagtcttcatggcaaaagacctaagaattttattttatttaatttataaatactaatgctgaagtagatagaggtgggtcttactaagattgattgttttatttcttttctttttctttttcttttttttttttgttttttttttttttttttttctttatttgtttaataagaaagcatcagtttagcttaaaaagcaaaagagaaagcaaaagttgaaaattcacagattccagagctcttctgtttctctctctctctcttatttctctctctaagtgctgctggttgatggcatatacccacaatgccaacaagaagacaaagcagagcccacctaacaaacccacaaaaagaaaaacgctctcacattattaaaaactatccatttttattttattttattttttttttgaaaaaagcatgattgagataaatagtaaacaattaaatctccccctcattacataaaatgttaatagaaatggtagaaaacaaaataaaaaaccaaacctatgttacgaaaacacttactggaaaaagaactattacaaaat

SEQ ID NO: 272883 - DNA, 1438 bp, Cannabis indica
acaacccttttcatcattttcttccatactagacttctctgaactctcttttaagggttattctccattgattttttaatgcagctgaagctatcttacttggtttccaacattacttggtaatgcttggcacaacggttctcattcctgcttctttggtaccccaaatgggaggtggaaatgtaagttataacacaaagtgttaaatgactctatattgattgattgattgctgtgtctcttaattaacttatgataatcttttttaggaagagaaagcaaagatgattcaaacaatactttttgttgctggtttaaacactttgtttcaaacattgtttggaactcgtttacctgctgtcattggagcttcttatagctatgtgccaacaaccatttcgattatcttagctggccgatacagtgacatagtgaaccctcaggaggtttttttccattgcagaccattctatttgttctttttctagtgttgttttcccaattgaattgatattgatatgtcctgttttaagtgtagaaattcgaaaggataatgcgtggtactcagggcgctctcattgtcgcctcaactctccagattgttgttggtttcagtggcctttggcgtaatgtagcaaggtttggaaaggctcttccaatttattgtgtctcaaattcccatttagttaatttgcaatgctatagttagctcttctctaagcatggctacaatttctgtttgtacaggttcttgagtccgttgtcagctgttccattggtagctctatcaggcttcggtttatacgagtttggttttcctgtggtaggagtctttatactttttctcaataagaaaaaaggaaggaaaagtctactcttactgttatctgacttttatgcttttgactatctgtctggatttttagcttgcgaaatgtgtggagattgggctgcctcaactcatccttctactgttattttcacaagtaattttcacatatatactattcattagtcctatttcaattttcaagatttttgtgtatacttgattcctctgtcaattgattttcgccacttaattctctcagtacataccacatatgatacgaggcgagagacctgtgtttgatcggttcgctgttattttttctgtggcaattgtttgggtttatgctcatctactcactgtgggtggagcatataagaacgcaggacctaaaactcaaattacctgtcgaactgatcgttctggcattatcggtgctgccccgtggtaagcctcttttgctatttccttgtaactgaattcatgttgctatgacacctttgatttatgtgttgaattacacaggataagagttccatatccctttcaatggggagccccaactttcgatgcaggagaagcttttgctatgatggctgcttcatttgt

SEQ ID NO: 272884 - DNA, 819 bp, Cannabis indica
acccatattaacatttttatttttatttttttaaaaaaagtgcagcaagatataaagttcaactcttatcataatattgttgtgccagctgtgggatgtgcgggggggattaattttagcttggaaagagggctttgaatttgaaagtattaatatttctaaaaatcagattaccgggtttgtgtactctgaccctgtaaggatcccctggttgttgtcttgtgtttacggtcctccgtacttccatgaaaagaagaacttttggtctggcttgatggttaatggtgaaaaatttggtggcccttggttaatcttaggcgatgtaaattttgttctgagcaactcgaagcgggttgggtctaacaccacctgtaattctgaccatcgacccctctttattaataccgacttttcagtctctaacgccaaaaggcctttccgccttgaagtttggtggataaaggaccctcgtagttacttggtggtggatcaagcgtggggatctgtttcccatgattgggcccctgctagagtgtttaagaaagttggtgcgacccgcttggccttgagtaattggaaccgggtgcaatttgttaagttggattcttgcatctctaagttggagggtcaattacaagctatccaaagtttgcctactggtgacagaatttgggctacggaggttgaggtgaggaaagagcttaatgaggctttaaggcggaaagcaattcactggcaatagagatccagggtttcttggattagggatggtgataagtgtactaattttttcttcatttccgccacgattcgtaatag

SEQ ID NO: 272885 - DNA, 1068 bp, Cannabis indica
agtttagtttctaaaacactcggtaaatattatgtatgataatttaaattttagttaaataaagaattcatttattattggataaacttaaaaaaaaaaaaaaaaacaaacaacaacaacaaaaaccaaaactacatcctctctctccttaagggtcagccaagagaaaaccaaggaaaactagaaattttccctccatttttcaaccagaaattaagagtatattagcaagaattttagtgcctttctagttgagaactaaggtaagctccattcctttttttctctttgaatatttttaattgtgaaagcttggtttgaacatgcaatactaggttttggtttttgtttggctttggattgtttggagtcaattttgggtgatcgattcgagttgttggagctagtttaattgcttcttgagtgtcttggtgttggttagctaagtttgagtttaaagagcttaaacttaggtcatcaatggaaaaacttgattcagttccttaatgatgctatttctggttgggtttggtcctttatatgttaattaggtgttctgaaaacttcaattaaatttggggtagttttgagaaagttttcaaagtatggtgtttactacaattttcttataaatggtgaaccagtttttgtggcagaacttagaaattgctaaactatttggggtttcgattcacaagatttttaagattttggagcctagtttttcacattttatcgatatatccacgctatctatcggtacggaaactcttagttttaagtttaagttcccaaaaagtcatttaccaagtcacttacaagtttatgcaaattgtgacttaggaccttaaatcgtcgagcaacagtttccactcaggtggaccgacacacttgaatttggaattcaggtaagattagtataatgaatatgcatgcttacatgtttagcgtacatgttttagattttcctagtagataacgtatcagtttgaggagtattagtggacatagagctgcactgaatagtgatgcataaatgtttggcaaagtatggattgatgctatcac

SEQ ID NO: 272886 - DNA, 620 bp, Cannabis indica
tgaagatggaggtttcgtatgtgttttggggtgtgtacaatataaaagaaaaaaattaaggtgtggacaatatttttgtaaaaatttaagtatggcggtaaaaatgtaaaactgcccccaaaatctagtatttttgtaaaatgcccaatacgaaaatttacacaaaatactaattttttttttctaaactttatatttatattttaattaattagagagtagtcacatcatctatgattaaatagaattatgtattattaatcttatgttacttttatctttaactgtgataaattcaactcaaaacaacatctataaaatgatctggaatgagaataaatcaaaaatattcttttacttttatttttagaagtctaatatgtatgtctaagagtctgaataagactttatattgcatttatttcgggattattaagtagtatcaaaataacttaagttaagactcctttatacaaagtgatgaagtatctttcttgagatacattaaatattacattcatgcatattttattgaaatgaattgacattctgaaaatatagttaaacacttacattccaacttcactgttatattgattcacataaatcaatatttgatt

SEQ ID NO: 272887 - DNA, 828 bp, Cannabis indica
tttaagcatgcatatacacataacatatacatacattcagatattgatatcacacgttatattcagttcttaccttatttctgcatttaagtgtgctagccgacctgaatggaaagtctcgtgctagatggatgccctaatcacattttgaaactgggtaagtcacatgattaaaaccctaatccccggaaacttaaaaccttaactctaggttctgttatgctttctaggggttaacctaactcttgaaatagggaaacacctatccgcggcactgaaatggacaaaaattgagaaaatgaagtgttcgggaatcctgccaaaaccggctagccgattttagaggctttgcaaaccggctagccggtttgcaccagttttcccaaaacatttcattctttgctcaatttttcaccaaatgctaccaaactttccagagtacctacacaatgtatacacaacatattccaaccagaaaatcacagaaaaacccaatgaaactcaacttgccattaaagacctaaacttgagtttcaaagctcaagctttctcaaaaccattaccaaagctcaaaactaatatccagaactcaaaatcaactcaaaataagcttagaaatcagactacacaatctttaaaccctaacagccattaacttcaaaaatcacatactcaactaaaggaaaagcttcacaacacatattcaagagttctagggttatacctttgctttagactcacaaacccttgcttaatactcagaaaataccagcttgaagatgagtttccccctggttttgccccagccgaaagagaaaagagagagag

SEQ ID NO: 272888 - DNA, 867 bp, Cannabis indica
aataaaaaataaataataagaaaaagaataacatttttgaatttaataaaatgaaattgtgattgatgatataattacttttaaaagactattttgattttttttctttaataaaaagaaataatttatctaatattatgaaagttttttagaatttgttttgtggtgtggtagaatgtcgattctcaaaagtgaatttagtatgaaaacggtaaaagaaggcatcacaacattatcattttttaaaattaaaaaataagaaatttatataaaaatattagtgatagaatatttctataccttaaagaatatgtaaagaaatttacataaaagaggattaaaattaataattatgtaaatgtgaagtttataccttaaattgtaatggtaaaaaaacgaggtcatgatccgtatgtttaattatttccataatgaaatctttatttgtcttgtagtttttattaataagatgtatacttaacgctcttgaaactatagatgatatttacacacgatccaataaaatagaagtttgaagcccttgaaaatagatgagactttgacaaaatttaattgaaactagaatggattttgattgtatctcatcgaacataaataagtatctaatatatccaattggatgtttccaaggcctatcgtaggaatgaaataaaataaattttttttaaaaaaatacgagctacattgtgaaaataataagagactcgaaacccttgaaagtagacttgaccttgtcaaaatcgaatagaaaataaagtggaccttgacagtttctcatcgaacataaccaaggttagctctaatatttcttattggctttagatagggtatcatagggtgaaaata

SEQ ID NO: 272889 - DNA, 592 bp, Cannabis indica
aaaaaaaaaaaaaactctaagatatagttacgatttacttttaaaaataagattttgatattttatattaaattaaatattattattattttgatgaaaggagaagtattcttataacaaaattatatcaaaagatacatcatacaatcatcgcttaacacaaaatcaagaaaatactaccaactgttcacaatgtattaagaatacgtttatctttagaagataattttcttttactaaaatagcgaaggcgagatttaattctctatttaatcatatcattagtatgctaaacagtgaacaaactagaataaaaagaaacaaaactttctattaacccaaataaaatagatcacagcagaaatgacaacaatcaatacataataatgtaaatcagactccagttgcccaatccaaatacacaatgggctaagttgtaatgtgacagtcagtagttttgtgatccgtaagcgggaataccgagtaagctgtgcaatcccacattgcctggggaaggtcaagtgtgatgattctgatgttgtgtaggtatgggactacatagttgaagatggcttaaatagattgattggta

SEQ ID NO: 272890 - DNA, 591 bp, Cannabis indica
accccaccaaaaacactataaataccccctcaaagctcattaatggggtcgagaattttgggttgcctaagtgcaagaagagtaaatactcaccaagaacattctctgtattaaatacactcataaatatacaaactcgtggactaaggctcattaacgccccaaccacgtaaaaatccttctcttaatttcttagagctctttaatcttctattattttattggttgccgaaaacctcggtcaacacttacctttccaaatctgataggatgtttttgaggtacctggacgaataaccagtgtttattatataccaagctgtgttaatagcttctgcccacaatcgctttgtcagcttcttgctatttaacatcactcttgccatctcctgcaatgtttgattctacctctcaacaactcacttttgttgaggagttttgggagaagagaattcatgagctatacctgtagacttacaaaagtcatcataaattgagttctcaaactccttaccataatcactctgaattcgaacaattttcccaatattctatcctttttcaactcttaatctcaaacaaagagtttta

SEQ ID NO: 272891 - DNA, 967 bp, Cannabis indica
accttgattttggttggtcatttaagcagttaactgtcccacttgattctccaaggttttaatggaagctctagtctctaacatgaattggagtaataaattagttgtaatattcacacctccagtagaacttggttgctgaataggctgttgtggaggcctatttctctgttgaaagaatcgatccttactgaagttgaggctggccagatggttacacttgaatataccgaacgactccatcgatagaaggatagtcaccaactcttggaaatccaatggcttaagcttgctccattggtagattattcacatccaccgggcaagtgtcatatgtgtgaggtcccccacatagctcacaagtaacttgagcctgctttacctgagcagtcatcaacttagtcaagggtagtcgctccaggcctctgtcgtcaacaacctcgtcttactctcctgcgtctgactccggccggtcttggtccacggaggcggacccgagatcaatctctggttcaaacagcttaacatcgagggtaactaccacgatggcctccgagtaaccgacgataagacaatggagattgtttctatggtcttggccggaaaagtgagtaaaggcctagtgtctctgatcaaccaagctggggtcaaagcacggcactgacggacgggtcgtcacggctaggccagctgccaatgctgtcaaattggcgtttgtgggagaggttgtccaggttgatctgaccatactctagtccatagtcaacgacgaccacattccggtgattacttcagtggcttctgatgaattcgggcagcagtacaatatcaatgctgacacgcttgctggagaattggcgaccacattgggtggtgagaagctgattttgttgaccgatgtggttggaattctagaagacagggacaaccccagtagcttagtgaaggaggttgatataagaagggt

SEQ ID NO: 272892 - DNA, 789 bp, Cannabis indica
ttcgcaagcaccgaagtggcactcataaacgacaaggttgacactgctatgcccaatggagaagtatggacgttgtacgtcgatggggcttcaaatagcgaaggttctggtggcggaatcctactaatcagtcccagcaattttaaggtacacgctgctttacgctttgaattttctgcatctaacaatgaagccgaatatgaggctttaatcgcaggattgaagcttgctctcgagatgagaatcgagtatctacaggctttcagcgattcccaaatcgtagtatgccaggtgaatggagaatatctggccagaggcgggagattggttaagtatttagccatagtatgcgaactgatgcaaaaattcaagaaagtagtcgtgtctcgagtaccccgtgctcataatttacacgcagacgcattggcccgcttggcctcgactagagaagccgaattactcgatgtaattccggtggatgtattggcctttcccagtgtgggggatcaacttaataggcgaactacctaaaggaaaaggcagagtcaagaatgcagtagtcgcagtagactattttacaaaatgggctgaagccaaagcactcgaaaccattacagcgactaagttgcgcgagtttgtctacaactccataatttgtcagtttggcgtcccttacaagctcatttcagataatggaaagcagtttgattgtacggagatgagacaattataataaaacacaccatcaaaggaaaactcgaagagtgtaaaggggtatggctagacgag

SEQ ID NO: 272893 - DNA, 1721 bp, Cannabis indica
atgttgattgaattacattagacaatctcttacatggatatgtaaatatatgttatatttgacaccaaaaaaataaatttatcatagaacatctttataagaatactttatttaaaaataatctctaatttacttttaaaaaaattaactcagcatttaatttctaaattgtaattagttttacattttctaagtctaatatacctctataagaataactatatcttaataaaaatatgtatataatttataaatttgtttatgtagatttcataataataaatgtataaatattatatttattcaataacaattttattacaatatatcaattatatcttaataaaaataaatatagtttataaatttatttatgtaaaattataatttttattctaaattgtaatacatatacaaatattaaaatatatatagtttatatattttatgtaaaattaataaattttaaaattataatacatgtataaacactacatttatttaacaaaatttttattataatatagtattaagggctatttattggtattgttattacattttatgttttgatttttcttctcaatgtacctttatttagttataaactctcaattagaatataatttgcttggttccatgtgtatccttagataaaaattttactttatttacattaattagtatttatattaaaaataaaaactaataataattttaccaatttattatgtaaaacaataaatatatataaatagctattttttttttaaataaaaacatatcaattttattaataatgaggttaaacctcaaatacccaaaggatcaaacaacatatttagcattttcaatggggtaatatacacactctcaattcattagaataaaaacttctcatcactacaacaaaagaagacttttaatcccattcttacacttaaataaaaaaaataaaaactgggataaaagatatcttgtaactttttattctacttttacatttggagccttaaagaaaaatttggaacaagaatcttgtttggcaaatgaacaaaaaatagtactggaagggctatttttatgcatttttcaaacacacccttagcattttaagcgggactttttatcctagttttcagccaagaaccgagataaaaggtccccttatatctgggccttttcacacaataatttgatgggcctttaagacacatataaaaggtacattaaggttttagggtttcatttattagggtaacaattttttctttcaaacactctctttctctctctctctctctcttctgcccacctcaatgtttctatcattctcttccgccaacatcttatttatttttgttttttttttgtaattatgatgtctctcctctttattctcaggtggatggagcttcatggtgaatgaagctttgggttcgtggtggacggagcttcacagtgttggattttgtgccctaaataaaatcaattttaatataatcagatttacaaattaataaagttcagaattcattctttgttgcatagttcacatgatttatttcatgattatacttaatgtataaattctataaagtccagaacatatataaatatatatttattcatgattatagtattgtcagcacagtagaatataatcatcattatatgttcaaaagtttaattcctattatttgtcggttcactagatttag

SEQ ID NO: 272894 - DNA, 352 bp, Cannabis indica
acacagcgaggatcaacaacgacatgtttagtacgtagttgggaacgaggtaggaagaccaccgagagataccttccaagcagcaaaatacgaagaaccttgggggggactttaactttccatagggccctccacagttcagaatccaattgaaggctccattcacctttcaattcttggagatggcgatatgaactcttaaccgagtagaagcctgtcggctctttacagcaaaaccaagaatcaacattaacattatcacttagaggaacctgcattatcaagtcaatatcccttgcctcaaacaagtcttgtaaaacctcaagattccattgcttacgattgatgtgca

SEQ ID NO: 272895 - DNA, 1377 bp, Cannabis indica
ataaattttttaaatatttaagcatataaattcaaatttcccattagaaaatacgtaaataaaatagggattaaaaagatagaaaactcatgaaataataagtaaaataattttgtaagaattgctgactaggatttgcattaaagcgaaaattgagtgagatcctgtaaaccattacccaaatatttcaaatcattaagagcaaaaaagtgaaaaggtattgagacatttgtggagtcaaaaaaggcaagaccccaaatagtactttcaacaactgagcaattttgtcatttacaataccatatttttcatgagattcttaaagggtattatcgtaataatagttctaagggtaacttggacatttcaagttcaactaacaccatttccattttccaatactggcattatttgtttaaaaatgtagaaaactcaagctttgtacatttttacaaaaagtaatcctcaatgcattatttgtttctattattatatgttactaatcaaagctacttttctagattacgtatctaatagttaaataaatttctcgtttttctaatttgcagcctgccttttagtacaaatatagttttaaaaaaattctatttaagattaattaagtatttttaaggaaataactcatgggatatttaacatcattgaaggagttcttaaatataaataatttgttatttaaacccatcattttttcattaatctcatgccttgaactgacattgtgtgtgaatcgaatagtttttgatttaaacaatataatttcacaatttcattcattgaatttatataggaataggatactaacctaagaaaaaaaattaaatataaaaattataatgctgaagctttagatgccaaagttaattagtgtgccagcccacatgtcataaatactcataacgaacctaaaatgacactttttgctctttttgcatgcattgcaatgcatacacacaaaaataatgaataaaaaaataaaaaattagcaaaatttcaattatgtttgtctctcctttatttaactttctcaggtgtagatttagtttctaagttatttttatggtaatttctttctaatacaatttataagaaggtcaaagtaataagtttcagggaaaaaagaagagagagagagagattttcatgaaaaaacggcatacgttactgtctctttctctctcgcctacctcgaaccaaaccactcctccattccattttacattaatttgtatttttgaattttgatttttctttagtttccttaaatttttcctttttcgccgacacacgcatacaaaacacactttgtttctctctctccattacaccaagcttcgaatatctctctctctctct

SEQ ID NO: 272896 - DNA, 619 bp, Cannabis indica
gggcataaaacccaacagaaaaatcaaaacacaaagaaaaaagcaaaaaattaaagtaaagaacaaaagatttttatacatgttcgaccaaaccaaagggcctacttcttgttactcccatagttattgacttatcttctccattaaaatgatgaattacaagcttcatttgttgagcgcacccagagaacaattatagatgaataccattgaaactcaacttcagtttcaactccaagaacagtagtcttggtctagtttcccaactttcttcacttagttttttttctctctctttctatgtctctctccgactcgatttcactctctcacaattctatatgaattgtgttacaataacagaatgattaaagacctttaaataggcaaaacaaagactaaactagctatcgagtgcactaactaacataacaaaatgctacaacatttaagacaaaacttaatgaaccaacgttgtagcatttgaactcgataacagttttttgtcaaactgttataatccaattttttcgctctatgaattaccaaacaataaattaggggtgtttgcggtgctggtggtgcggtttttgataattttttcaaattaacccgcaca

SEQ ID NO: 272897 - DNA, 1321 bp, Cannabis indica
gatggaatatggttgctgtgtgggaaagctctcaagacatgagggatttgtctaagaatggcagccaaattggtcaacattggccattgctaccttctttatatttttgactataaaacaagacaactacataacctatcatctacttagtacattttgataaaaagggagatttttttttttttttaataaaatttttaccaaagattttatatatatatatatatttttacggtattttacaaaaataatacgaaaaattacaaaaaaaaataataataataataataataataacatacaaataataaaaaaaatcaacaataaattaataagagtataacataaaaatatatcaaaactcatattttctataaataaaattataaaaatcgtaaaaatacttaaaatttcgtaaaactgtatttttttaatttatttattgtttttataaatttgttaaataatgcctttataataatgcttgtttatctatgtaatctgttatatatataggattattctttatatcaatatcaaagtttgatcaaattacggcaacacattaggattaatatggagtaatatacaagaatttgaattactctacttattacttattattaaaatcgagccatatacaacaatttgttatggtatttgagccaaatcaaacaatgtcaaaagcttgtgacacctaagaaatattggggtatttgtagtacgggtagtataatttttaactatttgttcaaactaactcgtatatgcagtttttttaatttcccaaactacacttacattgcgaaattaaaaaaccacaaaaattgcactgcgaaaaatagtgcagtgcggtgcgatttatacggtttagactatcactaaataattaaactatcacaaatacaacaaagcttgagcaacccttatcaaaaataccataaggcttaaaaaataaataaaatgaaaaaaaaaaaaaaaaaaaaactcaacaatacaataattagtgagcttgagttggactttcacatattgaaacttaaataaatataaacattgatatttttataatatgcggtgcaatgcggtttaaatcgcatattaacaattcaaactgcactgcactgaaatttcaaaccacatttttttttttggatgtagacggtttggacggtgtggtgaacacccctcctaaaaaagaagttcttggttgacgagtataggcccccacttaatagaccactcaatgaggctcataattttttaagggctatttacaaaaatatgggaaaataaaaataagttttgatatatatggcat

SEQ ID NO: 272898 - DNA, 1103 bp, Cannabis indica
tgattcacgatgcaagtgttgaactgctaagtgttggcatgctattcggaccgtccactgcccgatcagaaaggctttgtccgtgcagctatatgcggtgttctgttcggcatatctcttttaagcaaatatgtgaagtcaattccacgtgtcactagtatgtgatgccacgtcagagtgccaaaatttggataacaatcacctagtctttctcttttctatatacctctctttttacctctcaatcttttctctctcaaactctcaattctaatctgaattgagctatctcgtctcaattttgtgtcatctaaaataactaatcaaggtggtatttataggcttaagattaagatcctaaagtcgatggctgcatgaaacaagatggttaagttagttagaaataactaacttaactaactcctctttgactgaagtctccatgtctgatcaaagcctccgagaacatgtacgagctttcagactcacgaaccaaggacactcattgatgatgcttctagataggatttcgcctgctagagttgactatctggaactaccattctaggagggacaactagctaacaagaactctatcccagagtgaggctagcaatcctaaagactagacccgcagtagacatgatggtcatctgggaacacccttccagacttaactatcataccacaagactccttttgggagttgcatccgtgagtgaacaactttccaaaaatgacatttgtaaagaccttttcatttgatgaacctataaaataaattccacctagttacttcaaattaaaagtatgacgatgatgatgaaagaatgcagccatcgctggttggtgttataggaatctcaatgtactaacttctaagattgatcaagttcaagcaatgcttaaacttatttaaggttaggacctttgtcccaacatcaacagtattatcttaaattataactttctctaaaccaaccagtccttcttttatcttctccctgatccagtatagtatgatatttatatgtttactcttttcatgataaacatggttcttatatagatgaatggatgaattgttgggttttgggccctaa

SEQ ID NO: 272899 - DNA, 516 bp, Cannabis indica
tttatttatttatttttattgtactgatatacatattttgtttttttttctttgcttatttctattggggcaaaattctagaataatcaaataaaaattaaaattctaaattaattattgtagggtataacattaatttcattcatcataaatgaaaaatcctataaattaaacaaatacaatacaaattaattaagctaatcccatagaaattaacatatatgaacacaaaataaaaaactaactctaaaaaataatttaaaaaataaaatccaacaataaatttcagatccaacaaatccctatatcagtacaatccaatcacgttgtcatcgatcttcctcgcacgagccccaacccaactttgatgaagaaattgttccaagctcactgaaaaaatcataccagatctgtatataaaataaaaaagagaaagagagaatggagaaggggatgcgtgggtacctgggatttcaagggccactattcatcaaaaataagatgagaggtagaaca

SEQ ID NO: 272900 - DNA, 1451 bp, Cannabis indica
aaaaaaaaagaagaaaaaaaatcccaacttgcaaaataaatgaaaaactaaccaaagctcctcaaccacaacagcacaatcggcaaggtttcttcgagttcggtaacttttgtacactttttgaagcttaacagcagcagcatcaagctcactgaccggtctaggtgagaacataatggctggttcaggcagagaaagtgtggggattggtttgtgtttatttatttggttttttttcttaaaagtcaaactctctattgggtcttgaacaaggctcttgaatgaaagattactcttaagaataactttctccggtttgtaatgctgcaaacgattggacctgtcacttttggtatcgttagaaccatttgggattactgtcatggtttctgattctgttctcttaaagctctgtgttctactgtatttgaaagcaacacctctgggagaaaaacagcttgtgtgttgtaaaaaaccagagttttggctacgttctacaatttctttccaggctgaaacaagtatggagagggataaccccatagactaaacaaacccaccaagagaactttgtttcaagaaaagggtatctgtaatttgcattaaaaaagaaaaagattaatacttctcaatactacataatggcataattaaaaaaacagaagataaatcaaacaaggtgtaaagggatggtttattaattatcataccttcaattttgttgcttttctctttcaaaacatggttgtcttttttttataaggattaaatataggatgattagtccacctggtttcctcttacttatatatacagaacaaagtatgtgtcctttgctgaatttttcgatacgtgttaaaattggaaaaaagggaagtcgttgaattctcttatagaaaatcaagtcaggtacttgttggttgtgaagtgattagagggttcaactcttgattttactttcctttcacgattcaaagccacgagtttgatttgatgtattcaaagatagactttgaattaacttaatttggagttgtgaacaaggtttgctcttatgaacgctatgttacattctcgtatatatatgtgtgtgttcttcatttacaaaaccatatattaaaacataacaaatatattaatgtttaaaaaatatataattaaaggaagtcggtcaaagaaggtaagcctagcctggtttccatgaaattctcctttggaaaacacaatattcaatattgcgtttcacttagctaaactgggattttggtagtgtgttttaattctcaacagtcaacaacttttggtcatttcgtgactcgtgctgatataaatcgtaatactaatagctctctttctttcattttattatagaatgaaatgactataagacccttcccctttttccgcgggaagtgagaagtggctacccttgagaaatgttaaaaagtaat

SEQ ID NO: 272901 - DNA, 730 bp, Cannabis indica
caaccaagccaaaagaagttcaaaaccctcacaggtaaagtcgcagccttaaaccgctttatatcaagatcttctgataagtgcaaggagttttttcagattttaaaaggcaacaaaaggttccattggaccgaaaaatgcgagcaggcttttcaaaccttaaaaacgcacttggggcaacctccgatcttgtcaaagccaatgaccggtgaagtcttgtccatctatttagcagtgtcggaatatgcgattagttcagtactagtacgcgaggatcaaggacggcaatacccggtgtattatgtcagtaagcgattactggatgccgagacgcgctatccccaaatggaaaagttggcgtttgccttgataacatcgtcaagaaaattgcgaccttatttccaggctcacagtattgaagttttgacaaactaccccttaaggcaagttctggcaaaaccagaaacatcggggaggttattgaagtgggcgatggagttgagtcaattcgacatcaagtataaaccaagaactgcgatcaaggggcaagccctagcagattttatccttgaattccccagcaccgaggtagcgctcatagaggacaaaagtgacatcgctatagcaaatagagaactgtggacactgtacgtcgacggagcctcaaatagcgaaggttctggtagcggagttttattaatcagtcccagtaattttaaggtacatgctg

SEQ ID NO: 272902 - DNA, 1001 bp, Cannabis indica
tataaatataaaaaaaagaaaattaacacaaattaatttcgtttttgccaaaaataccaaaaattcagctcacttcattgtttgctttacgtaagaataaactaaccttaacctacgctcaaccacagacgatcagtaatggtgcgcactacacacacggcgtaaactaaccctcatcaacatatctccaaataaataaacaaaattaaaaaagaaaaaactgaaattattattatttcttctcagatttacagtaaagaagaaaaaggttatatcaaactacaaaagaaagaaaatctcagaaagaagaagaagaagaaagagttacaggtgacttttttgatgagcttttactatatatctactcatccttcgatgacgagctttctacagtcgtttcaacctcatcgtggtggtcgtggtcgtggtcgtggttgtggtggtggtggagttcggattctccggcgacgtaatcgaggagaccttcgccggttttatctgatgtggccggaggtaaggaggttttagcgaagacgagtacagcgatgaggaaaagagcggtggagagaagaagtggccagaagtaagctaaaatggtgaggaattttggagctataaagatgagtgtagtgattagggtgaagagaatgagtgttatcaagatgtggaacttgaatctcatcagattttgctggatctccattatcggaaaaagtaagttttgtttggttggagagaaaattttggtttggattttgggaatttttgtgtgaaatgagaaaatggagaaagaaaaagtgagtgaaagtctttctctctctctgagtctctgtgcagagattctctgaagagtttgtttagtgtttatttgctaattgatccttttttgggtttagatttacttttttaaccttgttatgtgatgggtggtttttgtttgttgatggaatttactaaaatgcccatcagctttttggtaagtgaatttttgacttaatttg

SEQ ID NO: 272903 - DNA, 547 bp, Cannabis indica
tcacggatcttcttcgtcgtgataaggataatttggcagctatagatcatttgccatatctgttactaacaagataaaggattttgaagattttaaagcaaaggaagcagagattattgcggcagaactagccatacaacaacgacgagctgagttcaaagctgaaaaagcatcatttgaagtagatctttctagtctcaatgattccttggaggagcaacgacatctcgctcaggagatagatcagtcaaagaaccaagctaatgtagaaaaattccatgaagctgagagagcgaaagcaacactcaagattcaagaagaagaaatccagagaagactcgacgctttaactttatttctcccgatagactaaaaaactttttatctttagttttagtttttattagccctttatttttattattagccttgaggactaatagtattttgtcatttagaccttttagaattttgactcctttgttaggaggaataaagaatatatattttttttattttgtggctgcatccaatttttgttcagatt

SEQ ID NO: 272904 - DNA, 562 bp, Cannabis indica
ttatcgaagggagaggaacgaagtttcgttcgttctttactctattatatatgttaaacttatatatataatatatcactactacaaacaaaggcctttaatcccggtttttaaggacttttatcccgattttcgctaaaataaaaaccgaaatatatgacagtgggataaaaagtctttaaaaaaagcggaataaaagaataccttttatcctggtttttattttttcaagcccagcccactaactatccagtatgaagaagaagactccagtagcacatatactatagtatatagaatcggagtaaattaatggaaaaatataatgaaataaatgaagaataatcagaattaatatttataatatgttgtttactacaatatattgtttaaaaatgaaataataatgatttatcttgttcactttatctgaaaacgtaatcaactcttttgagttaaattatattatatggtaattatcttgtaaggcatattttaaaggataaaattgtgattatatattttaatattaaaaaataaaacaaataataaaaatcattat

SEQ ID NO: 272905 - DNA, 1352 bp, Cannabis indica
atcggttaacacttttatgggatgtgcctggaagtacggccgtagcttacgagatgcgtgaactaggcagaaagcgagtttttctaaagggggatatcttgcctctacccctagtaaccttttacttacgtagtaaataggttgatggtgcttaccctcttctcgcactattgctgcagtaatcgcatcttctgaggtagccaaataaagaaatagcgtctctctggttattggttttgccaaaactggaggcatcgccagatgcctttttatgttttgaaaggcctctttgcactcttttgtccactcaaactttttattgcctcgtagtacattgaagaacgacacacacttatcagttgacttcgaaatgaatttgttaagtgcatccattcttcctgtcagggctcttacttccttaggctttttcggtgatggcatgtctattaatgccttgattttctcgggatttgcttcgatacccctcgcattaactatgaatcccaaaaattttcctgaggaaactccaaagtaacatttttttgagtttagcttcatgttatacttctttaacatcttgaagcattctgcgaggtcagttgtatgatctgtactctttattggttttaccaacatatcatcgacgtaaacctccatagtcagttcgatctagtttgcaaacatttcgtgcaccaatccctgatatgttgccctagtattctttaacccaaacgacatgactttataacaatagagttccatgttagttatgaagcttgtatgctcttgatcttggacatgcatttttatctggtaatatccagaatatgcatccatgaatgacataagctcgtgcccagtagttgcatccactaactggtcgatcttgggtaatggaaaattatcttttgggcacgccttattcagatcagagaaatcaatacaagttctccaagttccgttaggctttgggacgagaacaggattggctatccacgaggcataaaacaccttgcgtataaagtcattgaccaacacttatccacttcctgttttagtgccccttgtctctcgaaatcacagggtctccttttctgtctcttcgctgggtagtttggctcaatatttaaatgatggcagataatgttagggtcgatccctatcatatcttcatggctccaggcgaattgatcctggttcgcccttggaaacttattagctgctatttgagctgcttgtctggttcttcccaatgtatcacactttgtgagatttctgggtcgagaatacctattccaattattcaatggttttactggtttctctcatcttgaactcgtgggtcaagatct

SEQ ID NO: 272906 - DNA, 562 bp, Cannabis indica
tcatcagtgatatatatatatatcacactctttgtactcagtgaaatataatacagaatgattcttttacttgctctgtcttttcctctctttgcttatctttgttcttctttgttcatcttttacattgttctttccttttgattctttgttacaatgaaccgaaggaatcataatcatgacaaccagatccgattcaacccgcaaaaataactcaaattgctattcctagctgtcatctctctccaatgaaaatcttgtctccaaaattctgtctccaccctgcttaagtaatgagcaaatgatacccatttaaattttttaaaactcacgtgatactttcaaacttattctaacagttccgtttctattcttccgttcagtttccatggctataattttttcttttttacttttttttctttttcctttttcttttaaggtctatagatatcataaaaagaagaaaaaaaacaactgagatagtacgagtaaatggtgactgtatttaggagtgtgtataaatcaatctaatccaataagaactaatcgattcagttac

SEQ ID NO: 272907 - DNA, 791 bp, Cannabis indica
cttgagtggaaagttgtccgaagtggagaaggcgtcggctgaggcccaaaaggctctggttgctgagaaggaatccttggccaaggaggttaaaatcctgacagtccaagtcaaaaaggcgttccttagcgggagttatcagttgtcctttaaactgtactctgagtttaaggagggcaatccgatgcctggaatctggacgaattctttgcgaaatactccgagtttaagaaggatgaagatttggtggattcttcttcggagttcgacgaaggcagtgggggcgaggatgacgatagcgcctaaagagatgggcggggatatttcccactaaaatttcaataatttccttactgttccctttttatgcgtgtatgacaagttttatggacaattttttatcgttattatgttgttttatttttttttattatcgtttttgttcaaggaaaaatttatggaacaatctttttatttatgtgtttcgtttattgtttaaaggtttgtaaggatttttcccatggatttatgttttaatcttattttcctcattatgggtgtttacacgtgggagaggggggtggtattatattcatttattattcattattattattatctttttcttttttttttttgaaacgttttgacacctgggaatgtgcatttattgccatttaagccttatatgtaggcaaatttacctttccgccttccacttgcccttccttggccaccttttgtgttctatttaaaccaacacttccttttgttcatggtgtctttctagc

SEQ ID NO: 272908 - DNA, 290 bp, Cannabis indica
aaaatattaatttgaaaaagcaaattaagtggccggccatggtgtggtaatgggcctcacttaattttgcaattttatcaaattttatctctaaccttttaaatgccaaaacatacaatactaaatactaaaacatactaaaacatagcaagtaggaatgacaagagaaaatactaaaacatacaatactaaataatttccaaggttttcaacaaactgatatcagtgtcccctttaggcgagagtcaaagctaccatccattgaatagagttttcagctcatctaaaat

SEQ ID NO: 272909 - DNA, 1898 bp, Cannabis indica
ttgcaactctatagatttttactttttaatgtcttttttataaaataatgcgtacttgataagattaactaacaagttgagaaaacttcaaaaaaaaattataaaatttgggataatttttacaaaatatcgtcacacgaaatttttttcaaaagtgctgtgttctataaaacaccagtagaacacaaaatagaacaattcaaaacatgcagtagaataactaaaaaataccagtagaacaccagtgaaaacttaacagaatatactgcagtatgaaatttataaaaaaatacaataaaaaaataaaaatactgtctaacagtatttttataaaaaaataataaaaattagtgtaccatgtaaatttcccaacaaattttaccaattacgtttaaataatttgataattctcctaattatatttatttcaacaatcaccaattaagtaacttaaatgaagaggacaaattccattttccttctcctattaatataataatgcaaactgaataatcttagttttttcttggacatatttagttgttatgctttcttaaccttggtatctaaattaagtactacttggtacaaattagtgatatcgtacacaatcacaatgtgttcacatttgcccttttatcttttctctgtacaatttcacactccattaaagtacctttgagtccccaccaaaaacaattacactaatagttgtaattattataaaataggaggactaaaatgcaatattaaactctcacgatgagtcgcgcctacttaaaccccaaacactcaaaaagccaaatcagttctaactaacaaaaactctcttaaccaaaaaaaaaaaaaatggaaattcaacgctcaaatctactctccattttcttcatcctcagtctccgattaatcatagccgttgatgctgaatactactacaacaacaacgctaataacgaaaccaacggctcagatttcatccgtacaagttgcggaacaactctctacccagacctctgtttctcctccctctcacgctacgccgccgcagtcggaaaagacccggctcacctcgcacgcgccgccgtatccttaagcctttccaagacaaaacacatggcggcttacgtttccaacgtcacgcgcttagccgactacggctccggcgccacagccgggaacccccgcgccgccgccgcacttcacgactgttactcaaacttcgacgacgccgtagacgagatccgcggctctctccgtcagatgagacacatcaatgtcgtcggagccgtggccggcggcgaggttttcaggtttcagatgagtaacgttcagacatggatgagcgccgccctaaccgaccaggagacttgtacggatggattcgaagacgttagcgattgtccggtgaaagctgacgtcatcgaccgagctacggaggttaaaaagcataccagtaatgccctcgctctcgttaaccgttacgccgagaattccgttccttgatatatatacagttttattggggtacgacgtcgtttttggttactgaacaggtactaatatatttgtagaggttttagaaacactgtcgttttgtatgataatgttgtcgtttttgtgtttatttcttcatatatgtacacgacagagtaagttatctgtctatggataatttaacatatgaatgagttgagtgagaatttttcttatttttgtaaattatttaagctttgaaatggtttttttttttttttgatgatgaatccgagttgactcagttcagttccatagtgaattacgagttccgagttcaatgtggacctaatatatatatctttttctgtcgctttatgtaatttttgcccgtgaaatttaaatgttgtctgctgttgtttagg

SEQ ID NO: 272910 - DNA, 620 bp, Cannabis indica
aaagtgaaaggataggggtaatttttgaaggaaattaaaaaattgacatattttttccatgagtaaatttttggtataattaaacaccatttgctattttttagcataatatatcaaatttcccttttaaaattggtttattttatgaaattttatttattttattatttaagttaatttgataaaataatttaaataaacatagatattttaaattagtttcatttttgaattttaaaatttttgaaaagatattttaggttgcttttaacaatcttaaattttcaaaatagttgattagttaactaatactttaattatacgagtaattaatatcttctttcacatttgttaaatggacattatttgttatatttaattgtttatttaaaactttgtttaacaaacaaacctattatttatttgatctaaattgctatgattaacttgctgacagatccaatgatctaattttaatcatagtctaattgttaatagatccgatgaataatttgtaacaggtaaattttatatttctttcatctgtgtaaacctagaaagatgatagggcacatccaaatcaatttgacctgtgtgagcctatatgtttgcttttgggc

SEQ ID NO: 272911 - DNA, 669 bp, Cannabis indica
ataaaacccaacaatatgatgatgctctggaaagtttggtggtgattggggaatatttgagtagattatgggggcttaaaagttgagatttttcgtgttgtttctacccagacaattggaattccggttggttcagggttgttccaaccgaaattccggttggactgtatcggggaagaccgaattttgttttggccataacttttgacttgaaactccattttaggcgttctttatatcgttggaaagcttgttttgagctctatatgttaatctataaatataatgttaattatgtgattattaaaagtggatttagggattaaccctatttgtgtatctcgaaaattgtgactaggattaccgacacttgattaggagcacctggggatttggaatttcctcgtacttgggacatcaggtaagatagtagttttcacgtagagttaagcgcggtggcgctcatgttttatactatggttgtgattaattaagaagcgggattagggtttttaccctaaaatgaacggttgtatggcctagggtttttaccctagtaattaaagattttgggtgttatgctatgctaaatatgttggaataaggaattatgtgctcaaggcataatgaaattagactcggtaatttagtaccctaagtttaatagaa

SEQ ID NO: 272912 - DNA, 1117 bp, Cannabis indica
  modified_base (52)..(52): a, c, t, g, unknown or other
tgtgatgattttattattgaatggcaaagattacacttacaacaatgagaanacaagaacacaaagcacactaatggtgattcgcaccaattacaaaatgagctcactaaaggcagtcgaaatcttgaacctgaacaaccttgtaacacccaaacttgaagagaattcatctcaataaagctctcattcttctttgtgtatcagcctcccaactctctctctctctctctctgtctctcttagttgtaatgttttctatttatagcagtaggttagttaggacccatgtcaaggcagttagttagttgtttaagtgttctaaaccccacattactagtcctagtcttttccttgtgattatttgttcttggtttgtttttgtggtcttacacttgtgtgacacttgccatattttctttcttccgtagcttgcagataatttgtttgttagaaggccttaatgagacttagtagttagtgcttgtaccatttattaccgataggaaaaaatgtatttagaatgaatatttatgtctgtatataatacaagtagagattatagtgtttgttattttccagtggtcgtagccataagagcgatttcttttattcagctacaagaggacataaaaagaaactgaatgttgaagaaagaaagagtttaaagagtacaagcaaaatcaattctcttaggaagctcaattggtagatatcgaggctactctctcccttgttctaagggtctcaatatacttgaatattttttattggctgatatatgatattgatcaatatatgattgtgataattttgtcaatatttatatatttatgttaggttctttaacataatagtgtggcaaggatactagctttgtgcacgagcaaacggattaaaaactcttggtaatgtatttcgcatcttctttccttgcatttttatttagtttttctttttttaatgttcatctaaattttaattaagaagaaagattaggaatataagaatagtgaagaacttgtataattaacacataaatattatatataagataagcattttatattagttaatattgtgttttggtttagcctatgttagttttataaaattgtac

SEQ ID NO: 272913 - DNA, 662 bp, Cannabis indica
atccatgtaaatatcgcatttttcgccatacagataatgacgtcaaactttcaaagcgaaaacctctatgccaattcaatgttgtgtgtaagataccgttgttcatactccttcaattgcctagatggataggcaataactttaccagaatgcattaaaatgcaacctaaccattgttttaaagtgtcacattaaatcatgaatttctcatcactgattggcaaggttagtactggtgcagtaattaacgtttgcttcaactcttggaagttattttcgcacttgtcagtccaaacaaatttataattctttcgagttaatctcattaagggcgtagaaatcttggcaaatccttcaacaaatcttcaatagtatcctgctaatcccaggaaacttctaacttcggtagcagacttgggtcgaggccaatcccaaaccgcttcaatcttcaccaggtccactaggatgccatacttgtttacaacatgccctaagaaacttacttggggtagccaaaactcacatttcttaaatttagcatagagatcatgctcccgaagacattgtaacaccatcaaaagatgtttcccatgtgcctcttctgaattagagaagacaagaatgtcatcaatgaagacaattacaaaatcatctaaaaagtc

SEQ ID NO: 272914 - DNA, 1478 bp, Cannabis indica
gtgtttttattattatattttttcgtttaattcttagttggagcgcaaatgctttcaagattattcattatttgattgtaactatttttctcttcttcatgaattataggaaatattgacactgtcttcaaaagaaatcatcgatcaaatggacatctctaagttaagaagaagcttcttctacaattataattcttgtttcttcctatgagaaagaaatatatggttttaattccatctttgtactaatgtaactgggtgggatcattacaattttgtaattgtattgttcattgtgtaaacatatttgtaaagtaaaaacaattgtacttttacaaatgtattataattaaagtgttttccatcaatatttagtgtgtgtattaatatcagatgtatggttttgttcaaatatatatgtttaggctaattgttttaaagatttataagcaagaaaaaatgaaaaacaattttaatgaaaaataaattgttattatataaataattaattaataaaatcttctaaaattatacacactattataataaaagtattaattaaatatatttcttaacatttttaatatgtcaataaaagaatgtgttatatcattatattaatatcataataataattttataataacattaagtatgacactacaaaatgttattaaaagtactagatttttaacgtacccccattcaacaacatttcaaaaaatgtcattaaatgattctcccagcacattttaaatgtcattaaaacatatatttgttgtagtgtgagctgagaaaacaattagaaaaattgttattattttccttgtgttgctgaaaattggttagagtcttggaatattgttatttacttctttattgtaaagagcttaaagatatgaaaacagaaccgactactttaagagttataatggtctgttgaggcttgtaaaaggtcttattttatttttcttgtaacttatttaaagcattttccatgagatagttagtatggggatttatccaacatataagttaaaaaaaaattgttgtatgtttgaatgttgaattgttattaataatttgtgtgtaaatattgtaacatcttaatgactaggcacactacagtgatcttttgattaatgtgcactcctttgttaattaaaagatttctcaaaaattgtgataaattaaaattttgactaacattaaactttaatatatatattgttatcccaaattttgcactctgacatggcatcactggaatggtgacacgtggagtctacttggaacatctgctcggagagataggccgagcaggatgcctcgctggcatgactagagtaagatattcagcgatccacgcagagcaatcaacacttagcgaattcagctttcgcatcatgagtcattagctcaatccctataactcaggatcaatttacgtggatacgacatacacacgatcccactat

SEQ ID NO: 272915 - DNA, 2835 bp, Cannabis indica
  modified_base (88)..(88): a, c, t, g, unknown or other
ctcattcgtattaactgctttaccaacgggttttttatttaaagaccataaactcttccctattatatccttttatttatcaacacanacttcagcaaagcatcaaccgagtcggagagagatcaacaaagcgatcactgccaagagaaaggttattagtattaaaagaggtacaaacacagagcttacaacactaatagatttttttaaaaaaacaaaattagtaatacatcttcaatatgaaatacctgcaatctttaaaatatccccaagagtacagtaagagtgttccggtttgtgatccacaaacaacttttcgaccattctgtcaaaacaaaaaaagccaacttaaataactcagtacatagggtgaaggtatatgcattccaatgttcaatttatcttcttcgtatctaatttcaataataattaagaccagatcaaatcttctatggcaatctcttaatcgttaaaatggcaatggcaaccaaggaagcatgttaaacattgtgaatcgaaaaaaaaaacataaaaaaaaaaaaaatgtggtacaaaacaatcaatcataattaagcatttcaaaaagaggtgaaaaatggtaccttcatgataacaacgaaaagtagctcatcttctgaaaactcagattgagattggacctaacaaaaatggaatcaagaattgaaatttagataccgttggtcggttggcagttttctaagagatcgaatattagaaagagcatcgtaaccttgtttcttcgaagattgcaaacagatagagtcccatctccactaaatgaaaaaaagaaaaaaagtattaaggacatcataatcaaaggataaaagggtttaaattaaatgttaaaatctgaaaaaggaaaaaaaaaaaccttgttcccaaaagcttcatggaatcggatgtaaaagtcatgtcagaaatgtactcttcatgaactttaaaagaatttgtgcaagtgcgttgtctggtatcccaaacctgcatttagtcattaaaagataattactatcataattaataattagttaagacacaagacgtaagataataagatacatggtgaagatgatgatgatcaaaccttaatacaaccaccatcatcaccagaagcaatggtagaattcgttaaactgattatcttgttaatggcatccctgaaaaaagcgcaggcagagagtgtaattagttttccataaaagagagaaatatagtaagaattaatgaagaaagcgaaaactaactcatgagcatcctcaagacgagcaatggcagaaccggtttcaacatctgttgctagaattgaacagtccggtgatcccgacacaatagctgtcacgttaacacagtcaatttcatattatcttgatcaatcaaatacgtacataaacatctatatatatacaatatcataccgcggccatcgttaatgaagcgaacagctctgcaagattctgtgtgggcgtgcacttccaacaccctaacaaacaaaatttaatttagaagaaaagccaaaggaaatgagagagtgacagtgatagagaatggtttagattatttattacctttgaggagtggaatcagcagtgtagcggtacctacaagaatatcaacagtatatacatgagaagaagaggaagataataatgataatggtgatgaagaagaaagctgaagtttaagaaagaatattacaggagaagatcgccggtaatgagtgcagcagaaagaaggtgatctgatggatgaaaatcaatgtcaaatggcaatgaccccaaattaatctccatgttttctgcttctaatgcttcttctttcttagattgaaaggtctgggaatcacaaattgtgaatttgacactcacaaatttgtcatatttgggattttatcatgttcctacaagcagtaatcatcaattaagctcatgaatttcccgggaacataaaaagacagtgtaatctaaaaaacgtaattacttaatcatgaagctttcgtctttcattaaattgaaaacaaaatcaataaaaaaagtaataaatttagcattatataaaacacatctaggcaatggaattcgtaaatgataaacaaaggtggttaaatacatggctcacttaccaaacacataactaataaaattggaagacgatgaagaagacgagcagagaggaatgaatggccgagttgaggaagagagagaaagagtgtgttggggttttattaggttttatcgcttcaaacggaatattgggctgggctacttaatgggctcaaaaaactggagaaaattacacgggcctcatgacgaaattttgaaaaaagaaagggttttacaaaaatattggattttaggtaaaagcttacaattttattgccacaatttttcttacaaaaatattatctttttatatatattaaaaaataaaatagaacattaaaaacaacaataaaataactaaaaaataaaaaataatagtagaacaacagtaaaaatttaacatagttcatcatataaaaaaatacacaatttttttgaagaaaaattccgcttaaacctatttttttttcttttatttatttatttaagcctcttgcaatgttatcaaacttttatattgaatgtaattttataatttaattaggaaaatttacggcaaaagttcaaaaagttcagtttgatacaaataaatctcaaccttcaaaaatagctgtaatagtcatattttttagtttttaagttaacaaattcgtcaaacttatttcaaatgttacgtgtcgaaatattattggtggatgttattattttaatttaaaaa

SEQ ID NO: 272916 - DNA, 681 bp, Cannabis indica
tcccaggaagcgtgcgagtgaggacaaagcatgctagaaacactcgtgttggtttgtagggtcagtcatcagtccatgaagcagccagagtgacgtactcgtgtataagagccatgagtccgtgggtgtaaggacccaatggaggtttgaaacgaggacgttacacataaaatgcatctcagaattcaacaataacagtataaataattatttaaatagctataaataatttcataattaaacgtgattaactgctaattttcaaattaaactaagcggtctttacactttgagccaaagattaaagaaaattagaatgcaaggtgttggtaaaaatggtgtgtgagaaagagttctttgagctgttgagatgatgcaaggatgaaagatgggttcattaaatttctagcttgaaattgccttaatactcaatatacttggattagtaagattatgaatcttgaggaatgcaaggctaaatgtttgagcacatgctcttgtaaaacttatataaactatatcagtggagaaggcagagtggctgctacttctaatttagagatctgcttgatattcaaaaaaattaatcttgcaaaaaattgtgcattcgctatgaggctattagtacaattactttcttgtaactctttgagtgtaaatatagcatgcttgagcacatgc

SEQ ID NO: 272917 - DNA, 512 bp, Cannabis indica
ccaacccgattatgtcttgaacacataaccctatacttcaatatacatttatatatatcatggcataacaattacatattaacaatttatttgggtaataaccctaagccaataaaccgctcactttagagtaataactctaatcctggtttctagtttctcatatatatcacattccatataagcgccattctgcatatctctacatgctaactactgtcttacctgatgtctcgcaaatatggagattccaaatccccgtgtgctcctaaccaagtgccggtaatcctagtcacaactctaagatacacaaatatagggttaatccctaaatctacttccacattataaactgggcatttaaattctagatattcacatagaactcgaaaagatctttccaacgatataaataacgtcccaaacggagtcccgagtcaaaagttatgaccaaaacaaaaacgtgaaaaaaaaaacacaatatgttgacataaaatggccgcggctactgg

SEQ ID NO: 272918 - DNA, 654 bp, Cannabis indica
accacatttttttttctaaatgaaggtccaaaattttttttttccctatgacccactaaatttcaggactggccctggctgtacctctataggaacatcgtccattttgaacatttgatctggaaaataacaagatactctagctagactatgatcaaccatgttagcagatcgtttaataaaaaaataagaaaatattgttttaagatgtaagaagtttttgaaaattttctataaatcccctaaaaagaagaaagcataggtaataaattttgaatagcttggactgctacaaagcaatctgactccaactccactttctgccatggttgagttttaatccagcttagcgcttcctttataccaattgcttcacctaaatctggagtccctttaaactacccgacttagccatcactaatttcccttgagagtcttttgcgactatgccataatcaaatgttgctcgatcacagaaaatagcggcatcaatagttaccttgattatattctcttgcggcttagcctaaaattttgctccatcaccagctttaaaaattggaaaagaagcctttgaacctctattttaggttgacttccattgcacaagacaactcataaatgagataaaaataccatccaccatagcatact

SEQ ID NO: 272919 - DNA, 747 bp, Cannabis indica
gagaaaaaaaaagattaatggaaaaaaaagagagaaaatgagttaacaatgtaaaatagactaaacataagcaataaaagtatttttgtaattaaagaacttttagaaaagtaaaattgaaaaacatattttataaaaaagtttaaaaaaccaaacataaataaaaatgtaaaaaaagtaccaaatatgacatacagtgtaaaaatcccaaaacaaaactcatagctcctagatgttatactattaaagataaaatgatatttttcttgaaatttgcattaaagtcacgtaattgaattgattttatatttttttttaaataaaaaattaatggtagaatataataatttataagattataattataacatttttaagatgtgttatacattagtggttttaaaagtaagagtgtgtggaaaaaaaataaaataaaatattatatttttaaatgatgtaataatatatagcacctttaaagaatattaccattaaaaatactctaataagattctttttaaggttgaaaattaaatataaataaataataacataaaattattagaagttacaaacaagctataaataatagggttatttgcggcaaaacctcctaaagtggacaggtttttgcaactaaccccctaatctaaaattttggtggtaaaattacctaaaccactagtccgttagcagttagccttttccatccatttttggctgttaactgccatggtggaatgtcta

SEQ ID NO: 272920 - DNA, 2580 bp, Cannabis indica
aattccacaaggactcaaaattccatcatctgtcacaaggaacaatcttgtctgtaagcttcataaatcaatttatgggcttcgacaatcctcacggcaatggtataggaagctcactgatgctcttttaaaggaagggtttgcccaatcccaagctgactacacccttttcaccaaaggctctcacaacacctttgtggcccttctcatttatgtcgacgatatcataatagctggcccaaatattcaaatacttcatgctttacaagactcccttcaagcgagattcaaactcaaaaccttgggtcctctcaagtacttccttggttttgaaatagctagagccaaagctggtctctttctatctcaacgcaaatatactttgcaacttcttcatgacacagggtatactagcagcaaaccagctaaggctccattggatccaagacaatgactcgatgataaagaaggagacattctcgacaatccgccccactatcgtcaactcattggtcgccttctctacttaacactctcacggccagacataacgtttgatgtcaacacactgagtcacttcatgtcatgccctcagacaccacacttgacggccctccatcatctgcttcgttatttgaaaggatcgcctggccaaggcatcctttactcccctagatcgtctctccatctccgtggcttctccgattcagattgggctacttgccctacaactcaccgatccaccacgggtttctacatcttcattggtaactgtctcgtttcttggaaaaccagaagcaaccaacagtttccaaaagctgtgttgaggtagagtatcgtgccttagcagccactacaagtgagatgacttggatccaatatctcctcaacgatcttcacatcgagcaaccaaaccagccttcatatattgtgacaaccaatcagccatccacatagctaacaaccccacttttcacaaacggactaaacacattgaactggattgtcatttcattcgtgaaaagattgccaattccaccattcgtctcatcccaatcagtagcacacttcaactcacagatgccttcacaaagcccctgccttctactactctcaattctcactagtccaagatggccatacatgacatatatgatccatctttagggggtaacaagaattatgctctgtctatttactctgttttactgtccttggttagttgtaatattagttaagtcggttggcagttatattagttaatgtagttcttaaactttcggttgttagttgctagtccagcttctccgtatatatacttccctatctttgtacatattccttaatttaattcatcaataaaacacatttctggttttacgttttcatccgcaataaaaataaaactcaaaaataactataaaccagatctaacaaatttcagtataaaaaaaaaatctaacaaacaaatggccaacgaatcattgagaggaaaattttggattgcctaatggtgacttccaaggtctacaacaaaatttgaaaacttaaaaagcagcattgtcattgcaccaccacacgcagtggctgctcacgtttgacaataacgaaatagatagttaaccatgaaatcgagaagcccatgcaaagaagaacacagactaggtgattatttgtgaaaagtaggttcagaagccaccggatcagattcaaaaatctgggaactccattaatgttgacgaatatcaccactaattccaatgatcttaaagcctatctctttgaggggttttgttctcctagatctcgcgagctcaaccacacctctctttgtctaaaacggagctgaaatgatgatggaaaattatttgaaggttttaaagtcgcgaatgtaattgtgcggttctcctcgttggcggctcacgtcaggtggggctcgtggaggtggacgtttcgatgtcttgttgttcaccctgtgtggcgtgtgtcgtcggctgatgatcgaaagccgatgtcgggcttgagagaggataatggaattcgagaaagagaggagagagaagacaaatgtgagtttttttgcaaattttttttaataattttacaatttttttatgttttaatttttatttagttataatttttttaaataagtgtactatatgggtcaatgaaaatttgacatgtgtacatgcttgtacacatggatagttcaacatgtcatttaacagaaaaatttgaatagaagtggctaactgctaatagaataggggtttagggagtttcaccgtcaaaaattaaaaattggggttaattgctagcgagatgacacttttaagggctatgccgcaatttactctttgcatgagactcataaaattattggtcctaataagtttttttaaaggataatcattttagattagtaaaaacaatatcgaaagacaaaagtgaaaaaagttcaattgtctaatttaagggcatgctaaatcaatagcactgacaatttaggtcatgacatgataatacgatatgaactcaatatgaattattgtgggttagtgataactctatggtata

SEQ ID NO: 272921 - DNA, 2088 bp, Cannabis indica
aaattgactggttgcggaagaaaatcatagagtctaaggtatgacgaattttttccaaaaagtaactttgttttatatctgaaatgtatatttagctatgaaggatattactatttcacaacacgagccaaacatacatttaaaaggacgaatagcaaggatttaatatttctgataatacatacaatccaaattgcataaagatctaagaagaaagagaagaaaacatacttgaagttcatgccacatggactagcggatactgtccaaaataagcaagacaacttgaaaattgtcatagcaaatgcccttaaaatttgacatgatatgagtttattctaaaagtagcaccaccaacacaagacttttgatgatatgcttggggagaaaccttcagtagcttgttgaggatctaatatggtgaaagtagcattaatggaaaataagaatctattgggaattcataacataatagcgttgacgaactcaaatcaataactacaagtgattcaacctccaatgacacctctttcctgctttgctcatgactctctacaccgatgactatgattttatcttcaaataaattcatcactgaggatgggtgggtattgcttcagtcacaaaatcaatatcatcacttgtcaactaagcatctaatgtacctaaattttcagttaaaaccactttcaatgggtcttgctcttcaattataggcccaatctctttcgtgtattcaactaatggtgcttctacattattcaaacaactcacttaacttttgttatttgagttattgtccttaaaatactcctaatcatgtacccttaaattatcacatagagatcttactatgtctgtcaagtgattaatttttttctgcaagtgatagtgtattctcctctttctcaaatggttgggttggggtgatttgggcaataaggagggtattggtgactccaaccctaaagtgagggatcctaatgccattgataatcaaaatctgtcacgtcattcaacaaattattatatcatcattgcttcttattgacaaagacttaagagttatccttgctccataatctactaaaatttttgtttcatcatccaatccattataaaagaacagattaagatacccacttgagaaattgtgataacttctctctaccaatgcattaaatctccccaagcagcatagaatggctcattgtattgttgagaaaaactttgaagctaatgttgatgtagcatttattatgtacctcgcaagaaaaactcatataatacaaacattattaaaattaaactaatagaaaccaaattagaataacatttaattgatttaatattaactaaaacagtccctgacaacgacgctaaaaaattgttatgaattttctagcacgcaagtatacatatcatttacaagtaatagactcacaaaagtaaggttgatcccacaaggactgtagttaattaccaaacaatttaatttctaattctatttggtgataaaataagaaaagatattgaaaatctattgaaaaagaaaacaaataagttaataagtgcagtttaacaatgattaaaactcagggtgattaatttcaactaaatctactttacaaatggtttataataattcaattcctaaattctaactttcatgtgatagggaatttactaaagaaatttatgttcgggctaggatatatatgtatgcaaattttctactctcaataaatttaaacacataggagacattaagcataaaaatcttaaatgctacgcaaatcatataggtactctcgtcctatatcaaaatttgtgtctatttcactatagcataatcaatgctcaattctcaaatttcgtattgatattataaatagttaattgatggtcaggtaattaaaatagattaagtaagaaaaaaatagatgtacatagaaaattggagaagaattaaatcacattaaattaaaataaagtgttaaacaatcttcattaataaccctaattgaaagtctaactactcatattcattgtatatgaaattccgtattttaatattcccagtttgat

SEQ ID NO: 272922 - DNA, 1385 bp, Cannabis indica
tttttttttttttgtcttatttaactttatttattaattaattgtaaaaatattataataattaacaattaagtctcacttatgtaaatatagaatctaaataacgaagatggtgcatattagtaagaatttacctttcataactatttgtacgcgtatgtttatgtatatattaagatcgttggtataatttatttagagtattgtcaggcatggtgtttaacaacatgttacgattgactagcaatacttcttaacaactattatattacactatgtaagactcggtacttagttggaccaatagcgatactaacacataatttgagatttctctttatttaatgtaacacttagtatgatcaatcttaaattatttatttcatctctctcattggcaaaggccaacttcgttgacttgagactttgaaatagttcaacttcaacttcttcttcttcttcagttttcattcttcactctctataaaccctctcttgcgtcatctcaacgcacctaaaaccctaactaaccttcgatcctcttcgatcatggaatgtatggaagaaacgatcaaattcaacgcccttcatatcgatgaaaacagcatcgtcgccggttccttcttcgacaggttagtcaaagaagaagaagacgaacaagaacagagcgaaacaggggggaactatgtgatcctcaacgaagctgagataaggcaacgccaggaagatgatattttaagggtttccactgcactttctgagtcaagagccgccgcgatcgtcttgctccgacactttaactggaatctcagtaagctgttcgacaattggtttgacgacgaagaccaagtccgaaacttagttggcctctaccggaccccgatcgtacttcggttcttgtccgatcatccgattacttgcggaatatgccttgaaatatgcgacaatattagtaatactacagcttgggcatcttgtggtcacccattttgcagggactgttatggaggttacatttcgaaatcgataaacgatgaaggaccgggatgtttgtttctgaggtgtcctgacccatcatgcggcgccgccgtcggtgaggacatgatcggaatgttgatcatcgacaacaccatcaaattgaaatactcgcggtaccttttgcggtcttatgtggaagatagttacaggaagaggaagatcaaatggtgtcctgctccaggctgcgattacgcagttgattttttcgacttcatcgggaataattgtcggacaggtttcgatgtttattgccgatgctccttcagtttctgctggaactgtaacgaggaagctcacaggcctgtggattgtgatacggtggcgaaatggaacatgaagaacaagga

SEQ ID NO: 272923 - DNA, 708 bp, Cannabis indica
aagaatttatatcttaaattcataaagtagacttatatcttaaattcactgaccaacaactttgaaataaagcctgccatactccaaatggtgcaatcctcagttcagttcggtggactcccctctgaagaccccaatctgcacttgtgaaatttcatggagttatgtcagaccttcaaagtcaatggagttagtgatgatgccattcgcttgagacttttcccattctcgctaagagagcgagcaaagagttggctgatctccttgccaccaaactctattacaacatggactgatttggcgacaaagttcttgtccaagttttttcctccagcaaacaactggacaatgaatctctctatgaggcttgggagagtttcaaggatctcatcagaaaatgtccacatcatgggatcaaaaagtggatgtatgttcataatttctacaatgggctgattggtaataccagaataattatagacgccgcagctggtggggcatttatgagaaaaagtgtaaatgaggcctataatctgctcgaagaaatggccatgaataaccaacaatggccaactgaaagaagccaaacaaagaaagctggtggtatgcacgaggtaaacgccatcaccaagttgacagcccaagtggaggccctgacgaagttgatgactgctcaggtgaaacaggctcaagttacttgtgagctat

SEQ ID NO: 272924 - DNA, 772 bp, Cannabis indica
taattaaataagaaaattttaactattcacgattttcaataacctcgttgattagcaacgagttgcacagtacgtttaaaatcacgttaacacgcctatactagttggggtgttacatgggataaaatgagccatcttagaaaatttgtctaccaccacaaaaattgagtccctcccacgtttactcctaggtaaacccaacacaaaatccattgagatatcaacccatggtgaactaggaataggtaggggtgtgtaaagaccatttggctgaaccctcgatttagcttgcttacaagttacacatctaccacaaattcgctcaacatctcttttcatgtggggccaaaagaagtgttcttgtaatataactaaggttttagcaactccaaaatgtcccataagccctcctccatgggattcccgaactaacaaatctcgtaaagaacaattaggcacacacaacctatgctccctaaacaagaaaccctcatgcctataaaacttaccttcaccagatttttcacaagcaccataaatctccccaaaatcatggtcatcaggataaagttccttaatatgttcaaaaccaagtaatttagcatcaagagtagagattaaggcatacctgcgagaaagggcatcgacaaccacattctccttaccttgtttataccgaatgacatatggaaatgtttcaatgtactcaacccatcgtgcatgtctcctgttgagcttgtgttgccccttcaaatgtttaagggattcatga

SEQ ID NO: 272925 - DNA, 537 bp, Cannabis indica
cctagacctgggacccaaaattagaacctgaataagaatcgccgaaccaggactctagaacaagactaggaccgtgaccaggtcccagacccagaccaagaaccgaacacagacctagccttagacccaaactgagactggaattcggacctggacacggtcatgtacctagacaggaattgagacccggacctggacctaaatctgtacacgatcccaaacacagacttggacctagatacggatccgaataagaacttggactcggacaacgaccaagactgggatcgaaatgttggacctagatttggaccgagatcgtgacccagacccaaacttggacccgcactcgggacccgaacttggacctgtacctaaacctagatccagatcgaggtccagacctggacacaaacccagatagagactcagacccgaactcatacccacacctggaatcagacccaaaggtagacccggacccggaccaaaactcgaacccagaccaggatcagaacgaaggacttagacccagaa

SEQ ID NO: 272926 - DNA, 1636 bp, Cannabis indica
aaatttgaaaaaaaatattccaacatatattttcggacgtagagattgactaagagattgtaataagaggttgacggtagaacttttcttttatattttataataatcattaataagaatcccatccaatatttgttgacatattttaagtaattattaggtcaagtcaaggaaagcattcctcatcacaacatgagtgagtgacacatataatcataagtgagacttttgactaggaatactgattaatgtgaaaagggagtgtataagagaaaatttacatttgacacgcttctgacttgttcacttgttcactcggctaccccttgacttcaactgataaaatctctttttcacttgaaaacaaatagagaaataaagaaaacaattcaatcataatatatggttttttctttttttgaaatggaatcatactataaggtttcgccctttcacgagccaatctaattaaagtgcgaattgaaaattttaaaatgtatacttgtggattaaatatatattaatatacaaaagtaaaaaattcaattcaatctacacttatttgtatacattttaaaaattatatatataaaattaatattttaaaagtaaaaataattattttaaaaatttaatacacataaataaaataaaatagtgttgattaaattagtaggaagactatgggcccgtttggcacagcttttggaaaagctaaaagctgctttttcaaaaaaagctagtgacaaaaaaggtgtttaggtaagcagttaaaaaacagcttattgaagaaattatgaaaaagctacagctaaaagctaaaagctggtacaacccaactttttagaaaaaagctgtttttagattaaaaagacttttaataataaattaattttttactaaaaatttatttaattatttattatatattataaaaataaaatattttttaaatgaaaaaatatttaaaataaataatattaaatttctaatttttatttattttaaaaatattttatatttatatttttattattatttagattttttttttttgattgaatcagggaaatttgtattgctcaaaactattttgtacaaacaaatggcacccaacggcccaatctgaaattatatacaagtataataaatccctttaacctctttctatctttctttctttctttgttttttcacaacaacatcaactatacattctatgtattcttatcactcattacaatccatgaaaccaattagcatcttctacagtaactgttttcggccacactgcagtagctcgttggagcacttcacttctcatttctgcaatcatcttgtctgccttcggcttcttcttttcccaaacactaagattgcgatttttccacaggttatacactaaacatgcaagagcagcagctagtatgtttttcctaaactgactgatttttgatcttcctatccacctagttagagtggacaaagtatcagctgaaacctgccaggacaaccattgttttattccttgtaaacattcagcagataacctgcattgaaaaaataagtggtctgcactttcattctgtgtagaacagaattcacatagttcatcaatgttcatccccattctcct

SEQ ID NO: 272927 - DNA, 712 bp, Cannabis indica
acaatttactctctgttcccgtcacctcatattgtctaggatacgggtgactgtactcatccactattcagctttaattatgtcagtacctcccaaaaaagttggaggttgcagcttcacaaactgctcaaacacggagtctctatgcggcaacatgaacccctagttacccaccactgacataggtgttggtggtaacacttgctcaacaggggcagccggtgctggttgctgctcaacaggggcagtcggtgctggttgccttaaccgacgcaactcttcctcttgacgaagtaaaatgcctcacatttcttgaagcatctactgccagtcagtagacggattagcattgccaacccccgcattatccctcgaattcagcggaggtgcaggcggtgtcggtggattggtcgggtctacaccaggctctacttgcttgccatgtggtctagatgattgcggagggtccatttttacaagtacccctgtaatcaacaaccacaacaagataagcaccaataccacatttacgcacttattgctttaaaccctaactcaactatttattccatataaataaacacttaacatatagaattttaagcatggcatcatatatcacataaatactctaaatgctcacataatgcctaaaatgaaaagcggtaaataaataatcgtataagcaataaagcatttactctcaacactt

SEQ ID NO: 272928 - DNA, 1209 bp, Cannabis indica
aaaaattatctaaatttttgaatggtttaagttaaatcctaatataggtgaattatgtagggttgctggatttaatttttcaatttctctctaatttgataacaaaattacattgtaaaaactatccaatcatatctagtctaatactctccaaaagtaaccttaggattatagcagatgatcaatcatagtctccagttattacacagcagtgggattcaagcctaagtgtattattacttgtactgtataatatatcaattttatattatctttggtatattgacttgtatgtgcatataaatgtaaaacataaacaataaaagcatctaaagtaaggatgtctatttacctgaacaaggaattcactctcggcatccagagcgcttgtggcttcatcaagtagcaaaactcttgggttcattaatagtgctcttgcaattgctattctctgtttttggcctcctgacagcctcaatccacgttctcccacaacagtttgatatttttcaggaaatttgtcaatgaagtcatgtgcattagccattttctgagatcaatcatctttatcagcatggaaaccaggggaaagctttaagctttcatttcaatagagttacaaactttataattggaacttacagaagcattttctatttcagtcaagctagcttttccattaaatccgtatgcaatgttctcttccaccgagcaattgaaaagaacaggttcctggctcactatactaacctgtagtttgaaaatcatgataacatgaagactgtttcaaagtcattctattggcttcttgataaaaaggccaacaaacaacaaatattttagctttgatatgaaagagagaaataaaagcttacctttttatgaagatactcatgggatatttcgactaatggaactccatttagtaaaattcttcctttaacagggtcataaaatctctcaattaaatttgcaatggttgtctgcagtcaaatcaagagtgagatttcaatcaaaatgagctatctattgaaagatgatacaagagaaacaggcagctccagcagagaatgaggaaagcaatttaaaagagatcaaaatattacctttccaccaccactaggaccaaccagagcgatcttagaaccaggactcaatttcaaagttataccctgcggtttaagcatacttgtcagaatacaaaaaaaa

SEQ ID NO: 272929 - DNA, 1088 bp, Cannabis indica
gttctcaagttttatttaaactacaaaatgtaaaatgttaaactatggacttccataaaagaagtaaagggaagaaaaagaaatcaatcttcttcttttttttccttaatttgattttgctaagttgattgattgattcattcaagcaatagattatggaacattactttttgtacaacatataatcattagaaaagctccctttcggctgagttgaataaaacaatgacaagagtaatcactcatgatcaaagttgcttaaatatgatttcaaacaataggcaaattgttataaatctcacttatgttagtaatatccccaacgtgttcgcttttttgtgatctatttatttgtttgttttcattttcctcaaatataacctaaagttggaatatatgctaaaattgtttttttagatgttcaattttattttattattttttatgaaaaggagatttttactagttaaaaaaatgtcaaagcctcacaaagttagacaaaaacaaaatcgaacaaatctcacagcaagatgaccatacaaatggctaaccatgtcaattaacaagatgagcaaaagctcgatacccataaaggaaaacacgagggataaaccccacaaaacagtcaaaagttaaacgtcacatagaacaaaggatgataaacaccgttattaaaacgcaaatataaagataaaaaaataaaaaataaattaaaaccaccactaaatcatcatccttcaaacgaagttgtgcaacagcagccaaagcccaatactagttgaggacgggcatcgaagcactcactaacaatccaacccacactcaacgtctgtaaggaaggacaagagacgcagttcccttcgagagtaacctgggttcccccttgtcgtctttgaacattcgagtactcaaagaaaagctctgatgcaccgaagtcacaacacatgaaagaacacctgcaaaatagggacaaaatctaaaaaaatgagcggaatcacaccccaaagccccaaacaacagagaccaatactaaaaaaaagggtgaaggagaccattttaaataatcgggtaaagttttgtcatctgtt

SEQ ID NO: 272930 - DNA, 654 bp, Cannabis indica
cgcacgcattgaaaaacagttccgttgtaggcatctcgggtttcaacacccgtctcccacaactgtttcagttcatcaattaacggtctcatgaatacatctatgtctttcccaggagatgatggacctggaattaataaggtcaacaacaacgattcagaactcatacacttccacggtggcaaattatatgggacacaaataactggccacaggctgtaagagttgctcatgttgccaaatggattaaaaccgtcagtcgccaatcccagtctgacatttctaggttcaacagcaaaagacggatgaaggcggtcaaactgcttccattcttcagcatccgcaggatgcctaagcacaccgtcttcttttggtctctgcgagtaatgccaccgcatatcctccgcagtgtgtcttgagcaatataatcgtttcagtctaggtgtgagtgggaagtaacgcataactttgtgaggaacttttttccccttaccctttcttttcacccatcgtgattcgccacatacagggcaaaactccttcttctcattctccttccagaaaatagcacaattatacttgcacacatctattgagtcgtaacccaaacctagattgcgcaatcgcatcttcgactcataatgcgacttcggt

SEQ ID NO: 272931 - DNA, 736 bp, Cannabis indica
ccactatcacccaaatagagtcataataccctactgtcctgggtaatccaactacaaaaatccatggtgatgtcttcccatttcaatttaggaatctttagagattgaagcaaacctgccggcctctgatgttctgctttaattgttgacaggttaggcattttgacacatactaacaacatccctcttcatacccgaccacaagtataaaaccttcacatcatgatacatcttggttgttcccaaatgtaagtagtacggtgtagtatgagattcatcaagaatcttttgtctgatttctttgtcattcggcacacagattctgttcttgtatcgcaataacccatcaaataaacatgaaaagtcttttgccaatccggcctctaatttctccttatgcccctgtaactcaagatcactttgttgagctgctctaattctttccaatagatcagactgtagggtaatgttggcaagctttccaattataaattccattcccgttctagccatatcctcagccagctctgctgaaattttctttagttcacaaacttgccctgctccttttcgaattagagcatccgctaccacatttgcattactagggtggtagagaatctcacagtcataatctttgaccagttccaaccatcgtcgttgcctcatatttaaatccttctgagtgaaaaagtatttgaggcttttgtgatctgtataaatttcacacttctca

SEQ ID NO: 272932 - DNA, 636 bp, Cannabis indica
aaaggtattggagctgtttgagaaattttgtaactggtcaggccaacaggttaataagctcaaatcgtctattttctttagctataatactagtgacggtatgagaagaggtatcatgcaggagttgggactcaacattcctaccacgaatatcaattacttaggactcccgctattcagatcgaaccgaaaggatgcggatttcaattttatcctcgataaccttgtatccaagttacacggatggaagctaaagttgctttcgaaggcaggtcgggccacacttattaaatctgtgggtctggcgctgccggtttacgctatgcaaactactaagctttctaagaaacttgcttcaagaattgatggcatggtgagggatttttggtggggctgtgagcaaggtaaccgtggcctgtaccttaaggcatgggatcacatgtgccttcctaaagcgagaggaggcctggggtttcgaaagactgcggaactaaaccaggccatcttggcaaaatggggttgggctctgataaccgaggaccagtcgctttgttgcagggtgctgagggccaaatatctgaagagtaaacccttttttggaggctacctataataatgttgattcttggttttgga

SEQ ID NO: 272933 - DNA, 412 bp, Cannabis indica
tctctagcggagttagagaagggcaaagataaacgtaagtcaccagtgctgcgatcacgatcttgcagtcatagagggaagaattccagaggaaggagcccgagaagacgcagtccacagagacaggcgaagttcgaaattagccaagtcctctccaaagaaggaatcctctccgaaaaggaaaggtggcccacgctttgtaaactatacagagttggcagtccctcgggaccatatctacgcaattaaagaaaagaacggggtcttcaaaaagcctcccccaataaggggaaaccgcgataaaagagaccctaaaaaattttgtaagtaccacaaagatattggtcacactactctggagtgttggtttttgcaggaccagatcaaagaactaatcgggagaggaaaattt

SEQ ID NO: 272934 - DNA, 1751 bp, Cannabis indica
caaaaacccttaatatctatatatatgtctcgactttgagaactactgcgaaaaatattgaagaaaattggtggtccatgaagcgcaaaatttgagatgtattctaaccaacatgcatgtctcgtctccccaaggctaattgcattggtcaatataatacagacttttcaaatcacatgaatgggtatgtttgtccctaggggaacaatctgggagggcataatttcaacagttttagaataatgaaggaagagatccctaagacgattaaaaaaggggcatttcttcaaatacatcatataatcacatgcttgtatacaactgttaaaatcttgttagcattgtaaatgggccatcgtgttagctgaaaaatagactgggataaggctacataccacaccgtcatctgggttttccaagttgatgtttggatgcacccatcctgttcttatcgcctgcagaaaagaagcagaatatcatgccaaacaagccaccatttcataaccaatggtgtaatacacatttgcatatccaatcaagaagtcaaaaactttatacaaactagactagtgtctcatataaagaaaaccagaaaatcattactcttactagttgaattgaaactatcatgtaaattaatacctgaatcgttgcaacagcttccacagcgccagatgctccaagaagatgaccgatcatggattttgtcgagtttagctttatctgcaagaggtagaatatttagtttagtgatgggcggaaaaaaatgggcaagttacttgtattttgcaatcaaattacctctgcattcttgccaaaacaatgaaccaaagctttgtactctttaatatctcctgctggtgtggatgtagcatgtgcattaatgtaatttacatcttccttggctactccagcctgagttaaagccttctctatgcagagttttacaccagcccctaatgtaggtgggaaaaacattaaactctaaattctcatcaaaaatccaccaaacatgtaaaaattaacttggcacttggtccccccaaaatatatgcattaatgtagatgcacctatgacaacaatagagaaccaagaaaaattttccctgtacatgctcacatgcataatactcgtgacagaagattgctattttcaacaaaattgtctttctgtacacgtatataagcaaaatactcgcgaagaggattgttattttagaccaaacaaattaccatcaggatgtggctcagtcatgtggtatgcatcacatgtgaagcttccaccaagaaattcagcgtagattttagcacctctcttctgcaaaattgataaacattcatggaaattggaacaccgacttaaaaatcaaaaagtgctagtttcaaaatgcagaatcaaagtttccatgtttttttattgagttgaacgaataccttggcatgctctaactcttcaagaagtaaaactccagatccttcccccatgacaaatccatctcggttctgttcaataatgaccaccacaacttatgagagaatgaaagagagagacaaagagaaaatgagagatagtaaaagaaccaggattaaggtttcttttcccctgtcaaattttcagaaacaaagcagttaagaaacttaaatccatattcttcattatggcctcacaagttagtagttacaatttcttttccaaaaaaacccgacttatttacgacaaagtttaaaatgtgaacagatgatgcatagtt

SEQ ID NO: 272935 - DNA, 866 bp, Cannabis indica
gaaggagcttttgacttgccaggttttttgttcacctttctgtccgctgaatagcctcttcaagtttgataaagccttcagcacggtcaagaaaatcactcatcgagtctactggaccgttctccttatgtctttccaaagctcaccaaggacttcaatgccccccagtatcgcggataacttttcgtcttcggttactcgtgaaaccttagtcgcctctgtcatgaatctgctgatgtaggcttggcaagaggaggaaaattgtgcatgaaactccgaggagaaagccttccacgagttgaactttccaggtgccaacttgaaataccattgttgggcagcttctgagagggtgggaggaaaaattctacaacatacatctccttgtactccttgtagatccatttgcatctcgaaatacttaaggtgggataatggatcttccttaccagtatacatcttggccgatccgagtcacatcagcatctctttgggcgggaatttgagcgcgggttctgggttgcacgatcggcgtgtcaagctgatcgtctactcctctcctcctatttagattgtttctgagatcatgagtcgtccccagcctatcaaatacaggaagacctggctgtcccaatgactggttggtttggccaatatgctgagcaacaccattaaattggttgaagttattgggtatgacttctccagatgaattactagacaaggtttgcacgcctaccatttggcccacaagagaaacctgtgaacggtgatttgacggctgaccatttatagtctgggaagttttcattgctggatctttgtctgtttcacccaaggggatgacatttgcgggttgctgcctg

SEQ ID NO: 272936 - DNA, 734 bp, Cannabis indica
aaatgataaatacatacccttttctgattttataatttaattataaaaaaataacaaaattatcttatttccctttttaaaatgccatgattatagtaatcttattttaaataaggtcaaattacttaaaaaaaaaggaaatattttctataaaaggaatttaatatctgccttataaaataaaagataaaataatcaaattttaaagaaaataagaaaagaggtaaggaaaattgatgtttacctattttaaaattcaaattacactaatatctaaaattaattttaaaaaatcaaattaatttattctgataattagatttgaaaattgaaaaacaaaattaaaatataaaactataccaaaaatcggaagttaattccatgaaatagcatgaaaaatcgaagaaaacgaagaaaattgcacgctgtacggatggtatgcagcataccacccgcgcgcgcatgaggggtgatctgccgagtttcctcagcgctgggaggctgcacgcagccattccgcgcgtgtgggaagggtgatcaccaccctgattttttccaattttcaaaacttcataactaattcaaataaaatcgaaatcgagttttgtaaaaaagtaaattgcttaactttttccaaaatatccaataaaaataattttagaaacagaaaatcaattatttttcccagaatttcacaaacatcaatacaacacaacatgataccatccaaatca

SEQ ID NO: 272937 - DNA, 743 bp, Cannabis indica
accaataaaatttaatgtatgtaagcccaaataaaagtctaacacacaaccctcctaataataatattctttagatcaatctcaaatctcaatctatatataatatgtgagcattattctcagtcaactttaaattattgtgagtatttctagtcaaatatagacggaggaaattgtctaacgtaattaatgagcatcaacatgggttttgtacgtagttctagtcaaatatttagttatgttgaattttgtgctaaatttattagattatgtattttataaaagttattgattagattagattatttatgtttaattttggtaatttaatttttaatataattaacctaaaaccaatatttagtaccaacaattagtctcctaataatacttccagttcaagtgattgttaagttaaaatttgataaaaattaagtttagggttggtctattttgtacttttttgaaaattatcatttaacaaaataaattattttcgatccaaaatggtttttgttgaattctgctacaagaagatttatggagaaaattcccctgaggttaacctttaacctttaataattcaatgatgaacatggtataggtaaattctcttttgaatgtagtaaactattctgttttgggttttaatgttgaatgtaataggagtttgaagaaatggaaggtcttaatatccgaaaatttgagttggaattttagttagatgatgaggcaaagatgaa

SEQ ID NO: 272938 - DNA, 3840 bp, Cannabis indica
tcaataccgtgagtttgaaccaggtcaacgatggcttgtattcaccccagagtctgatctaaggctctttattttcttgtaaaatggttctcaactaaagctttaaatgaataaatgcagcaagggcatcagatttttagcttgagaggatacaaccatgtatagcggctgtaatcatccacaaagtggatgtagtaatggtgatttatattggaagcaatgggtgcaggaccccataagtcggtgtggataagatccaacactgatttggcacgagtattagatgaacggaaaggaagagcatgtgccttaccatattgacaagcatcacaaactgttttcattgcattttttgacacacttacattaacagactctagaacatggtttaaaaccttgattgaagggtgacctaacctcctatgccccacatccatttgggaaattaaaagactatcagtctgagactgatttacattggaatcgacagaaatggtaaaagctgaaagaaaattggacttctggtatggatgactagatttggtgaagggtgaatccaactgatacaattcgtccttaagcactccgtgaagcagcaccttctttgttaccttgtctttcaccaaacaaaaatttgagtaaaactcaatcagcacattgttatcagtggcaagtttagatacactaacaaggtttttagcaattttaggcacaagaagcatatctttaagcagtagatagttcccagattcagtgtttaatttaccattatcaatatgtgtgattcgaagcttactgccattaccaaccacaacagactccttaccattataatcttgtttctgagtcaaatttgcaggatcagatgttatgtggttgcttgctccgctatcggcaaaccaagcatcgaactcgagaacttcaggagtggcaacaaaggcgctgtgattgttgtttgtttgccctgctttgttctggttgtgtgggttgtttgggtcagaccccatgtagctttcgtcgaacctgttgtagcaaacagcggctgtatgaccatacttgccatagacttggcaagtaggtcgagaaccagaaccagggccacgtcctcttcctctgaatctatttgaagttccccgactgttggaaaaaagaccaccactgttagtggaagcattctgtgactgaaagcctcgaccacgaccattgttgttggttttagctgccatgttggcttgtggtgaagagcttgtagccttgttgctgttgagagtaagattttggagcctttcgatcttactatcgaagctaagcagtaagtcttgaagttcctgccaggttgtgttagatctagcctcaatctgcacaacaatagagagatattcagcatcaagtccgaataggacattagcaacaagatgagcctctggatagggatccccagccaaagccaacatgttagaccaattctttttctgcctcaagtactcactcatcagtgttgaccctttcctggtagtttggatcaaagtacgagtgtcatccatcttcgattttgagtaggctccgtatagactctcaagatttctctgtagatttgctgcagagtgtgaccccataacttctgtagcgattccttcggtcatggagctgtacagccagcccatgagtaactggtcggttattatccagttctcatattcagggttagtaacctgagtgtctccaaccatgacgaactccggtgggcacattagggtgccgctaagatatccatgtagtctatgacctctcactatggtagagaccatggtcttccatagtgtataattgttacggtcaagtttaagtgaaaagggctggtttagggttggcggggcgaaggcatttgggagctgagatgcctggttggtgttgttactcgaactagctcctgcaacactagagttggtcggtgagcttgcagttgaaacaggttggttgtcttgaggggtagacatggcagaggccagcaatggctctgataccaaatttggattttaagggagaaggcaaatggaaatcttagctcattttgtgtatgatccagagcaattcaattatagcaaagttcagaatacaattcagccgttaggcatgacacttggcagtaattacaagaataaagatctggaatattcagcctaaatattcccctaatgattacacaatgactaggcataacagaatccacttaagacaaattacacaattgaaatatacaaattctgttataaaacaggggaccactaaatggtgagaattgcagtgtatattgctggtgtagaaatacatggctgaaatgctattccttgacatggcaaaggttcgacaagttagtgtgatctaggatccaatttgaatatacaatcttctatttgttggccatgttcttttattttgttgggtcgacatctcaccttaattcttacattgttcacttttaacttaaaccctcagttttttttaaacaccttcccaaaaaccaataaaataaatggaataataacatgtcatgagacttgaattgatatccgctttcctttcatatccttctccttattccccgagctctattcttatgaactccctcacgctctgccgtattttgagttttagtccatgcttcaatgagtttcatttgttcatgacacatatctattagtttcacttaaattaatctttatcatttattaatcacaaccccaagatcaatcttcacaataatatcatgataccgtgaaagaaagccaatgaccagttagaaacataatcatgcatcggctatccaaaatttgtcatgaacgaacgtattaagcctatgccagattattctccaacaatgtgactcagcagcttctccacttccatgctttgataacagtcatacacttaaacatcatttcatagaagtgaaagccatcccaatggatgccttgagacacgccgtcccagccaaggttggagcttcggaacaaaaaaaacatttttttttcattgaacaaataatatctgttttcttataatgatgggaaaagttaaaaaatggtattcttaagaaataaaggaccttttcttctaagaatatttttgggcttgggtgggagccttgggcgagggcccagcccgccccagtaatttgggtcggccatgccttgagaaggccatcactatttgatgaggtagaattgaatgtcaatatggtattttgaaattttgttcgaaaaatttggcaatttttaatttatccactttttatggagttagctttttattttatttatttatttttttattgtgttcattattgcttcttttatactttcttttaaaaaataacatatttatttttatattattgacaagttttttcacttatttttttttagaaaatacataactgaagcaaatactactattttggcttaaaaaaaaaaacaaatactattttgaatttcccaatgaatctcttgttatacaatatataggcatgtgaagctactagcttttgactgaatatttacatttcaattttcaaaatgatatctttgtttaagaaaattaaaaaccaaatcccacagaaataatatatcatgaggcatcacaagtatcaaattaagtccaagtttcgaataaccaaactctcatatttgctagctgatcacttttaagaaaaaaaaatttaatcaaactatctagtaattctaaacaatagtttaacaatgcatgccaaccacgtgacacgtggaaaaaacaactcttaagaaactgacacgtgtcacgtacacctaacacgtgtcaact

SEQ ID NO: 272939 - DNA, 958 bp, Cannabis indica
cttgttgggttccccttcccttgaaaaattgtcgttgactgattttgatatttatactaatgaccgtcgtccatatcagcttgacatacgtagttcaagccttaagttcttggtaattaggttctttatgattgaatcactgtgtacagtgaggcaaattgaagtcataaatcttgagtcattggaactacttggtgttccctttgacaatttaaatctctctgtatgcaaggcaattaaaaatctctcattaatttgtgattggaatattgaagagccttcatcgttagaatatctcatttcgagccttcctctccttgagaatttgactttgggcaactgggaaaagaagaacttggaccacattaaaatctcgagtcaacacttgaaaagttttaatgtgaataattatgctgatgcaatgactgttattattgaatgggctccacaattagcatcattttattatacaggtgatctcctttttcgtatgtcaatggtgtcatcaaattctttgaatggaacattcgaaattgcgaagtatgaggactacaatggagattggtttatcaacatgatgaattttcttatgagtctcaattgttcttggaatatggtaacactacacgttgacagagccaaggtatgtttattacttttcttatttcgttatgtggtgttatttccttaactctttatcgtgtattcgatattttattcaattcctaaactctttacatgaaggctctcatctttccaaaaaacttgaagagaatgtttgaaaactggaagtgtacgtgtcgttttcctatggttaattgggagcatcttagagtatttactgaatgtaaaggagaggaagaatcagaattgagagatgctttgatgtgggtttttccttctttgaagaaattatctaatggagaaaggcatctcttaaaacttgccataagcgact

SEQ ID NO: 272940 - DNA, 1759 bp, Cannabis indica
gtaaaacatcacatgatgcatgatacaacatgttgtgcttgatacagtaaaacatctggtctctcccattattttcattttctaatttttcaaatttgttggacacctgaaacctcaacattatttaatactcaaaaatggagagaagtacaataaccaactggcttgcattcccttcctttaaagacttgaaaaaacatcggtcaaatgctgacgatgaaatcgggtaacattgtcataactcattaccatctcataaagattcaagttaataaatatgtgaagccaaacaaaggactgttgagagagacagatactcagacattgtgtttactagtaggcacaataatttacccatataagtctgttctttctcaaggagctatcaaacatcgataataatatatctcaaactaacttctacacaatcaaaactaagaatgactcataatgtacaaacctgattgtgtaacatctcactcaaatatacatgaagaaagaactttctgattgaattagatgatatctatgcagccttggatggatctcctcccactgctctggcctcaaactgtttggtatatacgcgatgctttctttcccttgcatagataacccagaaaatcagtgaaagcataaccgctgcagacactgtcaccaacccaatgtagatccactgactatgtcgtcgcaggctaggacagtgctggtggcttatgtctgtgaacgtatttctcacaaaagtacagtcctgtagatcaaccaagaatggaccataacggtacaaaccataactcacattcactgcagctgccatttggtcatagatggtaggagttaatcgaccggttgtggcacaaatcccatctgagttgaccttacatacataattctgccaaacctgctccaaaccaaaatgaaaacattagaaaagcgacaatcagaaaatgatgtagtagacattgataagaactttagaaaagccgaaaccaattggttttttttttcctagaaaatgggtgaataaatatgataacattggcatgagtccaagggtttttgcctcggagaaaactacatgttacaggagtttacaggaccatgcattctacaactttcctatcccacctaatctgtcaaaatgcttaatgtgtattacctctgtagcattattcagatgcacttcaccagctgcacattgccgagtagtgagatcagggttgaatgggttgcagagagagggcaacaatggaccagactggttgaaataaatcggtattcccttaggtggattgttaagattagtaatattgctgacgacagtgtccactactttgacaagttggtaggtgacatccctgctccgtaacaaggtttcttgggctgtggcattgtccacacatggaagaatatcatctaaagctgtgtgggctgtagggttctggacccactcatccattgaaacacatgcatctgcaaccacactagtgaaaataggaagaggaaatgagaaattcggagaaaaccaagctcaacatatatctttcaaacacagaattgtggacacctatatgcttcagtcaggtattttgtgcagtgcagagacaggaagatgagatcaaactaaaagtttccatacagttcacagttataatttaatgcaagtaaggttaaggaccaatagaaaccaaatgctattatttagggtgtgtttggaagtaactgtgcaattactaggtagggtaattactagggtagt

SEQ ID NO: 272941 - DNA, 444 bp, Cannabis indica
cattagtcaaatttgtgatcagggttatactgtgagctttgatagtaatcattgttatgtgtataatattcttgatgaaattgtcttgcaagggctcagatctagtgacaattgttatactctcactacatatgctacttgtcattctgtcattgataatattactgatttatggcatgaaaaacttggtcatattcattttaaaaatctgaggagattgtctaatgcaggaattgttcgaggattacctaaattaggtaaggagtcgttaggaaaatgtggaccatgtcagcttggtaagcaaccgaaaatttctcacaagagtgttcctgatgtgaatacttctaaagttctcgaactcctacatatggacttaatgggtccagtccaggttgaaagcttgaatggtaagaggtatatttttgtgtgtgttgattatttttc

SEQ ID NO: 272942 - DNA, 753 bp, Cannabis indica
ttttcaattttttcaagttccgtaattaaagatacaaatttagaatttcttgaaatcaattcagattcacaatatttattttttctcttccagatttttgatgttttgagataaatctttgttaaattttactaagtaatgattttcatcacaaaattacaaccacttaccaaacattaccttgtaagattctgccaatgattcatcatcaagttctggctcatctgaatctgaaataacttctttatcattgtcatcagtcaaaatgttgtttaaaaacaaaactttttctttttcctttaaaatacttgataaaacacttgttagcgcaatatttttattttcactattttcagaatcatcatcactccaagtaacattaaaaccttacttattctttttcaaggtattgacacatcagattgaatatgaccatacccttcgcattccctacattgaatttgattattgggaaccaaagatttagatgcatcgttaccttttggagtttttgagaaattcttttttatttctaacatttttcatgtacctttgaaaatttattgttaacaaagccatttcatcatcactctcattgtcagaaacatatttttcaaaaacgttaaaggcaatacctttacttttctcaacgaaagagtttggcttaatatttttcttgatttgttgatttaactcaaatgttcttaatgagcccatgagttcttcaaccttcattttgccaaaatcttttgc

SEQ ID NO: 272943 - DNA, 580 bp, Cannabis indica
gcatctgtatttccaggtgtagacgagtctgatttaccttatatttgcttggaccttgtttaccagtattccttgcttgttgatggttttggtaagttttatttcaatacatattgagctattatttgacttaattttctctaaaaatttcttttagaagttagagtctcagtattttactcgtacataagcaatgtggaacaaaatacacaaacacaaatttctttttttgatggattaatcacactaaacattttatccaattattaaaactctattatgggatcacttgtgctttattataagagaataatccttaattacaaacacatacacactaacaaactaagttattgttgttttgtgataatatatataggtttgaagccatgggaagagattactttggtgaagaaagtgaaatatcaagatggttgggttgaagctgcatggccactagggagtgccatagaagctgtctcatcatcatcatcatcatcaaaatctcaactttgatgagcatgagcatggctacacctaattagtgattatgtgcagaatttgggctctgaataataat

SEQ ID NO: 272944 - DNA, 1097 bp, Cannabis indica
ctaatcagattgtaatgggttttatttagggcacaaaacccaacaatttttaagttaatctatttgtgcttgcacaagtggatcaacttgttcagcttgttgacttgcctatgtcacattgggatctctttgaactagatcttgggtacggatacttggttagacaatcgctggaacgttttatccgtctaggccccttctcctaaggtcatgtgcggtacccaacctatcaaacacgaaagtaccaggtggtcttggtgtttgacttttttggccgataggttggcctgagacctcggtagtggtgaagtggttggattgtatgattccttcgaaaggacagtctggtacgatctgaccgtctaccgttttctccacaatttggacttatggccttggattggatgactaaccactgtgagtttgtgcggtatgcccatccacatacccttctggttcatttaagggaatattggatgcagtagcttgttgttgattggtgacttggtaagcccttcttatcagtatggtggcctgcctaatacgacattaatggttatctgctaagacctcatagtctttatctcctagttccgtcattctatgaattaacatctttgttcgttgaatgcaaggtttatggctactcggaggtcttcctgatcaagatgcaaagtgttattatgatcttgtatgagcccaagtgcctcttacagattttggagttcattgtcgtctccaacttgtctttgagtattagtagtggatggaacttcaatgctcggagtggattgatcgcctgctaaactggtttttctagtctcttgtacacatggtgtgatcccaacgagaggggatgtcactccgtggcctacagtaggaggttgtgtattaacctactcgaggtatgtccctggtggtcgtctcatgtctccaggattttgcacattgggatctgtcaccattgggccatcctaatcagcaaggcctccccttgagtttgtactaccatcttgtttatctgtcaaaacttaagacaaatgcttgtgtttttgctctcaatcaaagcaccaaaatattgacctcacttctagcca

SEQ ID NO: 272945 - DNA, 542 bp, Cannabis indica
acccggtgtttccccttacggatcacgggactactgactgtcacacaaatgaatattacaacaattgtattttatctgttcaagtcgtgtatttgacaattctaagccttgtttttataatactatgatattgtagtagcaaaactattattcaactaacgtgcaacttaattgcaactaaaaatgttaaatgtgaacgtgtatctgtaagaaactatttgtcagtatttttttttgtcactgatcgataattacgtgtaccttaatagtaatatgtggagaaataactgttagtaaaatgtttataaaattgttatgcaactgttatgaaatattaaaaatcagaacagtattttcacgtacataactctatttacatgtattttcgtgatttaatatgaacaaattcaccattgaaaatttagaaaacagcaaaaatacatcagaataaatattttgctatagtattgatgtaatttttttattataattgagttggattgtttgggaactccagttcaactttttgagatatgcatttc

SEQ ID NO: 272946 - DNA, 837 bp, Cannabis indica
ctctcaagttctctctctttcgaaacccttaaaaccagctgggattgctgtcttgttctccttcttcttgttgattccagcagattttaagggatcttgaactcttggtaagcttttgactttgtcttcttgaatttcttgaattgtaagtaagtaaaagttgcatgctttgaggttttgcttgctgtagctgatgttaatgcttaatgttgttatctgaagcttaaatatgtttagttatgtggattcaagcaggttttgttgattgttagttagatttaaccaagtttgagttttgaactcaaacttggagctttaatggtggaatttgattctgtgtttgggtggatgttttgttgccttgaaaatgttctctagggtgtatagaacaggtctggaaagtttgaattggattgcggttgatttggtcgagttatgaatttttggtaatttctgcactgagccagaattccggttcagagaggcctgtaggaaccggaatttcggttggcttccaggaatttttccctgaaccggaattccggttagggaaacggtctaccggttggggcaattttgggaaccctagttttttccatttttgtgttatttaagcttgttcgactcttactctgtttatttgtattttgtattgtcttgagtctgtattcaagtctacaaagaagaagaagaagaagaacagtgctaccttcgggagaaagttttacaaagatttcagaagattgcttttcaagtcttgcatcgggatgaagcaatcactcttcaaggagatcgaagggagttcgaactcttaaagtttcaacaaggttcaattag

SEQ ID NO: 272947 - DNA, 944 bp, Cannabis indica
atttcgtaaacctgagcccatgaggcatgcgagacacaaaagagatgcaaccaaatttttcaagtatcacaaggacattgggcatacgacaaaagaatttcgtcaactgaaagacgagatagaaagtcttatcgcgcgaggtcacttccggtaatatgtgaaaagacaaggcggtggataaaaccagcctaatccgcccaataacctaggcaactagagattacaacctcctcctcttgaaggagaggacatcctggttatctcgggagggccacatctcgtcggggaaagtaataatgcccaaaaaagatacgtaaaagaagttaagaacaagcagtttgtttttgctctagaatcttctaagaaagctaagactgaggaacctctaattgtgttctcggaagaggatgcaaagcataagagataccctcatgtcgacccactagtgattaccatcgagctcaccaacaaaaggagaaaaagggtgctggtggacaacggaagtttggtatcctttataaggatacactgaagaaaatgggacttgaaaaagcatagttaaaaccttgcatggtaaatctgtgtggatttacaggcaaaaatgtcgctagtcaaggaataattgagctcccattagctttgggctaagcgcctttatccaccactattatgcaagactttcttgttgtcgacctaccatcagcctacaagatactactaggtcaaccagcattaattggactaagggcaactagttcaataaagcacttacctcgaaagttttaaacaccgataggtgtgggagtagtgcgaggtgaccaaatcctggctcgcaaatgctaccgcatagagctacagaatagaaaagtcggtcaccagctaatggcagtcatgactaaagagggcaagaggtaggatgaggatcttaatcctcggattcaaga

SEQ ID NO: 272948 - DNA, 896 bp, Cannabis indica
aataaatataaaattagaggtaaatttgattaattgattaataaaaggggcatttttcaacttcccccttaaaattatgaggaacatagggccctatattggacctatcgggctatctttttcaacgttcaactccttcatctattaaactaccatcgggtcccatatcgagcctacatcggatctgcatcaggcgaggcgaaaatcatagattccactccaaaaatatagatttgagcctaaaaacctcaaaaattacatattctccactaaaaatacaaacttaaccctaaatctgattgctttaaccctatatcatgaaaaaataaaataatttaaaaattcatgaaaaaattaggaattacctttgacgaagacattgtcggtgttgggtggtatggtcgcagtggtccgtgggtcgtgtggtagtgtggttgcaaggtcgaggtggtccgtgagttgtgtgggtggtctgattgtgtgctgcttcatgttcgtgtttacagagagcgagagagaagggagaaagagagagagagggttgttcaaatggaaggagtacaatggagttttaggaaaaaataatatatattcgaccaatatggaatagtttaggtttaggaaaacaattttggtccaataaatacattagtcaaatttaccaataaaataaagtgtacttataatttattggcatgtaaatataagccctctaaataaaactctatttttatattaaattactaaattatcctcaaaaaatttaatcaaaatgataattttatttttcatatcaaaatttgatgtaaagaaattttctttttttctatatccacgaaaaaaaaataaacaagatggaatgaacttattttcttttcattctttcactttcatat

SEQ ID NO: 272949 - DNA, 875 bp, Cannabis indica
accctgttcaccaaaatttcactcagaccaacttttatacataaatactattgtggaagttagtttagttagttagacatttgccacatcagcagcaaaatcagctaattgggatttgtttagttcattttcagttcttggacaaaactttgtctcagttttgcaaaggagtttaatctccattgttgtataactgagctcatgtatttaagattgattaattaataaagattgcaagccatataacattccactacagtgaaacttgttgagctaagaataccacttcaaactacagtaattctttcttttaattactttctaatatctttttgacaagacagacataacatgcaaatctacaaaagtaaagacttagaatgattagacttgaactgcccaagacacaaaaatatacaagtgatgacttagtaaagtgtttggtttggtacctgggaggaaggttagaatgccaagtgttaagaggccataggcttgagacctctctccacccatatgaccagtaaaaatgaagaaagaaagaaaaagaaggattgagccaagaaagagcaagaaaagagccagagctatggatttccaagggattttatcagagccttttggagagtaataatcaaacccactctcatgttctcctccaataccattaccattatcattataatcatcatcattatggagaaggctatattgaatactccttcgtctggttgacatacccaccaaaccaatgtcaagtaagatctgtaataggaaaaaaaatacccttttttaataagataataataccaaacatatgcatttgaaaaaaaccatgtttggcacacaatactacaaatctactgttatatcta

SEQ ID NO: 272950 - DNA, 2033 bp, Cannabis indica
tttttttatatacatgatgatgatgacaagatgttttgttttaaaagaaaccatgccaggatttttactaaactactggtcctttgatattagttgtttttctactaggctttataagctgaccccctatatttctccttccaagaactcagtttggtacttgtggatgatggagaattactaatagagaacaatgtgattagcttagtcctatcttaattaataattaactattctattaaagattgaatatgtatctaattattgatggatggccagtatcatttaaagagctatgaattgttagggatgaggaatatgatggatgtttagattattttggtgttttgtaaactattaaatctaatcattgatgactacataactatgggaatattattattctatatagattgacaagtagtcctatttaattgcaactattttctatttattataagaattattttattatttaaaatgtgtattttatttaatttttttaatatagactaaaagataacttataagtattatttttcaaaaaggatcaaagtgtgacctttgaccacccaagttatggatattacataattgccacagtttagggctcaggtcgtgacaaaaaaatggtattagagcgctgggtttagaacctcgaagtgtgttacaaaatagatcaaattttcttaaaataataattataataataaattaatcattgtatgtatggtatattaaagcttacgtataaagagcatccattcttcactaacttgttagcttttgatataaagactaaaggaaacacatcgaaggtgaagcgtagcaggggatgcctacaaaggaaagagaaataaagagaaagtgttcagctaatgccgcttaggctaatgaccctcttccagagattgaattctctatgaatgtaatttttaaagctttgggagtaattctcgctcaatagatatacgttggtacttgagaaaaaaattattgttagatctttcactgggtttgaatgcctaattttggaggtgtatgagatccaatgattattgaaagatagataaggtggataatgaaaccttcacgctaatgaaacacctaaagggtaccatattaattcgttgtgtctaagttgaaagctggagcaacagttcatctttttaatacagtgactaaaataatggatagtgatcgggtgacccaaagagatttcaaaaggattttagggagcgatatttatattttcctcataagaggacaatggttggagcatgtgatggttgagatgaggagatatgacaatgaattctacataaagtttgtgagcttattttgttcaacttatatcggtattattgatcactctttttattggatagttcacgcatgttttaggaatgtagtacgtggtgggactgtaactctaattcttgtaagacttactaagtctcagtgatgctaataatgtgggaaacttggcaggatgaatttagccaatttaaagtaaagacaaaaataaaagtctacgcttaagcccatgctcttagtgttaatgatatagagggggtgtaagcccaggagtagttaatggtatggttcttatctcatactcttgggatcatatgtactgttttgtactggtgcaccaaagtttttaaatcattgctatttgagtatgatgggtttgagtttgaaaacctttaatcatgctatacagttgaatgtaccaatgtgaggacatggtgaggtatccatcatttatagatccatttaaattgtggttgtggacatgagttgtatgaaaacttgttagtattacttgttagatggtgtgatgtggttcttgtaatggattagttctttaaataccaatccatttatagaatatgctaagggtgttcatccaatccaatccttactattttgctagtagtgcatccgatccgcactaagtgcggagttcaaattttggatccaatccataccgcataatagctgaaatccaatccaatctaatccgtaaa

SEQ ID NO: 272951 - DNA, 1269 bp, Cannabis indica
tatataatattaacaaaattatacatcacgtttatatataataaaataaaaactaaacatgcattatctaaaataaaatgatatactttacaataaaacttatatactatataacagaaaatatatatataccttacaataaaaatatatatactaataacaacaaataaaaataaaaatatataggatgctgttaacgtagattttcgttaaccaaatttgagcctcacgattatgattcaacacagaattaataaaactatagaaaaataaaacaggttcaccagatttttacgtggttttgcagttaaaattttgcatagtccacgagtcaatcttattcagatttctgagtatttttcttagggcctcttgtataagagttttttcgtctcttttttgagatcccaatggtgagctggaaccatttttttatccgagatcgacaacatatgacgatcgcggatataagaaaatctactgacttgccagggttgtgagtctcgcttcgactagttggtcaatttggatcggtttatgtaataattgataaatttattaataataaattataagaatttttaatatttagtatcgaattttttgggcttgttgcgtatcatgttttttaggttagtctatttgtacttacatatcgtgcttttcgtacttcttttgttgtattgtgcttaaggatatattttttaggctatgccatgctaatttgtagcatcatgttgtgttataggtgtgtaagtcagtcggtttgatcggtttatgctatattttattcaactaaatataaaatctgtgttacaaaaatttaagtacaacccgtccaattaagaaaaaagaaattaataacccgcctaataaaattggtcggtttggtcaagttaacccgcccaaatcgacaactattttttttttacatttcaattttttttttatttacttatgataataagataaatatatatagattgaatgcaaagttcaaatcaactatcataaaagaaacatagtagtttgaactttatatatatttttttaaatatgtatgtcttaattagattggtcgggatagtcaagggcggaggtattctatgaccttaggtggccatgcccccctcaacttttcatgaaattgtagtattaataatatatgtaagtaaaactagagaaactataaattattagtttttattactttctttataaggttactcttataagatatatgttatattatatatttataaagataaa

SEQ ID NO: 272952 - DNA, 783 bp, Cannabis indica
tcatcttgaactcggggatcaagatcttcatctttcttctcgttttctcatgctaagatcattatcagctgatgaccgacctttctatgcttcaactctatgcgataacaatcgcgagcagccatttggtcgccacgcaccactcccatgccatctggtgtttggaactttaaagataggtgcttgatcgaaatgactgcccctagtccgatcagtgctgaacaacccaacaatatgttgtaagccgagggcaggtcgacaaccaagaagtcttgcataacagtagcagttaaaggtgccttgcctaaagttaatacgagctcgattatcccaaggctagcgatgctatcctcggtgaatctacaaagattcaccatacaaggccttaacttggccctttcgagcccattttctttagagtcaccttataaatgatatttatcgagctcccattatctattaacactctcttgatccacttattggcgagttgaatggttatgaccagcgggtcgacgtgagggtatctcacgttcttcttgtcttcctctgtgaacgtaatagggctataacaccctgcccaacagggacgccacatgtgtgcttttataaattctacttttactacataagtataattataccaaatagtgaggataatttaaacttttcgatttaaataaactcaaaaactttctttataagtaaatactaatcatcacggggaccccctgtttgtttcaaaatatttacaaccgatttaacagtgcttctacaacaaaa

SEQ ID NO: 272953 - DNA, 3505 bp, Cannabis indica
ttgcacttaaattttagcaacccgaactttagattgggttagaaaatatataggataaaccgccaaaccgaccgatgtacagtcctaccacacacggattatcctcagacaaaagccaaagaatgttaagcacctcagtggatgaaccaagtcctatattctcctacgagcgccatctttgagcagcgtttgtgactcaaagacactacgccatataaaaatcaatttaaatataccaataagaaatataacttaggtattattactgttaaaaatttaacttagatatttatctacaatcgagagttaaacttaactatttaagctgaaaatacttatcctacctataatgttatttacccattatatacatcaatctaattaactacttcttaacgcacacagtactacgtacttgttatgatcaatcttaattaacaagtgcatgcatattaagcaaaaccataaaaaacaaaaaacaaaagtcatggtttttgtcttggaattggaccccctcctcctaccctagccttatatatacattttcttagctatatataggggcccatgaattcgatttctctagagctctaaagaaattataaagagaaacatcttgttgagatattttaggatttttagatattttatttgacatttgattgatcttatattagatgatgatcaatatatatagagagaactctctttatttatatcttgcttttttctttttttaagtgatgacccaatacccacatggacctatcacttcattcatattccctaattctttggagttttagtcaaaaaaaaaaaaaaaaaaaaaagaaaaagactaataatatatgaagtatagtacatatttatgtagtactatgtttggtacctattatgacttatatgcttttcacgacgtattcgatccaattaaatttgcataattcaatccaatttaattcgtaaaatatggaaatatacacttgtgcggattagattagattgaaaaaattaaaatatgcacttgtgcagattcaatgttataattgatctcaaaaagtaatcaatccaatccaatccaatctaatacgtacttaattatatatattgagttggtgcattttatttgttttataatggaagacacaagaaaaattattttattcacataaacacatacacataaatttatatatatactagtttatttattttagtaatgaatacatatatattttagtgtaaatttaaaaatgagtacatatatatattgacatatgtatatattggtttaatttgtatataaatggagatagaaatagattattattggagattaagaaacaataattttttttttttaatttttttctatgaaacgtgcaaaagaaatagaaaaagatcccgagagagtgatagagatagatatatatatagagagagagatagaactatacctttggtgcagcgtgagttcaacaatggcaaagtgagggaagagagagatcccgagagagctcatggtcgaagctcacggggcttaggaggctaacggccagagcgcacaggggtgggtcatcagggttgggcgtccattgcagttgggtggttgttggggctgcggtgggaaagagaaccgagaaagagagaaggaaaaatagaaagatagaatgaagaagaagaagaaagagaaatgcccttgtaatagaagaaagagaaagagaataagatatattaagtgtaggattttgtacaatcggctttggcctatttacatttctcactatataatggatttgcgaggctttaaaattgatgctaattctagatatatatattttaaattctaccttttgtaattagcgagggagagagaattgacacaaaccattaattatttatgttgttttaaaaacaacaaaattatttaaactggtactactcacgtcgatcaacgcgatgagcaatcgtgttgaacgatgtgaataataaattttgtagtagtgttaatttcttatatatttatcaatataaatatatttattgaactaataatttgtagatgtcattgcaaaagaagcattacacaaggagaggcaaatcatttaaagatacacacatttatctcaaaaattagaagttttacgacataaaacattcttaaatctatttatatattcagtagtcaaacaatcaaactcactttaatatttaagaaagtctcttgctcaaatatttactatttttgttagaaaaagataatttcattaaaaggcaatgaaccaaagagatccaacaatattacaagcataataaactaaaataaattagggagacccaaccactagacacaaataaattaaacttcgcgaaattcagctcaaaagtatgagcctaagtactaactatatcatcagaaatcaatttattatcatgcacaaaagtattacagcaacaccaaaactattcaataaaaatactattgatgtcttgcgtgatcagaataactattcaatattcaacaaaaaactattcaatattcaaatatttaattttaacttaataatgagattaattatatggctttgtatatatattttccaaacattatttagatatatatatagctagtagcttgtcatgcatgcatgcatgattttctagctataggacaagtgtacgtagtagtactatacgtactctaaaaaaatatgtacatatatataagaaagaaaaaataatatatatgtgtaaagttataattatagggtttgatttgaaattgagaaaacgactttagcaatatatatatatatatagaaggaaattaataataataatgatcgatatgatttaagcatattaggacccatctattggcaacttgtttgtaacaatgtcacataaaagaagagaaagcttaaatttcatgaaagaaaaaaaaaacaaccaagttaaagccctaaaagaagaacaaaatgttggcatatggtttttttctttttcttttcttttctcctttttttttttgtttttcttttcatataaatataaatatatatgtgtacggaaaacttatatgaatgttatatgcactttttgtccaactccaccatgtgattgtttttttcattttcattctataaatatttatatatttatatatttattttgttgttgttgtttttgattgaaataataataattttacatgaaatgacatatatataatccaatcaagccagcatgtatgtgatcttcaacctccaacaatggaggaccctagattgtctggttttgtttggatacacatcaaaataatatatggtataattgggcttctatttttatttgcagatattataaactcaattaatatcggatttctcttaattaattattattaatataaatataaaaagaatgtcaactcatgagttgtttggcaaaacaatatgagtgagactcgctcagtcaactccctcttctatacttaattcccacc

SEQ ID NO: 272954 - DNA, 2654 bp, Cannabis indica
ataacaaacttattaaatgaaagagagagagacccaaaatatcagttcactaaaacttcacagatacaacacatcatgaagaagcaagtatgaaattggataaaactaccgaaattaaattagtgaaattggatattcaggatatgatggattatgagatgatttataaagatggaacttgcaaaaattaggtgcagacaaggataataaatgctggtagttgaattaaaacaagatggatgtcaccgacctcaggaggatcatcgaaaaaggcattcacatcatccaggtttacatcttcatattcaaaaagtctaacagagacataattcttcttaaaccactcgtcatctctgatctgttgaattgtgatacgctgcacgcatattggagacatcaataacaaccgaattgaacaaggtaacatcaattagcatatactttccgaaaattgagtaaataaaggcaagctaaatgcttttttaaataactgtgcttacagtaacaggattcgggtctaaaattctatatatcaaggatttggctccaaccggaaaccatgttgggcaagaaaactcggccctctcaatctgcataaatggtttaaaaaattacatctttcacttgcaattattctaatacacaatctagaagaaaactaagcatgataatcgtaaagttgttgcatgaataaattcatgccttactgtaaagagtggtgagatcaagctcgtcaaatggaaggtatcccgccataagaacataaaggataactccacatgaccaaacatctgctacagcaccatcataacccttgtgaccgagtacctgtagagtatcaaaccgaaagattgacacaatgagagcagaaaaagtgaacagaatatctttcactttcattaagtcaaatttagatgagaaagcaagcgcctttaatgtatacttcaggtgctacataatttggagtaccgcaggttgtccgaaggagactaactccctgtagacaaaacatacaaagaataaaaattaagattcatatcatcatcttcaaaaacaattcgtcttcaaagaatcttacttgttcaggcaaagcactcaaaccgaaatctgaaatcttcaaatttccttgagaatcaagtagaagattttcaggctgtagggaaaagttaaagacagtaagaattcaatctatggaaagagaaataaaaaccaacaataacatttcagatgccaagcgacaatcacctttaggtccctgtgataaacccccttactatggcaataatcgacaccatcgataagttgttgaaagtatcttcgagaatcagcttcactaagacgtccttgttgagcctacataatccaggactttaaattttaacatatcacagatttttcgagtataatcgaactgctgctaatctggtgcaacagctgaaattgaaattaaactacttactattttatcaaacagttcaccacctgtaacatactccaagattatataaatcttagttcgacttgctaaaacctgaataaatgaggaccaaccaatgcttgttatggaaaaatttcgacatcgtggaatattaggataaacactatagagttcttaaaagagtaaagaaatgtataacgaattccatgcctcgaataaacgcacaacatgaggatgcctaacgagcttcattacggatatctctctcttaatctgcataacaagaacaatgtagcattacaacagaagaacaacttactcatccttggtcatgcttcttttagaatctattacaaaatctattctatgtttacaatgttgttagcaatacaattaaattcattatcaggaagacaattagactaataatgctgtgctttgctgacaattagactaaatttagcattatggctatctcaaaagtccccaaatatattgtcaaaggtacctctttccattctaggcaagaaattcttactggtatacaaaatcttgaccaattaaaacatgattttccactctgagcaaacaacagtaacatctcataatcaaatttaagtatataaattagagagcaaacaacaataacccctaatcacagaaaagttgagaaaagaaaaaccatgacaatattattagaactaagagattaattggggaaaagagttgaaaacctggtcaaccatcttgtgtttgatgatggtatttcgatccaaaactttcatggccacactctcaccagtctcagtattctgagcaaacttaaccttagcaaaagtcccttcaccgatcgtcctcccaatctcatacttacctacttttctcaccaccatctctctctctttttctctctctgcaactaatatctcttatcaacaaaatcacaccatgactgatactataccaaagactcaaactttatttttaaaaaaacaattaaatacaacaaagtacaaaggaacttgttaatcaagcttggaaatttacaccaaacccagttgtaaaactcaaaagggtattctgaattttctactgcgaagagaaaaggaatggaaaaaggaacatgttcccccaattggggtttgaaaattgaaattgggttaatgggaaaagaagaaatttgagttgtggggttgaaaaaagattgaaactttga

SEQ ID NO: 272955 - DNA, 599 bp, Cannabis indica
taatataaaaatatatacatacatatacacatgttaaaagcactttatattgttataattttgtttattaattattatagataagattttgttaataatattaatatgtatagttcttcttaattgtagatgaaaaaatcaactacaattgatacattctttaaaagaaagaatgttgaagtttcaacatctgatgtctcatcaaatctatcagtggatgtagatcatgaaaattcaaaaaatcgcccaacaaagtctttaagacttgacattaaagaaggatttgatattaatttattggagcgtgatccgggaatacgcccgctaatatgggagtatccaccagagaagcgtgacgaagttcgcagagcttacattaaagctggtccatatcagattatactctctagctatcaaaaatcagaagaagctcattcacgttcttttcagtcatcttggtttaagctatttccatcttggttggaatattctcctaaagtagatgctgcattttgtctaccatggctttttatttcactctaaagatgcaccgcctagattggatgcatttactattaatggatttcgatcatggaaaa

SEQ ID NO: 272956 - DNA, 958 bp, Cannabis indica
ttaataaagactaattatatatagttgtgtaaggaatacaaataatttttatatgttacaaattatgttaattccatttttggcatatttaattgacaaaaatattttattatttattattattttcggcttgagtatttaaaatggtttctttattttttgtattcaaacttagaaggaaagttgtctagtttttctatttatagaagttgtggtaaaaatggtaagtttgattacacaattaattcttatctaaccagctgatatattctgatcttgtgagagtttcccaatttcttagatcaaatttcttgaagagaaaaccggagataaactttctttttctataaaaggaaggctgtactaactgcccacgattctgtaggtacagaaatggaaattcctggggtgattgaagatttattttagggaagtttctagtgggctggggtcttgttcagaccgtgtgtaagctatcaataaggtgtatattgattataaatacaccttatagcagctaggtttagtacctctcttatatctttgaatttcactcatatctttagaaaaaagagagtctttattttgtagagaagagttgttcgactcttactctttttatttgtagtttgtattgtcttgagtctgtattcaagtatataacgaagaagaacatcagtgcaaccttagggagaaggttttacaaagctttcaggagattgcttttcaagtcttgcatcgggaggattcaagcactcaaccttcaggagaaggttttataaagctttcgggagattgcttttcaagtcttacatcaagaggattcaagcactctttaaggtgatcgaaggaattttgagctcttggagttttatcaagatccggttaataggtggaatacatcaagcttgcggcatataataagagggagtttatttatgcataagtcaattacttt

SEQ ID NO: 272957 - DNA, 1596 bp, Cannabis indica
caaagaaggaagatgggttaccagacatcccaaccatcattaacgaatcaaactcaaatgagaagagacaagttccaactggacccactaaactcaagtttgaaggaaggaggattgatgtaggaaatctgccacagaatgaaaatttcatttcaacatgtcatttctgcaataggaaaggtcacattcttcccaagtgctataaattgcagaattacttgaaagcaatgatttcaccaaatagtttccctcaaccaaataagtctcatgggcgcaaacctcgtcgagaatggaaaatgaagtctaaaccaaatccaaatgttggattggtttcaaagctatctctgtctgccttcgttgaagggcagtggtattttgacagtggatgctctcgccacatgacggggaataaaaaatttctagttaactacaaagaagaaaaagagggatccgtgacatttggcgatggtaacaaagcgcagattgctggtaaaggtgatgtcaacgtgaatggagtggctcagttaacgaacgtcctgtatgttaaaggactcaaagctaacctcaacaacatcggtcaattgtgtgacgacaacctctctgtaagttttactaaaactcagtacttagtttcatctaatgggtgtgttgtcttaacaggaaacaggactgtaaaccagtactatgcagtatgcaataccatcgtgtgcaacaggactttcttggacaaacctgacttatggcactacaggctagggcacttgaactacagagaccttcaaagactagtgaagcttcaagctgtaagggaaattcctaacatgaaggtctccaaggagagaatttgtggaccatatcagcttggaaaacaacataaggcatctcatcctcccatcaatagacttctcacttaacgcttgttggaactaatgcttgtggacttgatggggccaatgtagaatgaaagtctcagtggaaaaagatatgtaatggtgttggtggatgactactcttggtttacctgggtcgaatttcttagagagaagtctgagacatttggtttattctctgccttgatattgagacttaaaactgagaaagactccaaagttggaaaagtatttaggttgaggagtgaccatggaaaagaactcaaaaattccatattctctaagttcggcaatggaatgggagttcttcaagaatttttagccccaaaaattcctcagcagaatggagttgttgagcggaaaaacagaactctccaagaaatggctcgagacatgatgcaagccaaggatatttcaaaacgtttttgggtcgaagctgtcaatactgcctgctatgtgtgcaatagagttcatcttcgcactggtacttctcagactgcttatgagctatggaaagggagaccaccaaatgttagccacatgcacattttcggatgtacatgctatgttctgaatgaccgagatcacttagccaagtttgatcccagaagtgacgaagggacatttctgggttactcaatcaacagtcgtgcgtacagggtatacaataaaaggactcactcagttgtcgaatcaatgaacgtaa

SEQ ID NO: 272958 - DNA, 1194 bp, Cannabis indica
gcttcacatcgagtctcgaacggtcatgctcgacacgtgtccccatccaaaggcagagccagctcggaagaagtctacacgcaacctcagaggtctcgtacagacttggggggcaaatgttatcccgaatttttcactctgacgtggcatcacaagaatggtgacacgtggagtctacttggagcatctgctcgggaataatagaccgagcaggatgccttgctggcacatcaagaataagatattcagcgatccgtgcagagcattcaacacttagcgaattcagctttcgtgtcatgagtcatcaactcaatccctataactcagggattaacttacgtggatatggcatacacaagatcccactatcagtatactcagcctcaatcccacgatccttgcattccgcattgatcataggatctttctgtttgtgggccttgtaacgaaataggaaactcttcctcctcaagtttaccagccctataaatagtgaggaatgttcactgggcaaggggactgagagattgaaagtcgatacgcagctaagctaagactatattattatctaagaattatatattcagagatactgttgtaagagctataagaaaaggaatattcttccttgttcttgagtcaatacaaataacgaggattaggctattaccgaactgctccgggctgaacctctataaaattcatgtatcttattattgctttattatatattcattacgacatatcatttatttcttatcaaaaagactcattgtcgttggctaaaagcgaagtcaacactaatcaataaagatcagaaatcgcattttatgttgcatgactcacatgatttatttcatgattatatttaatgtataaattctattaagtccagaacatatataaatatgtaaatatttgttcatgattatagtgtcgtcagcacagtagaatataatcataattatatgttcaaaagtttaattcccatgatttgtcagttcattagatttagactgtgataataatcaacgataacgtatacttacaccttggataagtgttatgtcctttccaggacattggcaaagtttactagtattgtatgtattgagtatacattggaaggcaccgatattgatattggacaagatatcatacacttaccgttatatctttctaagtcaatatcaa

SEQ ID NO: 272959 - DNA, 673 bp, Cannabis indica
agtcactcacctccaaaaatgagcgaaaatggaggtgaggatcttccgttggcgacccaccaaattgaccaaccatttggagcatttgaaacatgacgagcttgagctcaaagtgaggtgcttcgatttcggttctcacaatacccggatttagctcattgaacataggggctgcatacacaatttttagtttcaatcctcggcaacggcgccaaaaacttgttgtgaaaattatatacgcaagtataagtaagatcctctccacagggattgcaaacaaagtttgatgtaaatcaattaattacaacttaaagtaagagcaaataatatgcaaatggttgagtaatgattcaaaattaaaaatgacaagaattaaacttgctaaaattaaaactaatgctgctagaaaaattgtttacaagataaaaaatgtaatatgtcaaaaatggcttgaataactaattccttctagtcaggttttttcccatgcattacagcatcggttcagcattactctagcattcttcacaaagataacaaaaaaattcctgtaggcttgtgagaattttctaacactcacaactttaattctaccatttagctcaatatattgctatatcaaaccagcaattcaaacattaatttggtatgttatgcaaggtaaatgaaatat

SEQ ID NO: 272960 - DNA, 429 bp, Cannabis indica
cgtggaacatagagcgttctatgtaactgagagtgcaattccaaattctatagtggttcacaaacgaattaataagttagagaatttacttggtaaattctagatttgcttattggaagctcggttatataggcccatggtccccatactagttgagacaaattgcttgtaagactcagttaattgattataattaatcaattataattttaaaattaggctatgtctagtttgtgaattttcactatgttatggcttaattgtcaacaaatggtattttagggttaatttattaattaagcgactttgtggagtctaattaataaatattataaatgataaatttatttgataattattttaattattaaataaatagtttttgcatttataaggttgaaagtgtaaaaaagtgatatttgtaaaaaa

SEQ ID NO: 272961 - DNA, 1821 bp, Cannabis indica
ttttttattatttttttttatctgatggaccaatcttaactcatataatgtaaaaatgagaaaattttaaaaaaaaataaaaaataattataaaataaaaattttctaatattacttattcaagattgcacctatatatatacactctatgtgcactttgttgttgtatatataataactcatcattaaaaattcatcaaattgactacgatgcatgatatatatatatatatatatatttatatatatatataaattacgtagtgacctctatcaagtttgaaataattaatatttcaaaaaagtatagcagtgttttctcagcaacttcgtgtagaaaaaaagccaaacatgaaacaatagttaattattaattgaagtgacaatacatataaaaaaaaattgtcaaaatgtattattggtgtttaatatcatctttagtatcatactgttattgatgtaattaagtagcgggtctcatataacttaagaaaatattttaaaaaatatcactaactaatcgtaaagtatcacctataaaaagtgttgggcactactagtactctatgacaatactctattcataaatatatgacgatagggtttcttacatcatatgatgacatgatacacgatgatcatgcatgaagccgtcgcacacagaatccacacggaattggagttggaaattaaattttgattatttatgatacatgtcaagacttttcctatatactcatcaagatttccaattagtcttcattaattaacagagaaattcatgcatatatatatataatatattattgtgtacaagtaagctccggtcttattctaaagaaaatgtaaatttccacaaatttgtacgtacaccacgtatgattcttgaaatttgatttattatacttaaatgaaaagtatggtctttaatatatcacctaattagaaatattcttacacttttaaaaaaaaatccctctaacttgctcactctctcactctccaatgttggatcccgacccagaaacccctgccattgaagccagacctagtatcccagtcacaagctcttgtcgtctctcatagtttctctctctctctaagtctcgccctctccactctaaaaccccaaaatttacgagctcaatcaattcgaaacccctgaaatccccaccagtcgttgaagttctcaacccatcgctcgttttttgcatttttttcttttagttttccaatttttttgcaatgtcgctaaattaatcacactccaattttcacgatatttagcgatgtgtggtttgtgtcttttagtctcatatcgcaaatacatcgctaatatcaccgctaaacattacgcaaaacattgttaattatcactaaacttcatccctaaccacaaatttaatctatcattataaatacattacaaaatatcgtaaaaaacttgaaaactagaaaagaaaaatgaaagaaaatgcagattatttaaaatttaatttttggacaaaaaatcaaaaaacacaaaattaatttgggtccattttttatatttaactatatatatgggtatgctcttaatgggtattacccatgtatgggtattttattcttgaccattggatcaaatatctaatagttgatatttataatcattaattaaatattaaaaaattaatatttcctattttgttattctctatattcctaaaatagataaaactattaatagaaataaaaaaatttataaatggaattattatttaaaaaataacacactaaaaaactaacaaacaatttttttaataaaaatcattttaaaga

SEQ ID NO: 272962 - DNA, 2259 bp, Cannabis indica
ttaaacttttactacccttaacttttttttttaagtttttttttttttttaaaaaaaaaaaaagaatgataggtgaccttttatctcacttttattagatttttcttttgaatttttttacatttcattcatatttgtttttgcaataattaataaatctaatttttataattatatagaatatgtataaaaaaaattaactcaaaaataaataattaatataatttttaaaaataacattaataattagtaacttcaattaataaataatacattacattgtacaaatctctatattagaaagaataaattaaagttctaaacttttacctttttaacatattgaaaaaatatttgacggggttcctttcttgaacggggttaagaacatgaccctaaaaaaataaaatcctgcttttgtttaagcacaatgatcaacaaatatactgcaataatttaaaaataaatattaataatcatatttcctaagtactatatagatttacttttagaaaaaataatgagtaaatatgttatctaaatagttattaaaagtaaatagacctagactttatcaacttaatgatatattgtctccattctttacatactctattgttctcatcctttatgtaagagaaattctcccgtgctaaaacaaaaattattgcacgacttaattataataaataatgtgataaaaactagaatttaaataataaacaaagtcaaattctatttgcattataagacttaattgacaaatccattactttcttgtactcacattgaaaattttagctagaagagaatgtgccaactactaggccttggtttgccctttgcttcacaaaaagatatatctttagtcatttttcaataataccaatcatatatgccactcccaaataattttataatacatatattacataatacaactatcacaacccactatatacacacaatataatctcaaaattatccacttaaatttgaaatgaccttttatttttatccagtgaaatatcacttaataccatgaattttactgcacaaatcatatagaagtattaacattcaatgaaataaaacacaaaaatctagctgcaacccttaaatctgaatgttttattaaaggctaacaacatcaactctaaaaaaactaataatccaaaattagaaatcacataaatcactttagtgcatcagcttaaagcaagaatatcaagcaagaaaaccaaaatttaataagcaccgagaatgaaagaaatcaaatatttctagagctaagaacaaaaaacatgttcactaatgaatcctaaaataaattagaaaccacataaactactttattacatgcttagtacttaaatagtaaaaatatgttcactaaacgaattctttgaaaaattggaaagaatttctctctgttttgataatatttctcagttcgataactatataagaatgcaacaaacaatgcaagtaaattctgtcacaagaataaattagaaaagcaattaacaatatagtaatttacaacccatcccactgcagtacatatatttcgtagagctattttactgcggatgaatatttaaaatattcaaactcctctagcaagcatattaattctccatttatcgcagtacagtatatcacggaatctacttcactataaatgaatatctaaaatcttcaaactcctttaatagttttatatttagtaaaaagaaataagtcaataacgtacctttagctagcaatcaatgattaccataattttactttgtttccaataacaatctacaacctacaatattaaatgcaatataaaaaaaaaattcaaaataaaaattaagctagaatagtaacaagtaactaatacatatataacaagtgactacatagtaaataaatatagtaactagtaactccttacaataatgttcttgaaacctcttagaaatcaaaactaagattaagtataaacaagcacaaataaaattatttacacaattagtagaatatagttactaggactttctcaatatcaatatattagaacatttagaaactaattaatcactcttctaaataaaaaaatatgtctaaaagttctcaatatcaatatttatctacctatttcaaactaaaaatacacaacattagacatagcacttaaatattactattaatttcagtatagataaaaaaactaaaaaaaaatacaacaaattttattaaaaaaaatta

SEQ ID NO: 272963 - DNA, 2559 bp, Cannabis indica
atttatttattatttttttttttagaaagagtcaactatttaatatttaagtatgattattttttgaacaaataaagttatgtcatttcaaaaaaaaaaaaaaccaattaaagtcatgtcacgtctacacaattatttaataaaaacgcatcattttacagatacaacaacaaacacattccgcgccagaaattacgggcgaaatgcaacagtgaagcaaattttacagatacaaaatttgaggggtttgttgcaacaatttacacatgcttaattaacatcaaattacctcagaaaataaaagaaattataatatcagaaaggagaggaagaaagtctaccccttcttctattgccttgatgctacatcccaccaccccagttgtcatcttttctgtagctgaactgaacatgctcatttttataatatcttcagcctccgcatttggaaaaccgcttcctacattagagtcttccaaatcaaatcaaatcaaattggtgttgaagctgccatgcaatgcaagttcctcatcatgactcatatgttgatactcttcataaagtacgtgatggaacaacacctccaatcacagttatcactctaggattcaaacaatattatgagaagagtgaaggatcgggcaaagacttgcccccaatggatttgaggtccatcttggttagctccgactccaccgaatcaatgaccgaactggagtcacgatcactgcgtccacctgctccaactccctcaaacaccatcctctgttattttgaatctgaggtaatggagggaacctccattttgatcaccgttgccctagaacttttcttttctagttgaaaaggtatttgatatcggccgggattactgggtgaaacaaatgcccttccattagttaataaagagtaattataataagaatagaattaggattaaaaactatcttaaaagattaattctaatatgaatagaaataggattagaaaactatgctaaaagagtaattctaatatgaatagaaataggatttatctatacctataaatacataatacatgccaagactaaaacacaattgagtttttagctacgtagaagagagatcctatatattttattaaagcaatggatgataatgtaatcccttttgatgagatcacatttgatccaaattcaaatgatgatattgattggaatgaattggataactacttagagaagaaaaaacaagaagaagaagaagaagaagaacaacaacttaatttactacgtgaagagactcaaatatcattaacttcaacaattattcaagataataataacagaatactagatcatattcctgatcaattcattgaaactgatcaggatcctgatcatcataatttggtgagtggtacttctttgggtgatcaaatgaacattaatcatttaaaaaacatgtggcccatgttaattttaaatgagagtacatcatcatcatcatcatcagttacaaacacaaacgtctaccataatttctatacatttcaaccagtatccgaagttgcccaacattattatttgaattataatagtgggagtagttgggacgaaagtattaacaagcaagaagcacaaattgaaatgaacacccatacattaattcccattctcaatcccactcctatttcgactacagcaaatcaagaacaagaagttccttcttcttcagaagctctcaaccaaaaatcaacttcttctaaaaatggtcgttggactttagatgaacacatgtaagtaataatacatataaaataccatattattataacatacttttaactttttatttatttattattgagattatattatttgtttgattgctactaataataataataataatgtttacatatgaatggttttattatttttgcagaatttttctaaatgggttgaataagttcggttctggtaattgggcagaaatatctactttatttggtggtacaagaactccgatccaaatagctactcatgctcaaaaatattttaataaaatggccaaacaaaaaaagctacaaggacaacctccgactgagaatgaaacgaagaaattgaataagagcataaacgatatcattttaactgaagaaggcacaatttcagcaccagatgatctattgccatctatatcaaaatgtcaagaaatcctaaaataataactacgtagattaaatttaatatttttattagtttttttcataaatatatactttttatgtattttttcacagttttaaattttttatttacctatctattactcatgtcccttctttatattatcctctgaggttgttgctctcttacctagtaattaggagtgttcacaaagtattcgatccaatctaatccgcacaatccaatccaattcaatccgcaaaatgcggatatctgcacttgtgcggattggattggattaaaacatctaaaatctgcacttatgcagattggatgttgtttgacctcaaaaagtaactgattcaatctaatctgcacttaattat

SEQ ID NO: 272964 - DNA, 1667 bp, Cannabis indica
agagagagagagaaagaaattttttctcagttgttcttgctcatgtgttgagaactcaacaagaacaacactatacactttatcctaatagcccacacaattccttgtgtgaggtggattgatttggaagatactggtgtgagttcaattgcatcatcctcatcaactagattaagggatacaacatacaagaagttttgaggataccctgataatctttaaaatggtatatgttctaaacttgttatttttttttgttttgatttaatgtatacacatattgagatccactggttatacaatgataatcagataatacgaaacctttccgatgcgtacctaatttagtaccataaaccaacactagcacatactcacatcttggtaacatggtaacataattgagtgggagtgttaatcatagatatgaatatctatagcttctattatatatgttagaagtgaaatgacagttttctttgacgttggttgaaacattaaatatatagagctttatttcagtaattaaatttgtttactgaaatattattatgtcaactaagtattttaagaataaatatcattaagggtaaaatggtaattctaggtctctattaattatatattgtatgtataagatcattgattgatgtgatagaaataatgaataatttatagtgtatctatattatgtgtatagagcgctctataaaatctggagtgcaattacaagtctatagtggagtcatgaagaattaataataaaaaaattttatgttaaatttcagatctacttattgggagttttattttataagcacgtggtactcgtagtatatagggtaatgtttaacaacggggatacaataattatttatttattcaattaaaactcacactatttattttatcaatttaagaatttttcacttagttggtgaaatttagaagagagaaaaaaactttaattatttattaagacattttgtgttataattaataataatatttaaattatatttttatttaaataattatttagatatgataatttaattaaaactagtgtaaatatatatatatatatatatataaaaacatatgaattaaatatggcaaaggtaaaaaaagatgacaagattttacgtatattaagctaacatatgcaaaagagaaatttttaggggaaaattacaactatttttggttaaatttttacattttacgtttaaaattttatttatttattttgtacggtattctataaagacacaaataaatcacatgaaagtaaataagattttaaagactataaaaatacttaaaattctgtataatcgtatttttgtaatttttttttattgatttgtgtgtgttttaaattatcctaatttttagcccatcaacacatgaagtgggtgctaagctcttttattttattatttaattaaagaaaagaaaatgactaactacttcctataaataaaaaataataaaagagcattctacccacttctaagaattgagaaattttaaaaatttagctctgttaatcaatatatatatatatatatatatatatatatatataaagagaagtatgaagcggtgacatggcgctttaaaatcactcaaaatatttgtatctattctctacttaattctct

SEQ ID NO: 272965 - DNA, 806 bp, Cannabis indica
aaaactcaaaaccaaaccaaatacaacaatacaactcttaagcaattttcacacacaaagttcacaacacatctctgataggacttgataggaattttcctatcaattgtctatgaacaacaagataagagaacatataaagaaaatatgtattaatattgatattcccttaactccatattaccccctgtcctaacaatctcaatacaactaattagaaaaccagaaaagaatcatagtcaatttccggattacatgatggctaactatgattgcctatgaccttactgatccaaatagaaaaattaaggttagagtacataagattttcatagtttaagattatgaataatgaattatagtttcaagaattcttagattaatctcttatcatttcattatttttagatttttcacattgtctacacaaagggattaactaatctataccaaattatccaaaggaaagagatgacaaaagagcagttgctcaaggatttagcccccacattcctctacattcatactcctagtcctattcagtacccaactgtaatgagtgtcaagacacttttcaagttattaaatctaatcaaatgtataaaaataaatcttcaacattgataaatcgaacaatatcggctagagctagctcacaagaatatataagaaaagtttgatatctttcttaagcaaagtagtcagattctttagtgcaaaatcttagaaaaggactgaactgaagtactatttagcaaagaaagctgataaaatgcagtcttctaatattgtaaagcaactaaaat

SEQ ID NO: 272966 - DNA, 1572 bp, Cannabis indica
tactgaagaaagagatttgcattgtataacttcatatgttgtgatacatgcaaattttttgaattagctgctcaataacaagacactttattttttctgagtgccttcagaattgaaattcatagacttctatcacttattttcaggttaaaaccacagatcctttatctggaaaacctgctcaacgagaaacaagtacaatgccacagtgggctggttcttgctggtagtgtttccttttccaactattagtagctagccctttcttttactcaaatgtaacacattaagcctcaatctaagtctctatgaagggttcattgcgtctaattgcttcttgaagttcataagccgtcttaggcaccaattagattgtcaaaatagactttgtctccctatatgactacaactagcttcaagaatctatacctttacttgcatttgtcattttgtcgaatttcactccttgtcctggagatgactagaattgaaggggtgtttcttcaaagagttaatcctttttaggtactcatggattggttgtggcttgaaatacttggaactcgagtaatacgtgaatttgctctttcatattcatttgtaggtactatttgagattcatggacccaagtaattcaaaagaattggttgcgaagtcaaaggaaaagtgagtatttatttttcttcttttgacataatagttctttaaaagacatcaatttataggatctttttttaaattttccctcttcatttttaatcttttttatttttgcaggtactggggtccagttgatgtgtatgttggtggtgctgaacatgctgttctccatttgctttatgctagattttggcacaaggttcaactgcatttttcttgttcatgatctgagatacgaagattgcttgggtcttattattttcatttgaaattaaaagagaaacactgctggcagtaaaaaacatcgttcatgttgtcatctctcattagcttcatttttgtttaggtccttcagtagaaacatcagtgtatatcttgttttttaagcatatggtctccaatacgagcaaggaattttacagcacaggggtatgtgcatggtccttataagatccatgataagagacccttgaaatttcattattgactttatgaagtcaaaatatggcctgaaatgccaaagagttggaggattgtgatgatataaattataatataaccctgaaaaaaaagtagctgtggaacaaattgataattcattttccacttttatgcagggtcatgtatacatcttaattgaacttttgtgtctcaggttctctatgatattggtgttgtatcgaccaaggaacccttcaagtgtgtgataaaccagggaattattcttggagaagtaagttttagttgcttctgcttattgagtaatacttcatcattgactctctaatccttccaattgcaggttcaatatatggcttgcaaggatgccagtggaaatatcatttctgcagagtctgctgaaacagttggggaatacaatcaagaaagaatcccagaagaaaaagtaattt

SEQ ID NO: 272967 - DNA, 571 bp, Cannabis indica
agtttgaggggcatgatttggtagatattaaagtatgggaaacttggtttagtacataaacaaccattgaaacagtaaaattgaatgaaattagataaaagtccttaattaaatctaacaatctcaatagttcaagagaataacggcgaaaaaaattcaaggggtatgatttggtacatgtcaaagttcggggagaaaaatttctaattagtctttaaaaaaattaaaatacaatggtattatatggcttaataaaaagaaaaatggtatttataagattaatctaaaatttcgtccctcaacataaatttcactaatatttatgtatattgtaagcaactaatttatgataattttcaatacaaattaaagaaaaggttaaaataaaaagaaaaatcattgattcaaaatccaatatcattaaggggtgagttgaaaaataccacttttattaatcaattaatcaaatatacttctatttttaaatttagttgaaacatacctctttttatatgtattttacctaaaatatcctgacataagatagtcacatggagagtatcttgaagtg

SEQ ID NO: 272968 - DNA, 842 bp, Cannabis indica
tccaaaattggagtagaaccttagatcacatcaatctatcagacttaaaccaatataattcttgatattaattttacatttttcttgctttatttgatttctctgttgtactttgttttctcctcaattcttagattgtgttttgctgatatattgtttcttaatttgaatttgagttagttttaattctgcacattagtttaaattttcccacagaacatcaatacgaaaatgaaccaaaaccaagctaagctctcaaatcaaaatgaactccaatcaaaatcaaaatgaacattttaagatgtaatttgaacattttacaacctcaaaatgccatactctattcttctatctcaagctccacagttgtagaatactattccgtaaattttttgaactccaatcaaattcaaaatctcccctgataagggtacaatgaaaaaatctcacaacataccatcgatgaatcctgcaacaagtagatgattttctggagagatggtagatggaacgtatttgacaaactgagtttctaatccgcgttccttcaaccacatcatcctacccatgtcaataatttgcttgcacttaaacccgagtaccgctctttcaactgctttcatattccttgtaatttcttcgactcccttattcccactaaaattagttcccctggaacaataagatgtgtataacaaatcattgttcagacaatatgaaaggaaaatgggcagtgccatccagaaacatcattatggttcaaaacatattagaaaaaacatacatggattgtggctggaaattgtagttagttacatcagcaagatctgaaccatgatcag

SEQ ID NO: 272969 - DNA, 575 bp, Cannabis indica
ttgtatggttgcttattaattttttcaaagtgttgttgttggtcatggttatcgaaagtaaacgtgactatatatagtgaaggttaagtcaataaaagatgaataaaattgaaggtgaaattagagagaacgaaaaaattgtatcttagaagagattagggtggccgtataaatgtaaaatatacaaatgaaaatataaaaaagtttaaatttctgttagtccatataaatgtaacattttgagatatatgatgtatggagtaaaaatccaattatataactttagctcatcaagttgctgccagcttaaatatccaaaattgtaaaagagagatgtatatatatatggggacacacactagcttgatatacaataaataattttgggtccatttatattttctttcttttttaagcatgggcgaattttttttttctttgtttgaaattttttaatttttatgattaattttttattgaattaaaaaactcttttatttttatattataggctgaaggtaatttggaaaaaaaaaattgtttgttttaaataaattttatataaatatattttt

SEQ ID NO: 272970 - DNA, 3362 bp, Cannabis indica
gtagatgaaccttggtgagttttgggaggagaacactacatcgaccacgatcttcttcaacttttatatgtaggaccaacctcgtctttgctaccagtctgtcctctttgagtgacagactttctaacttgagttttaagggattgggaggtgagtagtgaaggtacacctactctagaacccgaggtgcaacatcatttttacttcaagcagatcgcatgagaaggcttatttgggagcttaggaaggggtggagacgctaccttccagctaactagacatatatcgtccgaccttatttgggagcttaggaaggggtggagatgttaccttccatataactggacatatatcccctggccaggtgttgttgatactattcccgtaggccgcccaagttctggtgcctttggcatccctattgttgctcctgtcgtgactgttgcacgacatacacaccaacacccgtccatgaggaggatgatggcccgcacaaaacagacgatgcagaagattattgcaactgaccctcatgtggcccggcatgccacgttgccgagtgtctaacaggacctgcctacttttgaggaagaagactatgagggggaagtcgatgtccaggaggtagaagaccaggatgacgaccgtcttgatagcccttccgaggctgaagaggagggagttgctcgatctctacgctttgaaggctacaatgaggtcggggagccgatgtctgaagaggattacgtaacccaagagtatgccgaggcggtctctcataagaggctaggtgctttgagggccaggtgggtgtgtcctccgtccatcgtaactgaggaccagttacgagatttggagaaagttgggtacctgggtggtgtcgaatgcattctcccttctccaaatcaccgggcaactagtatgagggagggatattgtgctttgtcggttgctcacacaaaataaggggctatgctgcctttgcacccgtacttcaaaaatattgcgaactactgccacatttttctgtcccagttcacacccaagggcatcaagtatttatccgccctgttcatcctctatgccatttaaggatggggtaagtcctcttcgcatgacaccaactggctctttgatttgaagtctactcccaagcagaataggtcggggtacttctacttctcttagctggatgacaagtggctaaagggcaccgtggatacggaggtgagcaaaatagggcactttgttaacgagtattacttcatgactggcatggagactgctcatactcgatttcagcaaatccctacatattgtcgtcctcctttcacgctgaagcttgaggaaatggctcagaaaattatccaactgccggaggatgctcggaatatcactttgttgaccacagaggccaactttgtgaagtacaagctttatccggcagattttataccaaagcccgtgaaggagaagaagaagaaatctaggccgagccaagctgaggatgccgagcaggagaaagagctcattcaactgaagcatgaggctaagttgaagggaggtgctggagccaaatagtatgctcaagaatatttagagcaggagaaggatgctcaagaatatcagaagtaggagaggtcgcgcaagaagaagaaagctctctcgaccaagcaagcgcgaatagaacatgccatctgaattagggaacccggcgtgcctgctcgaccatctacccctatggagggaaaaggaaaagacatcctcgtggaataagaagactcttcgaatgatgatgctccatctgtgattgtttgggagagcatccctgtcagcgtgcagagtacttcaacttacatttattttttctgagttttatgacttctacatatcttatgtcttcttctaattgtgttgctttatctgtgtagagatgtctcagaagatgttccaggctctaaagaagagagtgggagatagttcgggcctgtctcctcctgccaagaaatcaaagggtggtgagactccgtctaaggaaaaaatgtcgattgacgtggtcattgatctctccgaggagcgactcgctgtggacccttcaacctagaaggttacgaagtccaaaagttcccggggggagttcgaacgggtctgagcaagctaagactggatctgagcaggttagggctagatccgaacaggttaggcccccttcaacaaccctggcgctgtgcacggaggccaggagaggcaaagatatgcttcatcactatgtggcccgatcgcttcctggagtgagtgaacatctgttcggggcggacagtgaattattcttagaactggtcctaggaggagttctgaaggagatttctcgagtaagttccctctatcctttttctttcattcttctttgaatagttcggattttaacacatttttgtacagggtggtgtgaaaatggcttatgcctactgccgagccaagtcagctgctgacaagaatcttgccacttccaacacgatgcaaaggaacatggacttggccaagaaggacgctgaagaggcacggacccaactcgaggtcatgaggaaggaacttggggaggtaaacaaaaaacttcttactgccaacgccaaggagctgcaagacatgccttcgaccacgcaacttgaagcggacaatgtttctttatcccaagaagttaccagtctcaaggatgagagggagggtctccggactcttcttaacaagttggaggaggatgctaaaaacaagaagaccagggaggaggaacttgtggcaggggttggaggactcaagaaagaaattgagaacaagaagtctaaggtggaggagcttaagagggagttggatgtcttggagacagctggtctcgaggttttctacgacttctggaaggccaatcccaaagggaattttgattacctcggtgcttccaaagatatgtatcttatttattgcatggcccaggcggccagtgaaaacttcgaggcgaccacttccactactcctactgaccagaaaattgacgctccttccatccagaccgatggtcctccagctccttcaaacccagttgatccataccaagagcctgggactcctgctgtttgattgccttctttttatatttcttttttatatatgtttgttcggccagtaggccttcttttgagataaggtgaccgaccaagcagtctttaaacttggaatatatttttcatttttcaaacaattggctgaccaggcagcttttaatcacgggtttacatgctttgttatccttaatgaatttcgttccttgttatgatcattgtgcagctgtgtttgtttttttttttttt

SEQ ID NO: 272971 - DNA, 1072 bp, Cannabis indica
gaagctcctccggccagtttcctttagcatcctcaagtcttttctttagtgtatccttcaaggtcttgttgactgcttcaacttgaccatttgcttggggatgcgccactgcggagaaacttttgatgataccatggttcgcacaaaaatcagtgaagggctggcttttaaactgtttgccattgtccaaaactattttgtgcggcaatccaaaccggcagattatgttcttcacaacaaagtcttgaacttttttagatgtaatggttgccagtggttcggcttccgtccacttagtgaagtaatcaaccacaaccaccgcatactgcgctccacctttgcctttgggtaattgtccgattaggtcaattccccaaatggcaaaaggccaaagactttgcatctgagttaactcgttgggcggagctcgaggtatctttgaaaatctctggcatttgtcacattttttaaactaggcctttgaattctcgatcattgttggccaaaaataaccttgccttagaagtttcttagataaactctgcctggcggcgtggtttccacaaaatccaccgtatacttcagacaaaagtcgtgcagcttgttcttgagtaacacatctgagcaatgtcatggagaaccctcgtctgtacataactccctctactatgatgtaccgtgcagccttccttctcatctttcgagcttcatttcaattatctaggagttccctagtgttgaggtaggttgctattggcgtcatccagtttggagaagtatcaatcatttcgatctcctctgtgccagtgatgctagattcttcaaggaactagataggaacaaagttcgctttatcactctcattactactcaccagccgagctaacgcattcgtagtcgtgttttcttcccttggaatttttctgagaccgtagcttttgaattgtgtgagcaggtcgtgtattttgctcaaatatgctatcatcttttctccccgagcctcgtattctccagatacatgatttaccaccagctgtgaatcactacagattttaatatgttcggctttcat

SEQ ID NO: 272972 - DNA, 667 bp, Cannabis indica
tctcggtcacttactatattctacgtactccccagtactttactatatgcttgaagaaaagttgagctctctcttctgccgaagactacttcgacaccgggatgaaggttgcatacttagaaaatctatccacgatcaccaagattgcattcaagtctccagtcttcggcaaacttgaaataaatcaagcgagacactctcccatggtctgcttgggactgacaaaggttctaacaaccctggcttcttgtgactctccactttgtcctgttggcagacgagacaggtccttgtgtagtccaccacatcctcccgcatctgcggacaatagtacccatgcttcaacagggcatgtgtactatgccacccttgatgacccgcccacaatgtgtcatgacactcactcagcagcatcctcctaagatcgcctgccttcggaacaaaaaaatgcccacctttgccccacaagaggtcatcctctacccaaaactgagttgtctttccttttcttgcgagagccatgatgttctttgcaactgggtccttctccaggttctccttgatgcgctccttgattggtgtacccacttggctagctgacatgctcactaacacctttagtgctgccaactctactttactattaagggcatcaactgcctgattg

SEQ ID NO: 272973 - DNA, 908 bp, Cannabis indica
taaagtctcacaaggtatgaacaaatttataacgtctaaaattagcaaaaaaataattatatataaattattttctaaatctatgagaagaaaaaaaagttggacacttgaatcatacttttattatttttattttttattttttttaaaaaaaccatgcataattccacgtggttgacaaaaataacacaaatgcattacacgtatcacaaatatgagtattgttattgaacaccaatagtgttcaagaccttcgtgtcttgtaattagttagggatattcctaaaatgttattttcttaaattatatgaacctgatacttaattacatcaatagtagtacgacccaaaagaaactagtaagtctcttttaacgattctccacaaatatgcatgacatatatagtagagataaattatattaggctaattaaaaattttgtccctgaacttttacttgtaccaaatcatactctctaaacttttaaggccgttaaaaatttaaattcctcctaaacgattgagattattaaatttaacgatttttgtcaaattttaattaaaaaaatctaacatgaactaaagtttaggaaacataatttggtacatgttaaagtttgaagggtatgatttgatagatattaaagtctagacatcataatttagtacatgaacaattatcgaattagtaaaactaaataaaattagacaaaaatccttaaatcgatctaacaatctcaatagtccaaaaatcttaattaaccattctattaagaatattcatcaacattaattggcttatattactatttcgcttttacttttttttcccaataaagattcatggttagaatatcttttgatttttatgtataaattaggcaataataataatggttaccaaatatt

SEQ ID NO: 272974 - DNA, 551 bp, Cannabis indica
tggtagagaacagcataaggaaatagattacaccaagaatcggatccaatggcccaatctaatctctcagaaacagtattatttttccaaatatatttatgaccaataaaaggaagaggaaataaatgaaacttattcaaaaaattagaaaatttatccatgttattattatcaaaataactttatctttatgaaggagataactattaaaatctcccatgatgaaccaaggaagattagaagcactgtaataaactttatcaagaagatcccaagtaaaaacacgctgggaggcaataggagaaccataaaaaccagtaaaatgaaaatttttattatcattaagagttataatatatatgattacatgaaaaaagttaaaatattaacatcaagacattctttccacaacagcatgagtcccccaccaaaatacttcctagggacttcaaaagcatggtcaaaacctagtttgactctaaggttgtttgctgtatggataggaagccgagtttccatcaaaaaaaggagtagaggtttgtgatctttca

SEQ ID NO: 272975 - DNA, 551 bp, Cannabis indica
tcttaaacatctatttgattgacgcaattgtttatgaacactataaaggtgtttgtttgaaaattctattttgaaaattttgtttccatacagagtcagattgcttctcttaacatatagaatgttagttagttaattatgatgtaacaaactcattaatcaatgaaccttattattctcattttcatcaaaatcacatcacctacccacattcattaagaccaatattaataaaaaaacagaataaaaaataaaatatttatttattaaaccaaatattgaacagtatgctacatacataataaattaatttcaaaacaacctacttttattaattaagatgagttcttaatgttttgacagtttctgttgagtggtctgccaagtgacttacgatagttctttttgtacacatctgcccaatctttatttttatcacaacgacgtctcgttaacttttcatattcttgtttcaattctcttaatataaaaggtgacgtaccaagagggttctttctcatcgcatcgacaatatcatcaactccaagctc

SEQ ID NO: 272976 - DNA, 1012 bp, Cannabis indica
tggatataagcagaaagatacgtgggattaatgctgagtacaaagatcgtgggattaaggtagaatacactaatagtgggatcgtctgtatgccatatccctgcaatctgaactccaagttatagggattttgttgatgactcacaatgcgaaagctgaactcgctaagtgttggttgccttgcacggattggtgattgctttgctctgggcatgttagcgaggcatcctgctcggactgcttcctccgagcagatactccaagtggattccacgtgtcaccattatgcgatgccacgtcagagtgcaaaaattgggataacatttgccccccaagtctgtacgggacttccgaagttgggtgtagacttcatccgagctgctttcgcctttggatggtgacacatgtcaagcgcgactgttcgagactcgatgtgaggctgacttggtgtcccttcggttttcggctaataaatgctctgacaattaatatttcgaaatccaattttctcttaccacggctgacgactgcacttgattatatttgacttcacatttttgcttttaaggagggaaattgaggcgtctgaggttcctttgaaatgattacctcttttttgtgacttgcctataaataccaaccaacattggcacataactcattttcaccatccttccttgctaagtgagttcagagcaaaaagagaggttcttggctttaagtttcctgaagtgccttcatcgaaatttcttgttggattgatgttgttcgaacccagatatctgactcttaagtaagtttttgattctctttatgcttatttttgcaagtttacatttcgaatgcaccttcgactttactatagaaattatttaggaaaccctaggttcaaaaactctacaattctcctttgtcatagcttcatgcgattttactttccataatgcttgttttttaaactgcgtaacgtctgtctttcatcttgcttattctaagcttcatgaaatttttt

SEQ ID NO: 272977 - DNA, 1078 bp, Cannabis indica
aatcagatcctggtaaaaataatatccaacaagtcgtccaatcccttgtcacatgttcatcctgtgggccaagtggtagacggcaagaccctatctgactattggttaggtggagttatacctaataacttcatccaaattgacagttctggccaacccaccggccaaatcagtcaaaaattgaggctacccggtgcatcaatgttcaatagattgggtgcagtcgatgatctcaggaataatttgaacagaagaaggggcgggatgaaaaatacgttcaaaaagccacccagccaggcatccacatccaggacccagctttaagagatcctgacgtgacataggttggttaagaggctgaaccggttcacccatctatgcaagcacagttagatgaactaaaaaatatgtttcaaggcctgactggcccaaaactcacttttctcgagctggaccgagcacgcgtatcacctttcactcccgagatcaagtttcttgagctacccctaaagttcaagatgttgacctggaagatgtacactggaaaagaggatcccttgacacatcttaaatattttgagctgcaaatggatctgcaaggtgtacggggtgatgtgcggtgtagggtattccctgctaccctttcgaaagtcgtacaccagttgtacttcaagctaccaacagggagatttaattcatggaaagctttttcctcagaattccatgcgcagttctcctcttctcgtcaactcccgttacatctagaagacctggttgaagtaaaacaaagaccaggagggcccctcagagcctacataagctcgttcatgacaaacgttatgaaagtagcacgattaattgaagaggggaggctggctgccatactggggggcatctaggtactcagggaactgtggaaggacactaaaagatgtggccgcgtggggtctatggcagagtttctggaccgagcagatgagtttatcaagcttgaagaggccatttagggaggagatgtggagcctaaatagggccaaccacatgtcccctcggtgggagcacctgctcagagcccaca

SEQ ID NO: 272978 - DNA, 510 bp, Cannabis indica
ttaaaaagtaaattataatgatattattcttaattctaaataattatgatgcaactacaatttgtttcaaaagtatggtaaagattaaaaaaaaaaacttaagtttctgacagaaataaacaaaagaaagaaaaataaaaataaaaattaaaaaaagagagaaattcaaaagtggggctaaaaaaataaacctaatagctgtgtattataatttttttaatagaataaaaaactaaaaactaatataattaatggctagataacaaagaaaaaaaaaaatgtgatacgtgatacgtgagtaaatataaagtaaagaaggatgggtatgtattagtttttgtatattggtagtagtggacctaatggtataatttaaattaatgcgatgatttgtgtgattattttgtaattatattttgaaaaaccgagtttttgcaaatgtcaattatatatacgaaaatataaaactgtatacttctgcaaaagcagaacgtaattctgttgctgcag

SEQ ID NO: 272979 - DNA, 1101 bp, Cannabis indica
atcttcatttggcaaacttattgacattgcttcaccattggacttgtgagtacctgcttcttcactctgtaagtttgtattgtaatatatacggcgagacccctcttcaatcagaacctttgtaacagacccgttttgaaggttggctatcaagtctgaatatggaactacttttggagatggcaatgctgttagtttcaaaaacaaatagcacatccccaatgcaactgaaacagagccagatagcaatactcttcttatattcttgcgcacataagtcttgacatcattcaacattgtctcaattgaaactctcttcattctaatagtcaataaccgcaatctcggacgtaatctcaatgaaaatctccttctcattttgcccttttcctttttccctaaataggattgtttatctccattgtttccactcctcagtggcttaatctcatctttacaaggcaatccatgatgcaatttacaacagctacagaacccaaatggcgcaactctacccttatcattaatcaatgaactaaaattaccattccaaagcaacccaacttgagatttattaaatttatgaaatcccttataactgtagggaaaagaagtataacaaaaacgttcacatcccctcaaaggcttggtttttccaccacaaaattccatcttgttgtgggtaataaataacccattactgcaagaaatagaaaaacaagccatgtctctatatactacagaactaccactaatgagcaagacttcctgccactaactgtatatccattttgtgatttgaaatataaaaaactaaatgaatggagttaaaggtaccagctttgaacaggttgatgaagcaactgacctgattgaatcgtctggtgaagacggaagagaaggtttactagcttggaagaaatacgtattttttgggtttcgattaggtccgtttgaggctaagagataagccacgcggtgttttgttgcccggagtttggcaaatcctaatttttaacagtctaatataaacttccaaagtcttaagactataaggttccaaaaataatatcaacacaaattttccttttttccctcttt

SEQ ID NO: 272980 - DNA, 1331 bp, Cannabis indica
gtgttcctttctttaacatcctttgaggtaacaagaaattgaaatggacggaggaatgcgacaatgcctttcaagaactaaagagacaacttgcaaaacctcatgtactctcaaaacccctggacagagaagaattaggaatatacttagctgttacaaaatatactgtgagtgtcgtgctgatcagagaagaaaacaacatccagcatctaatctattatatcaacaaaagacttgttgaagctgaaggacggtacccattgatagaaaagcttacttactgcctaattttagcaacaaggaagtgaaagccctacttccaggctcatcctattcgggtatacactgacaaaccattatgccaagtattacaaaaacctgacgcgtttggacggttactcaaataggcagtagagtttggtcaatatgaaataatctttcaaccccgaacaacagtcaaaggacaagcattggcaaactttgtagttgagtgcacaggcaaagaagaaagtagcttaaaggacaacctagagccagtacaagaatcccagctgaacaacaatgaagacagaccaacctagaaattacacatggacgggtcagctacagatcaactgtctggtgcagggattgcccttatcacacctgggggcagtcaaatttggattcaaagcttccaacaatgaagcagagtacgaagccctcattgttggcttgaaactctctcgggagctgcatgctgaacacattgagatctgtaatgattcacaattggtagtgaatcatgtctcaggagagtacgaggcccagggggagaaaatgatagcctatctaagaaaaatacaagatctgcttgcacaattcaagggctatactctcaggcaaattccaagagaaaaaaacacaactgttgatgccttagcccgacttgtgagtagcaacatagttgataaggctaatttagtcccaatccaattccttgaagagcccagcatcacctatgcggaagaaattgagatgattgacacagctccaaactggatgacaccaatagtagcctacctcaatactagagaacttccaaatgatagaaacaaagctcggaagatgagaatgaaagttgtacagtatatcatcgtagaaggagtcatgtatagaaagggattctccatgccgctacttagatgtgttacataagaaggagctgcattgatgaaagtgaaaggtttatggttagttactagcagttgcctaagtccttctaagggaataccctagtgataggaacttccgaattatgaaatggttgtgtacttagtgtaaaccattac

SEQ ID NO: 272981 - DNA, 802 bp, Cannabis indica
gcaaccttagcctttcttcacggaagacaaagtctgccacataaaattcaacatgattctcacaagcatgtagtttttacgtgcatgaaagatcactggaggtacgacacgtcttcaaccctccttctcagaagagaaggactgcttgaagtctgtcacacacccagtgatgtttcacaccctttggttttttaacgcaaaattatcgcttggattttagtgcagttttagcctttctgcacggaagccaaagtctgccacataattatgaacatgattctcgcgagaatgtagtttttaagtgcgtgaaagatcactgggggttcaatatatcttcaaccctcttttttggaagagaaggactgcttgaattctgtcacacgcccattgatgtttcacaccctttggtcttttaatggaaaagtattgcttgaattttagtacgattttagcctttcttcacagaaaccaaagtctgccatgtaaaattcaacatgattctcgcgagcatgtagtttttgcgtgcgtgaaagatcattgggggttcgatacatcttcaaccttccttcctagaagagaaggactgcttgaagtctgtcacacacccagtgatctttcacaccctttggtcttttaacgtgaaatcatcgcttgaattttagtgggacttttagcctttttccacggtaagcctaaagtctgccacataaaattcaacatgcttactcacaagcatgtagttttgcgtgcgtgaatgatcactgggattcaacacatcttcaacccttcttcccaaaagacg

SEQ ID NO: 272982 - DNA, 644 bp, Cannabis indica
acattcacgtaactgaattttttaaattgtgtttttatgtaatatgttgtagtgagatttttctcacctagaaactcgagaccggactcctattaaaaagatacgtgtactcactttcctcgaggagagctgagatgtcgatgagagacctctcgtagtacgaacctcgcctgaactagattcagcgagatgatgcgaataggaccgagtctaatcgcattggtatggctcgcgttatgtaggaccaaggaccggttccaaactcgcatacgccagggtatatgtgagtatcacggtgatcctcctacgaaaacgtagagatcaattctctatattacaagctgacccaactgccttgataaaccgatatcgactcgcatgccttagttctatcagtatgttataagatgtccgtatgcgactccaagaggacgcagacatcctagactcgactagtctcgaatgcatcctaagcctaggagcttatgcaagtatatgaactgccaactcgcactacaaaggtcgcatacattgctgtatttagtgaattaagctggaaactgttcttcatttattatgtttacgttttttagtttaattattgtaattaaatgtatgaatggattggtaatgaatgcaatcct

SEQ ID NO: 272983 - DNA, 816 bp, Cannabis indica
tcttcgagccaatccgacttttatactagttttgtttattgtaagctaaggtatgtgttactcttctctggtgcctcactattctcctttaacttgatacgtgtcctccagccaaatttcgggtataacagattctatatgtatgattagcgctcccactctcttacactatcatgttcccaagatgtaagtattgggctgatctaattgttcagctttaacgaacaagtcaaagaacacaaataatacagttaagccaaaacctaactatcttaggattaagatctataaatctaagatcaactaagtgatattgacttagaaaagatataacggtaagtttatgatattttttccattgtcaatatcggtctagtctgatgtatatccaatacatttgatactagtatactttgctaatgtcctggaaaagacattttacttatacaagtgcaagtaaattttatcactgattatcacgtcaatgtaaatttaatgcactgataaattatgggactaaagaatttgaagcatataatcacaattacttttcattgtaatgacattactgtaattgtgaataactatatgttctggatttaaatagaaattgtatattaaaattattatcatgaaaactacatgtaaacttaaatgacttctaatcttctattgatagtaaataataagattacattgaaatggattttatttaggacataaaattccaacaaacttccacttgcactaatataaaacttaaactgcattttaattaatctattgtctttatatatatcaagtgtagtgtgtttg

SEQ ID NO: 272984 - DNA, 2072 bp, Cannabis indica
ttttctactctggtcaatatggcacttacagcatgctccgttatagccaggtatattcctaattcttctccgtccagaggttttgaaagcacaagaaggttttgcgagttgcagtttttagctcctaaaatgctttttcacattcctctgtccacttaaattgcttatttcctcgtaggatgttgaagaatgggacacacttgtttgttgacattgaaaaaaatatgctgagtgcggtaacacgtccagtcaaaatttgaaattccttggtttttgttggtgatttcatatccaccagggcttgaatcctctctagattggcttcaattccttgggcattgacgataaagcctagaaacttacccgagctgactctaaaggagcactttaggggattgtgtttcatgttgtatttcctgaggaccttgaagcattcgtccaagtcatctatatgccccccaaccttcctagatttgattagcatgtcatccacgtacactttcatgttttgtccaatctggtctttgaacatcttgtttactaatctttggtatgtagctccgccgtttttgagaccaaatggcatgatcttatagcaatatagacccatatctattaacaaatttgtatgttctaggtccagtagatgcatcatgatttgattgtaccccgaataggcgtctatgaagcttaatatttcgtgccccgctaatgcgtccacaagttgatctattcttgaaagtggaaaatagtcttttgggtatgccttgttgaggttcgtgaaatcaatacatacttgtcatttcttgttcggcttgggtaccaatacgggactggcaacccagaccgggtagaaagtttcaattataaaattattgtttcgcaacttttccacctcttctttcagcgctagggctcgctctttgtccaacaatcttcttttttgttgaacaggtcagaaattaggattaatatttaagatatgtgatcgattctgaccatatcctcatgtgaccatgcaaaaatgtccaggtttgctctcaaaaattttatcaatgctgattttacttcgagcaacaaaccttttccaattttgagtttcctggtcggaacatttgggtcgatttctatttcttctagttcttccactggaccaacattggtatttggttccccaagttggggatccacatcttcatctcccccttgggcggttccctatttggcaatgttttttcccatatctgaactctgactagaggatacttcctttttagccttggttagggcaaggctgtaacattcccgggcaacctactgatttcctctagggaacccaaccccattctttgttggaaacttgaggaaagaatgaaatatcaacgtaacagcctttgggtcttataaagctggtcagcctaacatgacattaaaggctgatggaacgtctaatatcaagaattgtgccattacagttatgctcttctgagcttgtccaacagtgaggggtaggaaaatttgccgtagaggtgcaacgctctgactggagtaaccatacacgggctgaagacagtgggttaagtctttaagttggagcccgatcttttcatattgtgtcttgaacaacatatttgtagaggctccattatctatcatagtttgggccaccattttgttggctatctggacttccacgaccaacgcgtcattgtgtgggaaatgaatcttgacaccatcttcatcattgaatgttatggtgggttcccctgcctgtggtatttttggcttcctttcttcgacagcaacaaccaattcttcttgctcatgctgtaatgttcgggcatacctctcccgggctttgccagaatctctagttatgtgcgggcctccaataatgacttgtaaatgcccatccaccggtggtggcagtaaatcttgattaacatatttttgcacgtgcatgttattctttcttattaaaaatttaatttcccgcttcagattggtgcatccgttggtgtcatggccataatctccatgaaaatggaaaaacttggtcatgtctctcttac

SEQ ID NO: 272985 - DNA, 2443 bp, Cannabis indica
ctgagtcacaggtaaaggtgactactcttctaagatagtggatgatcctgtagcatcacaatacaaatcaaacagctcacaaagagtatattcaatcttgttcaccattttaatgattgtttctgcatcatgaaaagtactaaaagaatgtttgaggtacttgatcttgtatccagggtcaagaactaaggcaataaaaagtgtctcgttacatttgtcaacatctccccaatacttgtcatacttattcaccatgcctacatccatttccttcaacaagaggtctcctatattatcttgccatcatgtacaattcttgttgcatcttacttatttcaacaaaatacttatttgtagtaacataagttgagccactaaaccttaatatcacttgataaaacctctctagaaatttaataaagaccaaagcatgagctcaaatttaaatcttcccatctttgtcaaattcattaaaataatttttgtaatttaaatcttcgtcaaacataaactaaaacacctgtttaaatctgtcaacaagtaaacatgaggaatgtcgatttccaccttgttgggacatctaacgtgagaagtcctctcgcttgagcacctactttggtgacaaattctttgaaagttttaagcctaataggggaagacctaacatatctcacaacatttctgatggcagaaattgagtagtttctctcctttaaaccttcaccaacaattaggttagtgatatgagcacaacatctcatatgtatgaatttcccatctaaaatgagaacattttcattttctctaaaaatatacttcaaatattgaatgatcacatcatttgaaggggtgttatctactgtaatagtaaacaacttgataactcctcacttttacaaacagtattggatttctttgcttatggtctcccccccgtgatcaacaacttgacaaaaattaatgattcttttaaataattagaatcaaaatcaatccaatgcatcgtgataaccatataattgatattatgaatacttgtccatatattggtggttattgagatccttcgatccttcaaaatatcgcttaacttttttttctcttcttcaaaagcctttgaaacatctctaaaaatagtcatcctagaagggatctcaaacctaggttgtaaggtcctaacaaattctttgaaaccctcccccttggcatgtttatacaacgattcatcaactgccaaatatttatataaatcaactttgcatgctattttgttatatgctaccaccactagactcttatcccctcttaaacttaaaatattctatttattttcgtcaatattacaaggactcttctcacatacttgcttaaagtgatttcataaagaagtactcccgtgctttataagatgacattttaactcagcaccacaataattgcacctacacttggggtcatcttctctattttaagttttggtgatttctcgaaatggttccatatattagatctagatttagaagctcgagagagtttagtagctttcctttttttactacctctatcatcatcagtaggttgtggcagttgggggaggaacaattttattttcttgatccaattctatatcttaaaaatgagcaaacacatatacaataataaaaattataaacaataattaacaatttcaagatttctgccaatccgatcgcaatacatttatttgcagaacctacttcactatggatgaatatctaagatattcaaactcctctaaaattttaaatatataaaataacataatatgtcacacactcacaaatataacaatatatatatatatatatataacttattacattaacacacactcacaaatcacaaattaacaatgcatactatataatttttaaatatatataaaaattttgaaaaaaaataaatatacaggcataatatatgaaaaataacacattaataacttaacactaacacacactcacaaatcatagtttcacaatcatagattcatagttttcattttcaaaacaaatatatatatagttatatataattttagaaaaaataaatataaataaattaacacattaacacccctaatatgtacatactcattactcattaatcacaatcttacttttcaaaatatatatatattttataacataatttcaaaaaaaaaatataatatatatttatttaccattttcaacatgagaggaaggggaagaacacaccgatcgtaagagattaaggggaaaaactgaagaggggccaaaaaaattacaaaaaaaagctagaagaaaaggaagaagaagggaaatgcctgcggtgccagtggtgtgccatcattagaccttctgaggcggaggatgggcttgggcttgatgaagcaaagggacggagggtgggctgggtggtt

SEQ ID NO: 272986 - DNA, 667 bp, Cannabis indica
gagggcttgagagagaacgagagaggggggcggctgtgtttgcagaaatgaagtgggggaagaaagggggcttcgtgccccctgatacatatcaaaacttttaccggcgcatccaattacgccggtaaaagtgtttaaaaaattaattgtaaacctacacaaaaacgagcgtttcacttaacacctttgctggcgcataattgccccgaaaaaagtggccccacctaccacataaaacccacgcaaaaaatttccctccaatttcttttagccttttgccggcgcacatatgcgccggtaaaagaagaaatacgccccaaaaatgaaatcaaaggcggcaaattcttgcgcctaatggtgttacgttttaccggcgcatttgatttgacattgccggtattgctatgttttaccagcgcaaacatgcgccggccaaagtaaacccaaaataatattgggagtccagaattttttttttgtctcgacaacttttgccggcgcatgtgacgaaatacgccagaaaaagtccttttcttgtagtgattctcattatacatatattcatgtatttgtcgttatatttgctgaaattttagtactgtaaattggattttatgtattgaaaagtatggggagttttgttgggtttaatgtgaatggtttctta

SEQ ID NO: 272987 - DNA, 3005 bp, Cannabis indica
aatattataaattaaaatatatagataccgttattaaattacttcaataatgaataatgtgtagaatttttaaaaaaataataataatgaataatttgtctttatggtgtctcatatataacaatattctaaaaattaagtaataatttaatgggttaatatcattttgaattttatattttacaaaacttataaattaggttattttttttgttaaataacaaattagaccctatatatatttttagaaatagtataaaatattactcgagctcaatttttgtcaattttttcttataataaccaattagttttccagcatgaacagatcatacataaaatataaatattgttgttataacacctttagataaaattagtatcaagttttattttgataaaaaaattagcttaggatactattttgtatcattttgagaaatttaaatacaaagtccaatttatcattcaacaaaacagatgatccaatcagtaacttttacaaaacacaaggtccaaaatagtatttaccgaccctaatttatgtacaccaagaaaaacctttcgtgtcagtattcctaagcgcaatcaatacaaaaactaacatcgttaattagaataagttttcaacatcaatttattatggatgataattgttgttagtaacgtcaattttcaaactgacgttaatgtgtcttaaaaataaagttgaaactacaaaaaacaagaacaaaaacatttattaataacctaacattttatcgtttataacgtatcttggttgcaaaatagacattaaaatttataccgctaattatttatttatttatttattgtagtatttatatatacgaatatttatacataatggagctaggttttgggagatggggggcttgccctggccggctggccctatcaaaagtttgaaaaaaaaatataaattgatctagtattttcttataactataacaaatcactttacaaatagtattttggtccctatatatatgttatatgtacaatctttatgatcatattcattttatgcctagctgcatgcacgaatagctttaactaataataaatcatattctaaaaaattagggttgacaaaaagagatgcaaaggaatagtcaataaaagttaaatactatttaattataatatatctctaagatataaaaactctcttataaaacaaattaaaaaaaaaagttgcacttgagtacttgacaaataaaacagttattataggtgtgagattaatatttttcatataagatgttattaagaatgacaatattattgcaataaataattgaaaaaaatgtgcatatctaatattatataaatatattccataaagactataggacaacgtgaataacaataatcgttagcatgaaatagagggtcacatatcaaaatcaataatttggttaagatatcaagtctataataagtaattagccttttatttcagatattaaagagtaatctaatatttctttctttcgtgatataatatattttttttttagtttttctatttttacactttataataatttttcttttttagggaattctacgcaaaaacctttatagtaactaacagagaaacttaaattaattgcaactaaaatccgtataacagtccacatggaaattactgaagcaatccaaaccgtacgtttaaaaaaaaaaataaaaatagtacatgagttaattctcttatttttttttttacccttttaattttttcttcttgttatttaacatttaatttacccatgataaattgttggttagtatgaaactttccatttgatgttattacccccacatccgaatttaataacaaatttatagtaattgtgttataacttttttaattgacatttaaattcttattaattaataataataaagttatacaacaaagataccaaccttttgcacttataaacttataaaattttaaggtcattattgtaaatggattcgatgttgtaactgtatgtgactactatatcattagattgataacttaattaatttgcagctaaaactatatgatgtatttttaacatcatcggaaaacatatatacatattcccatcataataaaaggaaaggagtactactctaccaaattataaaataacaacacattattaaggtatcatatatacattaacattattaattattacaacaataacatataataatctatatatataattggattgaaatggtcaatattaacaaacgtacatctctcctcaaatgtctctttcttcaatgaaacaaatgtttggtattaacttattattgaataactgaatatggcttcccacaacctctgagttgtgcgttaataacggtatccatccctctaattcgtcattattattattattattattattttaaactaaaaacaataacccccaagaaaaaccttattattattatttatttgtctttcaaaatattcattcattaattcccaatctttattttccttcatatatacacatataaatttgtcatcttccacaactcttttttttttcttcctcgatctctcttactttttactcttgccattccatacataatcttcttttcttgagggaaatttcatcaactaaggtacgtttctttttcttttgtattaatttactcatctatatagatatatatatatatatgtttccctacaattctactctattgatcttttgcacaatgcatatgcatatgcgtataacttgtgtttctgttcttttctttttcttaattattattattttaaaaattgttttgtatggtgtttttgcttcatttgtttctattgtgttattataattgtagtagagagtagatagaaatatgcatattaattcttaatgcaagacagattgtgccaattatcaaatattcatgccattcattattttatagtactttcttctaatcatcattttcattgc

SEQ ID NO: 272988 - DNA, 535 bp, Cannabis indica
ttttaattcagtcttatttgtgtacagcttgccaacgtatatttcccttgaatatgtacctgtaagagaagttgtataaacattatttttctctatctcttcccttgtccacacaatagatttgaattttgtacaaacttcaaaattagatggcacagtactaccaggaggacctggccgacaactactggtgcctgatgtttggtgatttttaatatgaggggttcttctttcttgctcttttcctctggtcccttagaggtggtagaggtggtggaggtagttctaacctcaaagcaggtacctctagagctttatcaacttgcaactccgcatcacattcctcgttcaaatctaccacaagatcattgttgtaaaaaggaccatcaaactcatcaaacttgttaaatacattatcaaccctatcctcatctatattagtaggggcctgctcattcaaacctaccgctagatctatttctgggacaaaactcccaacaacacttcttgggggacagttggcagagtaggcccc

SEQ ID NO: 272989 - DNA, 1657 bp, Cannabis indica
attatcgaatttaaggacttttgtctaatttcattcaattttactaatttagtgattatttatgtactaaatcatgttcccggactttagtatctaccaaatcacacttctcaaagtttgacatgtaccaaatcatacaccttgaactttcatccatgttagatttttcttactaaaattggataaaaaattttaaatctatcaatctcaatagttcaagaaaaatttttaacgaccaaaaaagttcaagagacatgatttggtacatgttaaagtttaggggcaaaaattctcattagcctataatttgttctagcgagtaatgaaagataaattttttgcttatatttttacactataaaaaatatattaatatataaaatgtttaagttaaatttatttttatttttattttttcagcagattaaattttgttgaatttaatgtactcatatttgaaaaaaaagaaaaaaaaaaggtacacggcgaaattttggaagtggaaaacagaatgcggcggggactacgttggtggatttaatattctaatcattaataatgttctggagtcgctaacaatgccatttagtcatacttatatactttccaaatgggcaaaaagtttggttgacgaaaaaaaaataagtacgttatggatgatataagaatatgtatagacatatatttatgttgttcatttcgattattgttcttcttattttgaccgcacatcgttgagagcaacgtgagttggtgtggtattttaatttttattctgctaaatatttggatgcctaagtgcacacaatcaacacttgagccgacaattattattcgtataatgttagagatatattaatatttcacatcaacaaaacataaatcaaaatataacacaaggtaatataaccactacagcaattaccttaattagccgcggatcactccactgctaataaatctaattccaataggctattagcggcggtaatccgctatttataggaacataagctggtaattttttacattcaattcaaaatataaccgttaatgaaacgtgatcaattctcacatttcatttaaatcgtatgttgaataatactagataactgcttaactacctattattcttatccttatagatgattaatactgatttggacaattgtatcttgcttatctccgagttgttatccttgtccattgtaatgtagaaaaaaacgctaagtgttagcagatgattcgcctcgtcaaatttccttaaaatagcgagttggttgtctcgctatttgtaatccaagattgcgttgcataactgtattcactcctttgaataaatgaattagcttcttgggcttgtgtactccgaagcaggtatgtgtctcgtcaatatagattttaatagtcttctattcttgtttcgcttaagactatatatagtgagtgagttatgaatattttatattaatcatttatttacgagttattcttttttcttcgtattaaatgatataatttcattatatcaggtggttcatattccactgcaagacacgtgttatttttgaagtgaagccgaattttgggtataacaattgtcccttaaatttttttttaataaaaagagttttttaaatgattacaagggtatttt

SEQ ID NO: 272990 - DNA, 1099 bp, Cannabis indica
aagtattagtttaggaaaaaaaattatcccctaatgcatgcatagaaattcaaatttccctagatattttcaatttttaatattaataatatatttcttaaaaaaaattaatatatagttgctattgatattttgaaggcttatttttcttgaaaaaaaataaatagttagcaaaaactccaacaaacttttgtttcactatgtgaatgatatattccatgtcttagcaaaaaaatatatataacaaaatagtctcaaattgtgtcataaaattctattatatgacaaatatatgtaagtgaaaaagaattataaataaaaagttgtaaagatgaattatatgtatgatgaccaatataatataatacacacaaatacaccctactaaacttgtttattcaattggtctaatacaatgctcaatgtgaattatatgatgcttcttatgaataaatttatagagtacaaaattttacaaagattattagccaaccaagaagaaaaccaataaaaaaaaaataatatatctgttagtgaagccaataaaataaaagaagagaatgactcttttatagtgcatgtaacatctattattgttgttttctttcgtccacatgcaacaagagtaaaataaaaattgaaaagtgaaaaataaattacgaaaaaaaataataatgaaatatataattatcattattatttaacaataatttactaattattatattcatgtatacaattttttttttaaggtaatatataagtacctgataaagattatgatatttatttcacataaataattagagatcaatctacatacctctaaccattgaagaatgtatgaaaagacaaatgaatccaccaaaaactaaataggtgaatacaggtatattggatcgattgttgagagataaataaataaataggttcaattaattattattattgttgttgtttatatgtgattttagagtattttataaaaaaatttaatttatattatatagttaggttaaataattaattaattaataaatattatatataataattttggtttgaaaggtttataaacgtgtatatatgagccatcata

SEQ ID NO: 272991 - DNA, 532 bp, Cannabis indica
tcattataaagaatagaagttgagattttacctcttctcccaacaaccaacaatttatctttgctaaatttcaatctcaaatggcacagttttctccaataccaactattgtctatcttaagctcatagtctcacaaatcctctccttttaagtaaattgtattcacccatttcacctaaaaaatatcatatttttccataagaacccaaatgaactttcctagaatggctttattccagttggaaccactcttaaaatcgagctcaccataagccttaggaaggcaaacggtgtcccaagaggcaagatgaatcttctatctcctttaacacccctcaagaatcccttacacaacttctcaagctctttgataatactttgaggaaagataaaaatgctcatccaataattcctaggccccaaaagaacagattaaatcagttgagtccaccccgcaaaaaaaagatttcgagtagcccaagttaacaaacgagcttaaatctttttattattattattattatatcgggt

SEQ ID NO: 272992 - DNA, 7207 bp, Cannabis indica
ttacagaattttatataaaaactagtattgcaactagcgctataaaacccctattgcagctatcactgcaatagaaactcaaacgataaatttaaaaaaaaataattaaaaaaacagacaattccctttaatttgggccttttaatttacaatatattttaaataaatatctgaatataaaaaatatagaatgttccactcatttatatttatgattttttttttttgaaagaattatatttatgatctacttcataatattaaaataacttttttattatttaaaaaaaaaaggcgggtccaagccaacccgtgaaatgaactttcgtgggccggggcgggcctgtctctcagtttgaaatgaaatgtttttagatgataatcgcacgtgacctaacctgacatagatatcactgaccacctgagaccgctaagggaattttttacacgtttcgaaagctaattcattcagtcttcctcccaaacattttattttattttatttttcctttttatctttaattattattattaatttatttatttgtattttttttcttcttgttttgttccaactttctgtttcaattcaagaaatacaacttccttccttggggcctggaaaaacgaaacagagtgaaaactgagaatagataaagtgtgtggttaggttccgccatgggtgcgcttgctcccatctcttcttggattcctgaagacgaccttttactcaagaacgccgtccaggtacactcatataactcccactgtagtgaactatggctttcactttcactttgccattgttacttcttgttattgctcaatttctttatttagaaactcaccgtagttcactagcttagttcgtattttttattttattttttctttctctcaatttacatatctatgtgaatccttaacttacattcttgcgttgaagcttttgttttctatttctgtttttatttgtgtgtgtgtggaggaggagaatttatttacaagtgtatgtcgttaatatatattcggggtttgaatatggtttcccttaagatgcctttcaactatgctttataaaacaggccaatatttagggcatttgaacaagggatttgacccttgctattgctaaatgtggggtaagaaagtgtgttaaatcactttgtagtggtgtagagacatatatttgtgattctagtggaatggtgttcttggaaaaaccttaggttaggcttggaatgtctatagtggatatggggatgtatatagggtgggtcgccccgaccatcaagacatccaccccaccccaccatgtatttttgccatggctaaggggatatttccaattagataagtcttccatagagtgagacttatgttctagaaacttaaaaatctgcttttacattgagatgcttgaaaactaaaaacgggtgctccacgtaacaattcttatgggtgcaaggttgctgtgcatcgattccccatatttttacttcccacagcattatttttatgtgtatggttgggcttttaggcattttggttgtttgagaaagtcatgtcgtagatgttttctgaatcttcaatattgctacataaaagattgtttgacctcctgctaagatcttaaatgtgacaaggcaccgtagaagtttctttatgcaaaaacttgagtttgtggatgcacaactaggcaccataaaagattactgcacgagggcagggaaaggaaacttgagtgtatgatatggcatttttgaataactttatgaatcattttaatctatctaaaagaagactagagacataaatatggaagactgggtgatttctttggaaagatctaacatgtttattaaaattgatgtctaacacaattaattgattcacttatgtatttatgttatggatgttatttcatgtccctgagctgtttactttttcatttgaatcacttttttttgactaattactatcatttgttgcatggaacacctgaatttgttctagcaattttcatttggatttatatatttatatttctttataatttttgcaggctggtgcttctttggagtcacttgctaagggtgcagttcaattctctcgaaaatttactgttcgagagctgcaagatcgatggtttactctcctttatgatccaattatttctgcggaagcatctgctcaaatgaatgagtttgagcgttctgcttcagtgcttccatcgaagctcaataggtttggaaatttaaaagataacaactgtgccatagggaagagaaaattggacagtgttcgtagctgttactatgctttgcggaaaaggatctgtaatgaaccatttaattccatggatctcagtttttttgttggccctactgatagtacttatgctggaaatggagatgaggctttatctgcaaattgcgtgcttcaagatgcagcctcaaacccttttgggcttgaggtttcagaaatggtgacttgtgcctttccaaatgatctgatggatgctgatggtgggacattccatactcttcacacaagtcttgaaaacccaactgaagaaaccttttctgttgaccaaaataacacccttgaagaaattcctcaggttctcggagaaaataggccttctatctccgggcttgaggagatggaagatccaacagatttggctgccagcttctttgaagggttgaaatacaagcaaaaacatctcctgctttcaatcaagatgatgctgatcaattgaacatgtttgctgaatttgatgtgaataaggtctttagttctcctgtctcaggatctgttacaccatttaacaacatggagtttctatctccacttccagggacaccaatttggaagacagtgtcaacaccagctttgtcagtggataattgtcttggggacagagatctatgctctggagattcttttcaccttcctgatgattatggttctaggagtacaaggacatctgactttgatgttcattcagaagtcaaagtgaaaatggaaacggcaccagctttgtcagtggataattgtcttggggacagagatctatgctctggagattcttttcaccttcctgatgattatggttctaggagtacaaggacatctgactttgatgttcattcagaagtcaaagtgaaaatggaaacggcctatggtaattttcaagttcataatggcacgcaattatttggcagactatccaatctcttttaaacttcaatgatgaagagctcttgtgtatgacttctgatggaagagatatgattgataggtcttactatgatggtctaagctctcttttgttgagctcaccaaatgatgttggtcaagatcaaacgaccaatataacagaacttgagacatctatagctccagatatgtgtactgcgaatgaatctgctccatatcacggagagctgcatgatgatactgagtgccgtgaaggtgatgaacaaatatcattcagttctccaagccagatgcaatcatctatattagcctcaaaccttcaatttcctgaattaaaagatggagttatttgctgtgtattaaatactgaggaccctgaagttccatgcaatgatgatgtttttatatcaaatcaaccaacagtgatgtcgtccacagcagaagcaaagcttcaagaaacaagtggaccactttcttcatctattaaggattgcagtagtaatcaacgaactagtgatagaggacctagcttaatgcataaagaaaaaaaaactcctagagagtctcatgtgatgggatcacatgttttacaagaaatgggtctgaatccttcagctggtagttttggggttatgtttgcagcttccaagtctgactcggctagtatggcatctaaggttgctagtattggtttaaattctgcaaattcaagtacaaggacactccaagagactctgaaggaagagatcagagaattgccaatggccaagcatctcaactcaactgatatctctattgagaaaccagcttttggctctgcgagctttaaaagctatccacacggaaatgccattgctatcgaggaggaacatgatgggttcagagatcaggagtcaatacaggctgaactgacacgcatgaattgtactgtttttaaaccacatttagacaatgcaacagctgagcatgatgcaatgcttaattacagtgaagatgacataccttgttattcagatgttgaggcaatggtaaatctggaagtgctgaatgcagaaaaatagaaaagaacattgacttagttgcttggcgtggtttgttttaatttttatgtaggttttataataaccttgtcttctccacctgcaggtgcttgacatggacttggatccagatgaacaggacttgcattctagtgaagaaggtaataataaccgagctacttcactaattgactgagcttattgttagtgctatatatctggacttattaatgtatgttgacatgcgtgtgattttttattttccctagtctggtattttcttttatcagagcatctaggagatgtgatatgtgctctgcctctgtctatagatgattaaacaatatgaatatggtattttttttcgcaagaattgcactggcatataaaattgggacaatagttcctataaatttttagattggaatttatgttcctgggtaaatctcagtttcttcaactggagatcatatgcaaatatttgcatgttcatatattttggtcatttgttttcaaataatgttatcatgccacttttattaaaaagaaattatcatgccacatgtttttatgactaaattccagattattaaataaacccggcattgcttctgaatatgtgtgccttttcaatgattcaacccaatgtctctttcttttcttccccttttgttttgttgttttcttcaacatccttcctattactccctcccctaccttttttgtttttctttttctgattacttatggttataactctgtatacctgcagtctcaagatatcagcatgaggagactaagagggcaatcatacggctggagcagagtgctcattcttatatgcaacgagctattgcatctcatggagcacttgccattttatatgggcaacactcgaagcattatattaagaaacccgaggtaggccagttctatcactctggctgcacccttgtacttctcatttggaatatttgttgtctttcctatattatcaagagctataggggatctttttggcgaaatttttattagagtttaagatatatattcagaactcagtttggatcttatgtgtagtaattaatttgatctagactcaaaatttaggaagataggtttttatataagacactgaagaaatataagtttcagaatataaatttggcaggatctagaaagcttttactgtgaagtgttttaacttgaattactttcatgcgtagaggttccaatgtgttttggggaataatcttgaaaacattttggtacctggttaccactgcattcttttatattaatccctagtaaaaaaatctgcaggttttgttaggtagagcaacatttgaaagccctgttgacattgatttgggaagagaaggtaactccaacaagatatcccggaggcaggtaagaggttctttgatcacactggattagcccgtataaaaaagagctaattatatttggagggagaggctgtgtgtggttatgcagttgttattttctgtgtatcttgcttttgtgttatcttgataggcatcttcacagttccatttcacaagaataaaagaggagaaagtgtgtttgtgtgtgtttaggcagaaagggaggagaggcttttactttataaagaagtgagtttgatctttctttttcttcacattttctaggctattataaagatggacaagagtggatctttctatctgaaaaaccttagcagcaggttttcaatatctgtgaacagtaaagaagtaggccctaagcagagtctaaaccttaattccaattgcttgatcgaggtacgttccttcggttccttgtcaatctgccttggtaaatagtatcaagtgggaataaacattgtgaataaataactggccccatttaaatgctttctccaatgagcttaagggtcataagagaagaatgcttacatcatttgagaatataaaagccaaactcatctatttgtaagaaatgttttctggcatagtattggagtaggaatctttctttaaattcctctagctgtgtagttaagctcctcttaaattgttcagaacttgaccttttttttcccttctactaatcttattcattatgtatgtgttggaggtttatcaagtatcacaagcatcaacctgcatttgcatgattctccagtatattagcctacatgtgaaaggaggattttaaatacaaatctcaaataactcaaagatttaaactttaagctggatgatcgaaccatgattatggttgattaagactaatgaggaagcaaatatggggaaaaggggatttcatgtacaactgaaaaatggcagatgcaacttagtcgagagttgagatgttttatatatgtatatataaacacaaacatataatgtatgaacacatattttcaaggcaatattgtatcgttacatgttaaacttatatgatatgtcacaaatggtggattttcagattagagggatgtcattcatatttgagatgaaccctgctcgtgtgaaaatgtatctggatagcataaagactacccaaatccaagagggccaattatagtatactggaggtgcaaggaatggaatttctcaacagaaggtgctcttttttaacttttctaactgccctttctgggtaatgtaagtatgcttttcaatatgtaactagtctactgatgttaagtgagaacttattcctttcccaccttgagtcgagggaaacaaaagaaagaaagaaaaatatatcaaggcaatatcttcacatttttttattccaatcattcatgaattaatgaatatcttcatatccagaagttattgttattgatgaaagacgtagattgaacaagaccggctgttacatggtcttatccagaatttcgagcatggatgtggttgtgcaacatccaattccaaatcaataaactc

SEQ ID NO: 272993 - DNA, 411 bp, Cannabis indica
aaaactgccaaaattgtacaatcgattttatacggatataatttctaaacggtcggttacagttttcgtaaaataaaaaccataaccgaccggtcagttataaaattgtaaaaaatcaaccataaccgaccgatttttacccctacttctaggattggcgtcccagatagatgaagcgcaatcatgaaggatgccctaaataggcacaaagcctattgaaacaggccctttcttggaggaaacaactagtattctgaaacttcttttcgaagaacgactaactttccacaagacttcttccaggacaagctagccttccagaactctttttcaaacgacgaccaacttttcatttggaggaactaaagcacaatattttaatttcatccaaagtactcataattagtctga

SEQ ID NO: 272994 - DNA, 548 bp, Cannabis indica
atcttgaggggggatgttagagagtcccgcattgctaatgtgcggaaagacaatagaatatataagaggaatgggctactcctcccatagccaattgattttgagatggaaccccattcaccttatcccaaattctaatatggtatcagattgatattacgcttccgttaccttcttcttctttctcgatcacttaaagatcgaactttctttctctgcaacaatggcgaaacatcacactaggagctctactaatgaggataatggcgatagtatttccgatcccattccaaatcctaaaatcacatatgctccgattcaacaagctccgatggaaaatagggatcgacctgctcacgacaacttatcgagtccatattttctgagcacgggagatcatcctggcctcgtgcttgtatctgctcctctcacaggacctaatttccagtcctggcgttgagctattttttggaaatattttaccaggatcttagatttactaacacgtatgttgtttaacatcctaaataattaaataaacacatata

SEQ ID NO: 272995 - DNA, 1457 bp, Cannabis indica
tgcggttgatatctaaaaatcacacaactgtgattggtccacttttacttggtcaatataaatgtgtattaaatatgttacaaatcgtatcgttttgggacatctcgctgggaatataacaacaacaatcctggtagcaaactagagcttttcccacacctttctgaggttgataatgtgagccttgtgatttatgatattgaagtcataacgctccatctgacaattgcagttctaggtgacaaggtgaacttcaacagccaacatcatttgaatgtcaacttctatctaagacaactgacttaacggagctatgaatctcactaaaagatgtctggagctgattagtgaaggtaccacgagcgtgccttcctatagcgagatgggcgcctcgctattagttgtatgggtttatccgattattatacttagttttatacagtgtattatatgctaagtatcttatcggtcattgtatctcgtcttctaatgtgtagcgaggttgacgcctcgccttatacatctaaagttgtataatttctcactaatgcacaaggcaacaacttgcaaatctttatctcgcctaagactttatagtgagtaagttgtaaatatactctgtcacttccgcatttaataagttattacattttcaaatataaccatcattacatttgtcgattcgtattcttcccaatttgacatgtgtccccctctaaagtgatagctaaattttgggtataataattgccccttaaaaagttcttttttaataaaaagtgctttttaatgattacaaagggtatttttgtcataatttctttttaaaaaatgcacgtccttgattttggcagttttatggtttcgatacacatcaatagcattaatgggctatcttttccacttcccttctattctcatccattagatcttccatattgtgatctgatggtcgaaaaatacaaggtataaaatggtgagaatcaaattttataccattttcatcatctcccaaaacttgagctttctaaacttatgcatgccatccttatcgttgacattcttcctaagaatttattcaaacctgctttacaaatcccagtgttcaaaaaatttatcctgccgaccaccacgtcttcattcgcaaaaatcttcagcgtctgacttttcgacttcgcacagtaggtgtctcaatctccttttatttttatttgagttacggcttgtcttacatcccagtacttcgtttggtttagcaattagggttcgtatctcctaggtgatatttagggtttagcattagtttaggtttatcatattcctcaagcttttggtttgataaacttcatccaggcattgggattgtctttctttggtaaagatgtcccaatcttgttcagaatttatctccagaatttgcaatccgaaaatgtcccaaacatatagcttgcccatat

SEQ ID NO: 272996 - DNA, 729 bp, Cannabis indica
tcgtaatcgattcgtattctacaaatccaatggttgggatgaatgctcaccagggtggtaataaatgcttgagtaccttttctggcaccgattaaatgcgctggatcatcaatggatgagaagcgaatcgttgcctgcaaaaggaaataaacattaatgatgactgtcataaatacagcccacgcgcttgaagcacgtgccgctaaaccgacaagcctccctatggcaccaaacaagcctcgtttattccccaccaaacaaggcttagggggtaaatgttgcccttgattttgccaaaaatacgtgggcctggagctgagaggaccaacttttaaagaaatcaactaagtcttagacaacagaggagtgcctctgggaaggtgtctcccggaggagacatgagaaggatctttacgctcccggaggccagggacatactaaggcagtttcgggaggtactggactctattgaacaatcacctcgcatttaatgccgcatgggggaagatgtattgaaaccaccataaacgatatgacggatggcgtaaccccccttttcagctattacgctatgattaataaggctagtgacggctactttatgaggaatcacatcaatcaagaggggataaaagattatatccacctaacccctaagatacctacggtataggtcatgtatttcctattttgtatctgttgggaatatgtgcccctattaagcctgca

SEQ ID NO: 272997 - DNA, 572 bp, Cannabis indica
ttttagtttgattgattagataatgtcatatataatttcatttactttttatgccatatttattataaccttaataattttttccatattttttaaaatgccccaaaaaagtatcgagtctaatagtgcagtgggtagagaaactgaaaacactagtttgcttaatccaacacaatttgtatgaatattgaataatgtcttttttttttttgtaaaggatgtgtaagtaatgttagagagatagatttaaattatacatagtatgtttttacacatatatagtgatatatttaatttcaatcataaatactatctcagaattttgttaatttgataaatattatatttaatgtgatttataaaagaaataataattatttaagtgggtccacattgatggttttttttttttggatggcaaaatatatgattgatttatattcaaaatatatctttatatattaaaagtgcctatctaacggcatttcttggtttaacagaatatacttaaaaataaaagaatattctgttaaatttaacgattaagtttgatctcccgttaaaaaataaac

SEQ ID NO: 272998 - DNA, 1489 bp, Cannabis indica
tctgaattgtcctttcggactgtccatcagtctgaggatgaaaagctgtactgaatttcagtctggtacccatagcccgttgaagactttgccaaaatttagaagtaaactttagatccccatccgaaattatagactttagaacaccatgtaatattactatctccttgacatataaatctagaaaatgtgcagacttcgtgaatcaatctaccaaaacccaaattgaatcaaataaacccgtggttctaggtaatccaaccacaaaatccatggtgatatcctcccacttccactcaggaagtgtcaaaggctgcaacaaacctgccggtctctgatgttcagccttgatctgctgacaggttaagcatcgagatacaaattctaccacattcttcttcatcccgctccactagaataagtagggtttaagatcttggtacatcttggtggtgctaggatgcaaggcgtatggagtggtatgagcctcttcaagaatctcatttctaagctctgtactacttggaacacaaaccctggtcttaaataacaacatctcactatctgaaactgtaaaatctctgacttgaccagttgaaacctcttccctgatctttactaattatggatcagttaactgagcaactttaattcgttgtaacaaatcaaattgtagcgtcaagttatgaagtttacctacaacaaactcgatgcttgattggaccatgtcctctgctaactaatgtgaaatctgaatcatactagtatctgcccgggacccttcctgcttagggcatcagctactacattagccttcctaagatggtaaaggatttaaatctttctgagtaaaaagaaatatttgaggctcctatggtcagtataaatttcacctctctctatagagataatgctgccaaatctttaaagtaaacactaccgcgacaagttctaggccatgagtcgggtaccgctgttcataatctttcaattgacaagaggcataggcaatatcccgatcgacctgtatcaatacacaccccagaccctgtctggatgcatcacaataaaccacgaacttttccttatcaaaaggtagggctaacactggaactgtgattaatctctgttttagctcctaaaagcttgcttcgcacttatccttccacacaaaatcactgattctttttattgagctcggataagggtgttgaaattttagaaaacccttctacgaaccgacagtaataaccagccagacccaagaaacttctaatttctgtaactattttcactctcgaccaatccctaacggattctattttccccggatccactttaattccatctttgctaacaatgtgtccaagaaaggacacttgagatagccaaaactcgcacttcttgaatttggcgtacaacttatgttctcgaagccgctgtagaaccatccgaagatgttgctcatgctcctcttctgattgagagt

SEQ ID NO: 272999 - DNA, 782 bp, Cannabis indica
atacctacatattccaaataaatttctgcagttaataaattacacttatttatttacttatggaaaaaattttataattcacgttaaattagattagtatgatcataatcctactcattattctctaattaactcataatatataataaaccttaattatctataattagattttcaggatattacaaaggtccaatggaggcttgaagcagggcgaattttgtaattaaacttcaatgtatggtctatatgacccaattagctatgaactggttatgaatgatgaatgatgatttgtaacgccctaaataattaggcaccctacccaagttacttacgaaaccccaatcccctaaatgggattactaatcaaaaaggcgcagaatttaaactttttttaataaacaaaatgaaaatcaaacttgtaatattttgaactttacagcagttgggattccaaaaatatttacgaactttattacaagtctttttctttcagccggcctgagtggcaaaatagagtttaaaaaatataacactggtagacccttaacccgcttggtctgatgtggctcaaacatgtacattcttcgccctgctcctgaactcatggctaataagctaaagcctgaccctatcctgcacagtagagcacccgtgagccaagcccaacaagacaatataaataataacaattatatgctcatcatgcaatctaaatagtatgccattcacatatgtctgtgtgacacagacctacatattgcattaacatgcctatt

SEQ ID NO: 273000 - DNA, 1113 bp, Cannabis indica
gtttagggattatttgtaacgaccgggctaaaatgtttgagggacataataatacatattttatagttcggggggcaaaaatcctaaatagtctttattatatattagatataatttttccaacaatcccccacatgaataaaattgaccaacaataaggaacacgcagataaaagactcacaaggaattgataagactcgactcaacacagtgatagagttctatggtagatacctacataggataggtgggtgttaacctttgaaccttccctagtaaaatatatttactttattagctgatcagtggacgtgatgcctttgaactatctgttgttgatgtaaatgatgatatatctcacacagatatcttcctggcatcatttctgttctcatgattatgttcatttttggccatgaacatctgcctagttctgcaagaggttttagagaatctaacccccacaattctcctttgaagcgaccccacttctctctcacataggtgatctcttaattaagaacaatcctgcatttctccgtttggacttccgacgcaaaaagatcattaaaatcttaatgcttatcctttttccataatgggaataagtgtttcattagaatgggtaggggtggtccccatagtgatcacacaaggtttatataattaggttgtcccattgaacctagttcttgagatctctaggcaactaggttggattttcctttctatcgacctttatttttcttaggcttaagtcccattcctttagatgtcttttcaacttgatctttatttaaccatttggttagcgaatccgcaatattatcttttgattttacatagtcaattgagataactccagttcaaatcagttgtctaactgtaataccctggatttaagaaatggattagcaaaaccctaatgagttaattatgaataattaaggaattatattattatatagttcattatatgagaatttatttgatttataacatggtaagaccctgctggtgagctaggggtatttttgtaattatgacccgagaaggataaaatgatgaaattaatttaattacgtgcttaatagaactatattattatatag

SEQ ID NO: 273001 - DNA, 655 bp, Cannabis indica
tcatttcacttttaaatagttatagaagttatagattatgtatctatgattaacgctcccactcaattgcactaccaaatttacaagatataggtatggactattcctacaggtaagctggtaacgaacaagtaaaagaactcttatagtacaattaagttataacctagccatctcaggattaagattaattaacctaagatcaactaagtgatatattgaaaagtataacgataagtttataatatcttttccactgtcaatatcggtccagtccaatgtatagtcaatacacccgatacaagtttactttgctaatgccctagaaagtgttggttttatggtactaaattaggtacgcatcgaaaggattttgtattatctgattataattgtaccatatatcaatagatctccatatctatgttcattaaattaaaacataaaataataagtttaaaatatatacctcttgatgactatcagggtatcctcaaaacttctcgtatgttgtatctctaaatccagatgatgagggtgatgcaattagactcataccagtgtcttcaaatcgatctgccacacacaagaaatagtgtgggctattaggatataagtgcctacccttgttttgtttaggacaaggatgatgtct

SEQ ID NO: 273002 - DNA, 977 bp, Cannabis indica
ttttttttttcagttttctatattagatagcaataataaaacaaacattagttctttaaaaaattaacattaattattctgagttaacaaagtaaaaaataatcttacattaattattctaaaaaataaaagtagtaggaaaatcatttaatagacacccataaaagagactcattaatagttccactatcgtgtagtataattggtccacataagaaaattttagaaagttattgtagattgtagtgtattgaattaaaattaaatttgaattagtcaaagttggatatactgatagacactttattattattatttagttgatttggccaatatcgaagcattcatatatacccttaattattatttcattagtccatctggctaaacataaagtattaaaatgaataattataaatgattattaaaatggaaaattagttcagggaaaagaaaacgagaagtcattctcttcaattccgcccagaccgtcttctccggtgaaggttagtgcatttttttttttgtaatttcattttattcattcttatttcaatttattcaaagtttactacatttataaaacttatagattatagaaatatagaccatgaataccatcgcataatatcattacagaacacattaatctcttaaaaaatatttcaagaaaacaaaaagaaattttaaaatccagatttgaagaacctgaaaaaaaggaacaaaaactaaaagataagaaacataaaacccacatttctgagccgaaagattgagtttcctgcggagagtactcgtcctcctcttcttcttcttcctcgtcattgctctcttctatgtcaattttcttcgagtcagaaatcaacacggctgagctacatatccaactcagtggcgacttggaaagcagcaaccgaaacgacgtcgtatcggtggaagtactcaaattcagagcagctcgtcatgatgacgatcaa

SEQ ID NO: 273003 - DNA, 1521 bp, Cannabis indica
gaattcaaaccgtagggctgcttggagtcgaagttcgctcgtagatatcattgcaacccctgctccggatccattctcgttggaggtgccatctacaaacactttccactccgggacttgcggtgtgggtatgttagcgttagcctctacttcgtggcactccgtgatgaagtctgccagcgccttcccttttatggaagtgcgaggaacgtagtgcagatcaaattggcttagctccatggcccatttgagaagttacccagacgcctctagcttttgtaggacttgttggagcgggtgattggttagtactttgatcgggtgagcttggaagtaaggtcttagctttctcgaggccattagggcaaaaaactagtttctcgatcacagggtatcgcgtcactcgtcggaccattcaaatttctggcattttttcaagatgttgaagaaaggaatgcacttgtctgtggatcgggagataaaacggctcagggcagccaacttggattttctctgggtttgccagtatcccccggtgactgataatgaagcccagaaacttccccgatttgaccccaaaagtgcacctctttgggttaagtttctttccgtttctccagaccacttcgaagcattcttctaggtcatccgcatggctggtgtgtgcctttgacttttccaacatgtcgtccacgtatacctccatggttcgtcccagcaggcctttaaacatccggttcaccattcgctgataagttgcaccagcgttttttaccccaaaaggcatgaccaggtagtaggatacccccttatcggtcctgaagctagtgcagtcttgatctacgatgtgcatcttgatctggttgtagtcggcgtatgcatccatgaagaacaatagcttgaatccggaggtggcatccaccattttgtcaattcatggcaagggaaagcagtcttttgggcaggctttgtttacatcggtaaaatctatacaaacccgccatgtcccatttggtattggtactagcaccggattggccagccattctacatcatacacgtctcggatcatgtcgttggttagtagattgtccacctctttctccaggtcttctatctttactgagtcgagggggcgtcttttttgctggattggtggcatgtccgagttgacgttaaggacgtgggttattacgtgggggcttatgtgttcgaattattttaccaggatcttagatctactcacaagtatgttaatttaacaacctaaatttgaacttctaaaacgataataaattaaacacataaaaagtatgagaaaccttacattggctgcagcggaacatatgtctcctcccactcagatctctaactcttgattcctttctgtcccagagtataatcaagatctgagcccgaatgtcgttctttgtggactctgaattctatacaaccttcgtcactatgattgaggtattacttgatgtgtgtgggcactactccatcacttagagggtttcg

SEQ ID NO: 273004 - DNA, 262 bp, Cannabis indica
acccaggggcgacaactccctgggacaacaactggatattgactccagttctacgttggagagacaggcccaggagttggcaagcctgcgattggcaagtcggctcatctagacttaggagaagaccttgagttggccagatttagggaagctttaggctgtgcaggcctaactaaagaaccatgcgctgttgattgtaatgtttttgcttagcagagacgcgaattcctgagatggatgaccaggaggacatccttctgtt

SEQ ID NO: 273005 - DNA, 638 bp, Cannabis indica
ttttgtgtatgtacatgagcaacaagatattttacttttatccatattgacatacaataatcattaaaagcccgtgatataaatttaccaacattatcaagacatattttcttgattgcatagtttggaaattgtgctcataatcgaattatttgagcaagaaatcttgcaaatattacactacgagtaggtaataagcaaatatatgactatctagttgatgcatctaataatactataaaatatctgaacggttcacatggtgggtaaataggcccacatatgtcgccctatattcattcaagaagtctaagggattcaattctaacttttattagtgatggcttaatggttaactttctttgagaacaagcaacacatactcattggataatagaatcttctagttttttaatggataatcatgtgagttctctattattctacgcatcatgattgaacctagatagcctaatcgttcatgttaaacaataaatgattttttttagtttatgaacttctcattcataataatatgagttgttattgtacttatacgtgtaacatataaacttgaagacaaactaagtaatttttttaatatgcacttttttcttgaaacaatagatgtaatgcaa

SEQ ID NO: 273006 - DNA, 914 bp, Cannabis indica
ggtccaaccccttgatttgttgaccctgagtacccagaccatgtctgtaagctgcagaaaggtctctatggtctcaaacaggcaccaagggcctggtttgagaaattatcctctattcttactgacttaggctttaattctacaaaactgatcactctctctttgttaaagcaggttttcaacacacactatatgttttagtgtatgttgatgacatattaatcacaagaagtgatcaatctcaggtttcttctcttgttacaaatctgagcaacaagtttgctcttaaaaaccttggtgatttacactatttcctggacattcaagtaatcaaaacacctactggtctgtaattgtcccaacaaaaataaatcccaacaaaaataaattcatgatctattatgcaaaccaaagcttcaaggagccaaaacacaaagctctcctatgaattcatgcctcagattatctcaatatggatctgatcctgagatagcttacaatgttaataaagtctgccatttattatgcacaatcctttgaaatcacactgggtagcagtaaagagaatactcagatacttagctggcacctcaggctatggatctcaactactcaatctactcatcttcaagcattaattttgtgatgcagactgggctgttgatccagatgatcgaagatccaccattggattctgtattttcttaagtgacaatctaattacctagcaatcaaagaagcaaacaacaatataaagatcatccactgaagctgagttcaggagtcctgctactgttgtcactgagttgacatggatttaatctttgctctccaagctccaatacaaatcaattccaaccccaacgatctggtgtgacaatgtaagctctgtaatgctagctgccaacccaatt

SEQ ID NO: 273007 - DNA, 5211 bp, Cannabis indica
aaactatttattctccaaccagacgaaaggtcatcgcctccacaccctctactgcctccgggttgtgcgctatatttcttggacaaaacccaacgaggattctcttcaagagttttaagggccttccttaacaaccctcacccgttagaaaccttaagtgatcctacagcttatggttctgaaggcacaattctaagagaccacgattcgagtaactacctaaaggcggtaaatggggtgttaaggcaacacactaagatggttgttcggaaagtgagaaaggagaggaatcttttgtggccattactcacttcaccatctccacactcttggagccatgaaagtaacaatatggagaataggttgaaaaaggagatcatgtccggagtttgaatttggagcttagtatttatctgttagctttgtgttgtgtacatcttttcccatatgaaaatatatctaaatacacttatatatgtatctatgttagatttcactaacacttgttaatacttcctaacacaataatatatattctactagtactactttttgtgcacttttttcttttgggattcatttcaatcaagtcttcatcgctatcaccctcctctagctcctctactacacataggcatatttcaactaattataatttgtttaaaatagaagctaccataatgcttgagtacaaattttagatgcccacatcataatttataactcatttaatttaatcaaggtagaacgtgaagaaagtagggatagtttaatattcaaccacctaaaaggggttgattgagatgtagagtatttggtcttttgcaaatctatttggaagaaattgcatttaaaatgtaataggcttgatggatagaccaacaaataaattctataaaaacattgtagtgaacaattaagcgtttaagtgcaagaaaccaaaataattgccgtctatagaaagtaaatgaagtgacggcacccaaaacctagttacctaacagtatttactaaaaaaaaaattgatattcaagtaataattgttgtatattaatcatgctgacatacattgtgattattattttaaatgaaatgttcattgttaaaataaaatcattctcacaaaaataataacaataatcttgcaaaattaatttgtcaattaatatataactttgtaaatcaaaccattatttgtttactggaataacttgaagagtgggtattcagatgtaagggaatcttcaacttttaacctaaattcttagattaataagggaaagaatagtgttggtgaagctattagcaattttggtgtgaatagaaagaaggtaggatgtttgttcttttaaaaacattgtataaataaatggttggagatgggacattaataaaaaaatgtgggcttagggttggaattgaaaataaaattaaaatggaagggcctataattagggcctttctcaacaaccgtacgtttatccctgcttatcggcctcgctccgtaagtgacacagtataccgttttttacttccaatatcaaaattaattaatattaatattatttgttaagagaaataatttctcattttttggccattttgcttttttattttatttttttattttattttttattttatttttttttctggggaaagtaaagaaagatccatatattttcattttcatttttcaattttcaattttcatttttcattgtcaaaacccctaaaaatgcaccataaccttcaacaatttctctaacccaatcacgttctatctttctctctctctctcaatattagttttctttctctgaaaaaaacataaacctaaagattgatcttgagtaaagggttcctctattttgggtttgggcttattttcatttcttatgcccacatttgctacttgataatcttcttctttctccgccaccacgcctgtaggtgccccattacccgatttgcccacacctcccaactattcggattttcccgtcgccgccgccccctagggtttggatattctcatctttcttttgccactatcggttcctcttatcttctttgtttcctagggttttatacctctatagattggggatttgatttttttttcttccccttcttcttactttcttagctttttagctactgggacgaaccgcttttcttgggattttacaagattgacaaaagggttggtattcttctcatttctaacattggtttggtttggtttggttatatttgtattttgtttttcaagattagtttggttttatttgcagaatatatacacaaaatcttatcttggtccggtcgattaatacacaaggtttccatttttagtgggaaagtattacattgaagaagaaatttagattagaaaatatactgtggaaagttctccaatttgaacgagaataaaccatttgtggctattgcaaatttgggttttgcttttgagggaagtagatattgctcttgagtatagtggtgcggcttcgcattttgagagtgtagtctgtgtgttgtacaaggaagtgttgcctacgttgttggtgaagggaagttttggcttgcatgggagaacatgaggcgtggtcgcagccaccaagtgggctattgccaaatggcttgttgcccaatgaagcagcttcggtgatgcgagtactcgattcggaacgatggttgaaggctgaggagaagacagatgagcttattgcttgcattcagcctaatccgccttcagaacagcgacggcatgctgtggctgattatgttcagcggctcatcacgaaatgttttccgtgtcaggtgggtattctaaccctttgttatactggataatatgttgtttacaaactatcttcaatgaggacaatgtgtgcgctttgcctgaggtttagtaatgaaaacattagcactgaagatttatcgctctgccgaggtggtgtcattattttgaatagcttattctttgtaagattgcataatttaaaatatgcttgaaggggtttgaacacattagttgggatgtgcacttgtttcagtaatttttttgaggaatggttttatttttcatgttagatttgagataatagatcccataactgatgtatattcatgttatgggcactacaaaagtgttcattaacaaaaataaaaaaattgttatctacacataaactttaatatctaaatcactagactaatgaggttgtatggaaaattagagaacttcaaggctctgtcaaattcagtgatttcatggtaggttgaggaccttgaggttgttagagattattgggcaatttaagcctttttaataatctttcttcattcactgtgagtaaattattagaagttcagtagtcttattgcaatcttctgattattaatttttttattaatttctgcaggtatttacttttgggtctgtacccctgaagacatatttgcctgatggagatattgatttaacagcctttagtaagaatcaaaatttgaaggagtcttgggcccagcaggttcgggatctgctggaagttgaggagaaaaatgagaatgctgaatttcacgtgaaggaggttcaatacattcaggcagaagtaggtctttcttaattaattaggttttatttattttgttctttgctcttgattttgtgttaaatttttatattatatatcatttttttttttgaatgaatattatatattatttttattatatacatacttaaaatatggagacatgatattcttgttattgagaatcactggaaaatgagtccaaaaggttgataagtcactagaatatgcacatgagcttataaggttattactttctgactatatatctggttattattatttcaatttgtttcattcaaacacaaggaagaacatatgcttgtctataattgtagttaggtgtatccttgcttcatcaagatcgacaatggattttgtgctaagttgacatgtttgtggatatcatttgtagttgatataattgatgaagcccgcacccatgtattttgttggcaactaataaattttatagattccttatacattttctcacgctgccttgagttattatgtttccttttcttgccagattcccccctccccctctcccctcattatatgcttgattattgaatcttttattttttactattaaaatgtttatagctattaattgtttatcatcattattggtattttcatgtttatcttgcaatccgtggtatatacttgtatggaatttacatggtatgatattggtagtttttatggttttttttcctaaataggtgaagataattaaatgcctggtggaaaatattgtggtagacatatcttttgaacaactcgggggattgtgcaccctttgtttccttgaggaggtgagagtttttgttttttggaggttctacagaagcccttttcttttgaataataattgatgaaaatatttgggtatccttatctaaatcatgttatttgcttctacaggttgatcatttaataaaccaaaaacatttattcaagcgtagcattatattgattaaagcctggtgctattatgagagtcgtatacttggtgctcatcacggacttatctcaacttatgctttggaaaccttggttctttatatatttcatgtttttaacaattcttttgctggaccacttgaggtgactctttgtgctcttcctctacttttattttcttaatttaaaatgaaattgtccattttgtttcttatctatatctttctctctcttttttgcctattcaggttctctaccgttttctagagttttttagcaagtttgactgggacaattattgtgttagcctttggggtcctgtgcccattagttctctcccagatgtaacaggtacaggcaattcacttgaaaactcttggcattacttcaatgtctctactatgtccaaattgccattaatatattgttcttttgatgtttcagctgaacctcctcgaaaagatggtggagatttactactaagcaagttatttctcgatgcttgtagctcagtgtatgctgtctttcctggtggaccagaaaatcaaggacagccttttgtttccaaacatttcaatgttattgatcctttgcgtgtaaataacaacctgggacgtagtgtcagtaaaggtatgtt

SEQ ID NO: 273008 - DNA, 3989 bp, Cannabis indica
tttggtgtttttgctgagtgcctcattgaattctgagactgatattatgttgtctgattcaatgctctttctgaatatttttatgtgacagcattacattctgggtctcttatggaggtgttgaaggaagtagctaaggaaggatctgcagctcgtgagggagttgctattagagctgatcagaaaagttatagttataaacaactcatttcttctgcacagagtatatgcagcctgttatgtggcactgagttgaaagcagtgagttttaaattttaccttttagagcaaagaaaagaattgacttttttctttttaatttttgctagtactgtttttctctgtctcattcagtaaaaaaaagatacaattcattatatttgaaactattttctcccttaaattgaatggcttcttgtttttcgttccaatttagattcatgaagcaggcaaacaagctagaccttctgcgtcaatcaatggcgcaggtggtcatggacatcttggtggagctcgaataggaattgtagctaaaccttcagctgaatttgttgctggagtacttgggacttggctaagtggtggtgttgcagttccacttgcactcagctacccagaggctgaactcttgcatgtgatgaatgattcggtatgcacttggagagctttattcgccattttacttgtttctctatgttagttactaaattgtgcttttttcttattgttggtctgctataaattcttcaaccataagccttaaatttaatttttttgataattctacatggtagacacttttttattcttaaaaaggaagtcttttactgcatttctatttcaatccttataatttttttactcttcgaaactttaaatagtaaattataagtgaaggaaagtgcatttatatttccttaacaggaatcggtcttaacatgagtcagtggttatctaatgataggacatctccatgatactgagtactgaagatcatcaagaacttatgcaaaatattgctgcaaaaacatcagctcaattttctcttatcccgtccgttcccagtagttgttcacaggaagttgcagttgatcatcgacagactggagatataagcacagatagcattttgctcaatagggaaatctcaagtaaatgcttctgaatacttaccaatacatgtccttaagaagcatgaataaagacaagaaacacattgctcatatgctatcattttcgtttgttgcagatgaaaatcctgccttaattgtttacactagtggaacaacagggaaacctaaaggggttgttcatacgcatcaaagtattagcgcacaggttgtatgtaataagttatgaaaaaaagaaacagtacactttttggctatataatcaagggtagcacctgaatctcaagaattgtttttctgacctttgtcctcactcggctcaatttcaggtccaaacattggcaaaagcttgggagtatacacctgctgatcaatttttgcactgtttaccactacatcatatccttccacctatatataacatctacaatttaacagcattgaaggcacacacatccatctaatttttgcaaaacctgaataaatataaaacaaaagaaaagtgtagtttgatggatccttgacttttaagttacatgtccatgggctttttaatgctttatttgcacctctctatgctcgctccacggtaatttattttattgctctttcatttctcttggtatttagactggaaattcatgctgagtagatgagctcagacttggtacatggtctcggttgtaatagtttttgattgtgttgttgaaggttgagttcttgccaaagtttagtgtacgaggtatctggcagagatggcgtgaatcatatccaacatctgaaactaaggccaatgattgtataaccgtgtttacaggagtaagtcccaatataatgacaaaaatgagcatgataatgacataagattttttcccacctgggtttatttctcactttgttggttatccattgtctttcatccttccatatagtatgttatgcttttgagcttgcaagtgtgccttttctttagcttttatggtcacggtttttattttatatttcactacatagaatggagacaacctcaaggggttagcctagaggtaaatacttggaatgtgttggttaggcacacggtcacacgttcaatccccacatgtccattgtggcagttttctcttggtatgtggcaggggggtgtgggattaggcgaggtgcacgcaagctggcctggacacccatggttacaaaaggaaaaaaaaatggagacagaatctcattgtttgtcacgtgccaaatcattttttaagcacagcatgctcttttaatatttttttttaatttgaattgtgcttaaccagtacacagattattgtgcacaatttaatgattgtcttttgtgtattatagtgccaacaatgtatactcgattaatacaaggttatgaagcaatggatccagagctgaaggaagcctctgcctcagctgcaaagcagttgcgtctaatggtatgcagcctactcctgaatttactgtgagcctatgaagatttatttttccccaatttaattgcctgttatggtgaagataggattcattctggttgcttagtcttttattctcttgggtaaattcaaggtagaatttaactaatgcattttggactttttattattttgctgaaacaccgcgttatttttgttggctaagcagtcaagagctacatggcttctcaaattaactgcattcttattctttgattttcatgactattatgctcgcttgttcgtgtgtcatatactaagatttactaattaaggccagattttattaattgacccataatttgatatttctcttattgtacttagatgtgtggctcctctgcactccctgttcctgtcatgcaacaatggcaaaccattacaggacatcgtcttttggaacgatatggaatgacagaagtaagtaacacttagaagttagattgagttggttttattgtcaaaatttgctttctaaagaatcatatatggtatatttatccagaaattttctaaaatttatcaataacttaaatgctttcagtttgtcatggccatatcaaatcccttaaaaggtgagaggaagtcaggcactgttggaaaaccattccctggtgtggaggtcagtatgaatgaatgtgtgaaagggaacactttttttcagaaagaaattcatttaagtattattattatcagggtaatttttaattttatataactagagaaaattgagtattaaaacaactgtagaaccagggaagatttattacaattcctgctgtacaaccaaggtttgccatttatatgtagtgatgtttaatctgtgataggtaaggattcttgcagaagatgagaatggagacgatgcaaccggggttggtgagctttgcgttagaagcccttccttatttaaagagtattggagacttcccgaggtacattctcatattacaaattgagtgacgatttatgtttcgattcatgaaagttcgcatgtattttcctttttcctgtcaaacaaatgtttccacatgaaaagtatattgaacagctgagttgtgttgaacttaggtaacaaaagcatcatttacagatgatgggttcttcaaaactggagatgccggtaaagtggatgtagatggatactatgtcatattgggacgtaagaaactttctgaaaccatacccactctacactgtcattatcattggtgtattgcgtttgtttatttttcatacattgtgccactgcataaggtgacctttaagaaaaaaatatggtgatggttaaaactacctggcaacctatgtgtgtagatattattccctcttgtttgtttctcatacagagctttttccttctatgatttct

SEQ ID NO: 273009 - DNA, 1347 bp, Cannabis indica
ctaagtcgttattttcatattgtcgagaatggaaagactccccatagtatgaccaaatggtatatgtttgttgaataccattttgtaccaaatgatgctcaactatatataagtcttggaaacttcgattcaaacaaaacccacatggacacctaacttgaccttgtgtattaacaaaagctttcgctctttcaacaaatgcctttacaccttttatatactctactgataaccgattctctatactcatccaatttttgtcaattgacatttcttgtaggaaaaacacacgtatatatcatgatacattaaaatgaaagaaaaacataaaatttgagtcatttaagtattagatacaaatagacaagttaagtagataaaaatataatagcatgaacccaaaaccatatgcatatataaagatacaataaaatttgagtcatttaattattagataaaaattatacctgcaagggaaacttctctaagtgaagataggtggtagaacaaagtatgattctgtatgaataagtgttcttgctgttgtagaaattagattcagtattctgcataagaaataagaacaaaattcaaatatgctcgtggcagaaaaaaggttctcaggaataattaatagtttggtctctagctttggttttttttttattgcacaagagggttgattaatatattaatataataattaatgagacaaaaatgcttagaatatatttattgccattttcagggcatctcatacatatctatatagtagtactgaagcaaagacctgtttaattaattgacttctaataatttctatatagaaagaaaccaattaattagatgtccctagttggaaaatgttcaacaaaagcttgagcttcatctgtttcaggatgggatacaaagcatggtggtattagtacttgaaatctcttgcaagcttataggatgggatgcaaagttaaagattcgaaagtcataactaattgtgtttgaaacatatcaattatattgtagaaagttcgaaactaagtgcaagtacacagtgattggatagttaacattttttatctacttcattcattaatgtatctgtaagctacaccgtatatcaacttggtgtaccaagtagcatccgggatcaaaaaccccatggaaaaatgttaaaatcattttcttatatccaaaaagtaaaggtgcaataaccaaaaaaaaaaaaaatacaaaaccggggaacaagcgtctccattaagttagacaaggtggaaaatcatttagcaaacataagaaaacaaaaccaagagtttacttgcctcgcgatttacataatctgccaaaata

SEQ ID NO: 273010 - DNA, 1455 bp, Cannabis indica
aaatatttttatttcaccaataactcacattatgtccgcatgtcctaaataaatctctgtaattaattaattatgcttatttgtccacttattaaaaattcataatttatattaaattaaaatatccgtaattaataaattacgcttatatatctacttgtagaaaaattcataattgacgctgaattaaattagtaggatcataatcctgcacattactacctgattaacccataatatataataacccctaattattcacaattagactttcgagatattacagtcatgtagctaacatatcaaaatagtaatacatggagttgcaccaggataccgacaagtatatgttaggaaatattaaaagtatgaattaacgctaccaacactagtacaactagagtactgagtgtagtttggtattatggttaactatactatagttacgaacgttcgagactcagacatagaatcatggtattttagtgtatgggcgctcagttacaagtcagatttatattgtgcatgttatgcttttcttactgagtctatcaactcacagttacgtttccatgtttaggtaaaggcaaagactgaacaacaatgagatcagagcttaatgaagattgtacacatccaaacgtctagacttggacggttgtgatcttcaggacaccgccgacagtattttgggtaatgttgttagacaataactttggttattgtataaattatatatgtttataaatagaatttcgagatcccagaccaaaagtattttaagtttattaaagttttaataattgcgaaaatttgctaaacacacttttatgttaaaatccatttaattagcaaaagttaacacagtacttaagaaatcattgtaacatgccttagctagtagaatgttacatatctattgctgagtgttgaaagtaataacgacagcagactcaacttcttggtaatgtgggtctctcagatgtgcttgcctcttggtaattcttaggggtgttcataaaatactcaatccaatctaatctgcacgatccaatccaatccaattcgcaaagtgcagattggattagaaattttaaaatccgcacttatggtgattggatgttgtttgagatataaaagtaaccgatcgaatccaatccaaacatatttatatattttttaaaaaaaaattacatatacaattaatattttaacgtaaaaaaatagtaatttaaaaatctaatatatatgatacaaatattttaaaatttaataaatcaaatgtacatttcattccttatataattcttatatgtaaggagaatataatttaaaataaaattatgcatatccttttacatacaactgtttttctccttttaaaattgttatttgttattagagacataaaataacaataattattttattttgttgttagttatgtaaaaaaat

SEQ ID NO: 273011 - DNA, 757 bp, Cannabis indica
taattttatagatattaaattaaaacttttatttagatttatctaaattagtaattttaattaaataaatatatcaatattaaaataaatagattataatatatatcaaataaaaatacatctccttaaaatagtgagctttagttataaggatattcgatctccattgttggttctacataattcttgttttagtgagattcatctctaatagatgttcgttcattatcaatttaacgtcgaagaatcttaaaagttaagtattatcgtaagacttttattcttagtaacatccaccctaatagtggcttctaagagtagggtttacaaagtataagacaatggtggaagctcataagataaaatggccttaactctcgcctaaatgggtcaatgcttgattcttatcttgattgaataaaaggttgctagaatgatatctactttagatgagttgactactctattcaatgaatgatatctttaaatctcgcctaaatgggacactatatcagtttgttggagattttagaaattatttaagatgtgcttgttttgtatattcacatatctttattacttgctaaatatattatattttctgaatgtgtatgaatttatattgaatcatgttgtttcctgttattaatgttgtagtataattttgaatcttcattgttggtctaacttagtttgttgtttttaatgggacaaatcccaaaggattatcatatgttagacaaacataacattgtta

SEQ ID NO: 273012 - DNA, 1601 bp, Cannabis indica
gtagtctatttgagtagaggtggccccaaactttttcatctattttttgcgaatgaactcatccttataggaaaatctaatcttgaggaagttaaaggtatgtgagactgtcttgaaacgttttgtaactggtcggggcaacaagtgaataagctaaagacttcacttttctgtagtaaaaatactagtattggtacgaagcatgctactcaagaagctattggaatcaagggcccagagaggaatatcaaatatttggggcttcctttgtttcgattctaggcaaaagatgttgatttcaattttgtggttgaatgcttagcgaataagcttcaagggtggaaggcaaaatctctctccaaggcagggaaggcaactctcattaaatcagttggcatttcgctacatgtttattccatgcaaatcaccaagttatccaagcggatggcctcccgcattgatgggctagatttttgatggagagatgaaaagggaaatcgtggtctctatcttatggtgtgggataagttgtgtcttcctaagtcaaggggtgggctaggattttaaaaatcaaaagagacgaatcgtgcctttatggctaagtggggatggtcaatcctcactcaaaataattctctctgttatcgaattttgagagcgaaatattttaagaatttatatttcttcagtgatgattctaagagttcaaactcctggtttttaaagaacgttctcatgtcaaaagacattatccttaaaggtgcttgtaaggtcataagtgatggttctctatagacttttcgaaagatccatggatcccttttggtgaggtgaaatgaccaaccctaagggggttccctagagatggatttagagttgtagttgaccttattgatggaaatgggcactggaacattaataagcttcacactttcttcacatatgataatgtattgtctattctgaaagggggtaagtcgaggggccctgggaaaggatgagtggatgtggaccaaagagcataatgggatattcaacactaagtctgcctatttcctccaagcctcggagcatgcaccattatcgacagtctctttgacacttaggaataaattgtggaactctaatatcccgaagcgacttaaagtgttgtgatggtgtatcctctgtaatgcactgccaactagtgttgtgattgggacaagatttcatgttgatgatgtaattttcccaatgtgtggatctaaaatggaaatggctaaacacattctttttgtttcgtaagtttgctagtcatatttgtagagcctcctaatgaggtcttattcctattaaggataatagaactcaatgttgggattgggtcaaatttctttgggtctcaatgctcatggggtggacactaaagaggtgttcatgtttgcttccatctgttgatgctatttggagaaggtgcaaagtaatatctctaaacctatatctcaccataacagtcatgaaaaaaagattaaaaaatatttttcgacgtattttttcaagtacagaagttaactaaaagattgtaataggaggttgacgttaacactcctcaaaaaaataat

SEQ ID NO: 273013 - DNA, 2405 bp, Cannabis indica
acacaattttacaataaattcttcttgtcaaacactagtttcagcaagaaaataaactatctcggtgtacgctatcagatatatatatctattgatgtaattgtgtattgtaatttatctttattttctttatttattattaaaaattttatttagagtttttgtttagagaggataaattacaatgcactattattattttgtttttttttaattctttttagagttattaggggtgtatcatatatttaatatttattttttttttgagaataagtaatttttctcatattaatatcacaaaattattaaaaaaataatataagaggaattaattaaacattagtattaaaaatgagagtgacacataatgaaaaaaacatatatatttgtatatacagatatttttttgtgactctaccattttcccataatatatttgtggttttgtatatttgttatattccttacaaatctaaattccccacaaatagaagaaatttaaatgtttattagaactctaattccaaagatattaatctcacaatgtgcaatggttttggtatgattggcttccgataaatttaaactttgtatggaaattaggacttgtcacttattttactaggtgactaggctcacaaaaaggacatatttcttattttggaatattaatcgtagtttctcctgttatccaatgtcgatcttttatttttagaataaatacttgttattataaattaatgagataagtcaattataataatagattaaataggtgggtgtatatcttccaaccaaaagtaagcttcatccatccctaacgcaaatttatccaaactatgagcaaccatattggctaaatgcttgacatgaactacattacttgagggaaaaagaataaaagactcgaaatgtctacgattaaatttttgaaagaagtaatatcagacagaggagttctcaaggcatttgagaccattaaagcattcgttctcacttatgcaataggcaattgcatatgtaggatccaatttagactaaaaaacatagtctttgcctccacttcatgagatgacaaatttccaattaaaggcttggcgagtgcagcaatcacctggccttgtgaatccttaacaacaaccccaactcttataatatttcgattggcatcgagagcggcatccacattcaccttcaaaaatccttcaacaagcggcttccatggagcttaaactacaaccggtggggagaggtttggggttgggctaaccgtcggatgatacttgattgtggcagctctgaaattttgcaagtagttaacatcaaaagaagcaagaacattagatggttagttctatttccatgaataactcagtttctttctatccaaatagaccagagtgtacaaataattttctccatctcttctctgttgttaacagttgagagatacaccaaataatcacctttatgcatatcggacgacttaatccaatcgaaactcaactgtgtattttgccacacgatcgggcatatttgcacctaaaaagcgcatgtctaatggactcccaaacttgtttacaggctgaacaagtagaatcagtgatgatttttcgcctaaccaaagatgttgccactggtagagcgtcatgaagaactcgccaagcaaaaattttcaccttttgtggcagctgcaaggagcaaaaaaaattccaccacgaagatggagatgttgagcttcagcaatagttgtggccaagtggtatcatgtttggagtgtgtagctacccgaaaaatggtggtgccaaataagagaatcatcattatggaagaaacttaagggcaaagttagaattcgatcaacatcttatggagaaaaccattgttgtagaatggggacattccattgatgatctttagttatcaagtttgcaacaaccctagttgaaggccctgcataacgaataggaaagaaagagtcatggctaggtatccaaggatccaaagcagttcgaaccaatcttccttcaccaatcttccatcttaagcttttcagtaataattttctaccccaattgattccctgccaagtcagtgagggggaataagaatgatgtgcttcaaggaagtcattaatagggaagtagcaactcttcaacagtttaccaaggagagaatctagtttttctaataggccccaagcttgctttgttaataaagtttgattaaaatgttcagagaagcaaaagcccatactgccttctgttttttctttacaaagcaggtgccaagcctgccaatgtatttttgaaccattctcattcgacccctactaaaagttagccatcatagattcaagttggttgcaaatataggctggcagtgtaaagaccgcttagttt

SEQ ID NO: 273014 - DNA, 479 bp, Cannabis indica
aaaagtgtgaattctagttgtcaaaggtatcttttttggggcatattgtcgaaaagatggaattatggttgatccaagtaagatcgaatcagtgaagaattggccaaggcaaaaattagtgacagaaggtcgaagttttctcaatttaggagggtattatcgatgttttgtcgaaggattctctaagatctctacgccactaaccgaattaactaagaaaaatcagcgattcgtatggtcagacaagtgtgaagcaagttttcaggatttgaagcaacgtttaattacagcttcaatgttagcgttgtttattgtgatgcatcaagacagggtctgggttatgttctgatgcaagatgacaaagttatagcctatgcctctcgtcaactgaaagattatgagcaacgctacccaacccatgatttagagcttgttgctgtagtatttgctctaaaaatatggcgacactatctttatgg

SEQ ID NO: 273015 - DNA, 1192 bp, Cannabis indica
taaagtataaaaataaaaaaattccaatatttttaccaaaaacaaataaacaaataagattggagcacattttatggtatagaaaaaagttgggtgtttgaagtttcaaccaatggtattgatgatatcattatccatttcatcatgctcttatggctatggacatatttctactactcttacctacttccacagacctaacaccttccttcttccatggcttccttaacttgctgtgtttacatgatcaccaaaaatatctccaattcaaactccaacaccaatggcgcctcaccatcaccatccgactctcttaaatccctcactcaacagaataataagccccaaaacctaaaccccaggcggcgtcctcaccagccctccgttatcgaaatcgaacgcgctatcggggccggaagattccgcgacgctgatcccaggcatcatctgatttctttttcttcactgaatttggattttgtttaggtagtttgtgttttggattctgaaaatttgatgtttattgttatgtatagggaattggaagaagataagaacacgaaattcgatgtgactatgatgaatttcccaggaaagtttgaacatccattacagaagaagattcaagagagtgctgagaggattactgaacaatctgaaagaacatttcgtttgaatggtaatatcattttcttctcttttcctttctaagatcaaactattatttgttcataaagtaattacttgtttgattagattattggtaccaaactaatcaaggattaggttaaccactcttaaatttgccaaattaataaaatttgtaaaataatttcaattaatttatgatcattttgcatctaaaataatcaaaataatcatataattcataatcgtttttgcgaccattaattattcttttgtaaaacactcaaatttattcatggtccacaatctagctatttgatcaatttccaccaattattttggtctttagtctcttcatttcactaaggtagcgtttggttggaggtaatgaaatggaatggaatggaaaggaaacaatttttattccatttctttgtttgattgcattttaaagtattggaatgacattccaatggaatgctctttccaccattttggtggaatggctattctattttaaaaagaaaggaatgaccattccaat

SEQ ID NO: 273016 - DNA, 574 bp, Cannabis indica
tgcgaggatccatgggcgtttttactagtggccatgtctgcttgtctcactaatccaaatgtcttccgtttcttttttaaggtggccttttttccaagtatgaataataaaacactaaacatttacttgtccttgagtataacactaaaacgaaaaataaaagttaaacaagtcagtttccagaacatgagtaattttcaagtagactcaataacatgattatgaaaaattttacttatgcataacaatctagaatttcagttcaattacgcccttgacacacttcaatttaatttcatccagcacatgaaacatagaacacaattaactaacaattgaaccactttattaatgccaattacaaccatcaattcactaacccaaaacttcatatgcttgcaatacttactactctccactaatataaatcaatgcacaaccaagaatcagaaggtctttctaggcttccagtgttacacttaagtaagggtagatgaaatagttatttaggtttgcctataccataagcttctctaatcatgtcacccaaaatatttttcacacaatctcaata

SEQ ID NO: 273017 - DNA, 565 bp, Cannabis indica
tagtaaacataggaggaatagtagtaatagaatgagttaaaataaacgtttggtattttatgtgtcgaaaaaaaaaatatatagtatttaagtataaaaaattaaaaacatatggtatttatactacaaatttcccaaaaaaataagaagacagtaccaggtattaattttccaagaaattatttgtccttatatcatcttaattaaattatttaagaaaactaacaagtcaatattatgttttcgtaataataatagtaataataataagtagcagttggatgatatttttgcaattgccgagacccacaacaaatggtttctcaaggcacttgcctggttttgattaactcgaagaacattaaacgagaatgaggggattaaatattgtgatagataataatgtgttatctcaactatactacatattttcagtgccgacccaaggattggacagcttgggctattgtacaaggcgtttattttttaaaagcctatttttttttttttaagaaaaagtctttatttttttttctttttttcccctattatatatacataaata

SEQ ID NO: 273018 - DNA, 688 bp, Cannabis indica
tttaatctgttgggtactcctggtcggcatatttgcttgtttttttgcttgatactccatccaacactcatcgtgcgtgttgtcttttgtagatgaaccttggtgagtattgggagcctcagcatcaaatcgaccaggaactgcttcaacttctacacgaagtccaccctcgtcttcgtgctaatccttcttctgattccgtacccagccattgaatgatggctcgtacgaagaaaactacacgtctagctgacgcttctgatccccaggtggctcggcttgccgccccgcccgacggcgaataggatttggcggtcccaatggaggaggaccgtgagggggacgttgaagtcaaggaggttgaggagctgggcgagggagaggaggagattgaacccccaaactatggggagtacaatgaggctgggcaaccagttaatgcctcatcggaggagcttgctgaggcagttcctgggatgtcctggttgcaggcgtcgactacgtcaccgaggagcttgctgaggcagttcctcatcggaggcagggtgccttgggcgccagatgggtgagtcctccgtccaagatttcggaggcacgcctccgcactctcgaccaagactcgatacctgggtgagctggactgcttcattcccgcccacgcaatcgcgcttcaaaccctaggtcaggg

SEQ ID NO: 273019 - DNA, 718 bp, Cannabis indica
gatagatggatagattatgattatgattagtatatataattaatatttatcatgttgatgacctccttccaccacagccaagttccttttggcagttgaagtaaacggcagcaacaggcaatccaaggttgtagatctcagcaaaatctcttgtgttgaagttgtgtcgccacccaggtgcatacactgtctgccttcctaactgccgaaacagaacaaacacatagcgatgaattcccaccgtcggtcttgggctctcgtagcacatcacttcttgtcctacatatatgcgtatatacgcacatcattaaatcatcacacatagaatatatatctttatatattaaaaataattatcgaatgataattcttgattaaacatttttttaacttcttaaaataacgttgttaacttatcgttaacttattggtgttattagttctgtaaaataaattataattgtgttttgtgcataaatattaacaaaaaaaatgagtgtataaatatgtaccaaagcctgttcctgtagttgcaggaatatcagtcaccaacctgaaaaaattatacactttaattaaatttaaactaaattaagaaaaataaaagttaataattattagtggcacacacttattgacgtgcctttgatttgttagtaatattctctaaaaattatcaaataaaattatatgaggatatattactaagtacatacca

SEQ ID NO: 273020 - DNA, 1650 bp, Cannabis indica
acttgtatgcatggtacatgtacaaaattcaagggagtaaaaatcctaattaacctaaaaaaaaatactagaaaggtagagtctgaatttgagcccatataagaaaataggctgatctatttatgaaaaacggatcagtccgaataaagcatgacatgagtccaagtatgatacaaaaagaagaaattagactctatacattttttatattgtactattttatttttatactttttttttttttaaagtctattgcttttacctctttttttaaacattgtaccaattttgcacctttcacttcaagatactctccctgtgactcccttatgtcaggacattttgtgtacaatacatataaaaggaggtatgtttcaattaaaaaaaattataggtaaatttggttaatagattaataaaagaggtttttttcaacttaccccatacaaaaatataaacttaaagccgtgctttatttatttttttaaaatattcacattagacacgacacaactcatattattacgaactgagtcaactcaatcgacacataattacagctataatgatccgcgctatgattattacttagttttaggacttttacatgaatctcaaaatgtaccatgcatacaagtaaaagatagtgaccctaaagttaagaaccattgtaaaactaacagtgctaccatttaggcctagggtaagaatacataacaattaattttggtttttaatattattctatataaattttattttggcatgtttatttgtccttaattaaaagagaataaaagagtatattcttcttctttgtactttctttgactaacatgtttacttgcaaaacttatgggtcccacacgtagtgcacgtgattaaggtatatagagagactggagaaaattgagaaaggaatacattacacgatctaataataatctaaaataatatgatttggtttaagcttaagcttagtctagctgattagttagttggtattatttgtcattttagttacaagttagtaactattttcagcagcttgtatcttctgtacaaatactgatgtaattcatttcaagaataatcaatgaaataacagagtaacactttgactgtattttactaaaactagctaataattctatttatcattaatcattgtatttgtatatataaatatgtgtatattggtgcaattgtcctctcaaagaaatgttctcacggtaaggaagttcgattctctatcttacttaagatttactatttatgtgctataatgtaatgtgtatcgaatggtgtaacatgtaataaatatgaaaaaaaaaaatctatttattatttaaattaaatcatcaattttaacattaaaacttatatatagaaattggataatgtaccatgattttattttagtttatactcgtttcttaaatcatttacagtaaaaggaaatttaattttctatacttacatatacctaatattttatctctaaactaatacgtatcaccattgaaaatatatgaccactttatttagaatccaaaaatacccctctcaaatttcccatacttttttttagtgcaaaaacataaaaaaaaaataaaaaaataaggtagtagttcgatggtggtccgatgg

SEQ ID NO: 273021 - DNA, 904 bp, Cannabis indica
ttagtaagatataatggtaagtttatgatatcttttccactgtcaatatcagtccagtccgatgtatagctaatacaactgatactagtatactttgctaatgccctggaaaggacattccacatattcattttgtaagtaaattttatcgctgattatcacgtcagtgtaaatccagtgcactgataaatcatgggactaaaagtagtttaaagtatataatcgcaattactttccctatgatcacatcattgtaattgtgagtaactatatgttcagaatttaatagaaattatatattaaaaccataattataaaaatcatgtaaacctaaatgatttctaatcttctattgatagtaaataagattatactaaaatgagttttatttagggcataaaatcctaacaattattactgccaaaattaaacttaggtatttatttgtatgagagttaaacttaagtatctacgtcgcaaattactctattcatttatattatttcgaggattattgaaaagttcattagtgtgttctataatttatttatttattaagaaatttgaaattatactaatgtatattgttgacctcaaaaagtgatcatccgacagttgagtcgtatgaatttaatgttttgccatgtgttacacaacaagaactataaagtaaataagacaaggatttttatagaggttcgaccccctttgttagcgggtaatgacctattttccatttaatactattcagatcactataggtgggatccgatatagctctctataaggttacaaagcatggatcaagtaggcaaattactactgaaagagaggtatagccttagagatgtgggagagaggatgagagagccccttaggcatgtataagagagagagagagaga

SEQ ID NO: 273022 - DNA, 1479 bp, Cannabis indica
gtgacaacttttattgtcactaaataaaatattagtgacaataaaagttgtcactaaagataaataaattgtggctaaaaggtagttgtgactaattgttttgacattttaaaaactattagtcacaaagattagttgtgattaaaagtcacttttactcacaatattacatttattgtgactaaaacttttagccacggactttttcgccacaacaccgtcacaagaaaatattgtgactaaaacttttggtcacaacatttttcacatttagccacaatttttgttgtgactaaaagcaaagttttttgtagtgtttagtcagtcaacactattttctttaattttgtacatatataatattgagctttcatattgtgtgtcattacccctaatggaaatatcaaaggttactaagaacaatgaagaaggagagagagtagagactattgaggaaattctggccaagcttgaaaaggttaagtatatccagggtctggtaattattactatttttatcaaggattttggattttagattttttcttaaaaggtatactatccctccaaactcaatttgtggcacgagatgatgatattttgttaacatcttgtccaaaatcaggtagtctttggttaaaatctctaatcttttctattgtgaaacgtaataatgataataatggtcccctttcgtttagtacatgcaatccacacaatcttgttcgtgcacttgaattatcattacctgatgaagccaagccaagaattatgagtgctcatagtccttacccttcattaccaccctccattatgtcctctaattgtaagattatatacatttgtagaaatccattggatttgtttgtttctcattggcactttattcataaactttttggggatattaatactgaaccaactcatttggaggagtgctttgatgtgttttgtaagggagtccacccttttggaccattttgggaccatatctagggtttttggaaagcgagtttagagatgcctcacaaaatattgtttttgaaatacgaggaacttatataaaaagataatgtattttttattagaaagatagtagattttttggtcgagatatgttccaaaacaaatagaacaattgtgtagtgttgaaaatatgaaaaaatcggatgtaactaagactgggaaacatcattctggattccctaatagtgcattcatgagaaaatgcgaggttggagattgggtgaactatttaacacccgaaatggctgagggtgggaagaagcttattcaagaaaagtttgcacaatccggtttattgtttgatttctaaattgtttgttttcattgtctaaggatgtaataatatttatgatttgcctaagtaatttcttttttatccaataagttacttatttgttgttggtgtacatcttcttactataaagatatgtcacttgtttttttttttttttt

SEQ ID NO: 273023 - DNA, 535 bp, Cannabis indica
caaaaaacagaaaacaataccaaacatgctctaaaactttccattctttttcttttatttattaaggtaaatactattttacaccttatattttgtaaaagttaccaattggaccgtctattttgttaaatgacaaaatagacctatgtatttttttaaaatagtacaaacaggaccctgaacctaattttttatcaaaataaaatttaataataatctgatctaaaagtgttatgacaaaaatatttacattttctgtatctgttcgtgttaggaattttcttcaagtttagttatatttaaaaaaaattgtcaaaaactaagcctagggtcctatttttaccattttagaaaatacatggtccattttgttatttaacaaaacagatggtctaattggtaacttttgcaaaatacagggtccaaaatggtatttactctttttattatggggcataatttttttcaaaatattatatattttttttaaaaaaaaataactgtgtattgtgttaagttttctctgttgttccac

SEQ ID NO: 273024 - DNA, 862 bp, Cannabis indica
aacaaagttagatgtttactatttagctctgggttaggaaaaccattttgggggaaagccttagcaaatgcaacctaccttgttaacatgagcccaaatagagttatagaccttaagacaccttatgagatgtggtacaatagaaccccaacctagcgcatttaagaaaatttaggtgtactgcatatatacaccaatcaattgacaagctggaacctgggtttgtgaagggaacttttttaaattacgccttaggaacaaggggtatagaatctacatttctaggaagggcacaaaaggttgtgattgctagaaatattatttttaatgagttataatatcctcacttgacctctagaaagggtagtatgtctttgtgtgttacaggagaaacaagaaataaagacactgcaagtgtggaggtggagtacggaacgaagctcccagaagaaggttcacaggtagaagatagtgtggaacaggaagacaatgcacatccaaaagctattgtggagccaaaagaacaagataactaagacctaacagaggtctcagaatggttcggatagacaggtctggaaggttatcagttggctcatgataaaacccggagagagattcaacctccaacaagattcgcggaagcagacataatagcatttacactggcggtagttcaacaaactgaaattgaagatctcggaagatatgaagaggcaattttaggtggaaacaagtctaaatgcctcctggccatggatgaggatcagatggactctctataaaagaataatacttggatagttgtaccgaagctaaaaaataagaagattacggagtgcaaatggattctcaaggtgaa

SEQ ID NO: 273025 - DNA, 539 bp, Cannabis indica
agaaatttcgaaaactgcttgtccagattagtctttcggagtctctgcgggtacgggatctttacatggtgatctatactgattggtggagatgcttgttttggtgcaggactttcagtagtcttcttttctgttgatatcggtgccggttgatcctgagtctcttcttccactggttgtcccccatcaggcccttcatacttcttcccacttctcagggtaattaccttgcagcttttttttggattgacctctgttgtactatgcaagatcccctgaggacgggttgctatctgagttgccaactgccccatctgagtctgtaagtctttgatggatgatctagtctccgtcataaactgtagcaataaatctgtctgaagaccagaattcccactagagccttgttgctgtgattgttgttggttctttgtctggttctaatttctttaatgatagaacccattattcctttgaccccctccttgattaaacccaaacgttattatttggagagtaattcccaatggcttttgctt

SEQ ID NO: 273026 - DNA, 1706 bp, Cannabis indica
ttgcactgttttcatatacaatacttatataaaagatatcattataaacaatatgatttggaaagaaagaccattaagtgatgactatgagtattgtaaggtcatcataggtagctagcgttttgtaaattattagtaattatttatatactaattattaaattaaaatattttattttttcttgataaacttcaaatacacagcatcaaatgctaatacctcttctttggcatagttaatctatatctgttggaagatatatctataggatattgcaacaaaaaaagataatttatgggtgaaggagattcactctatatgtatatgaaagacatagattgatatacttaattacactaaattgacaatctcacttgacaattttaatgctcttttctttagcattttgagtaggctcaagagttctgttttgtcttccattagttaaagggaataaataaataatggcatggaatggaagtggcgtgcatatggccatatactataatataaatatataaatgttatctttcttttaactttatagaggtatagctctatttaggatagaggttgcatatgaatgttgagaccacacatgtttggtccaaaatgatatcttactacttacatcacaccttcactttagttttaacaacttgccaaagccttttggtactataataataaattgccctacctttatcccatattattgtttgatttttattcagttatatatttaattgtaacccccatacaccttatatcatcacacacacacacatatatatatatatatatatatatttatacaattgtttgttactacaaaaaagtaatcaaaaattgtgttttggttggtgcattaatcttcttctaattaaagaaacacacaaacaaacaattattactataattaatgactttcgtagcataattagtctaattataaatcatatgtaccatataaataaacgaatattcaataattacattaaaaaatataattatgatagttacattttaatataaactgttatatcaaactaaaaatttcatatttatactcaaagtaattattatcaactatataaaataaattaattttaattaaaatattttataaaaaactccttataattaatatttataatttttttattggtaagaaaataaatacagtcaaatttgtattatgctacagataatttattaattatttttatttaatttttgaattagttataatcttttaataatgatccaaagattaaaaataaatataatccattaaaatttcatctctatttataaatatatggtctcgtttgataatttaatattgtagctagattcaaatactacatataagtatctccattgtaattgctcttgaagaaattatttttgggttgatgcttaagttacatgattaattgtgttcatcaatatactcacactgtataaattaaatcactcgaccacaccgcataaaaaaatatgatttgaaattttttacggtgccgttgcagtttgtatttttgccaaatcatgcggtgcagtacggtttgcagttcaaatcgtaccgcactatatattataaagttaccaatctttacaatatgaattttatgttttttttcataaaataaatatataatatatgtgtatattattttattttttaaagaaaatttaataa

SEQ ID NO: 273027 - DNA, 725 bp, Cannabis indica
cgacgacggagtacatttagtaaagatccaaaatataaggcgaaaactgtgcatgtaatggtgatgacattgtatggcatgctaaaatctggagtggttaaagggacaagtaatacttctgtgtaagacagaacagtactgttttcctacattacaaatccataaaaaaaacaaagtaaatacaaaatctaatccaaagtagaacatgtttataattaacataacatttttgaactgtacctgaagttttgctaaaataggtaaggtctccaacgatttatcttcaatgtagtgtatgcttgcttggaaatctggatagcttactagggcagaggggatatcgaatccctgattagcatctggtggaaatttttaacgtaaataaaaattttaggtcgtaaaattgttaataaaatataaaaaaaaacaatatttttgaaaatttctcaataaaaaattaaaaaaacatacaaataaaaaatatgtatatatatttatttctattgaataaacaactaaataacaaacaaacgaacaactgtataacaactccactacaatatgcaaataacataaacatgtaaacaattcaacaaagtgcatcaactccaaaagaaagaaaaaacaaccattagatgtataaaataaaattgacaagcaactacaaaacaatgtgtgtatcaactcaataaatgacccataaaaacgaaactaaacaacataac

SEQ ID NO: 273028 - DNA, 1248 bp, Cannabis indica
aagttttggctaatcgtattggggtttcatcggtattgggtaaaatggattatgggatgtgtttcaattgttcaatactggattagccacggtggttaaagtcttggtcctattatccctacatgtggttttcgacaaggagatcctctctctccgtatcttattatattgtgtgctagaggtttttttgggcttatcaagaagtgtgaaacaaataagtggctttatgggtgtaatgtggctaggtgacagttatctttattgtcgagtcaatgaaagagaggcggccaagattatggagctcctgacaaagtttgaacaagcttcaggacagcaggcgaatattgctaaatcttttatcctttttaacactaatacctcagagataaactgtgctcgagtttaggaaattttagtgatgtgggttacaggtgataaaagtttgtatttgggtcttcctaatactatggacaggaatacaattattactttgggtttccttaacaaaaaaaatgcataagcaagtggaaagttgggacgaaaagtggctctctaagtcgggaaaggaagtccttttgaaatttgtcgctcaatctctctctagttatgctatgagtatttttctgcttccgtttaagctttgttctgaaatggagcaaatcgtgtgtaagtattggtggcgggcaagtagtaatggcctaggtattaattggttgttgtgggagaagctagcggttcataaagataagccgatatgtacacttgttggagaagattcttttctcataattgtccaaatgtttctacctattacctgcaccacataatactcgtgagtcacaaggactcagcaagaaaagtaataaaaacaatcatataattcaccacacaatattagcaagtaaactcacatcagaatcaaatagtcatacattactcatatatttaaatttgggtcagtacatatattcaaaaataatgaatgtcaatataaagatatacggttatacacaattaccagtcaataataataactatatctgttacttcatataattattctcaccactttcctaacaaagtaattttaatacctcacctggtatactaatgtacttgtcgttgtttaataaaatcaccttgatattcaaaattgataatcaaatgttactgacgttgttaaattaggcaacctaaaaattattccctagtattcataaatctcattacttaataaggtcagtcgat

SEQ ID NO: 273029 - DNA, 553 bp, Cannabis indica
attaattatacattttctcattctgagctccaaacaccgcagtctatattctttgaatccttctgaatatcttaagaaaattcacttaaggcccttgcctcaagtttgtcttgcttaatgtgtgcataacagacacatccaaataccttcaactgttcataacttgttggcttccttgatcacacctcatctggtgtcttgaaatccagtgatgttgatggaaatttgtttatcaaataagctacagtggacacaacttctaccaagaacactttgggcaatctaacactcaatagcatgcacctgaccatttctaggatgatctgttgaacctctccacgggtccattttgttgaggagtcttcctcatggtcttgtgcttttctattccttccttcttatagatcacattaaactcatccgaatagtactccataccattatcgattcttagccatttcactttccttccagtttgattctcaatcattatcttccagtgcttgaatctctcaagaacttttgtcttatttttcaaaataaacacccataa

SEQ ID NO: 273030 - DNA, 718 bp, Cannabis indica
gttctggtcctagtttgagtcccaaatctagacaccgactactgttgtgttctaggccctgttacccgaatcccgagtcaagatctggatcactatcacgggtctcggtctggttctagttcaggtccgaggtcccatttgtgagtttgggttcgggatggagactggggtgtggttctaggtcccgacccttgttctgtgtcgctagtctggttccatggttgggtatgagttcaggttttgttcgggtcctgattctaggtttgggttgggatccgggtccggctcccaattcgggtctaggtctgattgggagtccgggtcctggtccggttacggttctgaatctaggtccaatttcatttatgattccaagtccaagtcctagttccactcctgatcaacttccgattttggttccaattttcggtcacagggtacgggttcgggtccacttttgggtttgggactgggttaaggtccggttgtccgttcgggtcattgtcagggtttgggtgctgggctgggtcccaaatccagacaccgactacgggttttgtccaagccctgggtccagatctgaatcccaatctcgggtcccggtctggttccatttcttgtgccgggtcacgaggtgggtcctaggttcaagttcgcgtctaggtccggtactaggtcccgatcctagttctgtttcctaggtccctatcctgattct

SEQ ID NO: 273031 - DNA, 1062 bp, Cannabis indica
gcctatattatatattatagatattatgaatttgtgtaatactcaccttagttatgttagagtttatgctatagaaaaacttataaagactatttccgattattgaataaaaagttgaacattatgatatatgcatgaatgttaatttattaatatttaatacattgaataatttatagataaacattagaaaatttcttattcataagtttttttttttttttctctctccttgctcgagcagctctctaagctggtgctatggcgaaaactagagctaaggcgcaggggaaattgaaaatctcatcaaggaagaccaaaaaacgtggaccttgctccacatctgatgttcagaaaaccaaatctatggaggaggtgctgggtgtggaacctttagatttctcggaggatgaggaatccctgaatttggatgtgccacctgattcagaagaagctgccctatgtgatgattttccggctcctctaactccgaaatcgtcgttgaaaagtattatccagcaggaagatatccgtgctgatttcagtatgtttatggctgcaaacaagagatgttctgaagaagtgaatcgaggtaattgtgttactccccctatcctcagatctggcagtgttattaaaaatttgaatgaatcattttcgaaatctcagacagcaagcaaagttaagattaatttggaagatattcaagatgaaatttcgttttggaattcttcaattgtatgctatgttctaggtgccaatccacctcttgctgtattggaaggctttgctaggagattatggaaagaaaaggtggataaggtgggtatgttggcttatggtgtattcattatcaggttcttttctgagattgaaagagatgaaattctcaaggggggtttcatcttcttcaataaaaggcctgttataatgaaaccatggaatcccgattgcaatttcaagaaggaagacatcagaagggtaccaatttggattcatcttgatgatcttgaattgaagtattggggacagacttctctgtttaagatagttgagcaaatt

SEQ ID NO: 273032 - DNA, 1113 bp, Cannabis indica
ctgatttaccataaacccgaggagttttcccaatctgactccaaagacacacttaagaggattgagtcacattttatatcgtcgcagtatctcgaacattgcttgtaagtgtgtaacatggtcttttgcatgttgagattttacgagcatatcgtcaacatatacctccatggtttcaccaattagatctgcgaacatcatatttaccagcctctgatatgttgcccctgcatttatctaacccaaaggcattaccttgtaacagtacaaacctcgatctgtgataaaagaggtatgctcctggtctggttcatacatcgggatttggttatatcctaagtatgcgtccatgaaactgagaagttcatgacctgcagtggcatcgataagttggtcaatgctaggaagtgggaaattgtcctttcgacatgctttgtttaaattagtgaaatcaacgcatgtgcgccatgagccattaggcttgggcacgagtacgggatttgctaaccagtttgggtagaacaactcccttatgaagtcgcatgctaaaaggcgatctacttcttctttcagcgcttggtacctcgcgggggccattttgcagcgcttttatcggacacctcgcacttcgaggtcaatgttcaacaggtgatacatgacctgcggagatattccgaccatgtctgaatgtttccaggcgaaaacatccagattttgtttgagagaagttacaagatttctccttgttgaaaagttagtttagaaccaattttcaaaaccttgttattatctaagggatcaatggtacctcaatagtgtgttccgcggcttgggcggtggtggtgtaatcgaggaccctaggacccaagtctggtttgtcttcgtgcggtatttcctctattttgaacacctcctgtcgagggggtggtgcttctaacagataaatgacattaaccgacttcttttctgcgagcttcaatgtcgcgttgtaacattctcgtgagtccgattggactcctcacacagatcctagggctgtacatatattttcgtaaaccgcctaaaccgaataacccgcctaaaccaaaccgaaaaaactgccaaaaaaaaaaa

SEQ ID NO: 273033 - DNA, 909 bp, Cannabis indica
ttttactttatttcgtcggtttcttttttatcatcatttaatcaaacgacgcaaatagtatattattagtgactttttaaatagacgggtccaattatttggacactactcatgtcggtcaacactatgaacagtagcgttgaccgatgtgaatagtgtaatttgtagtagtgctcggtccagacccggacccgaacacaaacacgaacatagacacggactgggacccaagatctgaattaaaacgagaccgggacctaagattaggatccagatcttgacccacgacccacagcttggacctaacccgtagtcggtgtttggattttcgaatcgtaccaagaccccaacctggaaccatttctagaccaggatccaaaacaaaactcggacccgggacccaaaatcagaacaagaaccgaaatcaggaccttggaacaggaattggacctcaacccagaacaagatctagacgcagaaccaaacatggacccagacctagactagggattgatacccggacccaaacctaaacccagacccagacttgcgccaggacctggaccaaaacctagacccgtaccagaacccagacccatacccagacccagaaccagacccaagccaagactcggacctagacccagacccggacggaagccccaacccagaccaagacctggactcaaacttggacctagagccagaatcgtaccaaaaatcagacttgaacccaggactcagactcaaacctgggaattggacctagactgagatcaagatcgggaccaagaccgagactaggactgagccctaaacttggatttggactagaaccagaattgggactgggacccaagactcgaacctgggacttgagaaccgaaccgtgacctagatgggggactt

SEQ ID NO: 273034 - DNA, 915 bp, Cannabis indica
cgttaaactaataatcgttaaaccaaaaattactgttagataaacacttttaatatataaagatatattcatttcttattttaatccccatcacacagtttaaattactcattaagcttccttaagtttccactaattgaatttatttgtttgttgtggttgcagtgatttcaaaagattaatctaaatttcctagaaagagaaccaactttgaaatttggatgacatattcttttaataataatatgtaaatgatatgcatattcctaaattagtatgaatagcacactacccttatcttgtgaatattatatattacatgtgaaagtgaatgatacctcattttggttgcattttactcacatggagatatgatggagagattggaatcaaagttgaattgactcatacatgctattttattattactgttattttaatggctacaaaagagacagaaagtcattttaatttctttgcttcaaaatatataatttaatgccttctaagctctattattagcaccttaatgccaccacatctcaatttataatgagaaaaacacttcactttcaatcaacaacctcttctgtattttatcataacttgacttatcatgcaccaaaattttactttgtattaattaattaccagccataatttacttgaaactacataaacgtgtgtttaaataccacgtatgatcattgatttattcaacctttatttagatttatctcactctgtttttttttagtcttcatatatattttactactcaatagaaatttggtagcataactataatatgaggctttaataatgtggggtactacttatgttaatgtgtgatgtttacatgtcgattcataatttagtgcctcccaaaaaaaaaaagaattataaaaaaataat

SEQ ID NO: 273035 - DNA, 881 bp, Cannabis indica
ctagttgtaagaataggtgacataacacattcatataaacttgtcttgtataatctaattgatgtgtccatgcatttattatacttagtaggtctttatatttgactcaaaacatgttcgtgttagtagcatgattatcaatgtcaaagttcatatttgaaaggttctcaaattttgtttgttaatggtgtagatatggccaactcgggttcaggatctgattcagacctagaggcagagtgtccaacagtaatacctacaagagggcctactcaaatgaatgaaatatccaagctaatggatcaaggcaaaagagtggccctcgaggttaatgacaaaggacaatactgcggcaaaagctatgccaagctcgtatcaactttaggagtcagatgccgtcagacgatagggttgtcgtataaaaattggaaagaagtcaaccctactctgaaaaataaagtttggacagatatccaagtaagcagttatttgttagaattttgattagtttttttttattattaattcaaatgttcactctaaccgtgtttgttttccttcaaactagacggggttcattgtgccgaattccttcaaacatgattgtctcatcctagctgggaagttaatgaaagacttcaagaataggatgacaaaagacatcataatgcccgctgtgaaagagaaggatctgggacgactgacacaagtccctgaaaagcaccccgagatcgaccatgctgattggtgcacttttgttgaaagtcgactaactcctgaatttcaagtacgctaattatatttgtactaagataaactcttaaatataagtacatgtatctaatgtattttttttggcattgtaggaattgagtaaggtg

SEQ ID NO: 273036 - DNA, 3642 bp, Cannabis indica
cgagctaacggaatgtctgttctcgtaaccggcgcagccggtttcgtcggctcacactgttctttagctttgaaaaaacgcggcgatggcgttctcggcttggataatttcaacgattattacgatccgtctttgaagaaagatcggcaagctttattagctcgtcatcagattttcgtagtcgacggagatctaaacgacggaccgttgttatcgaagctcttcgatgtggttccatttacgcacgtgcttcatttagctgctcaagcaggtgtacggtacgctatggtgaatcctcaatcttatattcgatcaaacatagctggttttgttaatcttctcgagatcgctaaagccgcaaatcctcaaccagctatagtttgggcttcatcaagctcagtttacggattaaacactgaaaatccattttccgagcaccaccgtaccgatcaaccggcgagtctttacgccgccacgaaaaaagccggagaagaaatagctcatacgtataaccacatatatgggctttccttaacgggcctaagattctttactgtttatgggccttggggaaggcccgatatggcttttctttttcactaaagctatacttcagggaaaaccaatagacatataccaaacgcaggacgataaagaagtggcgcgtgacttcacgtacatcgatgatatcgtcaaaggctgtttgggatcgcttgatacgtcggaaaagagtaccggtagcggcggaaagaagaaaggtccggcgcaattaagggtttataatttgggtaatacttcaccggtgccggtagggaaattggtatcgatattagaaacgttattgaatacaaaggctaaaaagcacgtgattaaaatgcctcgaaacggtgacgttccgtacactcatgctaacgtgagccaggcgtataaagattttgggtacaaaccaacaacggatttgtctacaggtttgagaaagttcgtaaaatggtacgttagttattacgggattcagccaagggtaaaaagggaatttaacttgaatcccgaggaatccgcttgatttaatataatcaatcatcattcacatggttttttttttaacactattggtttttttttttttttttttaatttttattttttatataaatgttattatttttattattgaggaaaaaaaaagttattattgtggtccctcatgtagtggatcatatttgctgcacctagctgttgttgttgtagaatattatatatatatatagatataaaaactccatatatagaagaagaaattggaaagagaggagaagtgtagaggttgtggattgggtgtgggaaggtgtaataatttttgggtggggtctactagaaagggtgtagatctcaaccattggattgatgttattattattatatatgatgaaattgaacagtcaagatcagttttttaattttatggtgaattttctttgctttttttttatttatattggtataattttttttaccattattatgagatacttatagtgtttaacacgatgataaagtattatataattgatttagaaattttttttttcgtaggaagacgaatgtgaacattaataagagaagacattaatactttacaatctgaaatattataagtataatttaatattgaagaattttctttgttttattttttatatcatttttatattctaatttttgttaatttacacatttttgtataattattttcctttttgaggttgcaagttgagtaagtatgtttgtgtacatttggattttgattttttttttttcaagatgcttatttttttcattaattgaaaaagattgttataaaatattctgacccttttagtcaaaaaagagtaaagagtgaaacttatatatattcttacaactaattaagtgatgacattactaataatcattagtgtaaaaccgacacataaaataaaagtgttagatcaaataaatactttgtttttttttttaccttttttttcttttaattagtcaaaaataagatgaaagctttaattctataattgacaatcattgttggaatcaatttgggcaataattactatgtccaaaaaagtaagaaaaaattaaaaaaaaaaaataatttgaaaatataaaaaagtgattttgggtatctaaaatttaatgacaacaaccttaaagaaattgtgaaaataattaaaaaggagctggaagtttctgtaaattgtacagataagaaataacataatttatatatatatatatatattttctatgtctaaaaatgttgtaattgcacatgatttgggatgatgattgcttctaattaactctatttattttattttttaattaatgaattggatcaaaactttttttggggttctttcttaactgatttttgtagtgattgattaaaataatattatagtttttggccattaaagctttcacatttgtgtcggtaaggttgtttattaagtcatcaaaataagtaagaagcaagccctaccatattggtgtcactccataactggcaaactagtcaagttgcataaaaggaaccttcttttgagagctcacaattcaaggcttcttttttgaatcaaagattaggctaaagtcaaaaaaaaatagtccaaagatttacatagaatcaaataatctccattatcaaactcattttagttaaattgtgagcaataatatttacagaacgattataaaataaaaacttaatgattgatatcttttgttatgatataaattgtagaaaaattgcgactaaagtgctgatttaaaaccattacaaacttaatcaacaaataattagtaataacaagattaaaagataatatattaattagagattaaacaaaaattagttgaatattaaaaatcataaataattaaaacaataaacaataaattaaaaaggacaaaataagcaaacaaagatagcaaaatggcctcaaagagcccctccctaacgcaagtcaggagccaacaggacgaccgaaaacaagccggccacgagcaaaagagcactgtagacttctgacgagaacaaaccacacttgctttcccatctaggtttcaaacggtaaaggagacgagcttgggaagcacattcctttgggtaaaactcatgtccactctcacttttgtaggaatgtacacactatacaagtgtacatatctataaatacactttgtgttcatatttttggatagaaaaattaggtcataagtttccaaaaaatacttatgtttaatgtatataagtctccaactttaaaaattagtagtattagtaaggtcattatttttatatattaattggtacgcaatttaacagatttgttaaatactaataaaatgtcacatgtcaattgcttattagtacaaatcataatttcaattaaactaaaaaaatatattttaattaaaaatattttcacccagccaccacttcacccctatccccattccctagtcacacccaacccctcgagctctccggagatccactactcgcagttgtcgtctaccgttgatgtctagactgtcgacgtctattgtcgacatcttcttcatccagccacaccctaaccc

SEQ ID NO: 273037 - DNA, 569 bp, Cannabis indica
taataaataattacacataacttaccattttgtgaaatttgtgtgcaggtaaagcaacacagaatcaaattttcgaacagcaattacagagccaaaagtgtacttgaatacatacactcagacctttggggagcaagtagggtcaaaacaacaggaggtaaccaatatttcatgtccattgttgatgactatagtagaaaggtctggatttttctcttaaaacacaaaaatgattgcttagaagcgtttaaaaactggaaaacactggtaaaaactcaaacaaattcaaagattaaagtgttaagaactgataatgtccttgagtttattaatgatgaatttaatgagctttgtttgaagtatggaatagaaaggcatagaactgtgataaagactcctcagcaaaacggcattgctgaaagaatgaacagaaccttactaaacaaggttagatgtctgttactagaggctggaatgaacaagaaatactggggagaggcattacacactgcctgttatctcattaacagaagtccaaatagaaaacttgatgccaagactcctgaaga

SEQ ID NO: 273038 - DNA, 466 bp, Cannabis indica
aattccgtaaaaatatatatatataaaaaaaaactgttttaaagtgtaaaaatgaaaaaatcccttagtttttttacacttaaattaattattgaaatacttgtagcaaaacgtcttataattttaattataacacatataatctcataatttaaaattttatcacacatataatcttaattgaagattattacacttaattatttatttattttatttaaaattttaacaataaaaattcgtctagtagttgaatgcattttctaaaaaaaaaaaagaaaataggtttaatgagaaatgagtttctcataatcctccttcttccctctcgattaataaatgtaaatttattttagatgaaaagtattctctgttattcatcttcaccactttttacttctgaaataagatataaggggaagtctaattttatataaaaaaattattataaatattataattaaat

SEQ ID NO: 273039 - DNA, 2628 bp, Cannabis indica
ttcaagtatgaatttcaacttttgcaacttgaattccaatgatcatttttggattttcttcgttttgggtacttattcctcaaatttatgaaatttatctctgcagattcctcagaataaacttgcccgctgggggtcatcctgtggcagttgaattctgtgatgatgcgtcatctgtggttgtagcttctcaaactatgaccggttgttccttatacatgtatggtgaagaaaagaccaaatcttctgatggagctaaccagcaaaccaagcctcctcttcctgaaatgaagtgggagcgtcacaaaatccatgacaaaaatggtgtcctcactttatctggaactgccgctacttatggcactgctgatgggagtacaataattgcttcttgttctgaaggtacttctttcttttatactgtatgcgttgtattcatttggttgtttgaacctgtaactcagttgtggttactagtatacgtgtatagagggtcattataacaatgtacagataccaacagtttaaacattagaagggcaatgatcaatgtggttgtggacattatggtaaactgtacgaaagattaaattggtagactaagtcctagtttagtatagggccaagagtgccaggcttgttgaggggtcaatctgtgttatgctgtcagattgaggttacattcggtcacctcactagttaatgacccctgttcgatcctttattgggttcaggattcaataagtgcttcagctttataacggagcttggtaattggatttagagaatttatatgtgtaaaagaactaaaggatatttttttttcctaaccgtaagaaacattaaaatattgcatataggaaaagctacagatatttagtggctctgatataccccatctcttttacactagcctcttcagactctctttcccttatttgccgcagcatccttatctcccacaatcatttgtaatctcaacaagttagaaatggttatcatcagtatatgttattattgatatggaaatgacgatacaaaatctataaatgatttaagatgacatgttaggtgatgtttggttcattggaatggactttgataattaggaatgataatgaaatggaagagaattagaatgggacataggcatatgaatgaacttgattgtttcaatggcagttgtacttagtaggtgaacttataatactatgaggttacccatgagaatggtatgtaatatgaattgtaatgagaccaatgacaattccttaaagaagcaaaatggaactgtgcttaggaataaaggtttctacggctaatggctaaaccagatgttggaatgagaataggtattccaaatctattcacattccatcccacataatcaaacattccatactgccatgtaaattccaccaatacatgaatgtgccataaggaatccatatacccctctaatttttagggagccaaccacaaagaccagcaagtagcatgattgcaacattccactaattctttcttaaccttctctataaacaaggactaacccaagacaaaccaaaattcattgaaaacctggtccaaagctttattgctttggaacaatgcagaagaaggtgctgcacagatttgttgttatctattgacatattacacattagtttggagaaatatctaacatatgaaatcgatgattcccccccccccccccccacatcaagttatagctaacactaatcacatttcaattatcatgttagctctaatctttctagttcttatacttcgttgcttacaggtactgacattatattgtggcacggtaaatctggcaagattgtgggtaatgttgatacgaaccaactaaagaacaccatggcagctatatcaccaaatgggcggttcattgcagcagcagcttttacggctgatgtgaaggtgaaaagatctacatgcttttcttgagtcagtcatttcattatagtcaatccctgtttatcctacttatgatggattttccttggcctgtaaagataaatgacatgtattgtgatgttttgtcattatctatttgttgaataattatatattttttcctgtttaattggcatcaggtttgggagattgtatatgcgaaggatggttcagtgaaggaggtttcaagagtaatgcagctaaaagggcacaaggttatatttcaattttaaactacgcaatataattaaatctagcccattccataatacgacttatctgctatcacttctaaaacttttgttttgcatttttcttcaagtagttctgtttggtctgttgatcaacacatgtatactaactcttgttcacgctattgctgtttagagtgcggtgacttggttgtgcttttccccaaactctgagcaaatcatcaccgcatcaaaagataactcaattagaatttggaatattaatggtatgttctttttttttttttaaggaaattggtatatgtgttgagtcctttcattttattaaaatattatgttgtgaattaaatttaatcatcctatcctgactattgtttctttatccttttctttaaaaagttcggtatctatatggatgaggatccaaaaaacactc

SEQ ID NO: 273040 - DNA, 686 bp, Cannabis indica
aaaaaaataaaaaccaacagttaaaagaaaaacattcgttctagtgtttgaacttaattaaacacttgtattactttacatcaacataataagaagaaaagaaataatacacaccgctaacgaagcagcagtcaaatcctgctctctcgaccaacttggcactgagagcgtcgaaacagcaagggctctggtgaatccccggagaccctagaatccggcgaagtagcttagccggagactcggctacgcgatctttgtcgacagagtaatctgaaacgattcgaagagctttaatggtgcgtttggaggagtgtggtttggaaaatagtggaaataagctttggtaatggtggggtgttgatggggaacgaaaaatgagattggaaagaggaagtttggggtttgatgggttttcatggctatgggtgtactgaagagaaaagttgtaggtggtactatgtagcttcatttgaagctgaagacccattattctcactcactctttcacttcttgccttgtctttctcctttagtattcaatcaatcaacgttagtgttatttaaggacaaagtatgattatgctaattgctactgatgttataattaatattgagtctctcaaacattttggaaatgtttttagaagctgttttaaccattttttaagatttaagttttacgagaa

SEQ ID NO: 273041 - DNA, 2093 bp, Cannabis indica
atacctaaatcaaaccatataatgattatattaatcttcacttctaatcttacttgtataaatataaagttttatatgtacaatgttatttaccccaaaaaaatatctgtgataagtataattagaaatgccttgccagtatctgatatattgtttattatcttataacctgtaaatttgagcaaagctacctgcaattgcagaattaatatgtttgattagaacgaataaaaatataggaatagaagaaaatcaaatttaaaattgtactggaatgattcttccttctattttaaaatggaatactcattctaccgaaatgatggaaaagttgttccattagaatgatattccaatactttaaaatgcaactaaacaaaagaacgaaataaaaatgatttcttttccattccgtattatagtctccaaccaaacgcaacctaaagaatgtaaataaagaaagagagctaactaacttacctgactttgattgaagtacaaaagaatgaacactgatatcccaaaagccatgtctgaccatatgttggcaaacgctccacggttttctaatctcctctcttcccttaactctaatctatacatacatacattcatgcataaatatatatatgtatatatacttgaaattgaaaacagaaacaagagagcaagaagggttattatgcttacgctttgtcccttaattcccaccaaagttgatcatcattgagaggaggagctttcccaatctcaacctcaagctgcagcctggctttctccattttgagttcttccactatttcaagcttttgggttcttctcacatcaagtatttgtgctgccaatggcactttttccacatatctgtcctccattccaaattcccaaatcaaacacatacatacattacatactaataatcaccattatcagataggaaacttctataatgcatcccaaaatgaatgtatctatgcattcatttcatgttttcgatatccaaaaaaattgtacatggcagttttaaagtatcgaaaacaagctttaaacagtctagttcacatgtgactctttcattttatacgcatgggaactagatcatttgacactacttttcgtattgtaaattattccgaatttctcaaaactctacaaaatgtcttaaataaactagactacaatacacaccatcatataaaaaattaaaagaataactattcagaatatcaaaaacatgataagagtgcatctgtacactaacaccctatgagatattagcttcataaaatcatacatacatacctctttaaaaatggcataagaacatagtcatgcaacacaaaatccaatgcccaaggcacaatgatcaacactgccaaaaacttagcctataaacatatacataacaaaaacaatatatcaacaatcaaatcatcatacatagcaattcataataataataacaacaacaatagaagaaagattagtgtgagttactgaattaattgaagcataacgaaagactctatcttcatacaacaaatcctcatcatcaccagcaagaaaattcctaacagacttaaccaatcccatttcaggaaacaactcttcctcaccaccaccaccaccattagaaggtggaattgaagaaccccctgatccagttccaccattgttgtaatcccaatccaaatctctatcactatcacccctttgctcccccaaatcagtagctaaccaatcctcccaactcctagaatcttcattcctcctatcttcttgggcttcacgcaattcaactatggcttcagctcttctcttccaagcctcaaatttagtatcatcatcaacatcatcttcttcttcttcagcttcttcttcaacttcttcttcgagttcaagcatatcgttttcctttaaaccaagccaatttccatcatcagccaagaaaaatctgtaccaccaactcttcttccttctggcttttgcatttgcagcaaacccaccaccaagattcctcttccttcttctccacttctctgaactaataaagttcaaaccttttgagaaagacaaggaagaagaagaagaag

SEQ ID NO: 273042 - DNA, 3125 bp, Cannabis indica
tccaggggaattcagctacttccctccagaaagagttatccgcgaggagtgcggtggtgctagtactagtggctcgtaattatcttggagttgccccatttaagctgaaagttcttaatttttattttatctcgcattaaaagagtcttttctcacatctataaatagaattgtcatccactgaaaaagttattcttaccttctaatgtttaaaaatccaattaaacaaaagaatgaaataaatattcaattttttttttttgcattccatttcattaccccaaagtcccaagttatgaaacatatgatatgaatacacgagacaggcataatcatgccagatttatttatacctgtagatctgatctgatatgtgatgatgatacagaaaggtagaccttgctaccttagaaaatgtttattatatgataacagatgtagttagttcttgatctccagaaaggtaagcaatttttgtatccaagattcgtatctagaacagactacatctgttacagaagcaggcttgtctgttgtcaagcaggcttaacacgatcccatgcgccattctcgtcatcaaagtcctttattgaaaggttgtggttttcttgcaaatatattaacccagtccatattcctcggatgagtaagatgctcacaaacactacactaccgatggtgcaaaccacctgcaatttcaaaacaaatagaaattggattaagaatttaagactgcattttggttaaagatatcttaattcttaaatgttgcatcactactcatgttatcttggcttttaaattagaatcttgatgtattcaataatcaatttcaaaccatgtaacgttatggatacgggtgtttaacagaactagaactaacttctcaactcaattattatcattaaacacaataaacagcaacagctccaataaattgcataaagttaggcatgtcatcataacttaatccaataaacagtacaaaattaggcacgtcttccaaacttgtacagtgaactgctcaaagttaggcacattctctgaactttttatcacataagcatatacaccgcaagtagcttaggcttatgtaaaaccagttgcagaagcattaggcagcctcaatctacaagacaagctacaggtattgttaaaatttacttcatggtggtgtgggcttataatctaatgggtaattttgaaccatgttttctcgaattgtataccagatgtattgtaatgtagtcctatacatagttctacttctactattcttactgggctcgaacaagcatggacatcaaattattaaacatgatagaacattacatgttggaaactaaatttaactagtgaagcagttaagatccgatgtaactaaagaattaagatgaaaagttactacagtactgctatgacttattggtcaaaagcatgacaaacatgccaatgccaaattcttaagccagaggaacctcaaatatttcaaaaccttctgtgagaagcacttgcaagacccattcaattagagatcatacacaacagtgattttaagtgatttaatgtaagagaattgattcatttacctcaagaaacgccttcaaaatccacaaaaaagcaagaattagcactccattgacagaaaatcccacctaatatcgaatttcaagaactaggtcagatgcaaatttataaagatcaaattaaaaatgaaatgaaaccccagtttttcatttcatgataataaatctatgctgagaagaaccgagtatttgtaccagtttggttgggataactattggaagaactgatcttacagctcgtcgagcacgcctagagatcttcttaaaaacattctggacgaacttaatcaaaagatcaagacttctatcttcttcttcttcttcatcatcatcatcgtcatcttcatcatcaccatgtctactgtattcagagctgatagaacggctccaactgcgtggatcatccacaagagtatcactaccctgaaacaaaattctaagctagaatcatactttaacaatcactatacatgtaatacaaaaaccatgtgacatacaaagagaaaaaacctggggagaattggagattcgtcttgaggcttgaaggcgaaaaggagtttgaaaaggtaaaaatctgagtctgaaatttgaggtatgccgatggagataaatggagtgaaatacttgttgacgagatttaagtgtttgaaatgataagggagagagtgtcgcagctaatgacatggttagggaaggtgtgacgctacaacatatgcagatcacggttgtgtgatacaaaattgttaattgaaaattctaagtcttctaaaatatggttacaaaaatgttgaatgccatagcttccgttgtttgcattacaagactgaaactgctatagcttcattgatggctacacccatatccctaaaatataaagaagaagaagaaaagacaataaaatgcatggcagaaatgattgagaatatacatagtaacaaagaacacaaaacaaaacaaggcttctttgataaacaatcaagttaattcctatgtaattctaaacaattatgatcacccgtcaaacaattttgtctccaattttatacataaatatataaaagaactaacaaattcaaatcaatctttaagcagagatcgttgtaatgcacctcataaatgacagcaataagatttgcttcatagtatctattttattgacaataaatcaacccttaaattaccttttcctctaaataaaactaatcaataacaccaaaagtgtagtgattataactatacgaaaactattccgaaattaagcatagacggataaaaaaggagcaaaaggatagatagaaattgaagcttcatcttttaatctagggttagggagtaatcacctgttcttgaattgaagatgaaaacccactcgtgcacaggggaaagctatctgaaacttgggcgtagttaggttggttggcaccaaacaaagggaaccgagtcaagccagttatgttatgtgaagtggctaatatcataaacgaccaaatttcagttttctggtttttgtcttattgatttatttactttaaaaatatt

SEQ ID NO: 273043 - DNA, 529 bp, Cannabis indica
tagcatcattagtatcattagccttacacgttttttaacacccgtataagcagatttgatagagaatttaccattgcgctccgggagccaaatccaggaatctggagaggggatactaggaagcgtgatgttagaatcttttagcgtcatcatgatcgaaccatctccggatcaaggcttcatgccactggtgtttcagatgaaattttccactaaactaatgccatccgtagcatccagacggggttgtggttggagaacaccattgggaacccagggatggaaccagattgaggtggctttaccatcaccgattttacaacacagccctttggataagaggcatcttgaatttaaaattgctttccatagaatagagtccgcagcactagcttggagatccacgaaatcgcgattctggatgtatttatcattaacaactctgctccaaaaggctattgctgtccgttagagctttccaagcccatttcatgaggaaagcaacattgatggattccgttgagcgaaa

SEQ ID NO: 273044 - DNA, 2923 bp, Cannabis indica
tttttaataattgtaaactttttttgaagcattaagaaatttttattaatcaagttcctttaataaagacgaaaaaatagcatgaatagaagtctcactaagagtacaactaattttagaataagagtactttacaagaaaatgagtcactttattcgcaaattatttaacaaaagtatgactttttagaatcatcaatcaagatgccatatggagaaaacatatgaactttgctattgatggcacgaacaacattaatgcactctgattccacttgcacattttgccaatcattcatttttatgcagttgagagcttttttaattgctattgcttcagcgatatcagctctaacagaaccaagtttgcttacttgaaacttgaaaggcatctaagaagcttccaacatgatctcttgccacaaaaccccacccaaagctattttgatccacaaaagttgctccatctacattaactttgatcataggatagttcagtttagtccagtgctcatcactctctaaagtagttggtaaactatttaagagagtccctcacatagattgagcacttttccattgctcaagagtgagtttagaaaataagatagctctatcagtgataattgaatattattccaaataaggtcattttgacatctccaaagtgcccaacacatcatggatataagctcgatatcagagcttatccaatttaaaaggccatgttgaaaccaagctgcaaaagtgccttcaatactgtctgcaatgctttcctccaacaattttgggcaaagttacagttgacaaagagatggagggcagattcaagtgccgagttccagagagaacaagtagtatcaccacgaacaacgtgtcttgatcttagttggaccttagtaggtaggaagttagagcaagctctccacaagaggtctttaacacgaggaggaagttgtaattgccataaagatttcaagaaatcataaagatggtcgagaccatcattaccttttaattgttgcagcaagtggtaagcgattttgacagtgtagacaccaacacgatccttgatccaataccagtgatcttctgaaacaaaataacataatttgagctgaaatatgaggtctccatctctttcgtcagaaaatcactcaaccgttcaatatcccaagctttggcatcagattgtagtagagaaacactctagttgagaagagcaagatgagttgagttaataaaaccatcatgttcaacaggaagctatggatcatttgaaatacttacagtagtgcctgatccaattagctgtctacaaccagtgaggagtagatttttagactcaaaaatactacgccaaataatacttaagttttcacccaaatcaacgttaaagaaagtagtattagggtaatagcgagccttaaaaatttgtccaacaaggttgttattgttaaccagaaggcgccaatcttgtttacgaagtaaggcaagattgaaatctctcaagtttctaaaacccatacctccttttgatttgtgtttgctgagattactccagcttttccaatgaattctcttagaattatcaccatttgtttgccaccaaaaatggctcataaaattttccatttgcttgcacgtcttattggaaagaagaaagagattcatggcgtaacttggaagaaatttgacaacagatttgatcatgacttcttttccagcatgggatagaaacttaccatcccaactttatattcgcttttgcatcttgtctttgggaaaactgaggacaacatttttatttctaccgaggttgcttgggaggcctaagtacttgctatcctctgaccttcaaaaattctcatggtaccacaaatgagagctttagttggatgatgatttttgccactagtttgaggagattctatctggaggtcacgtagatatggtggaggaggcacttatggtggcatggtctctatggaatgctacatcagcagaagttgttgctggtgctaggtctgttctctcctagtggaaacgtgctcatgcccatcgttttgagacaatgttggttcatcaagctattattagccactgtagtgagtattggtcgaaaccataaggtagcatgcttaaattaatgttgatcgtgcaatttaatgaattatctttttcaatttttttaaaaaaaaacatttgaaagacataattcaatttaacacattcgtaataattattggatacattattatatatgatattaatttagtcattgtattatatatatgttatattttcttttattttataaaaatgtgtaatattattgataataaaaagaagaaatatatgtaatattcaataacaatcaatcaaaaatggaggaaaatttggtgtgaaataaactatttgagtggaaggccaaatctttttttgctggaggtcgtgaggtgctcctcaagttaattattcaggctattccaatttatgctatgaatcttttccactttgttgtgcagttggttgaagaatttcatagattttgtgccaaattttggtggggatgtgatgatgataaaaaaaaaatcattggtgtaggggtgtaaagtcatccaatctaattacaaccgactgatccaatcccaaccgatctaatagaatcggatatccaatcataattagatcggatcggatgtaaattatgaatatccaatcggattggatcggttgttggatgggacatccgatccaatggataaccgaccaaaccgatccaatcatcatcaaatatttatccaattatatttatatatttttaaaatatatttataattttatatatttatatattttatttaaaatatatattacttgatttaatatacatctaacacatgagattaatgaaaaaaaaa

SEQ ID NO: 273045 - DNA, 1423 bp, Cannabis indica
  modified_base (28)..(28): a, c, t, g, unknown or other
taagtatactaataaataaaaaaaaaanaaaaaaaaaaaaaaaaaaaaaaaaaaaaaaaaaacgggtactttcattacactaatttttgaagcttattatagaattttctcctaatatatataaattttattttcttgtataatgaaaatacttatgcataaacaggtgcagcaaaagttaaccgagttataatagtagcactgtacccttcagttagagaaagctttcaaatgtattacgatcttacagaagcaatgggaatattaatagatcgtttcatggagatggaagttcccgaatgcgttaaggtacttgacatcttcactcgcgtcgccaaacagttcgacgagctcgaccatttctacaactggtgcaagaccgccggaatagctcgctcttctgagtacccagaagtcgaaaagattacacccaaaaagctcgaggtaatggacgatttcatccgcgaaaagtccgcaattgagaagacaaggaaacatagttccgaaaaccaagaagagaatcaggtgaaagacgagaaagaggaagaagatgatgaacacgaagaagaactagatattaatgccataaaagctcttccagcaccggaaatcccagttgaggaagagaaaaaagatgaagtgattattgatgataatgatattaataagaagccaaaacaacaagaagagggtgatttgttgaatttaggagaagatttcgccttgtctagcaaagaacaagcagataatttggctttagctttgtttgatcatcaagttccaccacctgagcaacagtctaattgggaagcgttttctgaagaatctccagccgattgggagacggcgctggttcagtccgccactgcattaccaaaccagaagacgactcttgctggaggtttcgatatgttgttgttggatggaatgtaccaacaggcgaagacatccatggctatggctgggccggggttcggggccagtggaagtgccagcagcatggcggtgggttcggccgggaagcctgcaatgcttgccctacctgctccgccaccccagtccttagcgccggatgggatcgcggtggtggctgctaacaacggcagtatggatccgtttgcggcttcgctagcggtggcaccgccaccttatgtacagatttcggagatggaaaagaagcagaaattattggtggaggaacaattgatgtggcagcagtatgctagggacgggatgcagggacagcttggaatgggaaacatgcaacataatggttacaataatggaggttatacacatacctattaattaaaattaaaggaaaaacaaaaatagggtaccttaatgattttaattgattgttgattatagggttagattttatttatgattttgatcgaatttttttttttttttttttttg

SEQ ID NO: 273046 - DNA, 825 bp, Cannabis indica
aatatatgtagttacatgttttttcctaataacgtaaattaactattttcatttgtgtcatttaccttaattaagggtagtgatttacttttttaatgataaattatatttttgtttaccatatttaatgcacaacgtttacacaataaggggcgatgtttaccttttttaagacacttagtttacctaataagacgttttgtttaccttatgtaagacttgcaatttatctaataaggtgtgtcattttcgttattttaaggtagtggtttagctcttaatgataaattatgtttttgtttaccttatttaagacatgcagtttacctaataaggagtgtcgtttaccatatgtaaggcatgcagtatacctaataaggcgtgttgtttctcttattttaagataatgatttacctttttaatattaaattatgtttttgtttaccttatttaaggcatgcaatttataataaagcatgtcatttatcttattttaagggaatagtttacctttttaatgataaattatgttttcatttatcttatttaagacatgcagtttacctaataagacatatcatttagcatatgtaaggcatgcaatacacttaataaggcgtgtcgtttccattattttaagatagtggtttaccttttaaatgttaaattatgttttcgtttattttattcaaggcatgcagtttacctaataaagcaagtcgtttaccttatttaaggtagtagtttaccattttaatgataaattatgttttagtttatcttgtgcacgaagtttccttaataaggcgtgtttttttatgact

SEQ ID NO: 273047 - DNA, 520 bp, Cannabis indica
tgagtgaagagaagaaataaaaagtttggtggtggtggaatggttcgggtgtgaagatgatgggaagagagggttggagagggttgatgtaattggggagggtattatggggaaaacaataaaaatgtcatacacaattaattttgttaagtataagtttaggagaacaattttaagatgatgtaagcatattaattcaaatttctctttaaaaactcaaatctttgcctatctggtgtgaactggttggggtttcggtggaccagttaggcccagatttacgtgcattgatttttgtattttatcgatatatagggtatttccacgctatttattgataaggaaacttcaagtttagagtttaagtcctataatggattaagatgagttgtttactagtttactattgttgtgacataaggggctcagatcattgagtgttctccattcaagttgattggcacgcttgaatttggacttgcgataagaaaagtacagcaacaatataagaaatagttat

SEQ ID NO: 273048 - DNA, 789 bp, Cannabis indica
ggccatggattttgcagcaaacaatagctgcttgaatgtgggtaacatgtgtcggtgcaacaatgaactctggttttggggaagtggggagcatgaatataaggtttcttatgtacgagtttagtactgatgggtatgaaggatcgtttgggaagaaagtgactgaagatatgggtagtggagaggttggagaataaatcgaaagacattgaagaaagcttttttgggtctgatgaactgaaaaagccattgaacaataacaaagtaatgataaggaaaatacgaagatcattacatttggactgtagttcctcattttgtgagttatattgatgtatttttgctatatagagagagagacaattatatattcatttgagatggaaacaaaaactttttcattattttctttatttttacttcttagattttaggatctttccttgtcaatggttgaaataggccatgggagaattaatacggaagaagatgttccaacttgcaagctaagattgaaagaataggttggcttttgataattgaagagagagaaatcttcggaattgaattaaactcgttaataaaacaaacgataaaataatagcaactaattaattaattttcaattaaaaaaaaactaattaataaattaattagagcaatgtcattagcaaattagcggaatttggtaatagttactaagttaaagtgtgtataatttatatttagttgcaaagtgaactatgcttagacgctttgtaaaactgcaccgatctacgagaggagctg

SEQ ID NO: 273049 - DNA, 693 bp, Cannabis indica
actatatctcacttgtagttgtcactacattgaaaactgatgtcatcaccgtatctcacttatagttgtcactatcattgccattagctaggtttgtcctcaacataacatcaatcaaataatgagttaactactatagaagaaaagcattatgttactacgttatatctcaatcattatgagttaactactatgcaatgagttaggaaaaaaaatagataaagatatttaaagtaattttaaaagaaaatttaattacccatattgttatatttatctttaaaactcaaaaaaaaaaaataaataaataaagtggagatgtaatctcaattatctctaaatatacatttatacacacatgcatcattaaagtagtaaatttacagtttttagaaaaatatgctacaactattttagtatattataaattatattaatatcatcaataagtttatcgactccgtataatatcattaatcatagtcgatatggttccaattttacgctttgatgtcgactattgattctgcatagcatatacctataaatatttaagcaaacataaaaataaagtgttagcctcaagctcctcctctagtatgtatattataaacacaaaccaatacataattaattatttaattttaaatttttttaatttttaaagaaaaagaaattttttatttttatttt

SEQ ID NO: 273050 - DNA, 1090 bp, Cannabis indica
ttggcatcaaatcatgttgtatttctgttattattaggagaataaaatgttttgattatcctcttcatgtccttgttatcgaacatcgtctttctttccaacagaggacagtatttgtttcttgttacataccaatccctgaaaacacgattcaaacttgtgtagcatctacatagtggtatttatgaatttcatgaatcaagatgaaatttggtttgtatttctctctagaatttaatatgcaattggcctttaagactagtctctgatttatgcttgtaattggaggaagaggcactcagcttggttttgtttccattcatctcatttttagatcagtaaaaagtggagagattttttccatccaaaaaaatttattgtctatctttgggggcatgttaaaccaatcctgccacaacattaacattgagattgatgtaagaaagagatgccttttgaaagctagacaataaaattttaatattagaaaaaaaaaacctaggatgtgtttcccatcccactaaaaatatctacaaaataatgaaaaggtggatcaatattaagtaggtgacaaaaaaaatgtgaaattttgtatatttggagcaaatatcttttgccaaaattacatgatgtaaacgtaataactataacttatctgtgaaaacttcattgctgatagtgtctccttagtatcttagatcagttagttttgctgtgcatttggttgatatattttgtttaagaaaagtctaatcttgttttctctagtgttgcttaatcatttttcagatttttatcactgcctgtctattatcatattatgtattcacattttctgtgttctgtatctatgatgtgattatgtcatggtgtgctatataatcaatttcactttaaatagtgggagctcaattcataatgagaatggatttgctccaagtttgacgccctcaaatgctagaaaggatcatggggagagaaatgttgctgaggtatttcttctttctttataattatttacttgtatgtatttttttatcacgctttgtgccaagggaaaaaattggcaaattggaaagttcaaatagaa

SEQ ID NO: 273051 - DNA, 1128 bp, Cannabis indica
aaaaaaaaaaaaattgggccttagaaaaatgggggctttgtgcaatggcccaagctgcccaatgcttgggccggccctgccaagaaatatatgttcatataagttatggtattttgcttttatgcactctgttaatgcagttttttgttaacgaatctaaaaaaattgtaattgagcaagaaaaacataaacaattattaatcaaaataaacctgtgaaagaaaatttaacaaagacaaaaacaagaattttatagttgtaataaccgcattattagattatgaattagtagggcgattagcattaattatcgatagtttatgattatgcattattatatttgttgtgggtcctatctatttttagaaataggtattaaaattttaatttctcaattccataaattttattaaaccctaagagtataatttatgctaaatatgaaatttataatttttatagtttttgtccgataatgatggaaaacgtgacgatggctaatagagtcacatgagtgaatttagaactttttatttagcggggtattcatatggaatatttggaatatcgtagttaggcggaattatggtttcagacaattttactcctaaacttataggttatttaagtgtaaagtaaggggcaaaattagaattttacaatttattttgtctttttgtgaaatttgacttgaaggtttcgttttatcccttatatcagattttaaaaaaaaattaagaaaactcaaactttgcctctttactctctctattcgaacctaaggagaacctaacaggaatcaaggaatcaaccaaccgtaaacgtgatgcatgagcgcatatagataaaacatataaaatattatttaagttatttcacgataaaattttctaacaattgattgtcactttagagtcgatatcgagtcaatttcattgagcctattataattttaaaacttaaatatctcataaatcactttcaaaatatgaaataccgttgtttggtcaagttaacaactaaccacatggaagcttagttgcactttatgagtgtaacccaatatttcagatttcatgacttaacttagtaacgccgccttagagttggtatcgcactaaaatacat

SEQ ID NO: 273052 - DNA, 1012 bp, Cannabis indica
attaaattatatattttgttaaataataaattagattcatattttttaaaataatataaaatatcttaagcttaattttttttttgtcaaaataaaatttaataataacccaatctcgaagtattatgataagactggttacattttctatatcttttcatgctaaaaatagttttcaaattagttatattataaaaatgtcaaaagttgaatttagaatacaattttatacaatttttagaaaataaatgactcaatttatcatgtgataaaatagtgtgtctgattagtaatttttataaaatacaaatctaaaataatattaattataaaggaatagtacggatataaatataaatactgacgttacaaatacaaatattaaaaataaattttgattggtggaaaaatatatcttgtttatctccataatttgttttgttaaattacaattatatatgttgaataatgattgttacttgttacttattaaaaactaaaatgcttaatcaaatcaaaatctagtacattcaaccacaataacaaataaataaaacataatttatttttttaaaagtatgaatgaataataatgaaactgttagaaatatatctgcagattggatatctgaattaagatatatacatatatatgtaaagcaaatgctgtagacaaatgctgtatgtttgcgattactgtatcatataaagcaaaatcaaaaacgcatacgcataaaagcaatgagtgcgactactgctatatatatatatagtatttttgctataacagcaagtatatacatataaagcaatcgtgattactcttggggattgttccttgatacactaatttggatgattcatataatacatgtatatacataggaatcgcatatacatatatatgcagtccgtgcattttacaaatgcattagtgcatgagttcattttatgtctatttaataggtgttttaaggaaaatctgaattgtatatatacatacaattggctt

SEQ ID NO: 273053 - DNA, 921 bp, Cannabis indica
actcaaaatcacaccccaagcttatgacatgagaatgatgcccaagtgaacattcacctaaagggcatgttctgctcatcaaatgaaaaatccgtcttgagcaaaatgcttctttagcattcgtaataactaagacttgtggtaagtcattcttcacaggaccctggccaccttgggcccaggtgacacaccaggttcccatgtgatttcatggcatcagcacacaaaacgtatttcaaccaagagcaggcgaactacgaaacctatgaaattaggttaattcactaacaattggtgatttaagcctcagagcaacatgagaatgtcaatgtaatgccctagctcgtaaggcaccaggtgtgtactttataaattagtttatgataataaactaatgatttaggataagatgtgaattaattaaaactcttagaaaattaattaaaagataacttatactttttttaaagtattactggattcgggtatccccttaattacaaaattttactaaaaattactaaactagcttgtttcaaaatattatttcatattcaaaacattaaaaaagacagatcatgtccactgagaaccaaaagatggcgggttgaaatgtacatttctggaagacctctgactcatagctggtccactttcccttttcccttacatgcaccacaaagcacccatgagtcacaaagactcagcaagaaaacaggtaaaacacaaacatcgtgtatagcataaagtactcaatgttaatgaacaaacattgaaaacatataacttaagcaactattcccagtgtaatcaaacaatagtaatcaaactatttgtactaataaagacaaactaaacctgatactttataaagcatccttaacccttgtaccaacgcattttttatcactatcgtttctt

SEQ ID NO: 273054 - DNA, 1585 bp, Cannabis indica
acatatattgggcaaaattaggggcaataagaatattcccacacatgtcaaagcaatacctagcatagtgaggaaaattgtgtagaaaaactgtcaactgaaggagacccaggttaagatcttgatcatactctacaacaaaaaggatcaaaggttagagatctgaacgaaagtagtcatattattttactgccatcaatgtaaggttttctataaacttttatgtgtttatttcattattttaagaaattcatatgtaggatgttagattaaagttttattatcaacatacttgttggtaaatctagattctagtaaaacatgttccaacaggctccattttgaagcccctagatttgtcattttctccctgagtttacttgtatcttcgttatttctgatgacagaaaaaaatgcctggaacactttttcagaaaacttattggaaacaacccaagttgacaatatgccaacctaggtgttgggtctagtttacagcccttggacaactctatttgctcctcaaaaatagtttattcttaatctttgacaaaaacagaacatatgcccagaagacctttaggaaaaactcttcagaattggcccaggttgataaaatgtcaacctgggcgctaggctagcactaggtgtcaacttaggcgctggtccattgttttggcccccaagttggcttctttctttccaaaaattacattttttttccatttttgatgaagacaaagaagatgcacgatttgaatttttagtttgatgtttggaagtggcccaagttggcaaattgtcaacttaggcggtgggtgctcgggcactgggtgctccgggtgctcaaaaatgaaagttcttcgaatctgattatgatgccttaaatattttatagtatgtctagttcattacccaatgtaaatttcaacccatttctactaggacggtcctagacactgaaaccctagctgggttgtcaacctgggcattaggtgaaatcctaagcaccctggttgatatttgaggtgatgtttcgtgtatttttagctcacgaggcctggacttggatgcttcatgtcttcatggtacaaaatagtgaaagatagtgaggtggaaataacttgttaggatccaaacaaccatttcggagttccaagagtcaacctgggtgcagggctagggacccctcccaaattgactgctatgactcgagactattgaactctgagatgttatctttcttgccacatgtcaaacattgatgtctacataaccatggaatttttcaggtttacaccctctacatatcatagtgtcataggtgctttgtaataccttttcaatagactagacatagcttatgcagtaaataagctaagtcaatttctacaagcaccaacaaccgttcactgtgttggaaatattttaccaggatctagatttactaccatctatgtttcattaacatcctaatatgaattctaaaacaatgaaataaacacatataaaatttaagaaaccttactttgggtgcagcggaatataatgactccttccgtatagatctctagcccttgattcc

SEQ ID NO: 273055 - DNA, 1173 bp, Cannabis indica
tgacagctcaacacattggaattcatcatatacttaactacaaaattgactgacatatatattgctctgcaacatctgcaattctacagccacatttatacattgtagaaattaatgctacttaatatgaaaaattaacaagagttaagtagtacgaagaatgtcattaaattacattacatgaagaagataatgaagaatgatcttcctctgtcaaaaccatcctaaatggacaacaaacaacattatcctaaactcttgcttttatcaggtattcatgacaagatcaaatgtgaagcaggctttgatcaaaatgtaacaatttatggtctaatatcctcttgataaatctaccacctctcttcccaatgttagttccagcaacacttgatgcaagaagagatttggtgtcaggtctccatttcaactctttaagcatggagaataagctagacaatgcaggagagatttccccatccttaaggcttttgcaccctactactctcagactctcaatctccttccatgaaaggatcactgactctaaacaatttgttgttagcaatgagcacccttctaaggacagaaaattcaccctcctgtaaaaacaatacataactactctatcagttttatacaaccaaagtaataagtaacttgtttagacagactaaggagtttagaaacctttacctgcaaatacttgccaagctgaacacatcattctccaatccccaacaatcctgaaaaacaatctccctaacagcctcacataagatgaacaaagcttttactgtcttcttatcccttagctgacacttatgcaagtgtaaacgctccagagctggacatattcccaaatactcatctggttcaggactagagtcaatctttttacaagacacaaacttcagagtcttcaaattctcacaataagaaagagcacctaaccacccattttccatcctatgatcacaaatactcaattcctccaacatctgacaacattgcccaatagctttgatcccatcgaagcttcctttgcagccactgagctcaagcttaactaatcttttacacccttgtgccaaaatagtcaacccaagatcagagaccgttgagctataaaacccgttcacattgcctaccaacttcagtacctgcaaattctca

SEQ ID NO: 273056 - DNA, 690 bp, Cannabis indica
aaaacttgtggaagtttttaagtttttttatatatttatttgactataaaattgttgtggtatattttattactccaaggtataatatttgtatgttatattatatatcatgaaggaaagaaataaaaataaaattaaaagaacacctagtaaaagtaaaaaacgacataatactcatattactctaaggtatagtatttgtatgttatattcatattactctaagacattttataatacattgtatataatgaatggtattttaggtattagaaaaataaaaaaaaggacatttgctttattattttaaaaaatagacattaactatcagtatagttagaaataggactatttacttgcatttctctatttttaaactttaagtttatcttgtcttgtatttattaaatgacaacacactttttactacagcacccgtttagggtattacagattttctcttagttttttttaaatgattacagattaaaaatttaataatatatatcgtaggaagctattctatggtgcactccctaaaaagaatgtattgatgtacctccttctaatttttttttcattagtcgtgtacataatagttgttaaagatattacgcaaaattctaagaaattcaaaataatttagattatagaaaggagtgttcaaacaatctacaatatctactttaa

SEQ ID NO: 273057 - DNA, 734 bp, Cannabis indica
agacatgtacaagcatcatcagaaaaagcttagctcacggttcagttagcctgtatttgtttagtattgtatgcgattaatatagcatgttaggaagcatattagtttatggttatttattttaatgtgttgccttaaaatccataagaggggtattaagtttttgtgatcgttgtctgacctgcctgtcttatgggttcgcaggataagtcctattaaatggacgcacaataaaatacaaggagttagggtaatagggtcgagatcggaggcagtcagggaaatcagattcctcagaatccccgtggtcgcggtaaaggctgtggcaagtttcagggtggtcgacatatgaacccacctcaagctcctccgaattgggagaacagatttgcagaaatgcaagatcgtatccgccaacaagatgaagaaattctgagattaaggtagcagggtcctcttgcagtgcctccaccgcaagctcaggccgttgtagttcctatggtgccagtagaacaacctattgttggcaatcgtatggagccgttatatgagaggtttcgcaagcaagcacctccagtgttcttgggaggtctagatttgatgaaggctgagtagtgctcatagtgatagaaaggattttgaatttcatgggggtagttggaaatcgggctacctgcgctactttttcagttataggaagatgcccttgtgtggtgggaattggtgtccctcgc

SEQ ID NO: 273058 - DNA, 903 bp, Cannabis indica
gaacgatcatggtgagaccaaatttgagaaagtttcatgatgaaaattgaagaaataagagataatgacattggtggttcttggcaaaggtagcgcatgtgatattcccataaatataattaatattcgtatacttcccacttgtagtgtccaatatccttgaacattattacttgaaacattaccacaaatggattaattttaaaagagaagaaacaagtaaatgtcaacatcaaaattttatttatgtggtcatcactatgaactttatagaaaacttccaactctaacccaaatataaaaacaatgtggatcacatacataaaaagaacatgaaaatggaagaattcccaagtctgttaaacaaacaagtcaacaattgtgctcaatgagcagggtgagtagtagcggttgctgtcttcttgaaatcaattttgtcaaccttcacctctccatcaatgagttcataaacgtataccacaacacgcagaccgtcaatatccatgagaacgaaacttgggttaacatcataggtgatgctgctgtaggctccagttgcagaccctgggtttataacaacaccaccctcatgtttgtaggcagtgaactgatgagtgtgaccagttacaaggatatccacatccaactgcctctgtagcattgctagtgagtctaggtcaccccatggaacaacctttggaaaaataaagcatacatgaatttgtagcaaatagaaagagagaatcaaataattaaaataactctttgttaaatgaaaggtaatggttactataatatccaatgtctgatccaatctatttctgaacttttcagttgtagacgtgcctaatgatacataagatagaatggccatatcaaatggcaagaggttttgcacgctta

SEQ ID NO: 273059 - DNA, 540 bp, Cannabis indica
ataaacactctgtttattatatagcaagctgtgttaatagcttctgcccataatcgctttgtcagcttcttgctatttaacatcactcttgccatctcctgcaatgttcgattcttcctctcaacaactccattttgttgaggagttttgggagcagagaattcatgagttatacctgtagacttacaaaaatcatcataaactgaattctcaaactccttaccatgatcactccgaattcgaacaattttcccaatattacatcctttttcaactcttaatctcaaacaaagagttttaaaagcatcaaaagtgtcagacttttctcttaaaaaatctacccaagtaaaacgagagaaatcatcaacacacacaaaaatatatcgcttaccatttagactttcaacttgaattggacccataagatccatgtgaagcaattccaatacttttgaggtattgatatcagacacacgtttgtgagtgatttttaattgtttaccaagttgacatggttcacacttaccaacactttcttta

SEQ ID NO: 273060 - DNA, 1145 bp, Cannabis indica
aaaggcgagcaactggtgttgttaatggaggacagggtcggcacaacctcacgaacttgaatacgcagatgttgaatggacttagtttgagagatccacctcctttgagtccatcaagtaatgaaactaaggcttataactcaccaggagaacctgtatatgaataccttgaaagtgaatcaccatatgttcgtaaacctttatatgatcaggtaagtctatttttttggagttttatgtattgatttctgcataattcttttttttttcctgatatgatattatgcttgtgcctctaattctgctttgattgccaactgtatcaggttttgaatcttgcatctaaattccctgggctcaacgtgtacaaaagctgtgatatattgcctgctagttggctctctgttgcatggtaagatctagtttttagttcttgttgaatattcactatgttaattttagaaaatagattaatttcaaattggatgtaggtacccaatatacagaatacctgttggcccaactctacaaagtctcgaggcatcttttcttacattccatcctttatcaacgcattctccaggtacatatttccctcactctattccacatcttatttgctttcaaaggagcaaaaatttactaaatccatttatgaacgttacaggcaaaaatcaaccacggttgcatcctgctgccagcgccaagaagggagacacttcaaaaatctctttgcccatttttggtcttgcttcctacaagttaaaagattcaattttttcacctggggaatccgaggaacagcggcaggcaagaaccttgctgctggatgctaagaattggctgcagcgcttggatgtcaaacttcctgactgggaattttttcaatcccgcaataagttcgtatcttctgaagttcatttattaaacaacacaaaggagtccagttgctgagttgttaaatgaaatgtgttcatgcgtactacaaaaacagctcgattttcagccttcgtttttcaaatacttgtgtatgtttttctccatggaagaagcatttgatagacacaagagaataggagattcgtgaggctgcctagcattgttggaaggatatagtgtggcagttgtatatgggcattaaaaaa

SEQ ID NO: 273061 - DNA, 614 bp, Cannabis indica
ccgagatctatttcccagcctcaaggaatttctcaacactggcgagaggctgacgtaaagatctctcggcacaggttagggtcttgagttggatggtttctctgatagaaaccacacaaacttccttcccagatccacctaaaaccatgccgatcttcctctagaattctttaccagcctgaggaggatctttaagatcgctcacaagatctataccccctgtgatcacttgtgaggatcggccatggcaagtcatggggttcccttggtttggattggttggaagctcctcagccttgtaatccatcgtttccggctctgtttgaggctctaaatctgtaggaacgaatggaaatcggttggtgcatctgggtataataagtttggaaagataaacttctgaactcagaagaacattttggcaggaaaaaagtaatccattctaaaagtagatttcactaaaaagccagaagggttgtgaaaaatgacaagcttgagccgctcttttatacacgaagttcagtgacaagaaagccaaagattgagaaatcaaacggccgggaatcatgcagaatatgaataggcgattcataatgatcttcgaaaccatacaa

SEQ ID NO: 273062 - DNA, 1115 bp, Cannabis indica
ttatcacatatttatttatacatttttttatcaaaaacttattcattaaaattagtgaaatgtataattttgaattattatacataattcaaaatttaaaatattattaattaaacaatagttactttaattgattctaagaaaaataacatgacaataaaattatacattatttttagaatattagaaaatttatataaatatcttaaaaaattaatatttatattaaattagtgtttaagataaataattttacattattcaagtatttttattttactattttaattatttattaaataaaaaatatgataaaatattttattatatatttatgatatatacttgattatatataggatatattattttattttataattttataaattaattattttttatttgtatatttttatatttttttctgtgatttattcatttttatttatttattattatatattttaattttactttattattatttatttatattttaatttcattttctaaaagaaaataaataaaatagtccagtctattcttaaaccaaacacaggattactttcacaataatccaatcttgtccagtccagtcaaatccttttcagtccaatcctgcgtaccaaacgggaccttagtgtcttaaataaggcacttataagctcactattttaaataaaacatatagtatgaattacttttaattttttcaataaattcaaaacaaagtgtattgacgaaaattaaaattttactcacatggaagtatttataccgctaaaaactttattaaagttataccacttacaaactaaaactttaaatacttatccctacattaattttctaggaaagttcaacttcatgcgtcgtcttttcttcaaccaatgaaattcactcttacaacttttttcgtatgcatgtgtaagtggatgaatagtacgggtggcactggcaaaacgtgtcatcgtgtcgtcttcgtgtcatattttatgtgacccgcttttatatatcgtgtcaagcatgtcgacccgttttttgattcatgtctaattatctcaaccctaacccgacccgtaaaaaatcgtgtcgtgttcgtgtcgacccac

SEQ ID NO: 273063 - DNA, 1290 bp, Cannabis indica
gcatgctgagtcctcttcggtagagaatgttatccatcatcacataacggtgcgcttgatactgaatccttcgagacagtgccctctcttggggcaactcacctgtggttatgtattttatgatggggaccatcaagttgagctcttgttcaactgctgccataatattttcggctttaatgcttggttccgagaggcgttcaacgggtaccaccccagtttctcaatttcgctgtctgatgctagcttagccaaacagtcagcgtgagcattcttttctctggggattctttccactttgtagtccgtgaactcatggagcagctcccggacaattgctacatacgcgaccattttttctccgcgcatttgatactctcctgacacctagtttactaccagctgtgaatccctgaagacttctactcttgtggcccccacggcttttgctaaccttagccatgcaattaaggcttcgtattcggcctcattgtaagaagctatgaattcgaaacgtagggtcgcctggagtcgaagtccatttggggatatcattgctacccccgctctggatccgttttcattaaaggcaccgtccacaaaaactttccatgctggggtttgtggtgtgggcacgtttgcgctagcttctgcctcatggcactccgttatgaagtctgctagtgcttgtccctttatgaaagtgcacggtatgtaatgtagatcaaactggcttaattccatggcccatttgagaagtctcgtggacgcctccggcttctgtaggacttgtcggagcggatggttagttaataccttgattgggtgagcctgaaagtagggtcttaactttcttgaggctatcaggaggcaaaaaaaactagtttttcgatcactagatatcgtgtctctgcccctatcatgcgtttgctgacatagtacacagggtgctgagtcttttcttcttcccggactaaggttgtgctaaccgcattctcggagatggccaagtacagcaacaagtcttctccgaggacgggttttgataagattagaggtttaggcatgtgttcttttagtttttttgaatatctcctcgcattctttggtccattcgaattttcggcatttcttcaggatgttgaagaagggaatgcacttgtctgttgatcaatagataaaccggctcagggcggcgacctttccagttaggctttgtacgtctttgtgcttcttaggagaaggcatattcaggagggctcgaattttttctgggtttgcctctatccc

SEQ ID NO: 273064 - DNA, 550 bp, Cannabis indica
ggactttaggcgagggcctagttggccttagctcaacctgcccttagttctacattgtttagaaatgtgaatgattttagtatataaggatcgacatcgacaattaatactatctccattgatatgcaaaacatattcattatatataatggtaagtaatacatacatattattatatgtagggatcgaagccttggagattcacaggagaggaagagaacatgaacagagaagacataaagatactggtgaaaaagtggtgggacatatataatgacaaatccttggactaccatcatcatgatcatgatcatcaaacccatgaaagccctaataattgtgaatgtgatcatgatcatgtggatggtgatgatgatggtgataaaggtggtcatatcaagcttggaccttttcttactgctttagcaactgctgccataccccaaacactgcaccttctgctgcttaattaattatgttaattaactcttatatatagaataataagagttaattaattattagccatattatatatgtaagtgttatt

SEQ ID NO: 273065 - DNA, 737 bp, Cannabis indica
atggtctgttgaggctttataaagaggtctaatttattttccttgtaactttatttgtgggacaatagtatgggaatttatccaacaacacccataccatatctacaacaaaaaatactcattcattatgttatataaccgtaactattttagttataactggtttgagttattttgtattatttgtttttattcatttataatagtgttatagaattgattctattttaattataactggtttgagttattttaagttatttgtttttattaattatgtgatagaccgattatatttcaattataatcggtttgaatgattttgtattatttatttttattcgttatgttatagaaccggttctatttttatttatatcttagacatctacttctggtgacttttctagcgacactaactttttcaacgacttttctggcactagtgactttttcagcaccggtaacttttctggcgattttttcggcgccagtgacttttctgacaaaacttattatagttttaaaaataagaaatttccattttttttttacaaaaatatggcataaaaaatcctatacaaatatatatatatatataaaaaaaaaccataatctcatggtattatttatctgtggcataaaaaagtaaacttttataattttctcctaatttatactttcatatttgtcatcaaattatgagagttgaacctgtgattgcagcccacttgata

SEQ ID NO: 273066 - DNA, 842 bp, Cannabis indica
cttaaacacggaatgcgcaaacctcgaatataatgaacgtattgggtgggcagcatgaatgtgcgacatcttagtcttcattgacttggctttgttaaatttgtggtacaaagcttggatggaatcatcaaagagacaatcagttgtcgcaaaattcaatgtcacatcggaagaatatttaccttttttcctaaggtaatagaatatggtgttcatatgctgaaacaaaaacatcacagaaacacaaatcaaaaggttgaacaactgtttaaaaactttaatacagtatctaaacttaaaaacatttaaaaagcaactgaaaaccaactatcataaactataatggaaaatggaaactttaccgagtcatttataaacatgtcgcaggtagccaaatgataaaaccatgttttatcctccacataatcaacacctaacctaaaacccggggaaaatttcttcgcaccatcaacataacaattgtaatgcctaaaagaacaaacaaacaacaaaaaaacaatattaaaaccagaataaaactgaaaaataaaacagaatacaaatacagatttaataaaaatagtcacctaggatgtttaagcaagccttgaccaatccacgcgtcaaactttgcctcaatctcaggagatacgggatcagcaaatgaatcattaagagcataaaggcccttcacataagtaaccattttaaaatccctatcatccccagctgattgagaacctgaggacattacctccattggagtgctccccacatcagccgacccaaaatcaacaaaaggagatttcaaggccggagcacgcttcctcttatccaacaga

SEQ ID NO: 273067 - DNA, 749 bp, Cannabis indica
aatcctcttctatacataactccctctaccatgatgtaccgcgcagcctttctcctcattttccgtgcttcgtttctattgtttgggagttcttcaatgttgaggtaggctgctattggcgtcatccagtttggggatgtatccatcatttcaacctcttccatgcaggtgatactaggttctttgagaaactgaacaggaatcagatttgcttgatcatttacagtgctgctcgcacgttgagctaatgcatcagcagtcgtgttttctttccttggaatttgccttagagcatagcttttgaactgcgccagcagatcgtgtattttgctcagataggctatcatcttttcccctcgagcctcgtactctccggatataatatttaccactagctgtgaattgctgcagatctcaatgtgttcagccttcatctcgcgggctagttttaggtcggcgatcagagcttcatatttagtttcattaatggatgccttaaagccaaatttgactatagcatgcaggtgttgccccttaggtgtgacaagggcaattccttcactggatagttgatctgtggcctacccgtccacatgtaccttcctagtaggcttgttttcactattactcgactgaggtatttgtactggctctgggttgttttctgaaatgctctcttctttattcgtacattcgactaaaaaaatccaccaacggcctgacccttgatcactgttcggggtttggaa

SEQ ID NO: 273068 - DNA, 1026 bp, Cannabis indica
tgggatctctttggggcaagggtaatcaaagttcctttatcgagtggagcagggagctgcgtgcggaggagaaattggagaggaagaggtagtcgagatcagggagttcgacaatttctacttgaaggaaaaaggaaagtcccagatttagggtttttggaaaaagaaaaaacttataaatgaatatgcaaatgataataaaatggatttatgaaaaaaaagttttatagaagtggaaaatataaattaaaaacgtaaaaacgtaaaaacattaggaaactagcgagtattgggtaaattcccaaaattatttgtctcacatacattctatgcaaaattaagttataaaatatatgataatagttgaaaatcccataagattttaaatttattatacttaaagtatttacataatatattttgttacaaaattgttacaattaagaatttgtatagtttattgtcaaattttgttaaagtatgactaaagagacacatgttaatattatattggaccaataattgttttaattcaataaatgttataaaaatcaatttaatatttattctaaacattaataaattttgttaattattgaattgataaattaaataacaaatatatattataatgtagatgtcaataaaaaatagacaaataaaaattaaattaattattaaaagataaagttaaaaattatatttgcgtcaaattttcttaattttaactttaagaaaatatttaaaaaaaaactatttattttaaataactatgttggctttattattattattattattaattaaggtgacgtttggtaacaatttttaatcagtgttctgttgttttttaaattggaaaagtgaaaatgttttccaaaagcacgttctattaaattgttttcaatttttaattttttaattgagaatcaaaatattttaaaaaaaaaactcactttaaatattcttttaaatagttttttttcttaaataatatttttgactccgaccagacccggacccaaa

SEQ ID NO: 273069 - DNA, 777 bp, Cannabis indica
ccgtaatgggcgtgataacctttttctgatgcgtgttcattcaagcgtggtgcgccaaggcagtgaatgggagtgtggtgaacttaggcatgaaagcccacatactttggtgcaccaatgccaaactgggtacatggacacctatatcaacagcacagaaaaaaattatttttcggtctaagtcttttgtgttcccgaccaacacttttgaggctcatatcaagtcccaaagggaaagaggacacatattattgaacaacacaggaaaaaattatttttcggactaagtcttttgttgaacccgaccaacactttggcttgcatatcaaatcccatcatatggtgataagcgtcttgtgtatgcctcagtcaatattactgaaagaaggcgagaagtactacttgacgtgtacttagatgttgatttatgataaagtgtctaaagaggaattgattacgagaaggatgaatcatagtcagcataactgcttacagataaaattacacaagcggttatgagaagttatttgtcattatttcatttgatgtaagtgtgaaacgtggggattgttcacatttcacgggtggttacaagtgataagatcctaagggaataactatcaccctaaactcctataaatagagagagaatccagggaacaagggacgaccaatttgagaaaaagaaagaattatatcagtctttcattttgtatacaatttatctatcatttgtattctatatccaactttataaatctttgaataagatggact

SEQ ID NO: 273070 - DNA, 634 bp, Cannabis indica
ctctctctctctctctcttgatgctaacctagatttgttctttatatctctctctctctctctctgtaatatatcgataagcctaatagtaaataattagggtttatatttttattatgagttaatctagtaataagtgggattatgatcctactaatttatttcaacataaaatttaaattttgctataagtgagtaaataatcgtaatttgttaattacggagatttatatagcatgtgtgaatgtaatatgagctatatgtggaataaaaatattttcaagtttggcgaccctggagacccgattggaggccaaaaatgtcacaacaattttagttagaaatattgatgggattattgggataagttgattttagaaataccagagtattttggggtactcaaagttggccaattaccctaaaaatagaagtttcttagtggctaaaaaataataagataactattaataataaagtttttattaatattatattattatattattattattaaaattttaactttcacgatgaaagtttatatatatattatataagttatataaggaatagtataacgaaagaacgaacgaaactcttgttctcccttcttcgataaaaccttctctcc

SEQ ID NO: 273071 - DNA, 598 bp, Cannabis indica
tcacttcttttgtttgtgtccaactatagttacgggagtgcatacctatgtttaagggattttaaatcctagatgaatatctgtataaagggggtgaaatcacttgtaaaggggacctgaaattgatacggacgagatcatactcttgagctccttttctcaaattctaaaaaatcacttgaggagtgaacccttggagaacatgactctggtgaactctcctcgagcattgagatcaataacactccaagtggactagcctattaccgctgaaagggggtgaaccactataaaattcttctagttgtttttggtgaatttttttttgcaaaccggtttactttaattaactattacttgtgttcatcttgctcgttttacgatcttcttagatccgttgacgaaaaaccgcgtcaacagaaacaacaaaagactaaaaataaactaaatgtcattatgcctagttaataatatgtgttagatctatttacttttattttattttttttaagtaaaaaatattcttttcgtgaataggcaaaaaattaattgatttaacatatatattatatacgtatttgattagagagaaatttga

SEQ ID NO: 273072 - DNA, 378 bp, Cannabis indica
acaatgagtctttttgataagcgataaacgatatgtcgtaatgagaatatataaagaaagcaataacaagacacaataattttatagaggttcagccccgagcaattcgataatagcctaatcctcgttatttgtattgacttaggagcaaggaagaagttttcttttcttatagctcttacaacagtatctctgaatatataattcttagataataatcttgccttagcttaactgtgtatcggcctataatttctcagtcctctgcccagggaacattcctcactatttatagggctgggaaacttgaggaggaagagtttcctctctcgttacaatgcacataaccagaaagatcctgtgatcaatgctgaatgc

SEQ ID NO: 273073 - DNA, 931 bp, Cannabis indica
agaattaagcgagtttgatatacagcacttacctcggacgactattagggacaggcgttagcggattcctggtcgagataactccagagcctgtcccacccgagaaagaatccgccggaaaggactggctactgaaggagacagatcctcaaatgctagaggaagcggagtgggaatagtactgctgtcacctgatggagaaatgatagagcaatctataaagttaggtttctgaggtaccaacaacgacgctgagtacgaagctctgatccacgggataaaactggtgaaggaaatgggagccgagagggtattagtccaatcagactctcagttgatagttcagcaagttaaaggagattttaaggctaaagaactaaaaatggccaggtacttatccgaagtaaaaaattgattgcgactttcgactacttccagattagccaaatcccccgtgaagcaaatatgcatgccgacactttggccggcttggggtcctcttcccccctccacattatgaggacaataccatttgactttattccggaacttagtatttcagcggaggaagaaattaagtgcgctgaaattccggcggacacgttcgaacattggagacagccaatcctcgaatacttgaaggatgataagttaccaccagaccccaagcaggcgagaaaaatcgtagtaaaggtgtcaagatacactctacttcggaaccaattatataaaagatcttaccacgggccgtacttaaagtgcataatgaagcaggagggtaagctaatcttagcagaggtccgtgaaggagaatgtgggagccactccggtggacgagtgaccgcctagagggtgcaaaggcaggggtactactgccccacagtccaggaggattcatcaactcactaacgaacgtgcgagaagtgtcaga

SEQ ID NO: 273074 - DNA, 566 bp, Cannabis indica
attgtcacaacgaacagctttaatgttgactgaaaattgagtggcgatgagagaaaaaaattggggaataatgaaagaaacatcagatttgcaagtgagcatgtaaacccaagtatagcgagaaaaatcatcaacaatagttaagaaatagcggtaaccttcaatactactaacatgaaaaggaccccatatatcaagatgtattaaatcaaaagcagaattagcaaaattattactagatggaaatggaagtcgcttttgtttggcaaaatgacatatagagcacataaaattgataggtttttcacaaaattgcaaactattgtttaagatagtagaaatgttcatagaaggatgtccaaggcggaaatgccagggatccttcaaattacatgtagtgtttgcaaaaacagaaatatccgtagtaagaagacgatgatcctgttcaaagaaaaacagttgtccaactttcttagctgtcccaatcgtaaaagtcagggagggatcctgaaccaaacattgatcaaaagtaaaagtaactttgttaggacaatgttcaagataag

SEQ ID NO: 273075 - DNA, 1086 bp, Cannabis indica
gaagcaatgaggaattaagtacaaagacacatcagattccacaatgttgctggtgaaggctttgaaagcgactctgatgttctctctgttgtagctgatgaaaaacttttctgactcttggattttggattctagttgttcgttccacatgtgcacgtataaggagtactttgacacttacaaggcatatgatggttgtactgttttgatgggtaatgattctagctctaaagttattggaataagaactgttaaggtgaaaatgtttgatggtgttgtgaggacactaactgatgtgagacatgttccaacattaaggaggagtttaatctctttgggagctttggatactcaaggttgtgtctattctgcaaaagatggtgaaataactatcaagaaatgtggcttggtagttgtgaagggtaagaaagagcgaaatttgtataacttaatcgggaagactattttagatggagctgtgaaggtggagtcaagtcacaaaaggaatttagttagtgcgaaggaatgtgacaaggtgaagaagactccaattccagttaaaagttgtttgaagaaagaagacatcagtggaagattgaagaacgtgaagacaagtgctcaagtgaagttcaatgagagtatgaattcgttgcatatatactcttattgatggtttgagttgtgagtttagaaaaatttgagtcaaagtggagattgttagagtttgactcaaattattatttatttatttatttatatttgtaaagttacaatttctttttaggtgtaattattaattatgggaaaaagaaagtcttagtggccgagttttgaaaagtcttcttgaggaagctttgaaatgtcttggtccccaagttgtcttgatacccaagttttgtaaccttataaatatgtgttatgtgtgagagagaaatagtgagtagtgaaaagagaagtctgtgagtttgttatgtggtgagagtgaggaagaagcaaagggtgtcttggaatttgggtggagagattgagatagagagtatctgtaatttgaagtgataagtaaatatatctctctttgtgggtttg

SEQ ID NO: 273076 - DNA, 1333 bp, Cannabis indica
atgaaatatagtattccatgtgacccaacattattacttgcattatttgtatgatttcttctttaacagcctgtgtgagatagtgcaagaagaaggaaagaaagaggagtacttctggaccactttttaattctctttcttttttcttgctttgcaattttcattgagttgtattgagttggggttgtatctattgggatttggtgtggatttcttttgggtgttttttaatttcttttacacaatgtcatgtgggtttctgtgtttatcacttttctgagaatgtcaagcaaaatagataatatacatattctcttcccatgtgcatttacttacatataggaaaccaagcattttgacccaaccccacccacttttgttaaccaatacaatgcaaacgaatttctttatatttgtactctcaacgttggaaaaagggtgttcaccatttcgttgtggcataatgatgagtgggactcatcactcatcatatgataatgagaggccgttatttgtgaattagattgaagtggaaaaaatatttactatctcaactcaacaatgtaatggtgcaaaataaaaatattattgttagaaatttatttatttaagaatacaattatttatatatgtgtttggttatcatataaataaatttattttgaaataaagtttataataataattgtcatgacttttaatatgtaaatacataaaggcaatttttaatttaatgagggactaaataaaaataattaataaatattaccaattattttgtcagctggtaatataacaggtaatagtctacaatttgcagtattttatattttcattctcttgaaactccttcattcaaagacaaaagttctagagagattttactacaaatttaaaagatcataccttttcaaaattgattatacacactttagctaattttttgattctattgttgaatttttcatggattaattagtattaaatttaaatttacagtaatttaacatgtggtatcaaaaataactcttaaattaactcgtaaagatttatgattgtattggtcatcaatgaaattatattggtagcgtatatatattttatatttttaattttagaattaaatttattatagatttattcggttattgctatttacattttgcatatacgatttgggttgtattcattcctgtagaatgatcaattcatgtagatacacatgtaggtagtcttcaatatatatatatattttttttagggtaatgtaatttatttaatagcttaatagtttcaaggtcctaagttcgagcccataacctctctctttttt

SEQ ID NO: 273077 - DNA, 2393 bp, Cannabis indica
agcactccctactattgtggaaactctccaagaagcaggtactcgagttgtttcgaatgctctcttgaaattcaccctctgtttctccttccttctctgcagttcttctaaaacctcgattaaacacgctgctgcgtctactgttacagctatttcatatctcgaaaggcaaattctttcgcaaattctaacagagcacccgtcattcgttaaggtgagcatgaacaccttatgaatggttcaaaaactccagtatctttggttccgctggtcacaaaaggatctaagttgtttttgcaagccaaaaccagtgggatatgaccttcttcccaaaaccagtagggttttgttgcctactacggccagaagggccatggccgctcctaacatgcatggatacatctctcagaaagaggagagagaagagagcacaaatagtctctaattttcaaaaataagatgtcaagttcctaataagtcattttgttttcttttatgtattccttaaatgaaaaccctgacaacaaaaccctcctttcatataaggggctttatttcttggtaagtgtataaagctcaaaaaagggactcccaatatcaatcaaggcatggaaataggttgatattattgactattaaccttatatggtatatgctataagttttttttttgtctttctatatgtttattcttttttaaattatctgtatagacaaggctacacgcaaggcactcgatgagctttcagatctcactagctacttgagattgtggaggatagactcccatgtttatatagatccgctaatgtcgccaactgaaatttaccacagggatttgttctttcaggtatttagatttgttttcattcaataaaccttttctcttttccaattgtctaatagatattttgagatgcaagaatgggtcaggtctgtgatcctgcccatctttttacaaatatatattatatatatttttgcaaaagaaaaagctgtagctattttctaaatcctgtgctgatgcaagggctagtgacgttaggtatatggtcctctttattagtactctatttatttgtaagggaatgcagtttgctgtttttttacgaacaaaataaagagagaaataaaacttgctataagaacattaagttcagagtttaagtttgtgtggatgagtggtatcagaattaagttgcatgacaagtcttgaattttaatcataaggtcatttattgattggtgtcctgcagagagtattttttcatgttttcaccacattatgtggagaatcgttgtatgacatagaactaagtggcatcactagtccgcttttaatgcttgaggtcatattaattgatttccggtggaaagtatctttcatgtgactttacagatagcattttcactatgttgttggcatatatgatgggattagcattgcagtaatgcacaaaaggaaatgaataatatccagtataatgagagacctgcctgaaacttttctgaaagttgcaaaaacggcttgtcttcatggttaaaggaaggcaatgtatgagttgccaataaaccatttcttaccatgaattgttaaaataaaaaattcatttaatgataagtgtgagaataaaaattcatttggtgattcagtttaaggtcgattttgaactgtttgcacaggtatacctgatgaaggaaaacaattctgggtcacttattgatggtgtattgcttgctattgggggtcgttatgactatttgatgcatcagatgtggaatcaagaatatgtaagttctggtttccaaattcattggcatatttttttaatattctgaaatggcaagaaaaaaaatctctcgtctccaaaatctgaatgagatataatgtggtgttttgtttccatcttgatatatgctgtgtagaaggacgacgaatctgttggtaatttgtttttgcattttgtaactgctttaaatatgtaaatgattatgtttaaagtaattggatacatgtaaagattgtttttcttcaagagtggcttaaatttggattcatgaacagtttcatcttctaagaattttaagagatcacctttttattttctttgactacatgtaaagagggagctttattgcattaagctggattttgttttggaaattttttcctgtgtattttcttatctaaacatgtcactgtcataattccatttgctgtcatgcagcttaattgttcctttgttatcagcaattaaagtgctttgaaaaattgagcgtcatcattattgtatattgttagatattaagtgtatattagctgtaagagagttagatatttagtagatatttagtagatatttagtctcctaactctgtatataaatatgtat

SEQ ID NO: 273078 - DNA, 877 bp, Cannabis indica
aacagtgtaatttaattaacagttttatgattacttaccctacacagccaaacacagtttacgcatttccctataatcatattcttcttcataatatttcatataatcaaattattttgaacacctcataccaaacgccccctaaagttattctaaaactttacattaccttaaaatataatattttattttctctcgtccacatcatcattggccacttcttactaaaaaaatgctctaatactaaacaaccctataaattatgtcccatacactattatttaatatatcagttattttatttataatgttttattttattattgtttttttgttttaggaaaaacttatatttaaaaaaaagctatggcaattgtccaaatattttactccaatgctatagctactatcaggccatcatcaacggaagcaacataaatttttatgagagacccacataaaagaaagtaaccaattaatacatttcttttattaaaaaaaaaaaacaaaaaatggtgggcatcgtagataggcagtagctactgtcccatattaactcacccaaattttaaccttctttcctccacctcatcccaaccctaagcccgaacctaacaagcaatcaacaataccgcctattaaactttgatactttgatatatagagtattggagttgctctaagagcatctccaatgcaagtaatacctaaaattatcataaaacttcacatcacttaagatataatattttattttctctcttatccacattattttttactatctaacaaaaaaaaaaaataactctaatgctaaacaactttaaaaattggcaccatacctaacataatagtatttaatatagcatttatttta

SEQ ID NO: 273079 - DNA, 528 bp, Cannabis indica
tttctccggccagagcgttacacctttggggcaaattcgctactcctcacgttggacaagctccgaggagcataactgtgatggcacaattttttgatagttgatgttccatcagcttttaatgttatgttaggccgaccagccttatatgacctaaaggctgtcacatcaataatctatttgtgcatcaagttcccaacaaagaatggggtagggtgtctaaagagaaatcaacaagttgcacgggaatgttacaaccttaccctgaccaaggccaaaaaggaagaatcttctggacagagttaggacagggggaaaagcattgccaaatagggagtcgcccaaggcggtgactaagaagtggatccccgacttggggaaccaaatacaaatgttgggccagtggaagaattggaagagatagaaatcgacccaaatgtcccgaccaggaaactcaaaattggcaaaggtttgctgctctaagtaaaatcacctttgataaaacttctaaaagcaaacctagacatt

SEQ ID NO: 273080 - DNA, 559 bp, Cannabis indica
tttgttttgcctcctctgtacgccgccttttgctttctaatatcaccattgagtcattatcattttcaccatcatgtaattgaccatcagaccttatctcctcattaataccaatttcttcattattgatatcatgaactcccacaaatttctccctctgatatctcgtccgatcaatatccatatgtcttccatgattctctccataattctctccttgatttctcccattaggccgaattacagctggagcattaaacatcgcaccagacttcttactctgatcaccgtcgccaccatcaaccaccccttcatcctcatcacgtcctgttcgtagccattgggcacctatcaggtaattcttcttccttataggagctttcatccactcaccatacaatctgcttgagtcatcaaaatgctgatcaaatctccttggacagaatctctcagaatgaccaataaggccacatataaagcagaacattggaacatgttcatacttaaaagttgtccagatccattcaccatcatttttgatcaatttcatacgtctctt

SEQ ID NO: 273081 - DNA, 1942 bp, Cannabis indica
ttttcgagatatactgtcaaaatatcattcaatgatctttcattttgttgcgtatttgttgtgggcaactaaaataattaaaaagatttttttttttagttaagaagtaaaagaaatattttcttttcagcatgggcttaagcccacactggtccttaattgggtccgctagtgacgtagcatgatattattgtaattgagatttgttaagttatttttgtaattattttatgttttacgtatatttgtgaaaatttccctaaaacatttgtatatccatattttcaatagtgataagtataagtttaaagaattaattagtcaaatatccctttttatcttttcatctatcatcttcgcatatcttaaataatttcttttgttcagattttgatttaaatattttccaattactgtatcatttttgtaattgattacatcaattttttaaattatgggacatatactgtaattattttgttgtatattgacttgataccgattagggtttttacttttattaatatttatagatagtttttctggtttgccagctgcttgcccaacttgtagttttgtttgactttagctattctatatctattatgaaatttctaaggagtcgctatttggtttaatttttttaaacagagcagagttcttattcaaattaatcttatatatactttataatgaatgtaaaattcttcgtgtactaggagtatagtattgaacattatttgcatctcttaaggatcttatgaaacttgtaaaatacctaaaccaatcaagcattttaaccaatttgttgcgactctatgttttcttgcttcagttatgctaacatcatgatcatatatgtgttttccctaatttgtactatattcattgatgtagttcaatctacagagcaactatccaatattcttacattaatatgtatttttttcttctttttttaattactcattccatgacccttatttaacctatcaaaaaggagaagataacatatatataattaatgaatcaaatacaatatttagcttaaaaaaacaaaatataaaaaatatattattgtgagtgttcttgaggcttaattgtattgaaattgatcaagtaatactgttaatgaccagattggtgtgagatcttagggcttttattacttaatctcttagatattaaagtcatatataatttttgttttacaaatgctcttttactgtaacaagtatgcttttgttagatcgtgtaatcacactcttctctgcagtttattattctcatattatagacgacttcaatgtccactataaacattatatatagggaaaaagtagggtacatatataaaaaatttcctgtaattgtcgtatgagattaattgcttcctgctactggtatgttattctcttctcttatatgaataaaaatgttggatgcattatgcttcattcaaatatctagattcaagaattggcaatgacaacactgtatttttgtgaagcttttgtttaatataagtagactgaatatagctactctgtgtttggctttatttttaatagcatagtcagtttcttgtaatctaagctaattaggtaattaggtctcattggccgctatgacagctgcaacaaacaattggctacttcctcttgttgctactattgtaaaaggatgtaagactaagagccactttttcaaggtaggtcttttgaaattgtatgagagagtttagttatatgagcaagagtgttttgtatttctcttcgaggaagtatccatccttgtaagttgttttgtcaataagaagctaaagcttgtaaggttgtttcttcttgttgtaggtatctcaaagggtactgaacaacgtaaattggtgttgtgtttttaatttagttccctgtgatgtcttatttataaaagaagagattat

SEQ ID NO: 273082 - DNA, 966 bp, Cannabis indica
acttattacaattaccaaaaataacaacacatatatttgttttttaaaactatttagtttagatgaaacacaaaatataaactttctttttacaaactgttgatcgaatttttcgacaaatgttactcatatattaataagaatgattaggatggggatttttaacgtgatttgagcgttaatgagccttagtccacgagtcacttatactgaaagttagaatgttctctagtttcaaagaatattcagtttacagcctacgaaattcactatattcgtctctctaaaaaaggtcccttttacatttactgtctaccggtatttataagggaagaatgagatcggaggagaaaatggtacatctcccatttttctctaggctttatttagtctctgtagtaggagtttggtgggacaagatttatctcatatacggctgatgtgacactgcaaaatataatcaccactttatttgcatagataaatgggttgttaaaacagtatggtcttctgatgatgttaatcctgcgccaaattagtcgtctatagtgatttactttggaacttgcgttatgtgaattattaagtcttgaaatggcctatgattcgggagttcgtgacttctcggatggccaaggccgtcattctttcaaccattcttcaaagggtccgtgatcctttctggatgtgtctcagactaaatggagaactttcataataatgagtattaatctcttagcaggtgggccccctttgtcacatggtgcctcaagcgcttgccacgtattttggtaaaaaatatgttcaacatttacccttcaagttccaactcattaaatttgaagtggaacttgctttaaccttcgactctttagttctctcctagaggactcgtggtgtggtaaacgaagagtctccacttgtatgaatgagccacgtgttgcataggagttggctcgtctatca

SEQ ID NO: 273083 - DNA, 1455 bp, Cannabis indica
taccagtttcattattctgcatttaattaaataataaaatttggaaattaaaatacggaatttcagacatgataatcaacgataaagtttacatacacaatgatatgtggaatgtccttttcaaggtattagtaaagtatagtagtattagatgtattggctatacatatcggaatagatcaatattgacagtgaaaaaagatatcataaacttaccgttatatcttttctaagtcaatgtcacttagttaatcttagatcaaaagatcgtaatcctgagatgattaggttctggcttaactgtactatatatgttctttgatttgttcattaaagttgaccacttggatcgacccaatacttacatcttgggaacatggtagtacaattgagtgggagctctaatcatagatatcgaatctatagcttttataactatttataagtaaattaataatttccttagagcttggcttaacagacataaatggaagatcatttatttcagtaatattagtttactgaaatatctgaagggtagaacagtaaatttatctttactcgatgtaaatcatctatagaggatatttgattatttggattgaaacaatagataatttatagtgtatctattcttggtgaataggtcattctatgtaattaggagtacaatttcgaatctatagtggagtcaagatgaattaataagatagaaaatttactcggtaaattctagaactacttattgggagtttgattatataggcccatggtcctcacactagttgagataatattgtcttgtagacttaattaattgattttaattaatcaattagaattcttaataagactatgtcttatttatgagtttcattaagcaagcaagggcttctttgaaaaaaaaaatagaggatttagggtttatttattaattaagagactttgaaaggtctaattaataaataagttaaatgacaattttatgataattaattataattatttgacatttatagagttagtattaaaagatgagatttgtgaaaagaaagataagtttcaataaaatgtcgaaatagaaatccactaggcccactaagggttcggccatgatggttcaaataaagctaattttatcttcttttttttttttgattctattttaattcaaaaacctaaccctaaaagctacactataaatagaatatgttgactcttattttcaacacacataaccctaaccctaattgactctctttatcagacaaaattgaaaataaagtaagccaccatcaaattcaaatttccccttcttcttcctaagattttcgaagcctatagtgattgagtaattgcccacacaattcaagaaaatactcaagatagcgtggaagattgtcaactaaaggagaatccatatactctgcagcagaaaggatcaagggttacaga

SEQ ID NO: 273084 - DNA, 1346 bp, Cannabis indica
aaatcgtatataatgataattacattagctaattacattattgaccaaatctatatttattagcaactatcaatattttaaggcattaattttccatttacacattagcttaaattggctatttattgcatattaaatataattttttcaataaatatatagctttacatatttgaaagaatgaataccatacatttgatattaattaaacataaaataatgataaagacatactcttaatctatacatctaaaaaacattaatgcaaaattaatagatgaatacatcacaattaattaattaatgcaaaattaattaatcttaatacaataaatatgatatgcactatccttaaaaacattcacaattaagattaatcacttatcatcgttttgagtgtacaaatttatgtaacaaattattatgagcattgtacattgatagtttccaatattagcacaaggtggtgtcttacaaataattaatttttttttatataattattgaattaaaatatataagactgaataatttttgaataaattatacaattttattaataataataagctaaaataataacctgtaatttaattgggacatcttttttgttggagacacaattagaattagaaataaaaaaaaaaacgagttaaataatcagccgccgcctaatttccagatctttgaaccttgtagcttgaacacaaacgtaattgtactactaacaattccttcagtcccagaaaacttgttattctcaactactaacattgaattcatggtgagtcatttaagaaccaacaacgaaacaaaacaaaagcatattatagacaagattaaaacattcaaaattatgtcacacaagcaagactaaaacactcaatcatgtcaaagagacaagactaattatagtaaaaaaaatcaaattgcaataacaaaacacaatcctaaccaagatgtatatatgctcataaaaaactaataaacctggtcgtataaaactcgatacttaactacgtcaataactatataatatctatgtcataaaaaactaataaacctggccgaataaaactcgatacttaactacgtcaataactatataatatctcaagatgcatatataatcataaaaaactaataaacctgaccgcataaaactcgatacttaactacgtcaataactatataatatctcatttagcatatttagctataattatgctcaaattttcatgttcttaattaaggcacgcacaaacataaaattacccacgcgtgcactcatttcgaatccatttaataatttaatatagtatcacaaagtttggttgaaatcacat

SEQ ID NO: 273085 - DNA, 1226 bp, Cannabis indica
gattatgctttcttatttagtatatcgactcacagttattacgtgtatgtgtaggtaagagctagatgcgaaccgggatgagtctagagctaagagtgaggattgtacatatcaagacggttagacctagatcgttcaagatagttgggacactttaggctcacattttgatagtcgctagatgacgacttttatagtacaagtattttgtaaacttatgaaacttttaaacgggatctcaaacttatgtaaatcatgtttatttgttaaagtttaagttatttaagaaaattttaattatccatattttttaataaaccctttgattagcaaaggagtgcacaataaattaaaatcacgataacatgcctaatctagtagcgcgctacatcgagccttttgactttttatatttccaatatttggtggattttctccatccattgggatatccctcatattcccaaattgttctcctgagtatctgtaggattcccttgattgttcccttatctcctggtcctagacctcggggcatttcctgtggtcgtcttgcagatagatcaggttgagtttgaggagtcgccccttgtgcagcccttgctgccgctacttatctttctaattcggcattcctccagttcaactcagccagacgttgtcaaagttgcctattttctagttccaccagtgggacatatctggttggatcataagcatcctcgcttcgcctttttgggatttgttcacaagttggattgaaatctccatcgttccttccagaatagggagtttcagcagtgttagtgtaacgccctaaataattaggcacgctacccaaaatgcttatgaaaccctaatcccctaaccgggattactaattaaaatagcgcagaatttaaacttttatattaaacagactgaaaataaacttgtaatatatttaaacttttcaaaatagttgggatcccaaaaatatttacaaacttattacaagttctttcttactagccgacctaagcggcaaaacagaatacaaaagtcaacactgttagacccataacccgcttggtctgaagtggcatgaacatgtacattcttcgccctgctcctgaaactcatggctgatcagctaatgccttaccctttcctgcacagtagagcacccgtgagccaagcccagcaagacagtataaatcataacaaatatattatgctcattcaca

SEQ ID NO: 273086 - DNA, 578 bp, Cannabis indica
tatataattacaattatcaatataaaaatatattttgtttgatagaaaaatagttgtaatatataagaatttatagactattataataataagaattttcataagctataaaagaaaacaattagtgatacaattttatatggattatgaagccaataaatttatattgattaatacaatttttacaggtacaaattagcagcttgaatcatgaaaatctaaaaataatgaatagaaaactcaaccattactgcttgtattttacacacatgtaaatcaccacataaataaatatttttcaaactattttagccatagcttaattaaaacaaaattgtatcaccatagtcaaaaaagtttaggttgagtaatattataaacaaaaatagtagtgatatatattagaaaaaatgatagaaaacttacttgataagttcttgagagattgattgaggctgttttgggaaaaaaaaaaaaaagagaaactgagaatagcgaagaggaatgcggctgtgaaggttaaaacaaatgaattattagggtaaaggatagatggttttatatgatggcaatattgt

SEQ ID NO: 273087 - DNA, 1285 bp, Cannabis indica
tcagcagtcaaatcctgaaggatcttcatgacttcgtccatgcccccaaagtcggacaagacgaagccatggttaattaggttcttggaaaggcggccggcctcggcagcaagctggaaaaggatacaagtatgagtaaaaatccttaagagaaaatgatgaggaaaagtaaactacaaatacttaccacagtgagggagtggctgagatcctggacttggaagatggagttcaaggatgcacaagcagcgaaccgcttgggtgcacaccgggtaagctgagacgcaaactcgccggtcatctccgcggcaaagggagctagggtgggcccgaggaaacgaccgaaccaatccgacagggggtccaagtttagatcccacggattctggtagttcggatcgttaagggtattttgcatttcaactcgcaaaaccctcctcaaagcctccacgtcagcatgcccccgggagtactcgtccatggcgtagttgtgtttagctatccggagttcctgtctcgcctcatctccaggaaccggagtcagcactatgttgggaggcgctgtatgttcctccacctcgggagagatcccggaatcaagtgcgggggccggagtatcagctctccgctgccgtttgggcacctcctcggcaaccatcttgcccttgcgcttgcgaatcagagcaacttcttgctcttcttcactttcttcaacttcctcaggaagagcccattgctcttctttaccttcttcagcttcctcacgaagcgcctcctcctcatccactaagtcaatagtgtctggaggggctaatccttcatatggtctccccaccgtgtcgagggcatcttaaacctatggagacgctcatcgaaccctacaggcctaagactggtatattcgccaacggaaggaacgtaatgtactgctaaaggagacttaccagagccggaagtactggcctcaggagccccggtgtttggcacttaaaccaaaggctttggcctaggagccctcctctcatccgggctcccaatgcgaaggggcttcccaccgatcgcctagcttctcctctcgaccgggctccccacgctaagtggcctcccggaagctgcctgcgccttggaataagccctctcctgggccttatggtagaggtattcctggtacttcttctcggcggtggtgatgagttcgtcccggaaggtcttctccgcggcagggaccctcacatttggacagataaccttggaaaggttagagtcctccactgattggtgcggc

SEQ ID NO: 273088 - DNA, 710 bp, Cannabis indica
atatttataaaaataaaacactgtaatattgtcttaattgaaatttatacgttttgtatacacttgctgaattggcccccccaataatttcattctggctccgcccctgcatacaatacacattcaataaaatattaaatgcatacatatatagtataaaaaatttgatatttaccatattaccgaaattcgacaaccaataccaactaaaactcggccaccatacacaaccgcaagaatacaatcttaacaatatggaaaaaaacccctaaaaaaatttataaaatagaaaaaagcaatttatattaataaaattattagagattagatttatactttaatggacattgagatttaataatttctccaccaaaagtagtggccagagctataactaccacctctaagctcggtttaccctaaaaaaactaaataaaaaacaatcaaactccggggatatgtttttgggtataaaaaatgctagattttaaaagaaagggtaaaaatagatgaaaaatgaagacatgggggaaagaaaggggtggttgggcgagggtttcattggtttgaggagaagaaggtttgttggttattttaggatttgaggaagacaatagctggagagggttatatcaagacatatggcgtcagttattacaaaataaccgataccatatgtgttttttcattaaaattaaaaaatcacctac

SEQ ID NO: 273089 - DNA, 791 bp, Cannabis indica
taagttttatttgaattttggtaaagaaaaagacttaatagagaaagtacaaggttttgttgaaattttgcaagaactttgctacaacaaaagtagcaggggtgattgttgaaactaatgtagaaaaagaggatatgacaattcattaattgaggtggcaaatatgaggctgaggtggcaaaagacaagtggtttagagttgatctagttggaaaaatctctaagtgggaattaaggaaccatgtggagggcattttgaaaaggtaaaaaaaggattttaccctagctaaaaagaaaaggggaagaacacaattcttggagccactcttattgaaaatacctagaggaatgaagaaaaagaagaagaagaagaagaagaaaaggagtgcacaaaggaagaaggaagaaggaggagccatccacttagtttcttctactcatttaatcttttgtatttcaattttatacttttttattttcattttgggtatttttatatttttgagcatgaactaatttcttttagttagaacttttaatgaaccttggattgtgaatttttgttgatgttgtatgaatgtttttggtaagaaagttttgttcattcaaggatgcttaatgtttgtctacctacttttgcttgatcaccaattgtaggttgttagctaatcttaattttgaaaaaaataagattagtggaaatacttaattgatacaagactattaccttggaaaagtgtgatttgtagatggtataggaatatgctatttaccttgtatgacccatggaa

SEQ ID NO: 273090 - DNA, 658 bp, Cannabis indica
aatttataattttattgccacacgaaaatttttataaaaatactgtcttttttataaaacaactgtaaaatactaaacataacaatttaaaataacagtagaacaacagatgaaacttaacacagtacacaatattttctaaaaaaattctgccccacagtgaaaaagaaaaaaagaaaaaaattaaaaatttcaatatgtgatgtaaaaatctccaaaactaataaccatttataaattataatcaaggttggcttaaccatttaaaggtaatgtatattttttttaataatatgggtgttatacattaaattcaacaaatgtgaacaactattaaatgtccacattatattttaattgatctaaaaattttaaactatcaattaataattaataattttttaacgagaaattttatatataaatcacctctaaataatattataatatttgtgctacatcaatttgaaatattaggaacgacacattaggagcgataaaaagtagctcctaatatcattcctaatagtacagatattaagggcgacaaaaaagtatagctcctaaaaaattcaatttttttaagggaattttgattttatatacttaaaaattaaaaaaaattaattattaaaccaaaaacttaaaccctaaaaaa

SEQ ID NO: 273091 - DNA, 515 bp, Cannabis indica
tatattttttattaaaaaaattatcaattttatatctcttcttattatataatctaaaccacttatacaaaccaataaatttatcaacaataatatattgatttattatacatgcgcttcataatacattctacagaaatttttagttacatttttatggaggatgatcaacaccatatgaagccaagaatatgttaggatgattaacaattaactttgacccttaatatttttttaaaatacctttttgaactttccaaaaatttggtctttattctttggtttcaatattacacattacacattacagtacgtaatcgctccatctgtagtttgatggacttacgaggcatttgagttttgtaatgatgattcgtagtatatactatatcatattttttttaatttgataagtcggttgtcccaaattaattggagactagctatagtgtgtgtaactgaatcaataatacatggtcatgtgatcaattaaaatttttaattttagcgcaatt

SEQ ID NO: 273092 - DNA, 1022 bp, Cannabis indica
gtattcatttagaacgtattcaattagagcatttctatttccacactaacatgaactcatcttgataccttgtaaatctttacttgttaacacattctttccatcttgataatctctggaacgactaccgattatgcatcctaatatgaatctttctagcgtactttgtcctcacttgtgtgctctccgagataacttcctagaagatttcccaccttgaaattaccccaagctaagcatgcttaactctgaggtaagctcatggtgggttatcagaaagtagatgctttgtcgtccctaattgtatttcttgctttcattcttttgttaataaaattcactttccatcattcccttcattaacctcttgcgattcctcatcagttttgttcacttaaacttgaggaattcctatttaattgtcaacttaaatcttgttcatctccacttattttaacttgtatcaatttcccttgaattgacacaacttttaattttgtttcccaatcatttacggttaaccaccattataaagtaaattgattaaacctatacagtggaggaaacattgctcataccaagtacccacaactaaactggaagtacacatttctcgaattctcaactaataacattcaatcaaatatcattccgtgatcctaaaatttactgtgtttggttgaaatcttaataatcttttcaaacacatctagaaatgtacatacctcaagtatattctttattttattgacaacccttagtacgaactacaataccaatttagagtgagcctctcgttgatgatgctgatttatcaacatctgagactctcatgttctttcccataattaccattaaggtttgacttcctagttcatacgctaccactgcttccttgcaatcatcactatcttcatacttggtgaaccactttaaaacttattatacactcagttatataggtctttgtttaataaacagcctgctttgtgatctaaaatttaccaatcactcaaatacat

SEQ ID NO: 273093 - DNA, 1312 bp, Cannabis indica
gtttcgttcttcaattctcggaaagaagaagaggtccctagttgatccgtgtatttaacattttttaatgttccttcttctcctctgctttttctctggcctaggagttgagctcagttcaggcccttgattcttgccgctcatgccttgcctttttcttgcttaatttagctaatctgctaatcatgaatccccgtgttcttatcttgcacggctcgttctttgagctctgcttctcccttcctcctctccttgttctaccgtccaaaataaggccgtatggagtatagacaagtggtaaggcattagtttttggtaccagcatgcaaaggttagaatccttttactccagattatgaacactcgatcagatctttcaagaacgagctaaagactacaggggaagcaactgactacagtccctgagcccacaagccaaaagttttacttgaacctacttggctaagagaagacatagaagggaaagacagacggctggttggacccactatcttgtctttgctaggattggtagatacgcgactgaaagaagctagctaggcaactaagggaggcagagaaatctttgtgtgccgggtgttgagctgacaatgaagtcagtgtccatgttccaccctctattcgtcaattcaccctaccgcctttgaacgaaattgaagagagggattaaagacagcttaccatgatgctcttttcgttcctggcaacattaagatggtacactatgtcgtactgatagataaagaagcacagagaaagaaaaattcccaggttgaggagaaaatgttaaagaaaggccttcaggttcctcgaagtgaattcactgcgattttaaagctttccattagggcagttggaaagatttcatctttttgctctaatagagtggacggaatcttgctgcttggttctcctaaacttgcttttcgtgttgcagccccaggtgtaatgccagaatcatctgtttgaacgcatcctatatacctgcatgagatcagtagtgcaagacactaggtcctaagtaacggctaaaaaacctaactgttgagctatagattatgtcgttatgggctagacttcctactactatctactatatgaaagaagtgttgttgcgctgtgctgtaagctaagttgttcaccttgtagacagatgagatatagaaagtgtgtcgtgcatgattcataagaatctaaagtagcaccagtatattcttttttttttcacttagcctgcctctcccatgactttctggaccaaccaacctggatctgccctcgcaagtctctc

SEQ ID NO: 273094 - DNA, 498 bp, Cannabis indica
gtaattttggtaattttttttcctttttgtattttttgtttttttcccaaataattatgtagtttttgtatgccaccacataaaccggacatgtactagtactgctctttttctgttttgagctaaaacatgtactcttattattgatctactactaaccattcaattattattttaaacttaaagctaaaacattatgattattattattttgccgaccacgcttatatactaaacaagctcattaaactaatgagaatacatgtttctgacaatatttgaagtacatttaaaaaaaattggaattactcataaatacaaccaagcaaaacattaaatttgatttgcatctcaaggttaaagaaaatattcatctaaagtaaaaaattatcaaaaacccaacagggagtactcccaattataattttttttccctcggttaggacttcatcgacctatggttgggttgcaccgaagtgttgatagggagggcttgat

SEQ ID NO: 273095 - DNA, 302 bp, Cannabis indica
taaggtttcttaaactttatatgcgtttatttacattattttagaaattcatattaggatggtaaacaacatacatggtagtaaatctagatcctggtaaaataattccaacatcaacggcctgtaaggccgaaatctaggaatggtaatatgggccattttcgcatgccgagtcgggcctccggcccgacggggtgactttgacccgattatgtcaggttcttatcgggcttcaggcccggcccaactcggcccagtacatattattttaggtcgggcccggcccaatttcaacttttttt

SEQ ID NO: 273096 - DNA, 744 bp, Cannabis indica
aaaataaaagaatagaataaaaattattttatttccatttcattacctccaaccgaacgccacctaagttccataatagttatcttatatatttatgttatattaaatatggctatataataaaaatattattttttataaatattacaatttaaatttaaactcattacacatattttttttatcttttattttattgttttttttaatggagaattatcattttattaaccattgaatttagcaaatcaactaggacagaccccaaattgaaacagcaatcaggataaaataaagcggctctagcaaagttatgaaccaccttattagttgatcgcctaatagaaaagatagaaatatttcttaaatctttcaataaagccttacagacattaaccatttgaccaaacatgaaaatcattacaattgaactacgtaaggcttggacaacagataagcaatcggtttcaagtatagcttggcgtggctggttcctcttaatccaacttaaagcttccttaacccccaatgcttcaacatactctgatgtagccgaaccattgaaaagtttgggaccaccttctaaaaacaaaccttgtacattttgaaccacaaaaccaaccccaaattggttcgtgtcagaaattatagcggtgttgacattaaccttaatgctatctccatgtaggggtgttcacaaagtatccgatccaatccaatccgcacgatccaatccaattcaat

SEQ ID NO: 273097 - DNA, 747 bp, Cannabis indica
attagtcctttatatatatatatataggagaaaactaatgtactctcttttatctttacctcatagcatagggaagttaaatgcaccattaacaataaagaaaaaatattgtatatttgatattggtgcactcttttacagctgattatttaaaaaaaaataaaaaaaaaaaaaaaaactaagctttatcaaatacagcggcatgatgttgggtttgaggttgagctttttaaaaatttcataagttaattgtaagttattagtgactataaattatttataagttttaaaaaattatataaatatataatatatttattttttatgaattaagcgtttatatattatactgcataatttgagactcgaactcaagacctccaacacacacgcactctcctatgcccacttgagctagcctcaagtgatttaaatatataatatttcaataacaataatatatatcatgaaaaattaagataataattattaaagatctaaaaacacaaaaatataccaatactaagtgtcgaattacatattttaaattagaaatgcatttttttaaaaaaataataatatttttacctataaatttatgacactactaaataatgtctcccatgataacggagtgttgttgtgttcatttaatccaatccgcactattttgctcatagattcgtactaagtgtgaatttcatattttgggtccaatctaatttgtacaatagctcaaattcaatc

SEQ ID NO: 273098 - DNA, 765 bp, Cannabis indica
ccaaaatacctatttaaaagagtctgcatgaaataaataagggtttatcgaaacaaccatttaagagggtataatgtagatttaccctaaaccttatttttcccattaattttcaaactaataaattgtctcaaagaaagggtcttatttcttcccaatagtgaaagtgaaattattgtgtgattgaaggggtgcatgtgggatgggtcacattggattactctatccaacagcttgtcaagtaagttgttttttttaataaataaggacaaaataattttaaaaaaaaaacaatacactttatgtgggttccacaatccttcttaaacaagcagaagagattctcttccttcctagtcaatgaccagtgacactccatgaaccttcgcaaacatgggaaaaagcctaataatgttattaaggagaatctatctattttattcttctttatctctactttttaattaaatatcaacaaatgttaaatgacatctataatatttagtactataaggtataatattattattaatataatttaatatcaaattttatttattttaatttaataaaaattataaaaaactgctaacttattataaatcacatcataaaagtgtcacgcactttaatatcccataacaatgctcttaaatatcgggcccacttaaattaatttaagggaaatttacatggtatactaatttttactatttttttacaaaaatactgccaggcgatattttttacttttttactgtattt

SEQ ID NO: 273099 - DNA, 590 bp, Cannabis indica
aaaattacataaactgttttttttttgagctaattaggatttttgtcccctaaattttgacatgtatcaaattatacccctgaacttttaaggccgttaaaaaagccccctgaactattgagattgttagatttaaggacttttgtccaattttagtaaaaaagtctaatatggatgaaagatcaatgggcatgatttagtacatgtcaaaattcgagggacatgatttggtagatatcaaagtctatggagcatagtttagtacataaacaattattgaaatagtaaaattgaatgaaattagacaaaagtccttaaatcaaacaatcgcaatagttcaggggcatttttaacgactttaaaagttcaggaggcaaaaatcataattacccttttttggtaaaacttttacactatcacatttaattttttttattttttttatatttttatggtattttataaaaaataaaaaaaaaaactacatgaaaataaaaaaaaataacatacaaaataataaaaaatcaacaacaaaataacaagagcacaatattaaaatacactaaaagaccatattttatgtaaataaa

SEQ ID NO: 273100 - DNA, 2966 bp, Cannabis indica
aacaaaaaataacatatatataaacaaaaaatcaacaacaaattaacaagagtacaacataaaaagacctttatttttgtaaataaaaacaaaaaaattgtaaaaatattacaaaattccgtgaaaccgttatttttgtaaatttttttgttgtttttgtgtatttgtgaaataaacccaaaaaaaaaaatcttaatcgggaggcccagatccgaaagaaaatgtgtaaggctgggccaaaaaacccagaaagtgacccgaaacatctaggccaaaaacccagaaagtgacccgaaacatctgggtcgcgtccaccccgccgggtcgggcttgacccgactcgcaaaaaaagtccatttttccatccctattaaaggtttaggaactatctacaatctacatcctaaaattgttagaaaatttactccaaagttcttgagaggtaaacttctaagctttgttaaaagttgaggaaagtgagattgtacaaagcttaagaaattccacaacttgactttgtaaccctttttcttttattcataatggctccttgatattgttcttcactcattttttttctcttttgcctgtttgttgtgttgtaatgttgtttctaatttgtctttttcttgttttgttttgtgattttgttatagttttttaagttgtcatatgtacacttaaaatatgcaccaaaacattatactcaataacataatttttactttaatagtttgtcgagtgattgattagaaaaaacggacatcacatcattatgtggaatttttttacatatattttgagaatcactcacaaaacaaagaagaaaggtcaattttgatatctttactctttaacttggttaaacttaaacacaatgaaatcctctcatctagatgaaatttcttattttgtaatgtaaaccattctttttatttagaatttatgtctttatgttatgcctacactaaatcatatggaaaaagatggtgagtgattgtccttgtaataataggtggtcttctcaactcaaagtacttttatatttttatgaacaaatatttcttattattatggtcggtgtgcatgtgtggcataaatataaaatggttgttgaattgaaatcacactaatcccaaagacccactttttggtttttgaatttaattcatttggatttatttctacaaaggaaattgtatacttacatgcttacaactcaatctcttgtcttgatccaacttctttcttataaaactaagaataaatatttcaaatagttataaaccacaagaaagtacaaagaaccaaaaccattcaaataaattagtgtctaaacactaaggcaattaaacaaagtgttaaaatatagttattatagcatacatcatagttatactttacaactcctcaaacaaagttgaatgactaagttaggaaaagagggaaaatttgagaaaggcaaatggaaaagttggaaaatgagtgacctaattaaaaagtttctaaaaagaagttggcctcatactcatagtctacatggaaatccatgaagtcttcactaaaaaccaaagctcacatggctcatctatggcatgccaagttgccaaccttgttaaacaataaacatcactatcaaaattgtagtgaatcttctctttttcacattgatgtctcaattatcttacaatgaatccactccaacaccactacctacaacatagcatgtacttaaacaaaaaaagaaaggaaagaaaaaggtatacaaaatccctttcttgctctccaagtaatttataaaaaggttgcaactatattataagtcaatgcaacatctcaaagttcttctatggctaccaaaaagctaagcattccaagctatgggttcgagagcgagtgcagggaaattcataattcatgggaaagattaagtcagttaggtttagttctggccacccgaacaaggcaggaaaggcaacaaattagagagacttacaaagcaatctacggagaggacttggtaaataggttgcaagagcctaaaatagcgaacaacaacaataaaagtgaaatttcaccaaaactatgcacaatcttgtcgttgtggatgcttgatcttcctgaacgcgatgctattttagcgaggcaggctctccaacaagatcatgacatcaactacaaagttcttgttgaaatcttcattggtcgaaaatcgagccatatacttctaatgaaacaagcatatcatgcaagattcaaaaggcaatttgaccaagatattgtcaatattgagcctcctaacccttaccaaaaggtaaccttagcaagctagttgtgaatttttttgtgtaaaacttttagggatgattaataaattatgtgtttggtttttagattcttgtggctttgattgcatcacacaaggcacaccatgttgatgttagtcaacacatagctaagtgtgatgctaggaggctttttcaaactggtgaaggaaatctaggggcaatagaagaagctgttgtgctagaaattctaagtaaaagaagtattcctcagttgaaattaacattctattgttataaacacatatatggacatgattataccaaggtaacatactaacatgcctcttctcttttagcttttgtttgaattattactttttgattttgttccaactcttttctatattactcatcaaaatagtgttaaacacatgttgatatataggcaatttgtttttgttttttggttttgaaaatatcacaacttatgtatacattggaaaaatataatttttttcatttgcataaaatgaatatattatattaatttgactttagtttgcacttccaattaatgcctttagatttctatatttttaattataaaacaatgttatatagaaaatacgaaggaaggagtttagttcatgtttgttatcataactaaaaaattatttt

SEQ ID NO: 273101 - DNA, 659 bp, Cannabis indica
tttatatgtgtttattttcatcattttagaaattcatatttaggatgttaaaaacatatttgttagtaaatctagatcctggtaaaataccatccaacaactggcctccgagccatggtaattgatttacttttcaaaaaatattgatttaaaacgatgtatgtgtgatttggatgtgattcatgttgatctatgtgtttattgatgattgattgatgtttgcaaaatttttacataaaataattagaatttcgttctggaattatttttcttggatagtatgaaaaaaaattaagcaattcactttcttacagaacttacttttgattatatttgaattagttatgatttttaaaaaattagaaaaaattaggagatgtgacacctccatgcgtgcgcagatgcccatgaaactcgggtgcacgcggttttagacacgctggtgtccgaggttccacacccatttggacaaattttggctgaaaactgcccctgcgtgcgcggagaggctgcatgcagccttttgcgtcgtgctttctcgtcaagatgcccaatccacgcacatggatggtttgcaatgcataccatccacaccaaaagtaattttttccaattttttcatttttcatagaattaatttcaaattttttgtgtaattt

SEQ ID NO: 273102 - DNA, 1523 bp, Cannabis indica
ttttttttttttatataaatttactgtatttcacataataagtaataaacttgggatcgaaattttatatttttataggtgagacattctattaaaatttctgccacaattaattatcaaaatattttgataattaattcaaaaaaatcaaatcgagcaatgaatatttggtaaattataatatgaccttataaacaatatcaaaccaattaatttttacccaatacaataaatataaaatatttactattttatacacatataaaattaatttatttatattttaatatttcttgcattttttttattttttaatattgtaaatttagttgtataaaaataagttcaaattgctctttattattactattttatttaaagaaatgggtaaaggttatagtttggtcaagtcaaactcaaaggatgtgttttctttctctaatattagaataggaaaagaggaagaagaagggtgcaatgtattgttgttatattgacttggttgttgtcaccaacccaacccactaatcactcatgcatatataatcattaataatgttacttatgatggtccaaatagtgggcctttgttaatttttaaaacattcaatttaacaaccccaaataattaattcgaaagctctatacacataacaatcccaacagaggaaatgattttctatgaaaactatattattatatattacaatattgtgttgttatggttctatattatataattaaaataatcctgaatttctatttagtttttttttttttaacttataatgctgaatttctatattgtaattttttttaaaattattttttaattaatgtttataataattaaattatgtggatcaatgaaaatataatgtgtataattgtgtagatatagataatctacattgacacttaactatgaaaatttaacataataataaaaaatcaaaagataatgtgaatttgaaagattttaccaacaaagattacaaagttggtcaacaaccacacatacgtgagaaaaaaaaaactaaagaaacttcgttgaaatataccaccaactttaaccaatttggctaataagggaagattagtgacatctcaaatttaagttatgcttacactatttatattaggaaaaattacataaactaatatttttagtaaaatatttatacttttatgtttaaaagtttttatttttctatttttacgatactctataaaaaatataaaaaaaatcacatgaaaataataaaaaataatatacaaataataaaaaattaatatatagtacaacataaatatacattaaaagaaaattttaaaacttagtaaaaatatttacaatttcataagttttattttttattttataatttttatgtatttatcaaattatccattttatatttattctgtgtgaaaaagaaaaaaaaatcatttagtgatgtcacaaaaggaagaaattcctttcatatcaagtccacaaaacaaaaaaagatatcttcttgata

SEQ ID NO: 273103 - DNA, 643 bp, Cannabis indica
tttaaaaaaaaacactaaaaacatataagcaataattaaaaaaatattacaataccatacacaaacaaaacataataagaaaatagttatacaaatctaaatatagaaagttgaatcattaatatatctattataatttaattaagaatttgcatgaaattttgtaaatatgttttcaaatatgtgcatttttaaaaattgtttttttttgtatattttttgtaattgtttaaaaaaatgtatacatttatgtaaaatgccctttaaaaaaatctatggactgagatacgatgatactaataatgactttgaatataatgacaagatacagcaataacaacagttttgaattaacgtagtcctgactacaagataatcatgcaataattttgagattatttttctttagaattaattaataaaaaatataaattttttaatatatatcattaaagaaaatataagtgtacacgaagcgcgagttgtttcctagtatatataagtttagtgtatcagcaaatttagtacaactttgtttttttttcttaaaaaggagggttacaataacttttttcacatatatttatttatttattttcaaaaattgagataacaaaattcaaactttagactttaaatttaa

SEQ ID NO: 273104 - DNA, 934 bp, Cannabis indica
tttttcaagacaattgggatcttataggtaatgatatttttgaagctataacttcattccttcatgctggttagcttttaaaagaaatcaactcaactattttgacgcttgttcctaaaagcaagtgcgcaaatatagttagtgattatcaaactattgcatgttgcaatatcttttataaagctgctaaaaagctaatttgttcaaggcttaaagtaatccttccaaactttgtagcccagaactaaggaggatttattaaaggaagattcattagtcataatatcatgatatgttaggatcttatttggtgttatgggaggaagtcaagcaaagctaattgcatgattaagcttgatctacaaaaagcttgtgacaccatcaagtgggacttcattgaagagatgctttatgcaattcagtttcaaaacaagttcattagattgattatgaactgtgtttaaataccaagattttctctgatgttcaattgctattttcatggtttctttggggaaaagagaggtttaaggcaaggtgatccaatctctcctcttctctttgtcttaagaattgaatatatttccagaatcatgcaaaaaattgggaagaaataagatttcaagttccatgagaagtgtggagatttaaagttaaatcatctcaactcggatgatgtccttctattttgcagtggggacttccagagtatatatctcatgttgtagggtcttaaattattttctcatacatcaggtttaatgcctaatcctacaacaattactttttattgcagcaatatgagtgatgaatatgttcaacgaatgctacatgctttgagtttcaagcaacatgagctaccttataagtatttaggtgggcctatttgtgctaaacgaatttccacataacaatgttggaaatttattttacc

SEQ ID NO: 273105 - DNA, 1633 bp, Cannabis indica
tggcatttatagggttgaaagttttaaaaaaaatggtatttgtgaaaaatagataaaatagttgagaaaaatggcaaaaactaaatttgtatggggcccattaagtggccggccatatgtgctaattttcactctatttttatcaattttttattcctaataattcaaccctaaccctattggagaatagtataaaaggaaggctatggtctcattatccaactaatgcctccaaagctaaaaacctagttttctctctaggtttgatgagacctcttccttcttctttctcttcaatttcgaaacactatagcctctcttcacaaacaatttcaagccttagtgattgagtgcatgcccacacatatcaagtaagtcctcaatcatagtgtgtaagactgtgaagaatccaaacacaaggaaggagtttcaggctcaaatcttggtgatactctgctacagaaaggatacaagggttagagatctgagcggaacgagtcatttaattccgctgcaactactgtaaggtttctcaaactttatatttgtttaaattacattgttttaaaaattcatatttaggatgttaaataacatacatggtagtaaatctagattctagtaaaacatattccaacaaagaggttatgggaaaagctttggaagatgagaattcatccttgattgaaacttttctgctagaatctcttctcagatattctttccaccaagagtaagcttggcttcttccaaaaggagcaccaaatttgtgactactgccaaatggaaattgaaactacttttcacttgttttgtcaatgctctttctctcgtggaatttggttaagaagatgcataaggattgattgttttaattgggctaatctgatggatttcgaatcatggtggagcagtttgaaagatgaagaaactcaagtcttcattgcctgtgtttgtgaaatcctgtggaaatggagcaatgatgggattttcaatgaccgaatgagtgatttggatttggtgtacaaagattgcctcttgagaactgatgacttcatgcagaatcggctgtggtttgatcaaagggtcgtttatgatacagaggtgaaggggcatgtttcgctcctagagaagggtctctggtgctgtaaagttgatgcattcgttgtgcgggaagaggctggttttgctgatgttcacactcatggtcaaacaatcgtggattcttgggtttctgtggggttttctaaagtctacagggtacttgaaggggaattggcgttgcatatttagctttggagaaagaggtgtcaaatgtctgaattgaaacgaattctatggcagctgctactgcttttgtagctaggattttaccatttggttggtgcacttttctcctatttacgtcttgtttgaacctgtgtaagtcttttataataaaattgttgtgtcttataatgtacctcggtctgagaatgtcttaattgatagattagctcgctcggctagggagactaaagttgaggcttatggtttgttaagagatgtgccccatgttgtggctattagtgttttttttttcttaataaaagtctctatttatcaaaaaaaaaaaaaaataaaaatttatttt

SEQ ID NO: 273106 - DNA, 593 bp, Cannabis indica
ttggttattgatcttgaatacgtattattaaaaatttaaaagttattaattgttattggttatggatcttgaacatgtgttcttgataaacttagcaaccgatgttattgattattattaattattgattttcactatgtattgtcaacaaagttagtacataatttactagttattgatctcgaatatgtgttattgataaaaatatacatatatgaagttgttagtttattttcaagttgtgtctaaaacatgtaacttgaagatatacagatgaaattgggatttagatatgatttataaatcatgaattcttatattctagtatttcgcactattctcagactttatgattaattattcaaaaatatattttagaatgggtgaaagtttaaattttataaaataatagtcttattgtaaatattataagtaaatagcttaactgttaaaaaaattataatagagacttaaatataaaaataaaattattaatattaattgctaaagagggtcttattaaatatttaaattaaaaattaattatttttaaaaaataatcaattatagttaatgtaattcttaaaaaaaaa

SEQ ID NO: 273107 - DNA, 2113 bp, Cannabis indica
aatagaaaacattttaggaacgtcaacaggaaactgatgaatctcatcacccacggattctctcctgagaggatcaacggcctcaaagctttccaacagcacacgttacatttaaaaccagaccccaaaaagcaatctgccacgtccgatctccttttcctaatccttccttttgggcctcagaataagccaactcataccacaaagaactactcgaagtgttaccaaacctataaagagtcatccgagatgggctccatgtgccactcactgagttcaagattcttctccaactcgtccagaacagctcttccaccagcatggatacaaaagtgttcgaaagccagcttgaaatccggaatgtaaggcttaattttgttcattttgaagatctttcttcccactaaggtcaggaaaaacagcagctgttccgacattgggaggactagcggtccgagggtggtgatgttcgtcttcagggcttctccggccaccgccattaggtcttttgacagagaaactccaattctttttgtgtcgtcctctttttggaaaacgcagctgtacgacttgtcgtctgctcctttgtgtgtacggactgtgtggatcagttggtatttggaacgccgccggtctgacgatctgtttgagaggagcacggcggcgccacccatacggaagaggcagttcgacactagcatggaacggtcattgccgaagtaccagtttagggttatgttctccatgcttactactagtgcatatgagtttggatgtgcctataaacaattccttaatttataagtcattattataaccataaatgattaatttgaattaaaattaatgtatacatatatatttttttttggtttttgtattaattatttaacattcttataaggtataagtgagttattagctaaacatttctcttgattattattattatttttgaaaggaaaagtttcttatttttatgtttttattgttataccccgcctggtaattaatgtatggtcgttagatatcaagagtaagattattactacagattagaattattttttaaatttagagactgaaaaataatttccagtgtaaatgttttttttaaagatattaaattaaaagtaataactaaaaacaaattaactacgtataaacaacataaaaaagtactctgccaagtattaaatatgaattgatgaaaggaaattgttttcctacaaaataataaattttagatgcaagtgctcctagctacgtaagtgtcccatatattaattgaacgcggctgtataacaactatagtttatattatataactgtccccctagctcgctcatatattgctatagtgctagtgtgttagtgtgtccaacactttatataaatagtgttgtacaattcgttaataatattttttaaaaattatttttttaaattatataaaattcgatatttaatataccatataatatgacataaagaaaaatactatccctaatttagcaattcttttttatattataactagcttctatatcttatttgatgaatgttgaaaagtgacaacaaatccgtgtatctcaactaccaaaacttaatatatatcaccatacacatagttattaatatactcgacaaacaaacaaatgttattttccatggtgaaatacaattatcaacaataaatgttatgaccacaacacaaaatcaaacagtaaaacctctataattaattaatataaatatatatattagaaccgaacaaaagaataatttattcaataaatatttatctaactgagtgttaatttatattattaatttcgatcataatctaaattatcaattattcttttatattatatataatctatggtattaaaaaaagttgtgtaattaaacttaagaatatagatatacaagtgatatatatggtttgaaattaaaataaaatagaaaaaagaaaaaagaaataataaataatatatactaacctggagaagctgtttggtcaaggtcgatggagataaggccagcactacaccccactcccaccaacgattatagctcataatattcctcgaagcttgtaatgattgac

SEQ ID NO: 273108 - DNA, 547 bp, Cannabis indica
ttattcttgaaaatgttctttgtctgcctgatttccaacataatttgatatatgtttctgcttagctgattcagccaattactcattctttttcctttctaacaaatgtttgtttcaggatttcaccaagaatcaagtgattgggatgggtgaaagaacggggaaccttcactatctgtctgaacccaaaattcctattgtttgttctatttcagattccaaaataagtgacgaaaatttgtggcattatacacttggccatgcttcatgtgtaaagaatcattcattgaataaagctttacaatttcaatattctttttgccctaattttcattgttgtatttgtcattttgccaaacaaaggaaactaccttttgttagcaatcataacatatctcagcattgttttgaattacttcacattgatatttggtggccttacaatattccaactgttgagggttttcggtatttcattaccatagttgatgattgctctaggtacacttggattcatcttataaagaataaatctgatgcccaaaca

SEQ ID NO: 273109 - DNA, 720 bp, Cannabis indica
tattttctattatacatggcaagacctagtaacaactaaggggttatttgggttgttattgaaaattatgtttttttatgtgaaaaatggtttttaaaaatgtattggttgtagtgtgatttaatgtttttgagttttaaaaaataattattttaaaaatatacaaaaaaaataaaaaaaattacaaaaatacaattgtatgaaattttaaatatttttacgatttttaagattttatttacatagaaatacggtcttttgatgtatttatatgttgtattcttgttattctattgttatatttatgttattttataaatttccttaaaaaaattaatttgtgattcattattaatctcaaactaaaaaagtaagaagatatttgaagattttttggatttaaacatgaaaatagtgtttttttatattattattttagccgaaaactcaaaataaaattcaaattttatttttcaaaacactcaattaatcaagaattgttatgtggactcccactttttaagttttcaaaaacataaaactgttttcaaatcttaaactaatcagaccctaaggtggcatttggttagagcctagaggtaatgaaatagaatgaaaaaaaaaagaaacaatctttattctattcttttgtttggttgcattttaaaatgttggaatgtcattccaatgaaatagtctttccaccatttggtagaatga

SEQ ID NO: 273110 - DNA, 1400 bp, Cannabis indica
agtagttagtttagtttttagtttttttttttttttttacaaaaaatactactttatttttcacattaacaacaagttgtttttatattgatttatatttgtattataatgtttatgccttattttcaaatataattgataatatataatcacttttgaaaatctaatgagataaacactatgtgaattctttattagtataaaaaataaataaaatcaaaatatgggttaccacttgttttttctttttcttttttttttagttgaatctacatagtttgaataaataaataacttagtttgtctttctacccttctagagtagtgcatgaattttaggtggaaacctactagcaagcaagtgaaaaacgtgtatatgtgactcgcagttggcatgatagacaaacttattcctatgcctaagatatatatatctcttcaaaatgtatatttttttatcttgaatattattattttataattttatataagtgttgccacattatttatcataataattcatgctaatctatcaaaatatgtaataaatttggggtccaaatcattattactcgggaagttcttttattttattttattatacaaagtcaatcaatattaagtaaaataaaaataatatatcatatacactagtctctataaatactaggactttatattttgaggcttatcaaatatacacaaagtctctaaaacacatagtatatataagaagaacaatatacgatagctgatcatcgagatgcctgatgatccagcaccgccgccaccagttcaccatgcaccaccgccaggtcaccatgcaccgccagtcggccctcctgagccacacaagccgcatccccctcctaatcatcaccacggccaccaccacccataatagctcatcatcatgtctaatatttaatattacgtatatactatgcttaaataattatgaagccctcactactctctatcactatgtatttgtattaagatctagctatatatataaattacatcgtgtgtagaaataaaaatgttgtagctactcatataatcataatatatattctaatgaaaatatttaaattttagttttccttttctttcttatatgatgttttaactaagaagagattttttcttttttcataactatagtctatacagtttgtgaaagtaatggaattctttgaaattttaattttttttagagtttttacataaaatactaaaaaaattagttattatatttttactgtgatccgggcataacaattaggagacaaaagtttgtttccacacaaaataaatttttgtgtttcgtatgctactatctataacatcaatagaaaaagcatgttcactaaaaaataaaaataaaagacttattt

SEQ ID NO: 273111 - DNA, 1619 bp, Cannabis indica
acaattaatacatatttttatctaaatttgcatctaaattttctattattagagcagaattacaaaaaagtgtactaaatatagcattcactaactttttatgttaaatttagcacttttttttacctcacgcattagagatgggtttagagcatccaatggagagatacaaattagtgatttattactcattttgagaaatatttgcttcaaaagttgattcaattttagatcacaatatgatgatacaaaatttacaacacaacaattacactatttttatgtttacttttaagtcatttctagtattttattattaaataaagttgatgcattaaattataaactttttgtatttattttttgttgttttacatgatagaatatagagcatcgccattaggcatcagtggtgcctagcactttctcggcatgtcgcgttgcgattggctagcgatactttctaaaagctattatattaaattatgtgagacccgatacttagttgaaccaatagcgatattaacacataggagagtgctaggcaccagtggtgccctttagcatttcttttatatataatgataaaggtattattttttatacttttgatgaaaatatttttatttttttgaggctattaattaaatattaaattttgcattaacttttccaattatgtattagacacaatacttgatttcaatatatcacaaatattttttgtgttaaatataattttacatcttttattgaaaaaattttattagtgtaatttaatattaaatctcacataatttgatttgaaaagtgctttactaatttttagctacgatgatatagtaagtgacttggcaaaatatagtaaacaaatgatggcaatctaagcaaattgtatgaactagaggatagcataacgaattaacgatcaaactattttcaattttatgaattctaaatttaaatataataatttaattatatataattaaaaattatttagttaagttaataaaattgtattaattaaatttatttttaaaatatctaatatatactttttaaaagtataaaatattacaaaagtattattaaaaacataaagtgccaagctaatataaaaaataaccatcacttaaataatattattagtggtgtatcaaataaattagaatgatgtaataagagctttctatttgaatataaacataacagaataattaaattaataaattgccgaatttgccggcaagtgatttatattataataacattaattaattatagatatatgcataattaaaaaatatttattcaaagattagtttgtaattaaaaagatttaaagataagttttgtaatttggttcaaattatatgtgtttattggattacatctaatgtttttaggcctattcagatccgatccaatcatatattaaatgttagattttactatctaatacgatccaatcaatttcagtcatccaatctatccaacatctgttggatgttggattggatcggttctatcattgaatgtatttcatatatatatatatatattggtttaatttgggtttattctaatattttaaacctagtattttttagatcgaa

SEQ ID NO: 273112 - DNA, 461 bp, Cannabis indica
gtttcttttccttgtaaatttgtgcttcttcaatttcaagatgttgaggatctgtgattagtaatttgtcataatcaatgatttcagcctctatgtgtgggttgtgtttcttgttcctcaactatttcctcagccaccagttttgcatagtccatgaagtcaaacattgttttaccatcttccaccattgtgccttgcattgttggttgttgagttatgaattcttctgttggtggtgcattacctaccattgttgctattgcatttgtttgtgtaactaatgagttgctcatttccaagaatgatggattgttgtttgtttttgtgttactgatcacgttcacacacaatggatacattgtgaagtcaggttccttcaatttcagctgtatgtagaagtataggctttgatcatcttttatcctcaacggttgatatccttctttcacttggtattttag

SEQ ID NO: 273113 - DNA, 1031 bp, Cannabis indica
aaatattataagaaaaaaattatcgtaatttataatataataaataatatttataaatatattaatatgtataaaattatttaaataaattagataacaaatgtcatatatattttagtaattatatatttaatagttatttaatcatttaatttaccaaacatttatatataactttttcaactcacagctgttttaaaattatatttaccaaacactcagtagttttttctcacagcacagctccagctgctttttctcacagcacagctacagctgctttttctcacagtacagctatgccaaactggccctaaatatgaatttgaagaccattatcacagaaccaaacccaaaattataaatgaaagatcaaagccctaatttttcttattcccaaattttataaacatgaatcctaaaatctcaaagaatcaattaaaggtggctcttgataccacttattagtagctttatcattcataaaatatgcaataataataatcgaccccatagataaacatattacatataattataagtgtataaccatagatctaaagaatacctttgttgattcaaagagaagaactcaaatagcggaagcgtaccttaatccatagatagtgatgatcttaatccgatcttaatccaacttgtagagataatctttgtggtgattttgggtaatgatcttccaagaaaacaagacttagggttttctaattttctctcttgatgggggaagacgagaatagaaattggctcttgtttcttggggaccactaccaatttataacctcatagctaggttattaattttaagtatttctaatttaacccctcaataaattagaagtgtcgcttagggtatctacacatttagctcatgacactttaatacctaatgacccataattactaaaatgataactttattttgggccaaacttcaaatagcaatacactaatatacatatgagcccatattgaggattttaatccaacaaataaatgataattgaaaaaaa

SEQ ID NO: 273114 - DNA, 2498 bp, Cannabis indica
ttcacattgtattaaaatttatgatcataataattagtacaatattttatctaaatatagtgttacttgttatttagtacaatactactcttacacgacccaataaattataagtttttgtataggagatataggtactgacacataagaatctaccactgagtgaaggagaatccatacaaagtatataggcttggcaaacatcatcagtgtgtacaataggtacttttccaagaaatgcgtattagaataaataattgtgttaaaacgctttggaaaatgtttgtactctaacaacaagttagttagatttattactctttcacttagtttttttgttgattttttaatgttgtattgtcttgtacaaacatttagtataaatacatgaaaggccaatcaatttaagattgagcaattcaatacattcatccattttcttcttctctcttttgctcctgcaccatcattatacaaagtcttacatggtatcagatcgatgtctaataatggcaacaatgtttccaacaatggcgcatgataacttttagtagatctcttcctgttggagaatgagttgcacaacaaaatccacaagtagaagcttaaatcacccttccaaacaacaatctccttcccttgatcgcaggttggatctcaccaattactcaatccatagatccttagttcttgttggtgttagagcctatgatgttgatcgatacatcttcgaccttaatcctccaccacaaatctacagttggacaacctttacagatgatgatctggttctatacattcttggaggcctcatattatgaagttgttgttattaatctcgcctctcgcacaaaatcactcactcttcaagaagtttagtttatgcttcgaaaccaaaaaatgcgcatccaacaattcactattaattctttcacaaatgttcaagcaagcatggttgctactaatctcaacaatagtggtcgaggatcttattgagatcataattttagaggactatacagaggaggtagaaaaaatttcaacaataggggaggtcgtggaaatggacctatgtgtcagttgtgtggaagggtaggtcacacagttgtgaagtattttcatcgatttgaaattaccttcaatgatttgagtgttagttggctttggaaagcatttgtattggaacgaaaagttaattagatttgttattctttcaattagtttttttgttatgaccattgcttttttactgattctttgctgttgtattaatgcacgaaaagccaatcaattcaagattgagcaattcagtatattcaactatctttttcttctctcttttgcttttatactctgctttgacagaatctttcaatgcctaaatatttaagggaattataatgaatgagattggcatggtttgtgagctgagaaaccattacagttaaagtaggtgatgaatgatgctagcgttaaaagtaagactgaacatttttgtcgggatttattcggacctggtccacccacctggacttgacccgtagaacctggctgtgtaaaaaacactttccctacgagcaggttgagtccaacccgatcagcttcatacgttaatttagggttgttttctgcacatgctcgggttcgagttggacccataccacccgccaacctgaacattttaatttttctaacttgtttaaaactaaaacattaaaaacaaacataaactaaacttttacgaagacccctctccctctccctctccctctccctttttcaggacctagacgaaccacccatccccctctcccttcccgctggcatcaacgacggtgctaggaagccgaagattagccctcctccttgacgaagacgacccaaccgctggatggaagaccctgacccctctcctctcttagttgcttccggacaaagctctcctccttgtctccaccagtgtctcatcgagccggagccagcaacccaccacacgagcaggagcaattttttttttttctattttaaaatataaaatttgagtttaaaaaagaaaagagagggagagagttgaccgagttgactcacccggtcaacccgcaaacctattagccccctattttatgggcgaatagtactattttttaaaaccaaaacccatgaacctgaaattcgaaaaacacccttgatgttcagccctaggtaaaaagtgtatccccaccaacaatgccacatgctggcgttacaacttccaattggtcctcttcatttttggtcccaaaactcaatatttattacatgaagaatatactttcgccacccgtcaccatataataaataaaacctaccaaccatgaaccattaaaggtttttatttttcaagattaatatgatctgtctatcgccaacatttaattactacatgtacttttgaggcacacttttctctttttataacaaaagaacctttaatctctggaaaaaaaaaaaaacaaaaa

SEQ ID NO: 273115 - DNA, 1059 bp, Cannabis indica
tttttttgaattatttcgttcattcttttccaatttccaacctctattttatttttcctggtatgtgttctgattttcgacttttggatcgaaaatgtaggaaccaggatgagcaatatcatagattgtacaaggtatcacattgctctctaaacttttatgttttgttaatattgattcctggttagtgatgaatgtgataatcatttcaaattcgcaattcttacaaaacatacataacttttcttgttgaaaaaatgtgcctgcaatagttgagtttcttgtggtggtagcatatcatacaagtgatttgaattgagtaaagtgagccttcgaaattagtctttattcttttgtcattagtttagcttgtgaagttatattgattttccattcttgttcattgtgtgatttgaggttagaggagcatagcttgtttattaataagtttccaaatacaccacccattaaaatatgacaacaaactcttcatgaatttgaagagtgcttatggcttattgtttcctaactatgtttcaaattacagttttgtaagttatttttacaactaattgtatttttgtttttattaggtacaatgagcaattcaataaatcatctcaataaattccaaactctcggtaagaatttataattgataactagttgatataatatgatatgagacatagttttattattttttgaaatatattgctaatttaatgttgttgatattaaattttatgtctacatgcctagtatttagattttaaatttttggaaaaatatgatttttgttatttttatcagcttacattgagatataatttcattatatatatagatatatatttgtagttacattgtattatttttattgttttaaatattttctgggattaaggccgtagtgctgtaattcaacgacacaagtttgttctagttcaggtatcttctcctaacttctttttttgacaacaaaagctttgtatcaaaattattttttagtggttgttctgtgtgtaatttgtggatggagattgtaattcttgcttt

SEQ ID NO: 273116 - DNA, 933 bp, Cannabis indica
aaaaatcccaattttcaaccgacgggatagggtttagtaatatatatacctacggtttttaccaaaaaaccgcctctaaatgtcaatttcgaatctggtgggtgttctcacaccctttagcttccctttctaccactactgatagttaatgtgcaccacttaggtgaagtttcaaaaattgaaacttctaatatagtcatgttatatgtcgttgggttcggttttgaatatagtatataatgataataattatttagccatttgaatatatatgtaaaagtaatatctaagattgaacaaaataattggagctcaggatttgagagcttaggatcgtctttttggacaaagtttaatgacttgagagaagtagagactcaacttgattattggatttgattttattgtcatgaatattatttgacatattataattttagtgatttatgacatatttatatttaaaaaattgaaaacttaatctgcatattttcttggactgtcttggaggcactgagtgccaaatatatatttgtacaattacctatataggttatgattttttagattttatcaaattacaaccgttacactgtcaaattttctaaaataagggaatatgtacttttgccattcttggtgatgtatttgattttattgaggagagtcatatttatccagtcttgtgcatattgttattcacgatctagtctctgtatcatcataagtagttcaggtgtacatgcactcacctgttggtgtaagaccttgatctgtacatgaagtgaattgaatgtgagccccattattttggtggttcaccactacccaattgaggatgtcatttctatgattggtattaagagttaggggtctagtggacaatgtgatatgtatttgaagcttaattttgtgattatttgtggtctgtct

SEQ ID NO: 273117 - DNA, 974 bp, Cannabis indica
cttgaagaaggtattttagtttgttatatttattttgatttccataatttaagtttaatatcataatatttattttacatatgcacatttattatctgattagtttatacttttgatattttacagagattctcaataacaatactataggcactttttctgctccttcaacctcaacaagtcaacaacaaggcacggcattggattgaaaatgtttattattatactttattatatttaatttattcatttcatttgctaatttatccttttttcattttaaaaaatattgaaaggtttggaactttggacttggaggactttggagtttgttaaattggacaatagatacacaaagagaagaacacaatatacacaagggaagtaaatacttttgaatagttatgaagatgaattattgatacttttggttatgaagtttgaatagttatattttggattttgggacttttttatatgatccatatggatatggattaaatttggacgttggaactttttgatatgatacatatggatatggattagatttaggatttgagactttttaatatgatccatattgatagattgatactttttgaaatggatatggattagatttagactttgagacttttttggtatgatctatattgtatggattggatatggatatggattagaatttagatttggatgattaatactttttttgatcaatagtattatattttaaattttgagactttttgtgatatgatccataatttcatattgtttagattggatatggagtcgattaagatttggattactaattttttttgattaatagctatattatgtagactttgagacttttgttatatggtctataatattgtagattagattggataatggatatgaattaaactatttttttttcttttatgggtttttgattgagttttggttctagtttttttttt

SEQ ID NO: 273118 - DNA, 1107 bp, Cannabis indica
tcttacaagtagtattgtctcaactagtatggagaccatgagcctatatatgtgagcttctattgtcgagcaaaattcgcaacaccaaaagtatatgataatactaataataagaagaaattgtttgaaggacaaatgcgagtattcaacctaaaatggcgagtactcgagctgggaacgtaaatacttaacaaaaaactggaaataacaagaagacaaaggattatagtggttcagtcagatcacggtctgcttagtccactgtagcaagagtttcgtaggtctcatttcgtggtggatcacccctttatatacaaagcaggtgtccagttaattacaccaggattgttattcattgtcaatccgtttgtacattgattcataataattaaactaaaaacgtaaacattaataaatgaataacagtttcgattcactaaatacagcaacgtatgcgacttctattgctcgagttggctgttcatattctggtataagctcgcgggcttaggatagacctatcatctgattaagcctaagatgtctgcgttcttagatagtcgcatttatggacatcgtatgacgagctgatagaacctagacatgcgagtctatattggtttatcgaggctgttaggtcatcgggaccaactcgcattatagagaatcgatctctatgttttcgcaggagtatagaaaggatacccgcacatatcctggtacatgcgagttggattcgttcttggtcccacataatgcaagttacacgaatgcgattagactttgatcatactcgctgattctagctcaggcgaggtttaaactcgaggagtctctcatggatatctcagcctttcttggaaagctgaatacacgtgtcctccaaacaggagtatgttcttgagtttctaggtgagagaaatctcactataacacatacccctagtttcgcgatgtgacagatgcggtcacgaggggaactatacgcgagagacaggtgaaaggttgtcatgaggaggtgacctttggttgtcccattgagggtttcgaaaaaatgacgactgtaattatttcactttatttgcatttatggtgccacgtcacgaa

SEQ ID NO: 273119 - DNA, 3781 bp, Cannabis indica
atttctccaaatgcaattcactaattgctgtattcatgtttcaattttcttcaggttatcaacgacaggtttggaattgttgagggtttgatgaccaccgtccactccatcactggtaagctgttacccaagttttatgtggaatttctgatgtatgttttatgatattgaattatgtctaaatcaattgttttatttgttattcagctacccagaaaactgttgatggaccatcaagcaaggactggagaggcggaagagccgcttccttcaacattattcccagcagcactggagctgctaaggtataaatcttagtgcatataatcaaatcaggtgttcatttggtttatgttattaataaggttctctaacttgggtatcctggtttttggttgtgcaggctgttggaaaggtgctcccagctcttaatggtaaattgaccggtatgtctttccgtgttcctaccgtcgatgtctcagttgttgacctcaccgtcaggcttgcaaaggctgcaacctacgacgacatcaaaaatgccatcaagtgaggattgtctctcttgcttttgttgtttagatcgctaagaaacataactgttttttttaactcttttacatgctatataaacagggaggagtctgagggcaaattgaagggtatcttgggatacaccgaagatgatgttgtctctaccgacttcattggtgacagcaggtaatattgtcttccaagttttgatcataatttaaattagtgacacattatcatgtagactctaatccaatgactgatttatgtatcatcattaacaggtcaagcatcttcgatgccaaggccggaattgctttgaacgagaactttgtgaagcttgtgtcgtggtacgacaacgaatggggttacaggtaataatacttcgatttcggtttcaaaatgaattgtgatcaattctgtattgtgaaaagtagttttcctcatttcttcgttggttgcttttttgcagttcccgtgttgttgacttgattgtccacattgcttcccaatgctaaacaaaacaaaacataacctgtgaagattgaaaggcttattgttctccattttcgattctatttagtttgagtctctttataaggttcagttgtttgttgtgcttaaaagtgttttgagttgagtttcgaataagcaaaatgaggcctaaccatttggcttttggtgttttaattgttccattttgatcagctttcgaagaacctgtaatggtgctagttagaattttataattttgatgtaaacagttacatggttttctttttcatatgaaattgttaaaaagcggtggctttttttacagagaaactttaatatcaaatgcctcattttcgtttcgttttgttttgttagaataactataatagtgcttcttacgaaaaaaattaatattctttaactggaataatttaagaaaggctaattagaaatttcgttattgagattgttgaatttaagaatttttgttcaattttagtaaaaaagtctattatagatgacacagtatatatcaaaatttgggaagtatagtttagtacataaataaaatgaaattcgacaaaagtctaaagttcatgagataaattataattagccttttagaaaacactaacataaattacatttttaacagaaactaaatggatggtgagcataacaaaatgataattgtattactatttttattatagttaaattcttctgagcactaaaaaatcatgaaagctttacaggtttaattgtaataccaagatcaaatccccctatccatttgtcacaaaaaagttgcgataccaacagaggaacccacctccatcgattgtgtgtgtttttttttctctgattaacatttcattaattcaaagcattcagagtacagccaaaaaagataaaacatttgtttagatttatggaaatgtgaaacgattgatgtgttttttgtttttcagacttacatgtttaagtacaattccgttcatcgaccatggaagcatcacgagcttaaggtttaggactctaagacccttctctacgttatctgtgtttgagaaatttgttaggtgtgtctgggggaacttggggtagaaagagtggtttgaatgaatacatggcttgggtttaccttagtgaaatttggggatgaaactactcgtgatctagttctagagggaggggttcttcattttgatcaagttccacagagataaatgttggtaaaagaggaagtgcaagctaaagaaagattgattgaggagcagtctggtatgggcacaattattctaacagtgggcaaggaagataaatgggaagttcctaaaaggaaaattgggaggaaccagcaacgaagacttaataacactaattcttttagtgttttgcaggaacaaaattgcaacaaaatcactcaataagttgatgattgagagttgcaacatcttagtgtaattgatcgaataagtaggagatgtttcttagtctcttgcaaagaaataaagtggggataggtgcggttttggaaactaagttgagagagaataaggtaagtgaaataatggaagctaaattctaaggatgggattatcttactagttctactatagaggggaaaatcttgatgttatggcgaaattttttttgtgtaagtggaggttttagaggggaataaacagtttttgcatagtagagtaaaaatgataggtattgatagggagtttggttcacaatggtgtatggatgtaacacgaatgctgagaggctggagttgtggaaaggcttgagtagtttggtttttacaatgtatccttggttggtttgttgtgatttcaacactagataggttatagtagattctaatgattgactatgttagcaaggcccaagctataggcccaattgaattggaccccaaagatatacatgaaaggtaggatatccagttgggaaagggacgctagccagcagatggatttcagccaagctcaagccgatggcgaagaagaagagagtactgcagctgtaacgagagaagctcgtaacaaaagagagtgtgcaaaaccaagctggctaaaggattatgtcatgagaatgagttgttagaagtctgtatgagggtctaaccattttcttttttgcttctgttagctgctgagtataaaaggaacactgtaaaattttcaaaagcatgttgaataaaatggcaatttgctacttgggagatttttcttgtctcgaagaaggccttttcttaacattggtgctttcattgcttagtcctcactatgaagaacgaggacgtagcaacgttgatacaagaattgcattctgaattgaacgttcgattggatgctaagctggagaagttcaagggtgatcaatcaatgaagttacaatcgatgttggactagagaatcgctcaatcagaggattgtatgaccaaacacgtcgcttatacggaggagcgtttagctcaagtatcattatagcctccacctgtcagcacaggagatactagctccgtcagggatacccacaaattcagggatacttagcctgcttccccgaagaatggccatgaatttaataacatcatcaagactctccgagtcaaaattcctcgatttgatggtacagatgtggatgattagatttacaagattaataagttttttgacattcaccaggtggagcagtcgatgcgattggcgatggtctctttgttggaaatttattttac

SEQ ID NO: 273120 - DNA, 1259 bp, Cannabis indica
tagtcacccaatgcagtggatgatttattattattatatttagaaaagcacaattataatgtggggactctcaagatgagatttttttgtcttttttatttgacttatatgtttatacgttattttttgaagttatctatggattttttttcctttgtcttgatcttgaacttgatcactaagtttcagtcattgaaagtgcgtccttgaaacttggaagcaagttgcacacaaaaccttgtccttcaaacttgacacaagatatttttagtatactgctaacttccataaactgtaatggtcctaagttctagaacaatacttgtattagtcgattggttaatttggattagtaattagttgttgtaataaggggtgattaaatcagaggcaccctttttttaactatgctatccttgtatcaacttgcatcaactcagaaagtttctacttttctttcccaccatcaatttttctgtcagtttttgcaaattatcttctggtagggcatctgatacccactcaatattggatgtccaaaaaagacactttagagcatagtttggctgaataagttcttataagtaagttgagaattgttaaaggtaaatcatagggcatctaatattgctcaaagtagtaatataacttcatttatttattttgtaaggaaaatataatttcatcaattatataaaatggaatcaaaccactcatatcaattacaatatattataattctttttcactattggttaactaactcgggtaaaacagatttaatctcctaattagatacacaacacattgaagtaacgataattcatagtgaatacaccaaatccacaaggacaaaatttatagcaaaatctaaaaaagaacccaaaccccaacaatggaagagcccttgcatgattcttggatccacctagaccagaggctgagattcatctccaactaccaaccaacagccatgctaagagaacaatcgcaggcaattaaacccatgactatgagcaagaattagaatggcaagttctctcaaaaatctctttgatggtttcaattgtcttgttaaagatttgattattgatattcataggctcattagcacaactattagaaaagctaaaagttactttttacttatttaataataataataaaaaaaataagtaaaagaatataagttttggaaaaagagtatgatttaaagtgttgggtaaagcaatttaaaacgagcttattgaaaaatttat

SEQ ID NO: 273121 - DNA, 3029 bp, Cannabis indica
aacagtttcagttcattatttattttattgaaaagaaaaagcgtgtagctcatttctcacatattttagctagatctttattttgaaaaattaataaataaattaaaagagacttgacaatgattcaatatataaaagccattgaaagtttcagcagaatactagttgagtcattactcagcacttcactttctctatttgttatgtgataaaacaaaaccaagaatgtaggtgtatagaataaagtaaaagaataaatgaacaagaaaagcaaaagattttgattcatttcattctgttcctataaattaagtttggtgtttagaagcttcaatgtcaaatacaatgagaaagaatatgtttatattggtggctttttatctgttaaacttatgggatttacaacaagtactagcagtagtagcaggaggagccaatgtgtcttatgacagtagagctattctcatcaatggcaaaaggaaaatacttatctctggttccattcattacccaagaagcactcctcaggtttctatttattatttatatatctatgtatatgtgtatattagtttttagttattcttacttttctctatgtttattattgacattatagatgtggcctgagcttatacagaaggccaaaaatggaggattggatgttatacaaacctatgtcttttggaatggacacgagccttatccgggacaagtgaattgatcaacaagttcttatcttaattactgctaattaaacaaatgtgttcataatctctatagttattgttattattttttttgggataaatttcagtattattttgagggaaggtatgatctagttgggttcataaagttagtggcaaaagcaggtctttatgttcatcttcgcattggaccatatgtatgtgccgaatggaatttcgggtaatcaaactatataatactaattttgttgtgtttattaattatcattatttgatttagccagacaatttttgaaacaggggttttccaatttggctaaaatatgttccagatatggtgtttagaacagacaataagccttttaaggtaatgcttaggccatcttcctctctttgttacacttttaatataatgtaatgtaatattaagtaccattttttttttcatttttaatatttttttaaggctgcgatgaagaagttcacagaaaaaatagtccatttgatgaaagaagaaaacctcttccatcctcaaggaggtcctataattttgactcaggtagcaatatatgtttagttgatctccctttattaaaaaatgggtttttgaattttgatcctcactaaataaatttattttaataattttgagacagatagaaaatgagtacgaattgatagaatttgaagctggtaaagcttatgcaaagtggtcagctcagatggctgcaaatcttggaaccaatgttccatgggttatgtgcaagcaaggggatgccccagatccaatagtaacaaaattctcactataaaactccaaaaataaacatgggcattataacaaaaatactctatttttgtttttggttactagtatcgttttatgtatgatagataatgtgaaagaggttatgtgaaatacttatattagagcacaattattttttgcataaaatattttacataagaggtaattattagaggataataactatagaatttctttatacatgtattttctttttagtcatatataaaaatacaattttgttttaaaaataattttatatggtaattaccctttaacaaaaagaaaatttcccatgttttactaaatgcattgcattacttcaataataaaagtagttgacccatgcagataaatacttgcaatggattttattgcgagaacttttcacctaaccaaaactataaacccaaaatgtggacagaagcttggactggctggtaaaaaacatgaattttcacaacacaaacttttttgaaaaattcattgtattaatttgcttcaactgcttacattccaggctattgcattttggtggtccaaccccttataggccagtagaagacttggcatttgcagtggcaaggttcatacagaacaatggtgcatacataaattattacatggtaagttagattcttcatcttaaatgggaatgaaaaaatgaacagacattgattgtgtatttataataatgtactgtatatttatttttcagtttcatggaggaaccaattttggaaggacagctggtggaccattcatttccactagctatgactacgatgctttaattgatgaatatggtatttatttgtttatttattttgtatataacaaaatcttgcctaataagggtctcttatccatatttgaaacaagtgttggaaaaagaaacagtagacatgtgattaagatttcaactacttcacttgcacatggatctaataacataattattgacaaggattcaaaaaacacaccaagtacctcatgttaaaacaaatgaatttagttgttaattcaatgatgggatgtagtatttttatcatgatcatatgtaggactaacaagggaaccaaagtacagccatttgacagctttgcataaggccataaggctatgtgaaccagctttggtgtctgcaaatcccatcagaatgtcacttggcaaaaaccaagaggtacactagctattctctcatagcttcccagcttaagcattgatcataaaggctaattaggatttttttctccctaaactttgacaaccaaatcatgcatcctgaacttttaaggtggttaaaaatgccccttaaactattaaggttgttgaatttaaggacttttgtccaattttaataaacaaagtctaacatagatgaaagttcaagaggcatgatttagtacatgtcaaagtttgaagagcatgatttgatagatatcaaagtctgaggagcatggtttagtacataaacaatcactgaaatagtaaaaattgaatgaaattag

SEQ ID NO: 273122 - DNA, 1110 bp, Cannabis indica
ttttgttttggagattgagattcatcatgacaagaatcaaaaactttttggcttattccaagaagcttacattaatcgtgtgctaaaaatattcaacatgaatttatgtaaggctggttctattcctattctaaaagcggacacatttattaagcaccaatgtcctaaggacgacttgaaaagagaagctataaaacatattccatatgcaagtatagtagagagtttgatgtatgctcaagtttgcacaagatctgacattgttttttgtttttgtagtcaatgttcttgggagatatttatctgatcgtgtccatgatcattggattgcacaagaaagtcatgagatatttgtaaagaacaaagagttttattcttgtttattagcatgtcaacaatctccgagttgttgtttattcatattccgattttagtggttaagtatgatttaaagtcagattctgactatatttcactttagttggtgcagctatttcttggaaaagtattaaataaactttcatcacatcatctattacatatcttgagtttgtcccatgttatggggaatgtttccaagctttatggttaaataatttgattttagagataggactagttgattctatttcctctcctatactattcgattgtgataataatattgttattttcttttcaaagaataatgagcttagtaatgcttctaaacatatggaagtaaagtatctcacagttagagatttggtcaagaaaagagacattgtaaaagaaaactacaagaccaaatcaatgttagcatctaaccaaaggattaaagtgtcgtgatgtttaataaatatattactgatatggatattttataatcttttgttcttttgggttagtaggagtttcttgctctattatttgagattacatgtatatgtaattttcttattgatgttatgaactactttgtttgttttgtgggcgggccaataatttcttatcattgaatgttaaagctttcaattttattttgttatattctcgagaattattgaattgaaagtttgtatttcacatcttgttctaattattgccctttaagtttatttacttaatgac

SEQ ID NO: 273123 - DNA, 617 bp, Cannabis indica
aaaaaaaaatatgataaaattacaacattcatataacatagagaagaagtagaagatcactacaaaaaaataattatttttagtgacgatttttttagtcataacataaattttttgtgactaaatgtgatttttagtcacaacaaaatattacttatgactaaaatataacatttagttacaagttgtcattaatttagttttagtcacaacaagtattgtgactaaaaaatacatttagtcacaacaaattataatttttgtgactaatatatttagccacagatcttttagttacaacataagaataatgttttataattagtcacaatttatttacttttaggttacaaattttgttgtgcctaaaagtaagattttttgtagtagatgatgatgtaattaaattaatagagaaagtaaagagaatgagaatttcaacttgtagaggagaattccaatatattcaatgaaaaataagacttagaaaatagagtaattaaaactatacaatcaataatttttattttaggtaactaattgattttctattataatggtaatttaaaatagagtaattgaaactatacaatcaaacattcactacaaaaaactgc

SEQ ID NO: 273124 - DNA, 738 bp, Cannabis indica
taagacaatttctaatacgaacaaatacaaaaaatataactagttttgtcataacatctttagataagattattataaaattttattttgacaaaaaattagtacagggtcctatttgtataattttagaaaatattgagttcattttgtcgtttaacaaaatagagggtctaattggtaacttttacaaaacacaggtccaaaatggtatttacccagaaattaaataaagcaatagaaagtagtgttagggtttatgccctgaaaagtatataaagacatttctgattataaataagagttgaacattttcatatatacttgattattaaattattaatatttaatattgaataatttatatataatccgaaaattccttattcatacatgagtttatgacttgtattgtatggagaattaagatcacttagccatgaataaaatagtcagcagcatattaaacttttggaagttttaatcaacggttgatagtgcggtttactaatgcccgttattcagtgcaagtaatcttgattcagattactaatgtagcatgacatctaagtgaaggtattgtatatgatagatattatatataacaaccgatatgtaactaagttatctttatcaatgtcgtttactataaagacctaatttatatcataatgatgaccaatgatatatagacataaatcttaagtaagcatgaactcctattcatgttattagtttttt

SEQ ID NO: 273125 - DNA, 592 bp, Cannabis indica
ctccgggtccagtcttcaggataagcttgtcactctccaggagaaagttctagttggctagttgtctttcttggaatgatagttttggatagtcgctccaccaggctcaatcctagctattcggaagcatcatcagcgagtgtccatagtccgtgagtttggaagcttatgtatgtttccagaggctctgatactgaagctagtgtgaagacttctctctaagaagagtaactaacttaacaacctcatttcttgcagccaccgactttaggatcttgatcctgagcctataaataccacattgactttgtcatttttttagatatgagatgacatactaaatagagatgagattgagagtttggcagagaaaagattgagaggtagagagaaaggtgcagagaaaggagagagattggatttggattttgtaagaagaatcttctatagatgaagaagattcttgggtgtaagtgtgagagttgaaacacttaatgaggactcaacagagaatctcgtctcgactgtattgtacctattcttgctcaatcaataaaaaaagatttttatagtattccagaattggagtaga

SEQ ID NO: 273126 - DNA, 506 bp, Cannabis indica
tgatacttgatgcttatatgcttggtcctgctgcgaaatattggatttttcgccattactatagctgatttgctatcgtaatatatctttgtagcctcctatgattctcccatgtcttctagtattctatgaagccatatagcttggcttgtagtcattactgctgcaatatactctgcttctgctaatgattatgcaacagttgcttgtttctttgatgcccaagaaaatatacaagattcaagtgtgaaggcatatcctgacgtgctttcaatgttgtctatggatcctgcccagtcattatctgtgttgcttacaagttttgagtcacttgtaattttgtaccatattctgtagaattttttgttccttacaagtatttgagaatttgcttggctgctccgtagtgaacatgacttggatcatgcatgaatcttgataggagagtaactgcatacattatgtctggtcttgtagcagttagatatagtaggctgccaattaga

SEQ ID NO: 273127 - DNA, 604 bp, Cannabis indica
tctactgtgcaggaaagggtaacactgttgtcgatcaaccacgagtgcaggagctggatgaagaatgtacatgttcgggccacactagaccaagcgggttgggatctaccagtgatgtattttgagactccgttttgccgcttaggtcggctaaaggaaagaacttgtaatagtattttgtaaatacttttgggatcccaacttttgtaactttaaaattataaggtttaaattattacaagttattttcattctgtttattaataaagtttaatttccgcgcttattgtactagtaatcccgattacgggatttgggtttcataagtttattgggtagcgtgcctaattatttagggcgttacaatttggtatcagagagccaaggtttttaaacttcctgtagactgaccgaacatgtacattcatcgcgtcaaagacaagctcgactctggttggttttgtgccctaaataaaacccatttcaatataatcagatttacttattaataaagatcacaaataacattttatgttgcatggttcacatgatttatttcatgattatatataatgtatgaattctgtttaagtccagaacatat

SEQ ID NO: 273128 - DNA, 681 bp, Cannabis indica
aaatcttgtgttgtacagtacttaagtatctggtcctgtttgatagagtttgaagatcatttgatattttttaaaatcccacaaatctcataattgttacggcgctacacttattaaattaggtgtttatgagattagtttagaagattggaggttatcagaagtattgaaaatatatgattaaaaggtctttatatagaaaaatactaatatttggcacatcaatatatatacccatactggtcgcgtgatctagtttttccggccaactcgtgaatcttttgttgcacaaaaatgttgtaatttaaccccaattgaattcgcaacttccataatggctgtcaaaatcacctctcccattcctatgaaatgttataataacttatgaaaattaaactaagacgtgtaactccaaatttatacactttaatatcgtgattgcatagtttaattaatatagtgatgtttcacaagttacgaattcggaacaaccccaaatttatgctacaatctttcacaaaactcaattcatcatcagttacattttattcaatcaaacatattatagaagtactatatctcaatattatattagtttggttcatagtgtgtacttgaagaactgaaatgggtgggattatatgaacccaaaagaaacagtaattggtatttgagacaaat

SEQ ID NO: 273129 - DNA, 769 bp, Cannabis indica
ttttcttagtgggatatatgttggagaaaaatagaatatcgagtttgagcgaggttagggtttttgactattttacccctaggcttgaattggctttatttaaagcatcgagggcattttagtcattttgtctaggtgattaggtggctacttaaggaaatggcagctggccatttagtttaattctcagcctaataatgttaattgatttatttactcatttggaaaataaagaaaaataaagaaaagccaacaaaatcaaggaacattctgtctttcccttctctctctcttcgaacccagcaagaaccaagatgaattgctgttgaatttctcatttcaattgagaattggagaagacgatatcttgaagaatacattctgtactaggtatggacattacgagtttctagtgatgtcttttggactcaccaatgccccagctacattcacggatctaatgaaccgagtattcaaggattttttggataagcatgtaatagtttttatagatgatattctagtatattcagaatcaaaagagtaacatgagttacatctcaaattagtacttcaatgactatgggatcataaactctatgctaagttcaagaagtgtgagttctgattgtcacgtgtctctttcttagggcacatagtgaacaaggatgggatcatggttgatccggccaaaaaagaagttgtttaggattggccaacaccaaaattagctacagaggttagacgctttttcggtccagctgcttat

SEQ ID NO: 273130 - DNA, 618 bp, Cannabis indica
gatagagagtggatgctaaacttgtaaagtaaaacagtgggaaaaggattaatgtaatccatcaggcctaagggtatcatattggaagttaatacaatacttaatgtgtataaattttgtaagcagttggtatattaattggtgttaaaatataaataaagattaaagagtcaaataagaagttgggctgctattaattactctgaaaactcttcggtctgccactaattaactccactaattccagagataggtccacgtatataaaagtgttacacataaatagactgttttacccctcccctcccaaaatatacaaatgaagaaaaagtgaaggtggtagggttgtaaaacctcattatcattatttggaacaaaataccaaaactcctttacataagattcacaactaccacttctaaaaagagaaacaagtttaagttcagcaatcaaattagacaaaaggccatgtattgatccatatgtttgtactgttatctctaagccttctcattttttttaaccttcaaccttaaaacatccatttgtaatttcctagtcacccatgtatataataaataaatatatgttgcaattttaccaagaatatatatatat

SEQ ID NO: 273131 - DNA, 1976 bp, Cannabis indica
ttcttgtgaggaagcaaggtgcaggaggcttttactacctcgacactcacacaaatgaacgcaggatcattgtaaggcttctaaacaagattgagtttaaagaagacttctcctggatgacgggtctctctccaataaatacaaccatattttgcattatacgtaagtaacactccttcaaaatctttactttgaattgtcttgatttaattttatgaggtcgcttattaagcttgtatctatttacagcgattccccagagaccagttcttactcctgagatggccgagcatcacagaatcttgttgaatcttctgttcgagcaaagatcggtagatttcttatgtaatgagacaaatttgaagaatgttggccttcttcccttggatgaatttacttgtgactacaaagtattcaagttctttgtggcaaaaggtcccggttccagccaatgaagaaagcgaggataatgtggctcacgcacattacctccaaaaaatcactcctcgagaagctgaagtggaaacatcccgaggtaatcaatgtgggtggtttcccattgtgcttagggcagaatgtaacaccctggtgtctttgtgagatagtcgatacaatttttacacttggaatccctttctcggagattgcagaacacatagattcaatatttggtacccacaattccacgtccagattattgtactagttcctactatgggattgccgagcagtatgagactatgttggatagagcgggtcatatagattcaagttgggatttagatccactaaacccttacgacatatttatgatgactttagtgaatattatagtcctccctcgtcaccttctaaaaattacggtaactttctcaagtgggagtttattccccattttcccttatttattttgcttaagtgctaatgtacttcccacacctcagagatatggatctcgacttggagaatatgttcaagagtcttcccccggttgataagaagtctaagaagagagctgcccaagttggtgaggcttcgggttctattaaggaatccaagaggaccaaaaccacaaccagcaagaagaaatcatcaggcgaactcaccatcgagccagccaactctctagagaaggaggtcccaactgcgacgagtgccaatgaacaacccacttggtcagtgcaccaagtgaagttctctggttctcgttcagagatggctcttctcgagccctcctatcccctaccccttgaggctgggtctaaaggctcttctcacgcgaggtagctctgaggatcttgcaaaaagagttatgaacttttgcaccaagttagtttcctcttctccttgttctcacttttcttcattttatcattttcacttcttttaatttgtttccttcttgcaggcatctcttctctcctttgctacttagcataggtcgtctcagtgggccaaaatgctcaaggctgaggtttgccaaattagggagcacagggacaccctggccaaaaaatggaatgactctgtggccgaggtttctcacacaaaggaggaggctaaaaggcaacatcaggctgactagaagagaatcaaggagcttgaagatgcaatcaactccctccaggccgaccatgacaaaaggctcaaagaggcggaagctaaaaccaaatattgggtcaatagcattgcgaggaggaccatttatcagacttggtcggctaaccctggcatggactttaactttttaggcgatggagctgaggccatgcttgccttatgcgagaagactaggaaggaagagcttggcaaagaagatgaggtcgaggtagagcaagataatttatccaagtcaactacaatgtaggcttggcttttttttatatttaagaaaatggcccgttggtcgagacaatggtttgccccttgtggcacttttttgtaaggataaatttgcattgttggatggccaactt

SEQ ID NO: 273132 - DNA, 565 bp, Cannabis indica
acaattcaacagattacaaaaaacatttacaacagcaactaaattgggtacaacaacccttaacaattcaacaaaaaacatattgtccattacaatatagatttagaacaacaactaatttagtccagagggtggttggcttgaacttgtttctcttgccttttgcttcattctcctaatgtttctctttacagtttcagggtctaaatttttttgggaggacgacccatctttttcttttgtggaggttcctgattcataaacaagtgctattgtcagattacaaacttaaacatggaaaatgtattttaattatcagtgcttaagaaatgaaaatacctgatcttgtactggttccttacaagttttctttgtatgtccaggctgtttgcaattagaggagttgttggactgcccaaatcttctcattttagttgcaccaggtggaggttcatccacttctctttttctagatttcttgggcttactaggtaaaacagtttctggtggtggaaggattagatttttgcctttatcaggccagtgttcaggactaggcataggt

SEQ ID NO: 273133 - DNA, 1225 bp, Cannabis indica
aagaccaaacattctaaggtagtatgaccaatgtctttgtggtacttacagaattttttggggtctcctctgtcgcgatttcccctgatggggggcggcttcttgaagactccatttctctcttcgattgcatagatatggtctcggggtaccgcgagttcatataattgacgaaacgaggtccgcccttcctcttcggcgaggattccttcttgggaggagacttggccaacttcggacttcgctgtctccgcgggctgcgtcttcttgggcttcggcccctggagttcttccctcgggactgcgagatcgtgaacgcggtattggcgatttgcgcttgtccttgcccttctccaactctgccagagaattctcgattctcttgtggggttcggccatggcgaagaattcgactaaggattctggtcttcgagcttgcaactctttccagaagtcggtcctcggcaaaatacctgttatcagcatacaaacaagcgaagactcgggagccttctcgacttttgttacctctgcattaaaccgtttaaaatagtcttgtaaagactcaccgggttcttgcttgatgttggccaaagtcgtataaggtggcctataggtcatcgtggcctggaaatgtgtgaggaataagtcgacgaaggtttcccatgtcgatattgatgcctcaagcaattgggtaaaccaatcgtgggcgttttcctcgagtgttgccggaagaatgcggcattttgcaagctgtggtacctgatccacctccattatagtattgcatttttgaagataatctatagggttagaagtacctttatactttagggattcggatagaagaaatcccttgggaagttgggcttgtcgcaggagtcggggctgccgcgactgcgggagtcgcaactactgcggcgaggtttgctgggacggtgatcccagtggtcgcgatcggcgcggtaggcggattattgtgagtgttgacaccctgatcgtccgcatggggatcacagagtgtctctgcgttatgaggggcacgagaacgcgctctaaaaactgcgttgaggtgatcacgcagatcacctcgatgtacctgataacgtcctcccttctgcatttctacagagccggaccttgtatatctactcggtgtacgaccatgcgatgacgaagaggctgattctgcgtcgttgtctcttgatggtcgactgcgaggatt

SEQ ID NO: 273134 - DNA, 1269 bp, Cannabis indica
taataaataaataaataaaaaataaatttatatacataatatattttaataaaataaaatatataaaataatagcgaaattacttcatatatcatttttcaatttgagagaattactacatattttaaatatttttatatacattagtattcatatatatatatatataataaaaaaacaattttaaaatgtaaaagtttgtgtccaactgccaatgacattggaaaatcaattgcaaattgagtgacagccacatttttattaggttttccttgccaatcaaactaaagtccaccactttcacttaaccagcattaaaatattaaaaatgtaaccaaacacggtaaactttcagattaccattcccacttctcttaatatcgaataccaaacaacccctaataaaattatgaattactttattaaagataaataataaaaaatagactttactcaaataatcgaacaaatatctattatcattaaaagctaattcaacaggaaaatttatcaaatttataaattttggttgatacactttaacttctagtgattaaaatcgttggatcaaatcaattattaatctaacaattatatgaaaagaaaatgcatacctggccaaacaaaataaaatatactctcatatatatgttatttatttttggttgaattttttttgtttttggtcccaattcacattggttttgaaaatagaattagggagtgacttaatcattttgaaacttattttctatatatatatgaattgacattatgtatatatatatatatagtaacatgcatatcctaataatgattaatttgttctacttttgattggttttatttaaaaatttcttcttgtatttgttaaaagaagtatgatatgatatgatatgattttttttaattattgaaaatatattttaaatattcctgtgtgctatgaaggttttgacaactactaaactaatgtatatatctatatgtagaattacactttttcaaagtctttttggtaattgggacccaattaactaaagtgccatgataactgccaaaataacacaaaagtgtaagaaaaatattattattattattattatttgttgagaaagattattattattattattaaggaaaatattagtttacatctactgtttataaaaacaataaatttaatttttatttataaaataataaattaaattttgtatttttaaaattatactaaataatatattaaattattttttattaaaataa

SEQ ID NO: 273135 - DNA, 1214 bp, Cannabis indica
tcacgctgtaaagatcttctatctttcagatgagcgagttatcggatagccagcagctcggctcaggaggccatgcatttgacggtgagactgaccaggagagggacagttttctccctacggacatttccgaaatggaggccgctcaaacagaattaggtccgatgtcttctgtagacatcgagaggatggtgccggaactcgcagaacctgggaccatcgatatccgggacagtgagtccacagtgtcagcacgcgagtaccttatccatacgaggcatgctcctgacatcgaggtcgaggagatggacgaggaatggacgactccagctcgcgagtcaggtggggaagaggaggaggcggaagggagtgggacagattcggtcgacgattcccagctgaacgagcccttcgcgtgcgaggatttaatctcgagggttgccaaatcagacttcaccacctttgtgaggttgaatttgctgcgactcgcgtttcaacgtcctaaaccgtctcagagagcgcaccttccatttactaaccctgcgatcattcccacagaggatgtggtagtctcaatacccatccttcggtgtggtgtatcggtcccctttcaccccttcgtcgcagccattctcaggcgatatgatgtatcgccctttcagctaactcccaacagttatcgcactgtcctagccttctatgcgatgtacatggagtacgtccatagggctccctcagtagaagagttcagctatttctacgacataaaaagcgtaggtcttcataacggcttctactgctttagcaaatgggcgacttctgaaatcaacggagttgagggaatggtgtcgaacatgggtgattggaaatcgaagtggttttatgtctttaaggttcctgggattaggactgactttaatcgcagacctagtatgtcgcgtatttcttgacttagacattttttgcattacttttgaaatcttttgctcactcgctctttgttgtcatcgcagatagaccagctcgaccgacccttgacgcgactagcaaggagacagctgaaattctcgggagccttccggtacaagatcgcgactggcgattattgtgtacaactgcgaagttgcgagaacatcagctgattcctgagaacgcaagtcttcaaagggagccagtatacaaagaaccatccgagaagcagcaagagcgaatag

SEQ ID NO: 273136 - DNA, 918 bp, Cannabis indica
taacttggccttcctattggtgaggtgtactaccacgtggcattgattttgtccatgtaagcatgccacgtcatgaaggaaaaaattagggtaacagtgagggtggtattgatggaaaatatggatccattggtggtgtataagtcaatatcattgatgaattcaaatcaatgatattaggtgtttcctcatcctcgaatgtcacattttctttactttcatctaacaacccttctttttttttctcacttccacttggctatccataactttactagtgatttcatattaaataatttcatgttcatggatagaatttacttcatttactacactacattcattatttgtcaagtaaaaatccaatttagacaaattttgagttgatacaacttcaaagggatcttgatcttcaattgcaagaaatgcttccaccttttgcaaacagctctcataaccttggatattagagtcgttgtccgtaaagcactccacattatgcaccattaaagtattagttagagatcttaccatacactccaattgagttatttcttctacaagtgatggtgtatggtcttcctcctcaatttggttgggatgagttttggtaatgtggagggtattggtgactccaaccttatagtgaaggatctcaatgccagtggtagtcaatatcattcaactaatgcattatgtcatcatgacttcttcttagcaatggctcaccagttacctctgctccataattcacccaacttttcatttcatcatttaatcaattgttaaagaagaaagtgagacagcccctcgaaaagttgtgatgaaatctctctaccaattcattaaacctccccaagcaacgtaaactactacaaattaagcttttagtgacactatatagtgacacacataaaa

SEQ ID NO: 273137 - DNA, 678 bp, Cannabis indica
gctcgagttcctcatctaagtcaatccattgttttcctagctcccccacttgataccttctgaaattatcctccaactcatctattcgcaattagattggatcctcttactttagaccgagttatgggcaaagatcaggttttttcttaatcaagtgctctcacaaatctggttggttatagttactagcggacctcattctactcacggactgtgtcctacttacggacctcgtcctgctcaaggacctcgtcctactcatggacctcatccttgactgacttacgatcttacttgtacttgtactttctcgatcattgttgcgatgagtaccttctcctccttgcgttgaccgactgtgggttcttgtgcggcctgaggttacactcgcttcttcacgccccgttcttcccccttaggcgtggttcgtcgtgttctacctactagaatttgtacgagccccttccctatgggtataggaagaacactagtggatcctcgctagtgacctacatcccccaggttgtgtcgcaggattttcctcgtttccacgtggaatttcctgttccccagttttgggtcgcctcctattctcatttctatgagatggttctagctaatcatttgggttttcagggggaagctcaatttccccaagttgctcgttttagtgggtcc

SEQ ID NO: 273138 - DNA, 596 bp, Cannabis indica
tatattttttttattgtatttttgaataattttgatattttttatattttcaagaaagtgttacctatataggttataaattactttctttagtttatgaaacatatatttttttttatagataattgatttatttcttacctaataaattttaagtttttatttaatatatactaataaataatctattatatagatttagaagtaataattttttttaactaataactatttagattaaatttatttataaattaataaatattaattattttaattattatttatatatttatggattaaatttattataaaaaattacttttactattctacatttctatgtctttataattttaaaataaaatctcacatggtttggaaatcactaagatgttatcttgacataatatttttattatgttactgtaacaccctaactgacttaggcgtattacgtgatttttaaacgtactgtgcagctcgttgctaatcaacgaggtttatgaaaaaacgtgattaattaaaattttgctttttaattaaacttataaacaatattacaaagactcgggatcccgattataaaattattt

SEQ ID NO: 273139 - DNA, 525 bp, Cannabis indica
attgtgttttgcgagagtttaaactgacgaaataaagccaaaaccagcctcgactctctcgatttcctctctgaaatcagcctctcgacccttccggtcgtcgtcttcgaaaccgtcctcttcattgtttctttttgctttttgacaatggccgacaacaaaaccattacttctccaacccaatacgatgtcgtcaatgggacatgtgtttggatctcagtcttcgtcgtttcatgtacggttccttcggtggagccttggatggtcttcttatcttcaggagtccagctactcgttaggcatctgtagcttttggtgctgtgattggcattggatcttcttacactcaatcatagcaattattatcatcatcatcatcatcccaatcttcttctataaaggagaattaaacacttgaatcttcggtaaaacctaacttttcaattcgtaataatttttatttgatgttggatttgattgagaaaaatttaaatgtatttttgatggatggagttttgataagaa

SEQ ID NO: 273140 - DNA, 673 bp, Cannabis indica
ttttttttttttgagaaaaatcactattattataaatcaaccagaatttacaatagtagtgaaaataagatagagaatttttcctatccaaacaacgtcttgatccaactctaaagcatgttttgtcaaaccatgagcagcacggttagcatccctcttgacataagaaataacaactttagagaaaaaggataaaagacaacaaacatctaagattaaattcgagaaactagataaatctgtagatgtattatgtagagcggtaacgactcggagtgcagccaattcgatatgagtaatgtgtagttattcatgaagcacccaactgagactgtgaaagagagctttcgcttccaactcatttgatctaaaacaacctttcactggctttgaaaaggcagcaatgatacaaccgtatggtctcgaattactgcaccaatacccagagtttttgtagttgagttgagagcgacatctacattcattttgaagttagcttctgatggtggctgccatagagaaactgctggaaatattttaccaggatctagatttactaccatgtatgtttcattaacaacctaatatgaattactctatcactaaaggaatttcgaaatttgaagagaagaaaagagagagagagggcggctatggctttgtctgaaagaaa

SEQ ID NO: 273141 - DNA, 822 bp, Cannabis indica
ttgatctacattacataccacacacctccataaaagggcaagcgctagcagacttcatcacgaagtgccatgaggcagaggctaacacaagcatgcccacatcgcaagtcctagcgtggaaagtgtttgtggatggcgcctccaacaaaaatggatgcttctaacaatgaggccgaatacgaggccttgatagcagggctgagattagcaaaagtcgtgggggctagaagagtagaagtcttcagtgattcacaacttgtagtgaaccaagtattgggggaataacaaacgcgcggagaaaaaatggccgcgtacgtagcagtagtccgagagttgctccacgagttcacggactacaaagtagaaagactccccaaaaaaaagaacgctcacgcagactgtttggctaagttagcctcagacagcaaaattgagaaactgggggtggtgcctgtggaacgcctttcggaaccaagcattaaagccaagattactgtggcggcagttgaacaagagctcaactggatgactccccatcatcgaatagataaccaatggcgacttgccccaagaaaaggcactatccagaaggatacaataccaagcgcaccgttatgtgatgatggacaacaatctctatcgaagaggactcagcatgccgtatctaaggtgtgtatcgaaccgtgaagctaagaaaattatgctagaggtccatgaggggttctgtggagatcatacaggaggcccaagtctctcaaagaaaatacttagataagggtatttctggccaactatgaaaaaaagattgtatagactatgtcc

SEQ ID NO: 273142 - DNA, 1525 bp, Cannabis indica
gatcaaattatacaatataatattatttcaaatttgataatgaatttttaattaaaaatgatatgttattaaattggctctaataccacatcaattagtcataaaaaaatagttatacaaacctaaatatagaaagttgaatcattaatatatctattataatttaattaagaatttgtatgaaattttgtaaatatgtacatttttgaaattgtgttttttgcacattttttgtaattatttgaaaaaaatgtatacatttatgtaaaatgccctttaattaagtatttgggaagaataataatatttatttatttaacaaaaattgatcagatacatttatcaattgtttattatgttttaaaggaactcataataagtaaatgaaaattattaacttcgattagaaatattcaaagtagtagattatacatagttcttataaaggggtaagtttaaggtattaatttgtgacataaatgtttaagtttaatttttgtaaaaatttattatttaacggtcaagtatttatgaaagtttcacaaatataatttaagtattattattataaaaatttaaacatatatttatctgtaactaaaatttattttaagtatttacattataaattagtttataaaaaataaaatatttagctatgagacaaaaaaaaaaacaataatagtcatgttgtgataaaaaaaaaggtgttgtaagttaaaaaaaggtcatatgagaatgattggtaacacgtgataattaaagggttcttaaatatacaaataacaaaaaaaaagtcacattattttgttccaatatttttttctcaaaaataatatataattttgttattaattctaataaaattttatataattttttattatttaattttttgtatactatatttattttataaaaaattaaagaaaaaaaaactagaatagattaaaaaaaagaatatattgtatataaaataatttttttaaaattgatgtctttatccttcaaaatatatttggtgggatatttttcttgctttagcttatagtggtgggaaaatggcattaaagatttgtgtgggcctcacttttggaatggtgtcattgtgttcccatttccaattactacaaaaataaaataattctaatttttctgagtaagaattgttgcatgtcgtgttcaaccttgctttatctccatacaacacacacttgtcgtgtataaatggatgcctcgaagagttttctttcattccttttttgggcttttgctaattttagaatatattcttgaaatgttggcttatttaaatacgacaaaatagcattgtacaaagtttacctgatttagaataaagtagaataattaaaataattgccgtatagagttagaaacaaatagcttggcctgtttaagcgatttgacggtatttttatgcttttacaatttagttttattgttcaagatgttcgaaatttatttttggctttattttttggtaatttgtgttttgtaaaacgat

SEQ ID NO: 273143 - DNA, 4441 bp, Cannabis indica
aacataaaaaaaaaaaaatactctctgtacattggaaaagcacccttttattttatattttgattgaatggaacatcatgtatctaattttaaatagtaaaataataataaagaaaaaaaaaaaatagtaaattgatattttaaaaaatcattagaaaaaaaaaataaaataattacattttatggaaaaaagaaaaataaagaaagaaacgcttcatcatttttctatttaccttttatggaatttgttgttgttgtttttactaatgaaacgtatacaacttgaattgataaattttgagacgaaaatacccctcgaataatgtataatttcctcccaaaaacaaagattaagaccgtaaattcaacataaaacgaagggcattttaagaataaatgaaaatcttcaaatatatatataatctccacaaataattaataataataataaagaaaagaaagcattacatttacttagtgactctgacaaggtttgacgagtgagagagaacgaagaagaagaagaagaattctcttccttcgtaaaagcttttctccctcgtttgtaacgcccagtatgatctcaattttcaatctttttttctgggttctttctatttgattcttctaacgatttctgtgtcgactttcatggttttttttattctttatatttttcaaatttgtttacataataattatgaggttttgtgggttttcagttaagaataatggcttcagatccaaaggtgcacaaattcgaagaagtggctcaacataacaagaccaaggattgttggctaattgtttcgggaaaggtcagatcttttttctcttttgattggttttggagtgaggatttagtttttggattgattggtcaacttaagactctgtttgtttgctgagaaatttggtttgggaaacttgtataaactaattttatccagcctgttaacctaggtgttgatttgctgggatcttaatccaattcggataattgtcactttagcctaattttaattgctaccaatattgataaaatatatttgtgtgtatattcatatataacatatagggaacttattcctcttgggtaccagtccctttacactcttagttacaaaattaactcaattatgaaaggaagtagaagcaattactatccccatattacatatatatttgtatatgtgatgtaatgtagtgtttattataaagggcctaaatgcttgaatatgtatactaaatgaagtcttcttcttcttttctcctctaaaagacaaaaagttacaacttttattatgttgaagtagaaataagtgaaatctcttcaacttgagttttggtagtttgcatacaataaaaaagttatgaccaaccaagaaccccattttcaggaactaggtaaggagaaaaagaaaagttcaattatgatccaaactcaagaattttgtcacagccttctcttttattattaattgttttctgctttttgtttttcgttctattgatctttcattggcatggagtttattttgaactcatgtagttagtatctggattcaggtgtatgatgttacgccatttatggatgatcatcccggaggagatgaagtgctgctatcagctactggtaatgcattcttcatcatattaactgttccaattgaaactatgtatattttttgtggggaggcaacattgatctaataccccaaatgaagactcttttttgagattaattttattcaaaaacctttgcagggaaagatgcaaccaatgattttgaagatgtaggccacagtgattcagctagagaaatgatggagcagtactacataggagagattgatgctgcaactgttccgctaaaacggacctacattccaccgcagcaaactccacacaatcccgataagacacctgagtttgtcatcaaaattttgcagttcttagttcccctttgggtttagcattcgctgtccgacacttcaccaagcaggaataggttcagatcagaactgtagagaagggcagagtggttactatgcatttggaagaacagttattttttgcagccattgtttaattatgtgctcttctaatcaaattgagagtctgtttgagttgattagtttctgtgttgttctctgttttctatgttcttcagttcattttagttggaactcaacttataagttataataacaacagtgtgctcagtttcattgtttatttttcttctttaatattaatatggaacttaaattacatatgcatattctatttgtggtgtttgaaaacacatgatatatgattattcttagaagtttcagaaaggaattagtaatgatataaatctagagaaagaactagaacttgttacgcattcctttctttcactgaacacattcagttatctaaacagagtccttgtttgataattagaacacgaaagtagattagaagtcaagtagaaccacgaagtaatggaatcgtgggattgcttgaatcggtagttaaaattaacaggctcggttagtatgttgtatttatgtcatatttttatatattactatgttaaatttcaatttatactaaaatattatacatttatgtgttcgtaaaagtggaatgaaataagggtttgcttgaatcataaaacaaacctcttcctctaggtttggtttaacgtgtaaagctaggtttctcggcacgatcacccaagaagctaaggttcatgcttttattattgctcactcaaaccttgtaactggagcgttggatcactatattgattcttcgagggcctctttcgtctcctcaatgtcttttttggccttcttggcaatgtcaaataaggatttcttcaaagtttcgaccttgacctttaaatcgttcttgtccttctcattttggagcatctgttcttctagattatcatgtgaataaaattaaaagtaaatattaataatagagataaataagacacatgaatttttacgtggttttatatttaaatctacatagtccatgagtccatattatttctgagttcttgatttgtttaagataacaagatatctgatacaaagtagtaatctctaggtttttctgcacttaatttctcaaggtatttcctcccaaaaattatttgtcccttacatcataggttctgtccctatttataggatttttaggaatgaccgttattcctttttgtttttatctagataaccgtttatgaaacataaacaatctccacattttattttacaacatgtgggataaataaattaactgttagtaagcacttttgtacttatcttgaaattatcttctttgctgagataacatacctaaaatatgccttgccttcttcagtaatgttgggaatgactaggcgtatgttgcgagacgttaattgaggtatcttcttcgcttttgctgtctaagataggtcttaagataacacttagaattgaatcttttgtggtccttagggtaaatcttcttacgtcgtttatgagccttccgagatggatcattttttgctcatatctcttagtcttttaacatactcatgagtatgtgggtcaatgagcaacaaactcttaaagaacttattatctaccttttccagcgactaatcccttcatattctatacatgtcttatttatctgggtcatgtttgagataggcctatgatgttgttatctcgctaataattgtatttataattttatcgcttttatttgacagtcatattataatacaatgcgagacaaacgtatcatttaattgtagcatgtctcgaggtgagaaacctatcccattcctcatgtttatattattccttaatttttaagacttatatccacatatcatcttcatattaatgctcgaaatatgggcgtgacaagtttttctatttaaaatgattcatgtggtcgacgatgacttgtgggtcgagtttttggttgttctggcgaaggtctcatattcatatgagatggttccagaacatcgagtcgtgtttgccttagatttggaccatttagattatgtggaatttctgtgtcaacagtaatctctcttgtattcacaggttgttgctactagaatatgtagggttgtttgtattgttctccttgacaagaacattcgacgcccttttggtctttgacccaccacgaggccttcctcgtgtttgtcttgctgggggttcaaatagttttgcatgtgtgttattagcattcgcacgcgctatagcggcttcacgctttaatccagcatttctttggttaggcttgcctaatctttgtcgaagttggcaattttttaattccctcaaggaacatatctagtgggggtcttatgcccctcattctttctttctagaatggtttcctcgttgtcagttctttcaaagtccca

SEQ ID NO: 273144 - DNA, 578 bp, Cannabis indica
aaataaaaataattgaacctttcttcacgtgcggagcagcctcctataaaattaaattaagaatgtatttagtttggagaaatgattaaataaaaataagataaaatttaataaatatgcataaaacaataataatattttcatatgcaatttgatttatttctttattaggtaccttcataagaagaatgggagctttgatatttacttcccacatcttgtcaagaatagactcttgggttcccataatcgtggttatgcgtttgccagttattggattgacagcaacacttgaaacaattacatctatctttccaaatttctgcatgaaataatttattattaatttaatttgagttacatatataaacaaaatatgtcaattcatcattattaatctaattacattatgaaacactatatggatcatgtaattcatcaccaattaatttatcaaataataacatgacctcgagtgtcttgtgtatgagatctttcctttgttgggcattagagacatgacaaacaagccccaacacttggattccttgacttttaagcttttgggttgcttcatc

SEQ ID NO: 273145 - DNA, 558 bp, Cannabis indica
ccttgtgtcggttcgtaattagtttttgtaaaattactgtttaacccttctaattacttatttatcctttagtaccattaattcactagtggaagtataatttagatcccatctaaatgtgagcgcaactttctaattctagaattaacacataaagataaccaacattcgatctgttagaaaagtcaggatccattattgtagatcgtgttctcaaccatccacattattagattcccaaaatagaaattgtaagaatcatcttctttgagaaattttaacaagtgaatcaaagaaactattaacatgaacaagagtttatgattactcaggatttaggacaatcaacaattgatcatcattatgatatagattaggtatttatagtaaacaacatatctgataaagacaacttaattcatatcggttcttgtcatatataatctctattatatataacacattcacttagatgtcatactacaccagtaatccaaattgagattacttatagtgaagaatgagcatcaatgaactgtactagcaaccattgattaa

SEQ ID NO: 273146 - DNA, 529 bp, Cannabis indica
ccttttccacaaggcggtgatgatgaagaagatgaattattctcacgaaaggtcatggatttaatccctaagtcactaaaatgaatggttgctgaatttctaagaatcaaagataaacgtgatacaatcacaattcctgtgccctaaggattcatagcaccgcttctccaagtcacgatacttggagaggatttgcagcaggttgcattatgtgacttcatcgacaaccagagaatgttgtttggaatgatgcatactcttctttaatctaatatttaacaatttaatgcaggcagatctaggagagcataaaagatttgagaaaaattttcaatttttacgacccaaagtttcttgcagtgaatggtatcaacgatgaagagaagagtcagtcttttgagaatgcagcaaaacgattgactgcttggttattattgatgaataacaaccaccgaatgttctttattccttagaatatcgggtaaacactatttaattttttagtgctaattgtttatttctatattat

SEQ ID NO: 273147 - DNA, 10257 bp, Cannabis indica
agagagagagagagaggagggggacaactgaaaaaggtttcacagtaataataatgattttcataatatagggtacccctaattggtatcacttatgacctctaatatcacagaaagcatgagggcatctaaagtaggaccaactgctacaccaaataattaaatgaatttcagcgataaaaaataatgagaaattttaaatttttacaaaagaagaaatctttcaaaaagagcagccatcacatcagattattaaaaatgccatgcgttttaaaaaataaaagaagcatttttactgggctgttgtttttttacacggccgttgagaaacttgaaattaaatttcataccttaaacaatatagtttataggaaaaggattaagattaataatgatagaccgaccagtcaatgcagttatatggaactagcctaatagtctcacgccacagcccccactatccactaaagataaacaaccatcggcccctcactctaacaaaggaaaattttaagaaaataaaattaaaaaaggaaaaggacgagagagaatttcgaccacataaatggacataaggggccagtcaaacaatagttgcagatttgcagcataggttggacctatttttgtccaaagcaagctacctaattatcacctttggaatcacaacaaagaacagctaatatggaaaatgccaccattataatttgtaagaataacttattggggtggaagtggacccaaatttctatacattgattttcttttccccatataaagattttaaaattccattaaaaaaaaaatatattcctataatcttttcagcctagagactagagtacacctgtgtctacaacaatgcgattctcacataagctcctcggtctgtaacaatccaggatagacaaatgatattatctgtttcaaggacttaactgaggatttcaggaaagcgtgtccttcagttgctgcaaaacaatgaaccaagaaaaatgagaaatataatgatagataaggaattaaacttgtcaatggaaagaagagaatttacctcttaacaacttcttcactcccttagaaaaatcttcaacacgtcctagcacgggtctcatgccacatatctgtagaacgcaaagttccaagtacaaggccatctccattatctgtagtaataagcaacacgcattctgtatttcttttttaatctggttcaatttgttggcttcgcatagctcggcaacaatgctgattgcttgatcctgcattgtgtacaacaaagggtgttaaactattcaaccttaagttcaaagcttcaagtacatccaaagggttataacagtacatgtgttaagaattaagacaggaatgctacctgtaagccgtgtaaaataccaggcattggaagctcaggaaaatgagcgagatccacataacctacctcctctgcccttctagcggcaccatcaacttgcaaacatagaaatttcaatagtagaaatgaaattctatatatctctagagaaacaacatcagagaagtacgtttgtgcagcatgattagcactttcggctggttgacttctgattatgagagatgttgaagttgtagaaacagctgaaaattttggtcttgagacacaaccaagaggtgaaagggcaaaccatccatttttgctgttaataaatgacggcttattgcagttatcaaactcctcttttaggacaggaggacataagagtggcgcattgatactggaagagtctcctagacgttgagatcctttgctaatgaatgctaaaagatggatactttgttctctcaattgggaatccatttctttgatggccttaacccacgatttccagtgtcttgcaagaacacacattaacatgatagtatgctcagtttccttgagagctgatagagaaatttctgttctttgagtcctaggtctttttttgtcatgatcatcaaaaggaaagtctggtgcactgagataataagaaataatataccctttctctgagaataagtacggtatcacattgtctaaaatatctctacatgaaggactgtctcctaaggactcaaccatagctgtaatgacagccaaagcaaggccccaaacttgttgaggcttctccaacttgtcagttgagatagacaaaggtctaccatccatgtactctgtaaacaaaaatctcaaggatgagagaaaaccataattaacaagcatctcagcaccttccctaacacgagcaagggtcaaaaagaacttcataacaacagggacagatgaaaaggaactcttgtcctgaagtttcaaaataacatcgttcagctggaggtgagactgtataacggggaaccatgagttgggtgtcaagaaatttcttagtatcaagtcaacagttgtcagggagagggtgcagtgatcagcaatgactatacagttgcaaagaatgggtagtagtcccagacacacattagaaattttagccatgtcctcaacagattccttatctatcatgccaccaaaatgtgaactgagacaacaaaactccactgtcgagagaagcaatacaagtaaaagcttaattgttatgttaacctcagtagctgatggcctgaagtcacacagtacccgaaggccagaacctgctgttttcaacaaatgtacacaaacagagaagttgaggcttttatgtgcagatcgcaaaagatggagaagcagttctgattgggctgaaagaaaatgaaatgtgtcttcagagccactgcctctatatggagctaatgattccacagtgtccctgaagcacttgcatatgtgatctatacatgttcgaataagttcattagagatccctcccaatgtggcatttttctcctgcaataacagaaaataagtcatatgcttaaaaaaattatgggttctaaaatgaatcaaataataaaactatacacaatataaaacccaagggagcaatgccaggtggcatacttgaaattgctaccacacagggaaaagatgtattattgcacacaacaaacatttacattttcaggtttaggtttaggggcctcaacccaaaaaacatctccggttcaggtccataattactgaaacatcagtttaaagatggggacatttgagtaagaacagcatttaaaatgagatacttttagggtagatcccatctacgcccgtatctcatttaaaggataaaagtaatagaatacgaagctcaaacaagtgctaaactctagaactttattgccgaaatataaagtaattataaacagtgatgcatacatgtattctcagtcaattatgccaatgcagtactggttagtgttgactaatgtacagaaattactgtagaatccttacccaatgcaaagaaatatcacaaaactttcagttactacaaacttcagtagattatgaatctacatgaattaatttcaaagcagataaaagtaaaaacactaattcaaccaccaccgaaatatccctaacttttaagaatgcaattacagcagctacagaccctaatttcactttagacatgcaacaagacaatcagactgataactcacatcattctcatagatggttaagacagttattaatgatttcaatgcagcaagctttgaatttctaagcaacaccgtcgaatttgcccacatcatctgagacagcattctttttgtgatctctttagatgttttccacttcaaatagtcccaaagatctgatcccaaatcagcccgtacacgctcgggatcaaacaagtacacatctttgtaagttataagaaagtcattgtcatacttatgttggtaattgtgcataacttttgaatcaaccaggtattcagaaagttctttaaatggcccagcgctaatttcacgaccctcaagctctccttcaagatgataataaagatcattaagtatcaaattatttagttccttcccttcactgaaacaagaaaatgattaagcatataagcatctcatatataaaagtaaataaagtgtacaaaaattatgaacatgtatgtgcaaatctagattaaaaaaaatgcatgattgtggcaatggttagaaaaatatacaggggttagaagcgagacaaggtgtggaaacattttttactggcaatgaagtatatgaattataaaaaaaagagattgcatatcatgtggtaaaacatgtgaatatcatagcatacaatacataaagtagatctaggcccactcattctctcttacagtgctgacccaactggggccaagtagcactgctccaaccatatccagaacctttctaagggggttttcacagaactaattctgtaactgcaatgattaaaatcctagtaaatgattgccaaggatttatcaccaattcccaactcgttaaaaaagcacactttgaacaccgagtcaaaaataacaaggacagattacctataaccactctgtgaatattgggctaacaattcagagaaagcaggatgacttctaagctgcaaaatagggaagaaagaaaaaacatagatattatggaacctaaaaatttcgaaaaactgaaagagttaacattttatgattataattaaaataagccctcaaagagcttaatacttcacaactaattttggacagcatggctgaagtatttatctaaactatctacaccggtcataacaggggaacagcaaacctttttagacatggtgctgatcttctgaagtattgatacagataagcttccagtatcaccagcagttactttctcaatcaaatgcactgtaactaaactggcagaaacctgcaaagatttactagataaatttattaaaatgccaataatcacattaaaggatccatctaaacttaaaatcatctccaaacatatagtcgcaacaagtctccaatgtacatttttaaaagagtttttggcggcttaactctctaaactatcatttttaaccctccaaactcaaattttggtagtaaaactttccgaactactgagccattagcaaatttaagatagcatccatttaccacagttaagtgctaacatagactgcttatgtgtatacttacacgtggcacattcctattggtacacctaatattattattcaaaattaaaagataatacaaagttataaaattataaatatacataaataaataaaataaaatgaaaacaaacaaacaaacaaattaaaaattagatattaaaagaaaacaaaaactaaaaaagaaaaaacaaagctgtgttctctcgaggacccatctctttcaccctctctcttccacctccctcactcatctctgtcggatagccacccccgcccgccgtcgccgccgctaaaccagtcgctcctcttctatctctctcacactctccttctctctctctttcattatttctttctctccctctttttctctctcccattatatctttctctcattctcacgagatttgcatcccagatctgaaaggaccatcaatgttgattgttctcgatctcattatttgcttgttcagttttcaggttggtgacttgctgaggatggcgatgaagacgatgacggccgtcgtgacctcggcgagagctccgtcattggactagatcaagatgagttttagtgtgttatcaatttctacctgaaatttccgtaagagagggacgttgcgagcatcaaggagcccacacaagttcaatttgtctcgataaccaaacaaattttgttattgtgtaagcttacattgtgatttagatgatgagtagtgagttcaaaattaaataggtttagtgtaactagggttattattattattgctgttttatttatttagtaaaagagaaaaagaatatggaaaataatgaattaaagaaaaacaatttttttttaatttttctaattttgaaattatttttataatttttaaataataatattaggtgtaccaataagaatgtaccatgtgtacaagaatatacacatacgcagtccatattagcacttaactgtggtaaatgaatgacacctaaaatttgctaacggttgagtagttcggaaggttttaccactaaatttgaatttaaagggttaaatgcaagtgaaatgatagttcaaaggatttagccgccaaaaactctatttaaaaatagatgatcaagtaaaaagcaaaaggggttaatatcgttacctctgcatgataaaatgatttgttatcatagtcataagtagtaagtaacttgattagattaaccaagacagaaccgtgacaccatgttgataaaacatctctatgatcatatagatttgcagcttttgatttatcagtgcttccctttgactcaggtacttgttttttttgtgactccacctgtgacaactttttttgcagaaacatgtcatatgccattatttccattatggaagattgacattgatatctgtatgcctgatttagagcttccatctcagtcaggctatcaggcaaagaatccggagaagttagtggaacacattttgacaattgcttccagaacttctcagagcttttcaacctcgccaatatattgatatattgggccgccctttcccacaatgcctttaaaaagttgagcacattaagcagcacaaagggtttgctgtaataaagaataaaccaatcaaaatatgtaacaaaatagttaaaaagcaacccggcaaaattgaaggataaaccaggctaaggatgtctctagaagaacttacttattgatatgactatcagaatttacaatataacaaagtactgcatctacaagacttgaatctttagactctactgccccagaggaaacctcaattgctggcagcttcccaccaccagcattacttgcttggacgtccatattctctttattggcaaatacagcaataaaaaaagcaggctgaatagagcagaaggttcaacataaacagttaatcagaaaatccgaaaaaagaacaactgaaaattacccaagagcgattcacctattgacagcagaaaacagatacacatgtcaaaaagtaacactgcacacctgataacgagcagcagcagtgaaaagattgacagtagcaacaaataagtcttcattttcttcagattgctcgagtagaataaagcttacagaatctttcagatcagtaacctaaatggtgtattaataaaaaatattaaattagaaacaatgactctgtcatttaaatataaaaattaaagatcagtaaagaaaatgcagattcaaacatgctaaacctgtttatcatccaaaccaaagctgcttgcagaaaaatatgctggcaagaaatctgccgtcatcaacagcattgaaagtactttagttgcgccaatctgtataccctgcatggataagctagaactccttagtaaaaatttccaacaatgtaggtatagccactgtttacatacaatcataaaaataaaaatggaatcaaaagcatacggtacaggcaagatttccattttacatgcatagaccttcactttttagtatccccaccaattgaggtcaagcacgatggaacaaataacaaaataagataactgcacacacacacaatgtaagtcttcctcaatcaacagaaaattactactagtgattttcacagaatcaatgaagtttacttacgttaagaaacaatgatttccgttcatgttaaaagcaaaatttgattccaacaaaaagatacacaccaatggaatagtgtgattcaagtttatattgctttcctgtagctaggcagaggaagcctagttccatcttcttcctctttaataaaaaatcatagtttcattattaaagatagaaacaaatatatatatatatatataatgaaaaaagagaaagaggtcaattgtcttagactaatccctcccccgttatgttattgaaaacctatatatataatatacaatatacatacacactccacaaaatgttggtgatgaatagtatgggtcataaactgaaaagatcaaactaccacaatggaaaaagaacaccaaaaaagtaaaagaatcttcaagtgttgtatttgaatgaataactagcagagaagttcccctcagataagaggaaaaaacattgtatgaaaaaaacttccagttcaagcaccaagagaatacttacaggattgcgaaaataagataccaaggagacaacagcagcaactacagatattggttttgttgcagatgacaatactgattgaagaagatggggaggctggaagatgtatcctgaaaagtaaaagaacaggacatcatctcttacaattacaaagagagacttaaagtaaaaaaaatgtacataatcacctaatcaaccaaaatcataagagagaatcctataaacaaatgtgcattttacagattaagacaaaaaacaaaattttcattattctaggtcctaaacaaatagtaggtaaaaatatcagaatataattactcttctttgcaacaaagaaggttactaatatgctttacagtatacccaagagtaactcaaatgtttagcatgtagtttgcttccagaatggctgagattcaaatccccccatgagcacttctcatagcaattgttatagtttcacacacctgttaatactgtaaagtaaggtggaaaacccggtttcaaaattgggcctgctaagcaggtctgtgggtttttcatcatatatcaatagcaccaagaattgtaacacctgtgttactaatttccaacttggtcaaagaatagaaagtaactctttgtttaattaacaatgtaccttgggaaatttggcaagcacattgtatagaatctccaaaacagacgatatagcaagtgataaaccttcaatttccataacatcaaagagacggctaacatgaagtttctgcgagacggagggaaaaatacaagacaaaagaagaacaagattacagaaagtataaagctcaaattagtgaagaaaacaaaattaaatagcagactctgaccaaatagaatcagcattcagacctccaacgcttgtgaagtcgtgcaaacaatccgaaaaagagtactatggattgaagaatcagaaagtaacatgtcccagatgaccccaaccagctttccagagtatgatgtcatcgcaatgccttttttaatcagttcaagcacctaaaatattttttgaaaaaaggagagaaaatcagattgacctgtcaagcacaacctgccatagaatattaacctccaatgtgtagaagtagaactatataaaacttgcaaatcaaataaagacaactataaattataaataatggataaaattgaatttattatcttcaataatatatcattttttaaaaaacaagttaaataatctaactgcattatgttttctatactattgagggacaaagataataataaaaaaaaagggatggaaagagagaaccaattagaattcaatggtaaaactcaaggtataccttcaatgttattctccagcgactatgtttcaccttgaatttccaatattcatggtttacaaggacatactgcagagaaaaaacaactaatgcaagaacagtgtcattctcaaatcccgtttccatcagctgcattgtgaaatccagcactgcaacattttacatggcacatcacaacatgtactactttggtgtccacacaatataaagcatcattgacctgatcacatgaaacattaattgcatactcctacacatacctgctgtagttaagaagcagttattctcattctgctcacagtcaatcaatagcattgttgccaattttccagaaagcaaccacgatccgctagaaaaataaggtaatatacttagaccacaatctccattttataacacagattttacgtttaccaagacaaaggatacacatactgaaaataacatatatcatctgccactcacagggagcaaaaactaagaatttttaaccagatagaaaaatctatgaaaatacaaaagaaacaacacacaattgggaaccaatggagaaattaaatgtactgattaaataacatggaaataactaaactactgaactgcctgaagtagaattaacaaaaaaatgcaaatttcagaaaatggataaaataaagaataacgtaaatattgaactgttgaacttcctgaaatgaggaa

SEQ ID NO: 273148 - DNA, 1254 bp, Cannabis indica
ttttccttcatgctcatagtacttaaaataaacatttgtatttctttaatagattatgtctactctaatcaatatgttgaaaaaatgtgatgtaatttggtaactagaactattatttcttaaatatcaaatggtatttttgtttcaacatatataaactttgtagtgctttgtttatactatatatttcccatgtaagtttgcatagatttttctatttgtagtttgtagaggtgttttcgggtttcgttttagggttcgagtttttcaagcttaggttagagaaatgtgctactaaattttgtatgaattgtttcaaattttacatgagtgcgttcgagctaagatttaagttacgtttgagggatttatggatttgtgctgatagaatggatttttgcaagattacaaattttgactattaatgtatctgtatgataaatgcgtgacaatattattttatttatataaatattagttattttatttatcactaattgattttgcgatgaaattttccttatttttagaataacttttattttacttttcatattcttcgttctctcatctcttattacattacgagagctcgaaaacaccctaatataaacatgcctaatttagtttttgaattattcgaaattgtgagctcaaagagaaatttgtgataaaaaaataatttaagatcaattagtattataagaaggaaggttagtatgcttaaatgtaaaacatcttgttttaatataccactcaattagaaatagtatatatatttttaatatttttttcttctaaaaatgcgtttacattttaaaaatatctctcgctctaactctctcactctttggtgttaaccccgatccaaaactcctaccgtcgagcacacagacccagaaccccataccgcttgagtattctataaaaataaaaaaaaaacattaaaacaatataaaaatattatacaaataacaaaataacaagagtaaaaaaaatacacaaaaaactgtgttttatataaataaaatctaaaaaaatgtaaaattgttgaaaatttcatacaacccttttttttctaattttgttgttgtttttatatttttctaatttttgttgttgttgtttttgtcctctgtatggtttgaggaagaatctattgaacacttattcctctcgtgtgaggtggcgatgcatttgtggcgatcctcaccttggggaatttaccctatttgtgatgctggtattcgtgtc

SEQ ID NO: 273149 - DNA, 574 bp, Cannabis indica
tcatgttaacggtggccattgttgttgttttgcccggagtctaccgtgtgtagacaacacaactctgaacctccatcaaccacaaactcagagccacaactgcgtaaaattgactcgccgttaaacaaattttgacacttccacgaaccaggtatcgtcttcgccctactcctccacagtcaatggaccattgacctactcgaaccaggtatcgtcttcgccctactcgaagttcggtgaggcaaaatggacgacctactccaaacccccatgcaccattgacctgcaaagaaatcgaggaagaagagaagaactgtggtgatagacgattgggcataggtctgactgggaatggcagagtgcgaaatcaacgtttcaaggggtgctacatctagtggtggttctcgtttgggcgttacgatgccgaagatgcccacaatctggcttggagatctgatgatcttagagaatgtagagggaagaagaggcggaagaagatgatgtctgtagggtcggtttttggtggctggttggagaagatgaataaaaaaaagaaaatataaaataaaataaa

SEQ ID NO: 273150 - DNA, 1008 bp, Cannabis indica
cataaaacccaacaaaccatgcatagtagccacatctaaataatcattggctcctttttccaccatcaccacactagtcaccttattctcattattagttgaaccaaaacaactagcactcccatcccccacaaagccatgatccaaatcgagaccatcaacaatagttttggaaaaagaagtatccaaaacaggtagagagttcagatctgagcaataaatgcatccgagacgggatgccaatttactgaatcttccaccataatacccttgcctttccccaaaccatcattaacaaccgatttcaactcagcccctcctacagccgaccaccctccaatggctgaacagtcatgaggtcactcaccttccccacttgaaccaccgccccagaagccgatgcatttaatgcacagccccgaggacttttagaaacgtgcccattaaccttgttcgagaacaaaacccgaatccaatctccatattttaattgatccttgccaccaaccgaggttggatttaaaagacattctttaaaaggatgacccaaaataccacaaaattaacataaatctggaagtcgttcataccttagcagcatctgtaatagaggtttatccagtgccaaacgtcttctgatcacacgaacgaggggcttgtggacatcaacactaactcggaccttcataaacacccccgtacaaagcccattcggaccacacaacacatccaaaacctccccagccaattttcccaactcaaagccccatgcctttgtcatacaacacaccagcaccttatgaatctgaatccaaaatagagcgtaatcaaacaccatctttgtcggagccaaaacatcatctggttccttgagctccaagagacagtgtttaaatacccacgacccaccctctaggacccttttccgatccgtaatcaaatcaaaatgaaatacaaacatattcatacctcgagccttcaccgtaaaggacccctggattttccaga

SEQ ID NO: 273151 - DNA, 462 bp, Cannabis indica
acatacacatagtaactgtgagtcgacagactcagtaagaaaagtataatcgtaacataaatgtaaacaggattaagattaggcgcccatacccctaaccgtaacccttccccgcatccaacacggtactgagtcaagaacgttcaaacgatagtactagtgaccacaatatcagcctatactcgatacgctagtgtacactagccgtaccgatgtgaaacggtcaagtagtacagtattatcaactataatatcagcctatactcagtacgctagtcgtaccgatgtgttatgtcgagtagtacaaatgccaacatacatttatcgatatccaatataatattaaatatactcataccgttattgtaatgtaacctagcaggcataactaacatgtaaacacatatgcaaagcattatactaatcttacctttgttccgaatgcaagtatgctggtaaccc

SEQ ID NO: 273152 - DNA, 1472 bp, Cannabis indica
taaatttgactcgttgtcgttggctaaaagtgaggtcaacaatatcaaatgtcaaaacaactaaaaataagcagtagaatcttaaaagctccttgatcgaatttatgtaaataagtcctccaagaattcttatgttgcactgcatacaattaggccatgtggccaatgcataaagtagttatacctattttgttgcactacaattgcaagtgcatttgaagctttcccgtccttttcaggtaagaaaacatacaatcatttaattatatacttttacatataaatttgaatgggtagagtaattataaaaggcaataaagaaaatgaaaacaatatttaccttatattcttcaagatttccagtaaattttctatttggctattttctcttcttttaaatcactaatatataaagaagttatttcacttatatggacgataaatattacacttgcatatgaaatgagaaatggattgaaccaaacctttctttcttctgctttatctcacatctcgtcttgcttggatgaactctctattgaaatcaaaatgcaaacctcaacaattaaaaagtaaacatccgacgactaaaaattctacactcagcgactgaaaatgcaaatttcgattaaaaagtagtgattgaaaacctaaatcattctttatgcctttcctccaatcatttttacctccatccgacgactaaaatctagattgagaaattgcgactaaaaggagatgaagaacactttgtaaagatcaaactaagttctttctcagaggagtcatcttctatcgtagatcaatgaaaaatactctaggaattgttatagttgtcattgcaaggtgtggttacgggagaagagaattcatattttgaattcgttgatttcatatttagtatcgggttttaattaaaagttaaataagaatattttgttctgtcaaaatttcacagaaaaaaataatatcgttaaaccaagaattctgttacatagccatattttatattaaatagatataacaaaaagaatcttatagcacctaatatttactacacttattagtcataatcttcacaaatttttaatagtcatctatatatgtaatatgtttatatttatttgtaattatatcaattaattgccatcaaatttatttaaacaacaaacatattatgaatgatagttgtgttagattgatactctttatatctgagtcatttatataaatatattataacgttcgtatattataactaattacttaatcccacactttattttgaggtgtgtgatatctctatgtaatttgggatgtttaattgaattgtaaagtcaaaaggttaaatgcaaccgatgataattagtaatcgattgatatgtttagatcattgtatttatgttgaatattttattgtgaagcattatcacgagcattcttttcctgtagtaatgcgtgaattatatgaa

SEQ ID NO: 273153 - DNA, 630 bp, Cannabis indica
atatatataacagtatttgatatgtcgtaactagggatcgatgcacatttttcccatggggatgggggccctgcggggacccactcctaatgaggcggggatttcccgtctaaatgggaaacggggcggggatgtgaatcaaattttatccctgaatgttaaacggggcggggacggggatgacactccccacctcgaaggggacccgtttaatttattaattattttttattaatattttatattttatatatgtattttgtatttttttttagcatattgatattatttttacaatttttgaagttgtatttttgtataataattaatatattgaatagtaaataatatataaaattttattttttatgtaatttaagaattttatacatttaaatttttaaaataaactttatttttacaatagaggattccccgtcccatcctcgccccatttgggaattccctgtcccgtccccgatggggattaaaatccttaacggggatagagacgcggggagagcactcccgtccccgctaattccccgccccgtgtgcatccctagtcgtaacactgaaaattaatataccgtaggtttaaaattatataccaccaaaaattataacaat

SEQ ID NO: 273154 - DNA, 2742 bp, Cannabis indica
attacaacctatcttgaaactggagtactttcaagatcaaaatgaagcttagaagatgatgaggaaggttgtacagtatttgcaccttggtccctctttctgttggtagaacacgtgttaggtggaagtgggtttataaaatcaaagaaaaccctaatggaaccactcaaaaatataaagcaaggttattggcaaaggcgtaccattaacaaccaggctttgatttttctgagacattcaaccctgtggtgaaacccagaccaacagaatagttttaactttggctctctctaaaaggtggcatgttcatcaattagatgtcaaccattctttcctcaatggtggtttacttaaagaagtatatatgacccaaccatcaggttttgaagatccaactcaaccataaagcgtttgtaaataaataaagcgttttatggtttaaaataggcccttggggcctggtttgacaaattagcctatatatgttcttacatcctttttctttttctcctcaaaggtaggttaattaatgttttcaagcacattgtaagtaacactaccctaatttctatttatgtagatgatattttaataagagggaactctcgatctctcatatcaacattaatctcagatatgaatgagatttttgctctaaaacacttgggggaaatcaagtatttcttaggcattgatgtgctccatgcagtacatggcatacatctatctcagtcaaagtatctcaaagatttacttgctcgaaaaaaatggagtttgcaaagcctaattccactccaatgatcttgggtgtaagattgtttgcctatggcaatgaccttgtggaggatgcacagttctacaggtcaattgttggtagcctacaatatgctatagtgaccatacctaaaattatctattgtgttaacaaagtgtgtcaatttatgcacaatcctcttcaatctaattggactactataaaaaggattctcaaatatctatctggtacacttgattacagaatacacttagcaaattcagctcaattagacttggtaggattctgtgatgcagattggggtgctgatccagatgacagaagatcaacaagtgatttctgcatatactttggatccaatctcgtagcatgcaatccaaaaaagcagcaaacagtatcaagatcctctacaaagactgaatttagaagcttgacaagtatcacatcagagattaattggattctcttttagctgaactggaagtttccttgtcttccaaacctattattcggtgtgacaatcttagcactatacttatagcagctcattcaattttatatactcgaactaagcaaataaaacttgatctatcctttattcgagaaaagatgctcaacaggaatttgatgtgagacatgtactaattatagaccaacttgcaaattgcacactataagaaatatcacttttgccagcacatttttgtgctgacaaaagttggtattgcgttggtaaaatagaattcacttgtgatgtgttagcaaaagggggttgtcaaatcaatgttcatattaaaacttttaccagcataaaatgaaaagcgctggcaaaaatgacttttccttacgcgctggtaaaagttagattttagccactacaaatgtacgctggtaaaactttgacctctttgccagcgcagtttgcgaaatgtactggtaaaagttatttttaccaatacagtagcgaactgtgctggtaaaagtgacatttcttgtagtgttgcttaactaaacccatttcaagctcagtgttcccaattttgagagacaagttaaagttgaaatttttttctaaatttgagtttgaggggggttgttaaagaataacctttagttattttctttttactgttgagttaagttgctatatctttagttagttggttgtaacatctcaattgagctcttatgcataaattgagttgcaagaattgaatagcaaagatcattttctttcatttcttctctcaagaatcttaacatgtattaataataaatttgaagaataatgtaataattaagaatcatgagcctcaaatcaattcgatgactccttagaaaaaaagagaaaatgaattcgttgcatgcatgatatgcatttattattcctctttttgccaaataaataatgcatacaatgagtacgaacccaataatgtaaaggcaagcttactttggctggccgttaaaagaagatggatgtccttcccaaaaactatttatattttatattcctcaaatgaaagccatttatttgtttttaattagttaattttattttgatctaaactaagatatggtctacgtcgtcaaaatggcaaggtctatatgaggtccctacatcctaataatcctaagtgtgatcggatttcggtctcaacaggtaagggctgttaggtcctttttgggtctacttatatactctatctactgtctaggtttttaaaacctatgatttatacaagattaaaaacacacacaaaactaggcatacgtagtctattattatgggccatgtaaatattaattagtactctattattaaacaaagaatcggagattattggcttataagctttcttaccaaaaactgaagtagtaaaaaaattaacagcgtgtactgtaagttagtttgctatatgtttagaaaatgacactccattgactttgtcaaatatatatatata

SEQ ID NO: 273155 - DNA, 1285 bp, Cannabis indica
acatagctagattcacacaaaactaattttgtaagtatcacatacttttactctttttcttcaaaagaaaagggatttttttgactagttgagaaactagtaaatagaaattactcatttgattaaacttgttgtctctatggttaaattccagttttatttttctaatcaatactggcctttatttaagtataatttagaattaagtataacaataatattatagtgaatcataaacatcactttcacattagcttataaatataaatgtgctgttttgtttctaaaaatgaatcaaaagcaaaagaataatgagtatttttttggggcatggctccctaaagaagtgatattcctcctatttcagaggagaaaggctacttagtttgagagtggactgtttctggtttgctacttagttagagctctccctagtaacatatgagtactaatctcttggactgtggaataattcaagtgagtgttggcttgtgttttcgtgttgagcccaattcgtttatgtttgatgcagataagtctctaactttaaaaattggcaataaaatccgttagtccttaagttaattattcagtttgttcttttaaaaatgaaagtattatcagccaaaattataattttaattaaaaataattttaaaataaaaagaataattaaaaatctactcataaagatcttgtagatctcattgttggtttcttcatgtctcgttgtcaatcgtagatggccatcgtgcgcggtgaatcttcggtgatctcagattggtggtctaagcttgaaatgtgctctcatgttggaggggttaaaattccaagcaataagaggattgctttctttgtccaattcattaatggaatgaaaaagagtcagacaaagaaaaaacaatggaaagaaaaaagaaaaaaaaatgaaaaaatataatgtttttattttttaaattatgttttggaccaataatattttaacatatgtgtcatttgtgtaaggatcaaactgatgagttaacttagggactaacagacttaaaaaaaattgtgaccttgggaattttaatgccaatttttgaggttggggacttatttatatcaaacataagttaaacataaatttttaggacttatgttgcaaatttccctttatgttataatggattaatgaagttgtacagttcaaatctcaaaaaactaaaatgaggatttctcaaagaatcgaaaaactattttgcagatcaataagaagggcaaagattctagatcttaacataaa

SEQ ID NO: 273156 - DNA, 606 bp, Cannabis indica
aagatcaaaaaagctgtaagttttaattattaattacagtatttattataataacaaatatataatatacatatatatcaactaatataaattttaatttttttaacagtttgggggtaagaagcaatacgatccaaaaactgaattgttaccattacagcgaaagtggatagaacgattgatggcgctgattcacgatgacgagtgaggttgaaaggcccaagaatttttcttcattatgtaattttttagattaacttgtagttagatttattaacttattaatattttggactaattttacattaatgttggtgtaatatttaattacttttatgaaataaaaattaaataaaataataaataaattaataaatatataattaaaataaattatataaaattaaaaaaaactgaaaactgcttatttttcgtgtcggttcctacgacccctatggcgtcggttattatctaggaaccgacggcatatatacccctatggcgttggttcctagaatgtaaataataataataataataataataataaaagggttatttgcggcaaaacctccttaggtggtcaggtttttgcaactaaccccc

SEQ ID NO: 273157 - DNA, 1867 bp, Cannabis indica
tacatttttatttttttttttttttttttcagaaccctaatttcgaatttcgaattttgaatcacaatgctctgataccatgtagaaaatagtgaatcgaattatatgtgtatttcatagaatagtacatatttatatacaaagctaggagactaggaaataggaaactaccaacaaaataggaaactactaaatacaagttaccctaattcttttacacctaatatacagctaatactctaacaattttcaatagtttctttattactccccttacatccacaaatttaagctatttttatttttaattttttaacagagaaagaaatgaagagtttgtggtaagggcatatagaggtggtacaaaaaagcaactcacaaatcaactatgtcatcttggcaacgatatctttctgtcaaagaaagttttccatccaggtaatgcctgcttccctttctattataaattagtaatttatggccataaaaataataataaaagcatagagatatgtttagtcttaaaataataaaaacatgttttggagtataactgaagcatagccattgatttagatatgatttggagtatattgtaataatataattgtatcagatcatttaatttttatggtatttgtgttttcattgtacttgggttggctcaatttttttgattatttctttcattcttgttgtggtgaatcctcaccctcaaaactggttgtcacagcttcaagaaacacaattcaaaactaaaaccaatcacaaaatcaaaacttgaacttaattgaaataagacaaaaaaacttaacttgataatgaatgaatgatggatctttattgaataggaatagtcagtagtttacaatagaatgagcccaagattacaactcaacatagtaaagtattacaaagaaatgcctcacattgagggaaatcacttcaagagtgatactcccttttacatccctccacacacactcactatgatctcggactctctgctctctcaactgaatctgaagtatgagctttggagattagagatcagaactctctttgtgaatagaggaaccctatatatagttgctgatgagtccctttaagttggtattaaaccaactgtataatagtagcaacttttttcagtattcatctgatgagcaaaaagatggacatactgacttgacaagttgagtgagtttacgtcccaacatttcttttttgcctaaaatttttctttttgagctggactgatttgggagttcagaaatgcatatgtatatttattttttttttcatgaacaatttgaacactgaactatgaggaacttaaaatcaatgtcttagtttacgaattttgttggaaaggaagttttgaaagctcggccatttattatgtgggggtctcatcacaatgcaattgtagctttaaagaggttagaaaagagttttaggacatgctacaatttgatatttgatcttttccttttctgattaaataagttttctagaataaagtcaaagatatttcagtttgatcaagtgaaattcacaactatatattatatacatatgccatttataatataccaaaaggggggtgaaacactaccttatttgccacattttatcaaattttgggttgagtcttgtcatgtctatttttgatttcaaggatgaagagttaacaataagaacatgtctaacacaatttttcaccatgtttaggaaatgttttgaagatggtctgtcacagaatgtgtcaatgaatgatgcttctgtcactactacatcttctaccccttatacgcctccaccgaatgcaggttctctttctctctctctctctcgctctatataa

SEQ ID NO: 273158 - DNA, 641 bp, Cannabis indica
cctatgggggatactaccctacagggataccagggtatgtacccggagctcagctctcgggaactttaccagcagcaactccaccgatgagcggcatacaatttttcgctaccccaggatataatcagggtcaggccttagcccctgcatcttctccttatgggaatccttctgggataagtggacaagtcccgtctcactccgctccaaccgcaagcttagcaggtccctctcaaggctcccggagcaagaggtgctcaaaaggcagcaaccagacggaggataagcggcagaaaagggggtacactccccagtacacccagtacacggagctaacggactcccaggagcgtgtgtatttcgctactaggcaaaatacgcaaccggagaccgcctcctctgtacaaggatagctcccgaagggatcccaacaaaagatgtgagtatcacaacgacattggacatagcaccaatgaaagcaaaaacctcaaggacgagatcgaaaacttgattcgattgggtcatctttacgaatggatcaaaaaccagttgcctcatctcaatccggttctggcagcaggacctttgccccaaggaacaccagggggtgcaaccggagcgttggcaccagtcgctcccct

SEQ ID NO: 273159 - DNA, 1950 bp, Cannabis indica
cactcagatatacatcttcttgtagttactcaatcctcttttagtggaaaattacaagtgatatggttaatgttcatgttcacatacgattttgaataagtataaataattgtttatatttaaaatacaagggtctttgacttggttagactatgttgtttgggagcagatgcatacctagttatgtaatacaagtagatgcataactgatgtgcaatacaagatgcatagctgagtgtgtaatacaatcgcatagttgagtgtgtataatacgagaagatgtataactaagtgtatatacgagctcagagaggcatagctgagtgtgtaatacgaggagatgcatagttgagtgtgtaatatgataagatgcatagctgagtgtgtaatacaagaagatgtatatctgagtgtataatacgagacagtgtataactgagtgtgtaatacgaggagatgcatagctgagtgtgaaatacaaggaattcataaatgagtgtgtaatacaagcaaatatatagctgagtgtgtaatataagcagatgcataactgagtgtgatacgagctaatgcatgtattatgagtatacgcatagttgagcgtataatacaaacagatgcataactgatgagtgtgtattatgaggagatacaagacttttgtattatgaccaggtacatgatccttgtatttcaacccgttacaagatcattgttgcgagatattaaatgttcatcgaaataacattccgacaacgctaaattttttttttattattatataatttatattttaagagaaaattttaataagtcatatattttaagggatcagatagtatcaaaagtttataggacaaaaatactaattattttttatttatttttttctattttttttgtatattattttatattttaaaataatatagatcacttaaattttatctcgtgtatacgtatgtatataccggtacactttagcatttaacaataaataatggaactaaataacataagagtgatgttgagagaatattgcctcaaaaaatattttgtggaattaaatgttacaaatagttcaattagtttaattgtgaatatctctatataataataataattataataatacaattaatttgatttatatttaataagtaattctaatattacgtaccttacaacatgtttaaggtcttcttggtatgttgattgtacaacgttaaaatctagtttagcaagttgaagaaaagttgaattcatatgatgatgatgagacatttcagcatacatatcaataaaccaccttgcctccaaccttttcattctccaatgcactggaagctccaaagcatgctccactaatttcaccattaaatcatcatcatcatcatggtcaacatattgaccttgcctcgtcatcatcaagtattgtttgagatgtttggttgtgaaatctcttgcttcatctaatatgggttcacccctaaatgaatagaatgaagcctcatatagacataccattcctttcacatccttacttaaattctccttgaactcctttttctcgtctttgaaaacattgaaaacctctgtaaaatagaaaatatatgaaaattacataaaatatagctttcctataaatcactatataaaaatatatttatatatacctgaagatacaggactgaatccatattgtctaaggagtttgaaatgaagagcagtggcatacagattatctttcttccacaatgcattattattgttaaatgtcaggtttaatattgtcttaatttgatcttcaaagtgataagatattccaagtctgctcaaatcattgatctgttcaagcttaactaaaggattttcagcctccttctcaagaattcttctcacatcttctttcagctcattgattcttttcccatagctttcctcctatat

SEQ ID NO: 273160 - DNA, 3088 bp, Cannabis indica
tttttaattttatatttatttttttaattttaaactttaattttttttgaaaaaatattaaaaaattaataagtgatttcttttaatttataaaattttaaaatacatatattaaaaataaaaattaaaaatataactaaatatacgtgcaatgcactagcctattttaaaaatgtaacgtatacatatttctaatgatgtttacatttttaccatctaaaaatatactttttttctactcttttttttatactaggcttattagactcaaagttcataatttcttttaaaaaaagtacggtttaaactaaaagaccacacccctttttcttcttcgttcccaattgcacgagagcataaatttctcttctatttttgttctgtgcaataacaaagctacaatgtagatctcaataacataacgatctaatcctaacaaatctaaaattaaaaggtaagcaaaaagaaaaaacacagaaatttctaactccattaattcaaaagaaaataattgaaaagcaacaattcaaattatagtgtgcaaaatttttgataataacacaattaaaagagaatcgaagcttacccaaaatcaatttggaagaatttgacaaaaaatataaggtaccaacatttcaactgtctttctttataattaagttgttatttagtgtttctcaatcagaccaaacatcattcatagtgtaaatttgttgatctgaagaaatgtatgcaactaatttataattaaacaactattgatacatttaaggtcatttactgttagttgtcataaaataattgtttatacgtttgtttttgtagattaaaaaagttgtttagaaatattgatacaaaatattccgaacaaataaaataatttcaaaatataaaacctctgtaaatagtggtacaaattaatggttattgggatgacaacaaacactatgttaattacgaatcaagtgaacaattaatatcaaaagatttcgttatgctgaactagtaaaaataatgttccaagaactacactgcaatcctgaaacaacttaaatacaactgaaatactaactaacggaaggttgtcaaccactctaaatcaaagattacaaaagtatgttgttttacataaatctattattaaccaaggaaattgattcacttgaaatccattgtatgtgaacaccttcaacaatacaaaaacaacaagaatacaatctttttttgcagctacccaagtaatagtttgcaacagtgtgataataattagaagtgaccatcactcaagatactcaactgtacagcaacctgacaacagcacaacaacaacaacagcaacaacaaaataactttaatttgctcaaaggcggggactagtttcaagtaatgttattttggttgatactggtactttaacagtggaatcaaccatacaacaagaaaagaactaaaagcaaacgccaaaagaagcaagtgaatattttgactttactgactatacgaggcttgttgctacaaaaattgtagagaaactacaaaacaaccagaaagaagacgaagaagttgacaacacatagatgtttatcatcacagatccacgtcacggaacgatagaaaaaggacagatatacaaagacaaagatacattgataaataccttatacttctttgcgataaagaaaacctttcgttaatatcaagcgttgaaatcatactctaaagaataaaatattgtttgtttggactcaaattgcaagtggagtttaaagacttctaaaaatgggaacttgcaaacattcataataagaagttatgaacaagaacatgggtgcatacctatcaaattcagggatcaacgacaagtaaccacaaaatttatagcaaattgcgtacaagcaaagttcctcagcctgaaaacaaagtgcaatccaactaatataaaaggtgaactgaaagatagatatagagtaaagatgaactacatgaaggtatgagatagtagggaacacgcactaaatgagctatgtggaaacgcaaaagaatctgcctcttgccaaaatacttgtacatgctaaaaaaaaccctaaaacaataattgacattgaaaagaaggaaaataatagtttccaatatgtttttgctgcaatgaatgcagctctgagggttggccaaattgcacccataatggttgtcgacggcacatctaatttagagaagcattcagagtttgagaagatcaatgtttaattttagactgacatgaaaccatcctcaaagcaaccagaaaggtgttcccataaataacacatgggtatttcatcttccacctcttgtccaacctcaaaaccaaagtcaataaaaaaaaatacaaagcattacagcttaccattcttcgcagcagcacttacaccgaaatagagtttgaattgttgtgaatttacaaggattcttatgattctaacattacattaatgcagtatgaacacatataaagatcaacaacaatgagaataacaacaaaaaggttaaatcaacaataatatcataagaacattaacaatctcttattatgaacaacaagactaattcaaaaaaaaataactaagaataaaaaactaacacaagtagcataaagaatagttagaaaacatcaccattgatttctagaatcaatctttgatcaaagaaggcttgtcgggttagattaacgcctatccaaaaaatctttactccaaccctccaataattgttaatggcttctctaatggaataagatctgggacttcaaagatctatttggcttcataacttaaaaactattttcaatagtttttaagaactaataggagttatttggccaaattttcttaaaacagttttttaaaaatagagttttaataaactgaaaaacaaaaagcatctaaatgtagttttcaattttcaaaaacaattttttttgtttaacatattatattttacatttttgctcacatacacggaccctggacccagaccatggaatcgggacccggaccagacccgaaccctagaccccgacgcccgaccccaaattgggacccagacctgg

SEQ ID NO: 273161 - DNA, 1511 bp, Cannabis indica
gtttactaaggtaatttatagtcttcttagatatataaataattaacctcaattacatgaaaattttctactctcgtgataaattaaacatgtaacaggcattaaacacagaaactctataagctatccaaaccatataggtactcttgtcctatatcgaaatttagttttatttcactatagcataatcgacactcaattctcagatctcgcatcaaaatcatagacatttaattggtgatcatgcaattaaaagtaattaactacgaatgaaatagaatacatagaaattgagagaaaattaaatcatattaaaaccacatatcaataacaaacaatctccatctagaccttaaagaattgtttagctactcatgttcattgtagcaaattcgcacatattaatttcagaaaagagaagaaaagaatgctgaaaaatcctctgaaaaatacctacagtattgaattcaatctcccaaattcgtactccattgactgcttttgatttcctttttaattgcttgtcgaaattaactgaagttcacttcttatatagccaatgagaaatgaaaaagatagcataagatagcacatgcagaaaacctattcagcttcgaattagataggaaagataagcccgcgctaaaagtcctatttctctttgaattaggagggcaggccgcggcatgctctccttatgctgtgacccgtgttgagttttcacacgcggattcaagcttaatttgacacgagccgtggcatgctctttttcatgctgcggcatggtcctcatcttgtggacacttattctttatttgatctttttatcttctttatttcatctttttctttcgatattttttatgcttcttttattttaaatttgcaaaaataaaaaataaaaaacgtaaaattactctaaacacgagtaaaaataaattaaaaatacattaaaatcaatctaaaaataatactagaaacaacctaacacattattataagacattagtggtgtctaatatatactttcatggggtaggaccttacaaatagttaacgatagtattccataaatattattattttaaattatatggaatttaatactggtaaaacatcttaagtggtgttaggccatattagtgtcttattattgcattttgtaggattcccatattttatactttcttagagatacaatagtttgtaaatataagatttatatccataatttagaaataagtattttgagttttctaggagctagtgtttaaatttttttgtttattaatcacataagctgtgacattgtagtgtttcacacagtaaaaataccttataatattttttttgacatatactgattagaatcactcatgaatttacgatgcaaatatctacatacagtgcagaaacctccttgaacctgaatagcttatcgtctaaatcgaagaacatactttatcaaaccaaaaattaataccttaatttcaatattaatttctcatata

SEQ ID NO: 273162 - DNA, 2033 bp, Cannabis indica
aaaaaattgaaaagtgaaaacagttttatagaacatgtttttgaaaaatatttccacttttccaattttaaaaacagaaaactaattaaaaaagtgttaccaagccaccttagtttttacgattctaacaaacatttcttgttattcatgcagattctcaagtaccttacaaagtctttcaacttgagcaactcaacagacaaccagggcaacacagctcttcatgtggctgcatacagaggccaactagctgcagttgaagctctcataacagcttcaccctcatcaattcaccagaagaacaacgcgggcgaaactttcctccacaaggcggtatctggcttccaaactctggcctttaggagattagacagacaaattgagctgctgagacaattagttagtggtaaagctttcaacatcaagaacattatcaatgccaagaacaacgaaaaccgaactgctcttcatgtcgccatcattggcaatgctcattcagatcttgtgcagcttctaatgacagctgaatcaatagatgtgaatgtcactgacattgatggcatgacaccacttgattacctaagacaaagaccaccttcagcttcatctgatatactcataagacagttaatctcagctggtgggatttttggttgtcaaaattacaatgctagaaaagtcattgtctcacgtttgaagatgcaaagcaatggaaacagcagccctggatcatcatttcgaatctcggatacagaaatattcttgtacacaggaattgagaatgcatcagatggtagtggtggtggtggtgatcatgttattagtccagtaattagtgcagcagtttcaattgatctaactagtccatatgattactctgccaatgagaacaaccgtagctcattcactagtagtagtgccaagacaagttcagtaaacaatgcaacagttcagctattgaaacaagtcctacattggcctaagatcaaagacagaacaagaagaaagcctcaaaaagtgaagaaatcagttgataatgatgatgatgatgaagaagcaaacaattcagataatgctgcagcaccaaccccactcaggaagagattttctaagcaacaacaacaacaaataacaaaagggcactttctgtgaggagtaaccaatcaagtccatcagcaaagaagaaacttgcttctggtataaggcatggtgttatgcaagcagtaccacagataacagttccaattccacaccgatcatctcggtctagttcattctccaaatcttcaatctcatctccaacttcattggacaaacaaaagggtgtctttactgagaatgatgacatagctggaccttcttgctcaagctcaactcaagtacatgacaatgacaatgacaatccaagtttgattaagcaaggaaataatcatgttcaccatagtcatagcaaaaggttgaagagtccttacttttgttttgggacagctggtgtgtctgttaaaagcccagttagtactactatgcatagttacaaacgccctgttcctttagtggcatgaatgatttagtgtcaaactgttttgggactagaaatatttaaggtgtagcatcatcagcttggaacactactaatgcaagcaaaatccattaataggcatatttgagaagatcagtactcagtagttgtttttatttaaggtttgtttttattattaattatgtagaaatggtcaagtactatttggcctgtactactatcttatcttgtgtgaacttccttaatgtttaattaataaagaatgggctaaagctgtatatattatgctcatatttgattcatgattatggtttagattctgataatcttcatagagtttttttttttttttccagcatggttgtactttaaatttattaagattagcataatagtccctgagtttataaattgtagcaactaaatccacccctcccccttaacttcaacatatttaccaaattgcacattgtacttaaattttctttcattt

SEQ ID NO: 273163 - DNA, 983 bp, Cannabis indica
agctcattcgagctaatatggtaccaaagctagcaagctcttcttcctgattttggatttggtttgttgttgatgtgtaatggcacgaggtggaggaaatcaagcacgaggaggagtttatactcgtgctaattgtgaatctgaaaacaattctaatgactcgaacatattctctgttcttggagaaaattctcgatcgactaatgctaatgatctgtcgaatccatactttctctccaatagtgacaatttaggtattgtttttgttcctaaaattctcaaaggcagtgaaaattacagtaccgggagaagagcaatgctaattgctctggttgctcgaaataagattaaatttgtcaatagaaagcttcctcaacctgatgaggatcatgaaaactatgatagctggtgtagatgaaataacactgtcatttcttggatacttcatgctctctctgatgaaattgcagatatagaaaaatcacacttggattgttgtctccctacctgcatatcagcatgtcattggctgcaaataggtctataagatgaaaattaatactgatgggagcaaagaccttatgcattacaagtgttagaagaccttaaatattcaaaaagtaagcctatgaatacaccaatggaagccaatctcaaacttggccaagatgaaaaagagaagtcggctgatccaacactgtatagaaagattgttgggaaacttcaatacctaacaatcactagaccagacatttcttactccgtgaacaaactgagtcagtttttatccacaccttgagtcacacatatgcatgcaactcaaagggttctacaacatgttaaaagcttcccggacaggaatcttcttgctgcaaacacagaagttaaattacacgcctatactgactcaaattgggtagtatccccaaatacaaggagatcaactacttgttctgtatctttgttggatcatctatcatctc

SEQ ID NO: 273164 - DNA, 1601 bp, Cannabis indica
ggcaagacactagtactagctttgtgttggcaccgtaacatgctaactgtatattccaggtgggatgatcccaactactccatactctgtggtaagtcaccatttagcgggatgatgggttatcatacccataggtaaggacaaggggaatgtcgcacgtggctgaagattgtatcaattagaaggacatagtcattcacgaggattctttgtttggctttttgttgttaataaagttgtttccactattattgttgttggtcctctttccattgttaaatccatttttattattactctcctgaccctgggagccttggccactagtgcttgctccgttcttatttcccttagcttggttgaggcctttggcgttccattcagccacttctagtttaatgaactcatcagctctgtcaaggaagtctctcatagtatgggttggtttctgccttatatccttcgatatctgacttcccaccaaaatggcccccatgatggcggcccgcttgcaatcatcgctcagactttttactttggttgcctcttgcataaagcgttgaatgtagtcttttagtggctcatcacgattctgcatgatggcgaccaagtcacccaactcttttggtatttgtcgagctgaagagaattgggtatagaataacccttcaaactcatcctaagaagtgattctccttgggggtagtttagtaaaccactgttgcgccgtgtccgtgagggttgaagggaagattcgacacctaaggtcatcccagattcctagaaggtccatttggattttgaagttctccacatgagttagtgggtcttcactatccgtgtacttccaagtgggcatcttaaactttgttggaatagggaggtcattgatcatttgggaaaaggcagaccctctccacctttccagatccaagtcagtgggttttggtgcagtaaggtccttgaccaatcgggttagctcgtccaaccaagcttggatcactggatctgtgactgtttgaggttgagcaatattaacgccagcattcgcttggtctctttgaaccggctcagatggatttactatgttggaaccacgattttccctatttctgttgaaagcgtcccgtaggtctcctacctcctcgggggcctacccgttcaaaaattgaccccgttcttagccttcctccggcatcctgactgtcagccctaccatcaactgggggtggtactgggtcattcctacccctttggggcggattctcaggttgatgttgcctattaggggcatacagccatccagcttgataacccctagcttaggatttggttggttgttagcccgactttcagcttcatcattaccatgaccgtcagggtagtttggatggtagtcactgttgacctcagggtcttctcttctcccccctggacctactatttcttgggggatcatcgccatctcgtggttggccgcgttggtcgcagggttgacattccctacgttggggcatccttccaccatttctgctacggtcaccattgttgttcttagagtttcctccatcactctgccttagacggacattatgggagtc

SEQ ID NO: 273165 - DNA, 4221 bp, Cannabis indica
actgtttgaacgtagtttttggcagattaaacttttctaaatttcttaaaattttacaggttgtcttaaataactataacatacatgaccatgagaaaaattttgactaaaaaattatttcgggtgctaaaacagataggagtacatcaatatatccattttaaagagttgcatttttagaattttccttagttttattacataagaaaaagggaattattggtatttttgaaaatttctcatgtaaatgaaatggaatgggctcatgagaaagaggatgagcccatgcccgtgcccatgtgtatgtatgtaattgaattgtaactgtcttagactgactgtgtaactaaggtggcttttggaaaagcgaccattacatttgaaccaccgccaccgccaccgtcgccggtataggggagcgtctcttttgtttttccgggatggggatcaggggagtggggttgcttcggttttcccaactcccaaatcatttccactagaacataaaggtatacttttctcttttcctctctctccctttcactttgtcattttgaattttcacaaagttaaaatcaaaatcccaaatttccctatatcataattaattataagccttaacgctctctcccaggctctcaaactccatgaataacaagactcgtagtatgttgttgcattgttaattgctttctcaagcctccatggataacattgtttgtttataccatccaccatctttattctttaatgcatgcttacgttttcaccaactatgggtttttcattattttattctattaaacttagttttttttttgttttgttatgctttttagagtttggttttttattttataggtgttactcactgattcttttattgcttttgtgtaaaatagtattataggaaatgaaggaaacttacgcacttggatttggatttgacttctacttaggatggagaggagagagagagctatgaataatgaatatgaaatgaattagctcttgctctgctgtttcaaactgtaagaatttggtgcatttcccattatgtgcatgcatacatatgtttcttttctttcacttactactgatagtaaatagcaatacattgcattacattacatggtcaaatcaaatcgtgttgcatactacagtactcctagtttgatcaacttctcttgtacaatgtattcatttggtcaccaacctattaatttgttttattcgaatttttatctatgtaatgtattctaatttgctacacatttcgccttacaatttcctcctcttatcctctcatgtcttgttagttttccatcttgcgagttgggattgttagaaaatctaaatctgataatgcttctgaagtgagcttttaaacgatgattgttaaaaaatggagtttaaaagtctaatttcaaggggggcttttcataattttaagttgcttgtatggaacttgatcctagaagtatatataaagttggttcttaatctacttctattggcttcttttgtagtatgaatgaaagctgatggtgatgaatatgaagactacacctacaaccattaaccatgaccatagcctcttaagatcccgaagccgtcgatggcgccagagcagcatgggaactgctgtcgtggctgttgcagcactcctaattgccaccactgcttggctttctcttgttttctctggcaccaccacccgctgttggcaccgctttaaggactgggaagccactcctcattctcttctttggaacaaacgacattatgatgtaatctctctattgcctccgcctctactgccatccccacctccgcctccacctcctcccccatatccagaactcacccttaagcacattgtctttggcattgctggttcatcacaactttggaaacgtcgcaaggaatatgtgaggctatggtggcgacccaacgatatgcgtggccatgtatggttggaagaggctgtgccctctgaagacagtgatgatttattgcccccaataatggtatctgaagacatctctcgctttcgttacaccaaccccactggccacccttctggactaagaatctctcgaattgtggctgagtgctttcgcctcaaattgcctcatgtccgttggtttgttttgtctgatgatgataccatctttaatgtcgacaacctcgtcacagttcttcgcaagtatgatccctctgagatggtttacataggcaacccttccgagagtcattcagccaattcttacttcagtcattcgatggcttttggtggaggaggagttgctattagctaccctttggccaaagcgctttcccgcattcaagatgattgcttagagagatatccaaagctgtatgggagtgatgacaggcttcatgcatgcatcaccgagctaggaatacctttgactagagaacctggattccaccaggtacatatctcccatccatttttctctttttctttttgtttaggaagatgagtaaagttaagtttgttgttgtttgttttgttttgcactaccttaattatgatagaagtcttgaatttggctttgttttgctatttttcttttggagccagtgggatattagaggcaatgcacacggtcttttatcctcccatcccattgcaccatttctatcaattcatcatgttgaagcagtcgaccctttctacccaggcttgagctctttggagagtttgaagctttttacaaaggctatgaacgttgaccctactagcttcttacaacgatcaatttgctatgatcatggtcgccgccttacttttgcagtctcgcttggttatgttgttcaagtgttccccaacatcgtgcttcctcgtgagttagaacgctctgaacaaactttttctgcttggaatggaataaggcatagaaatgagtttgattttgacaccagagatccgtacaagtctatttgtaagaagcctatactttttttcttaaaagatgctggaagggaaggtaatttttcagtaggttcatatgctcgtgctagaggcaaagatgatttaaaaaagaagtttctttgctttcctcatttgctcgcttttcgccatgtgcaaagaattcgtgtcctggggcatccgctaaccaagaaatggcatttggtacgttcttgctcctttagttttctcatctgaagtgattcactttttttggtatacaacgtaggatcaagagagtagacaaaagatttgttgatagaatacaactctagattctagatgaaaattcatcatatcaagtcgtagaaatgaaaataaataaaaataacataatgaatagaataatcttctaaactagataaaaattcctaagattattacaaattatgctagtcattcatcaaataataataatccaaaattgtgaggtgttctagagcttgaccttggacagttaaaacatttaaatattataaagaagcaatgtgaacctttgaaacatttccagcactaatgtggatgcttgaagaagaggtagctagtaattatgatcgatgttaaccttgacaatccgaccacagactactttcttttttgcacaagactcataagggaaacgaatgtggagaagtatgagagattatagagtgaggaattttaagaaaatagaagagatagaatcaataaatgagatttgatataagaaacagaacaataataaatagtgctcaagactttaaaaacagtgatcaagtaagcaaataaaagaactagtgtagtaagaaaagtaattagaacaatgtgtaaaaatgatcatattattactattttgttgttggttttataataatgtccttgaatttgaacatgaacatgaacaggtacctcgcaggttatgctgcaaagtgaaccaaggcagtgaagaaatattaaccttaagtgtagggcaatgtagaaaaggatcttcgggttctgttgctgattctatgtgaaaatcatcatatatgttcttactcttactctgacccttccaaaaatagatttgaggatatatgttgttaattgcagatagtaagtgtactgtagtgtagagtgatatgtactacttgttaaaattgattaatatgaaaacgagctgagcagaggagttgacattcattcattttgttcaataggaattgcaaaaaagtgagaatgctttgttgttggatttgtgggct

SEQ ID NO: 273166 - DNA, 661 bp, Cannabis indica
gatgaacaaagtatgaacacccataaacgatttaaacagtaaagcgataaaaacaataccaggatatatactagttcaagtctgatagatcgatgtgatttatggttctactccagttttagtacaccaccaaatcctatttattgattgaacaagaacaagtttgataaagtcgaggaagatcctctgttgagttctctcaaagtgttttaactctcatactcttactcaagaatcttcttcatctacagaagattcttcatacaaaactaaaacccaatctctctctttcctatgtacctctctctacctctcaatctctttctctctcaaactcaaagtctcctcttgaaacttgtcaatccaaatcttgtagaaatggtacgtgtttgtggtatctacaggctcatgatcaagatcccaaagttggtgagtgcaagaaactaagttgttaagttagttacgccaataacaaatttaacaacctcctcgtaacagaatttgcacgttcgcttaagtgtaagtgcatctgggaacatatatgtgagctttcgggatcacaaacaaaagcacttcctgaaagggcttccagataggaaagagccagctggagtcgactatccaaaactatattctaagaggaactgctagccatctggaa

SEQ ID NO: 273167 - DNA, 966 bp, Cannabis indica
taatcaggtattaactaattgtagagccaactaaaaatcaattcatgttgtcattcttaatttccacgaatgttgggaactaatgtgtgacatggaacattttggaatggcgattgtttttactcgaaataccaacattttctcttgcaggaagattacatcttgaagcagcttatgagatccatgcatgctttggattttgttgagctcatgattgaagttgattgatgtaatatttaggttttcttcttctaacatgaaaccttctgcttagctttcgttttaaagaaacagtaatttaattccatagcctttttttaaattgttataagttggaactaaggtatgttaggaatgaaaataagaatataaacaaattggaatataatttaataagtaaaaagaaagttgataatttcttttagttgtctaatataatggcctttctgtgactttttgaagaaatgaccattcaactgaaaaatagtaggaaaattataatattaaaatgacattacagctaaaagaattcgaagtagtttttctttcgatgcctcttaactaatcagatctaaaatgtattctatttatgtattaaaagatgattgagtggagttaagacaaaaaaaaaaaaagatttgagtaggaaaaatgtgttcttgcattgttaaaaaagaaatttttatttttaggtttttgaggcacaagttttcgaaatgtgtatttttagttggttttttttttttttttttacttttaaaattagttttttttttttttttactagtaattttatacagaaatttttatagcaactaacagagcaaattaaattgtaattaaaattcatttagcaactcagatagaaatcataagagaaactatcaaagcaattcaaatcgtaaatttttttttttaaaaaaaatttaaaaaaattaaagttataattaaagtaaattcttaccg

SEQ ID NO: 273168 - DNA, 1194 bp, Cannabis indica
aaaataattccaacatataagtggttgaattagaaattatggcatttgtgaaagaataggataaatagttaaaaaaatagcaaaattgtaagtggtgagcccacatcctatggccggccactagtgctttattttaccatttatttatcaattttttaatgacaaataatgcaaacctaaacctagaaggattcatataaataaatagtgatggactcaaaactgacagcattagcattcactagcctttagtcaaattttgagccttctgtctctctccatttttgaatccttctctctctctttctctcttcaatttcgaacccttatagtgatagagtacatgtcgacgcatagcaagttggtactcaatcatagtgtgtaagattgtaaagaatccaatcaattgaaggagaatcgggctcagatcttggtgatactctgctacaaaaagtatacaagggttagaaatctgagattcatttaattctgctgcaaccaatgtaaggtttctcgaactttatatgtgtttaaattctattgttttagaaattcatatttaggatgttaaacaacatacatgatagtaaatctagatcatggtaaataattcccaacaaagaactctctgaaaaaatatgaatttggccctctaaataatagaatggattcactatttatagaaaaaatacaataaatattgttacccaaaataataggaaaagaaataggaaactaaacattaattctctagaatctctcgactgtacaaaattgatcccataaatgtaggtatttaatcatgctacaaatgtggagatatttaaaaaaaatatcttagagaatctgtattcgccgagtccttctacgtgaaggattctgcttcgctggctggcgacgttctgctcggaacatcacgcacaggtcttgtctgaatgttgtccaatagagacttagacttaacaagttttgagcataaacccttctggacgcaacatcagggaaatatgacctgtccaagtcttgaactgatctccacgtgtcacccctaccacatgtcacgtcacactgtacaaaaattgggataacataatcaaatacagtcaacaagataatgcaaaatgaatttgaataattttgtactaatattagaaatattctaatacacagacccatgcaaaaaaaaaaaaaaaa

SEQ ID NO: 273169 - DNA, 710 bp, Cannabis indica
taattgtaataagatggtaagattatagttaattaataggtacaaataaatcaatactaaaatttaactttgtcattcaattataaaaaaaagtgcaagagagagtacaaaccaaagtctcattaacacttcctctattttattatgttcttcttgtattatttttgtattattttataattaagttatagtttatcttgatttctttaattgttataaaatctattaatagtgtcttttccttataaaaattgtggtattagattatggttacatgcctatacaacaataatattggtattagcactctgcacgaaaattataggctgacctcaaagttaggtgctagatagagttggtttccaaatctcttaaaataaaataaataaaaaagagggtcccatataggcatatcctctttccacagaaatcttgttttgacaatattagcaaccataacaattataattaaaaataatgaaagaaagaggggaaaaaaacatcataaattcttggtgctcgattgttttcagagaaacattgcatgtgggtatgaggtcaatttcatcacgaactcaaaattgtgttgtgttttctttccgagagctacgctgaaaaactattttttttggtcaaaaaaaaataggagattatatagagaagttagaaaataccaaaaataaaacctagtacagtaattcaaacttaag

SEQ ID NO: 273170 - DNA, 1210 bp, Cannabis indica
cttcacttcactacaatacaaatacagtattctcactcatttcttcccgttactttattacacacacacacacactctctctctctctctctctcaaattcagaacacagcatagcatcatggccccaaccccaaatgtctgtttgaagcgtaaaagaccccccagcattgagataccaaatgtcttgggagagattcgaatggagaattctactacgccccggaacgatggagtttcttttggggaagttggtgttggtgttttctcacgtaaaggcaagaaaaagttcatggaagacactcacaagatagcttcttgcttacaagacaatcccaacaaagtaaaaactatgaattcattcattcttgttccttttactcaattgggtctttgttatttttcttcttttttgatgtttttagttgttttggattttgggtagagattcttttttggagtttacgatgaacatggtggtaagaaggctgcggagtttgtggcagagaatttgcataacaatgttcttgaaatgatgaagaattgtgatgagaaagaggaaggtgttaaagctgggtatctcaaaacagaccaagacttcttgaagcaggttggttcaaattttgggtcattatctacaaatgatgtttttttttttgctaattagaatgtttgtttttaaattttaagatgtataaattatatcccttaaattataaaaaaaatttcctttaaactattgagattgttggatttaatgatttttgtctaatttcattcaatattagtagttcaatgattctttagttcaatgatttaatgctctccggactttgatatctatcaaatcatgtctctcgaactttgacatgtactaaatcatgccctcctaactttcatgtttgttaaactttctttattaaaattaaacaaaagtacttaaatttaacaatctcaatagtttaaggagaatttttaaggaccttaaaaatttagggcaaaaaattagcctttttttttgtttcctatgaagtcttttgattcatagagtctaattcccaatatagcttcttctccttcgaagaagatttcatcaaactcatttttccaaacaaagttttgctttgaataggttacaattggctatgattatgttgataagcatacttaggcttattcatactccaactcagttactatgttagtatgcta

SEQ ID NO: 273171 - DNA, 1601 bp, Cannabis indica
gtccatccctcaactcatcttggaagtacttcctggatttgtggacaagatctgcttgtagtaatcatccagtattgcaaattgttctactacagatccctcaagcactttcattgcaatattttttagccctataaaactgccatgaactgactttagagaacttagtgttctctgtcatctccttgaaagcactatagtgaatatttgggtagagtctgaactagtccaggaaatatttgctgagccagttaacatttatgtgcctgcaagattaatgaaagtagtatgcaatccataagataaaaaaaccacaaataattttatagtgtagcattgaaaaataacaataatttaaaatatctattgtccaacacaatcccatattgatgtttagggttgagagtcttgactttgaaagtcttcccatgttctttaacatatgcatatactttccatttacatccttctactttgcactttgcccttaatctttctttgtcatttgcaatcagttcatactccttgtcaagatagatgaagtgttctcttaacacatttcttaaaatgtccacactgccaaattccatgtcaatgtcaaacttgaagtcatctatttttgtatgtggattgtattccacctttgcatctgagccaccagcttcatcttcactgtgattgttggccaggtcatcagcagattcaatcccatcagcttcatctgcctcagcatccccaactaagctagacataaatcacacatcacacaaataaataaataaaatgcacagaagttgcgcaaagatagcactaatttttagagttttatatcacacataaatcgcatagacatcgcataaaaatcacatacatgtcaaataaattaaatacatagtaaaattgtatagtaatcgtacacaaattgcatagaaaacacataaatataaatatatgtcgcacaaaagtttaaacgccaaatttgaacagttaagaaataacttacaacatcatcgagccattctccttgcactatcactttcacgaaccaagattgattggctaggccaatgtaaacatcccttggacgaccattgtccctcaagtaagtgatccacttttgttaaaatttgtacacccgtgggtctgttggcctcagtgtctacttcaactgacccaattcgttatttcttcttcccctttgtgtagtccttcaagaaaattggctttcgtttttccctaaccctcaagaattccactccagcaggtggcccatccaactcttgcacatcctaagactgtgtatcaccaacgacaactataatggcatccgttggagtataaggaacctcccaatctttcgaatacacatcatcctcaccacaatcgtctcccgaatgtgatggctatgtcggctctaatgactgtgtcgtggctgatggctgcttctgtaataaacttagcacggtcgcaatttgatccatgatacgattcttcatctctttctaacttctcttaaagtcaaccttcatctcagtatgtgcagttaaaattgcaaattattgggcttcgacattcttcaatctctttgccaaccctaggta

SEQ ID NO: 273172 - DNA, 914 bp, Cannabis indica
agtgaatcgatgtaaacatcagatcccacgttattattactttgttcaatggttttaaataacatacttggcagcagcatcattgagtgattctatattatcaggagtttgcaagtacttgttgaaaagccacctcgaagtgttgacagcatcgccggcaccttttacagggaaaacatttctactgctttgccaatcgtttgtgagctttatccactccctcctccaacccttcaatgagaaaccattaccttcttctaagcttgtaattaaaaatttaaaatatatgcctgctcggggaccataataatctcgtagaagcccactccagtacttgtttcctgcacaaaatagatttattactctcagttttggatcaattttgattttatcaaaagaaactccagggaatagccattatgctaccatagtcgcgaagcaagcttggttcttcatctgagttgtcaaaccacattgttatttgagttcttgcattccactcaaactgcattttggattgctacaattaatacaattttacttcctgtattgataaagattttaagtagttgatatagttcagggagatgcagacctgcttttcctgattttcatcttgggctagttgttttgcactttctaaccaaggtcctagaagaaatccttcatgacaagctaaaagagtgtcaaaatcatccaccaaatccaaaaacttgtggctatagtgagtcactccttgaacattatttgattgatatgcttctattgctttcaaaaacagctggtttgcatattttgctaaagcttgtctagtcagatcaacaagatcgtacctgagctcagtgagaataacacaaaagttcaagatcaagagacagacacaagagctattgcctagttaaaaaaaaaaaaaa

SEQ ID NO: 273173 - DNA, 1038 bp, Cannabis indica
aaaaaaaaagcatatatataaacatcctgacccaaagggcaggtccaaaagaaagatatgtgcatcaaataagatcatatatatataaaaaaaatcctagccctaagggcaggtcaaaaaataattataaatatatacaaagggcccggggacaggccttaaccaatgtttccccttaaataaaacagctatataaataaaaattgtcttaaatgtaagagaattggctgtaaataataataaaaaaaagagataagaaaaatctgggttgaattcataacggcctagtcaattcgaggaggaaggcgaggaccaatgcgcgcctctagcatggcgtcaagcttcttcttcttctcccagaatttagcaatcatctccgcgggtttggggtagaagtcgagcttgatattctggccatttgttgaccaggccatgtaaacgccatcgtcgaagcgcttgacgcaccggctgcaagagacgggagaaaggagctcatctttcttagccttcttcaaggcttggtctttgaagtccttgagctccttcagctccacggccaagttggccctagactccaagtccgcctggtgcacttcctctagggacttcaccttggcggccatttcatctaaggcttccctagcctcccggagttcgcgtctggccttgggaacaccctcgccctccgccctcagctcctggtacgtccgcctttcagcagacagatcctgaaggatcttcatgacttcgtctatgcccccaaattcggacaagacgaagccatggttggttaagttcttggaaagacggccggcctctgcagcaagctgggaaaggatgcaagagtgagtaaagtccttaagaaaaataatgaggaaaaaagtaaactataaaatacgtaccacagtcagggagtggcaagatcctgaacttgaaagatggagttcaaggatgcacaagcagcaaaccgcttgggcgcacaccgggttagctgagacacaaacttgccggccatctccgcggcaaagggagccaagg

SEQ ID NO: 273174 - DNA, 742 bp, Cannabis indica
caagaagagcaatgggctcaaactgaggaagttgaagaaggtgaagaagagcaagaagttgctctgattcccaagcgcaagggaagatggttgccgaggaggagcccaaacggcagcggagagctgatactccggcccctggccctgattccgggatctctcccgaggcggaggaatacacagtgcctcccaacatagtgctgactccggttcctggagatgaggcgaggcaggaactccggatagccaaacacaactacgccatggacaagtactcccgggggcatgctgacatggaggctttgaggagggttttgcgaattgaaatgcaaaatacccttagcaatcagaactaccagaatccttggaatctaaacttggaccccctgtcggattggttcaatcgtttcctcaggcccaccctggctccctttgccgcggagatgaccggtgagtttgcgtctcagctcacccggtgtgcacccaagcggttcgctgcgtgtgcatccttgaactccatctttcaagtccaggatctcagccactctctgactgtggtaagtatttcgtagtttacttttttcctcattattttctcttaaggacttttactcatacttgtatccttttccagcacgctgccgaggccggccgcctttccaagaaccttattaaccatggcttcgtcttgtccgaatttgggggcatggacgaattcatgacgatccttcaggatttgacc

SEQ ID NO: 273175 - DNA, 801 bp, Cannabis indica
cttcaattttgaaaagcttctttctgcgtgagtaaccgtgacaggaattgttagcataatcctataagcaatccaagcattcgggtaactaccattaacttcttttatataattcaacacatcaatcgccttttttgttccttttggcaagttatgtcgtagcatttgtaactcttgatatagatcatctttattaagatctgaaatctcaccatggctcattaaattggtaagattatcacaaaatctcttcacactatctccatttgtagacttcaatttctccaagttaagcaaaagtccaaaattttcttcaaacctctcaaattgttcaaacctaattttagaagaaaatatattattatcaatatatacacactatacatataataaatcatttcatatttgtatttatttagtcatacctggattcaaatgaagaaattgcttgatcaactatgtagagaaaatagttgattttgaaagaatccacaggtgattgtacaactacattgctagtactctcatcaaattgtttctttctgtgacatgttcatttttcaatgaacacaggttcaattttcatttcacttgctatctttgtagctgcaaccatagcctcttcaaacccagtttctctatatttttgtagaaacaaaaggagagtttttaactgtctaatagctacatcaatttgcatatcttcactctgaagaacgatgctaaccttattcacagcagacagtagatcataccaaatgaccaagcctagcaaaaattcaaaattttgaatattatatg

SEQ ID NO: 273176 - DNA, 827 bp, Cannabis indica
aattgagttttaaaaaactagaaaatagaaaacatcaaaatgttgttttcaattttcaaaaataatttttttgtctaacatattatattttatattttttctcacatactcggattctagacccggaaccatattcgaactcggagccaggtgtgttcatgttatggtatagtgttaaaatattattattattatttttttttggtaaaaaaaaatctaaaaataattttaaaaaatttgtatcaaacaccattgaatttttaaaatgacaaaatactgttttttattctcacttttaaaaatacaattttaaaaactgaaaactaaaaacacagccaaacaaactcttaattttttttaggttttgaaaaaaaaaatagtaaaaatattttgagtaaagtgagaagttaataaaatggtattgtataaaataagtaagaagatttttgtttaaaatagtgattttttttcaagtatattaaatgaaaattttctttcaatatcatacatgtatagttttggtcaggtcttgtttgttaggatgtaatgttacaattcctcatattctatttttgctaatatgttttgtatatatttatatttatattatttaaataatatagagaagatcagggccgtcagacttattgtgtcttatgtagtaataaaattattaggctttttattttattttaaagaaaaaatatggtattttttaaacaattactaaaaagaaatatgtatatttttaaaatgcttttttttttttggggtctttgggttggcctttaagcataaatctactctactttagtccaaacccaacg

SEQ ID NO: 273177 - DNA, 993 bp, Cannabis indica
agatttccatttagaaaagcagtacgtcttgacatctattttccatatctcataatcataagtggcagttatagatagaagaatataaatggatttaagcatggccacatgagagaaggtttcgtcttaattgagggcttctcgatatgtgtagcctttggctaagagcttagctttaaatgtctctacctttccttcaccatttctcttcttcttgtaaatctatttgcatcctataggtgttacaccttcaggtaggatttatagcccagactttattggtacacatggaatccatctcttgatccacaatattattttacttgtctgagtcaaggtcatccgttacttgctggtaagttaatgaatcgtccttgtacattcacaacggataggttgtctcacaacccttccactacaacgatgtattgaggtttccttttcaataattatgacaaccgttgttggttgttcaactgatagtactaaagttgatggttcataaatctgttcatttctcatttcctcgataaccatttgaccacgtgcatggtttgtgacctttcacatagttatgttgctttctgaagttgttttcattttaatgttatactattttcaggttatgttatttttattttataaatgaataacaagtcaattataaaagtataaatggataaaaagtcaattataaatggaaaagcccttatattaaagggtatttggtagactccttaacagttgcagtatttaggagagcttttcaatctattttttttcttctatgaacgtatacgttatagttatttagagtcatttgtaaatttttaaaaaattttgaatagtttaatgtgccaaaaataaagttttttattcgagtaactgtacttatacgcgcttgataagttactatttgagttttatttctgacattgtaaactattgagaattttttaaacatttacatgtgattttaaataactacatcac

SEQ ID NO: 273178 - DNA, 5716 bp, Cannabis indica
taagtttctaataatcaattttctttttttgattacactaaaactattagaactaatgaagtatttatttattaaccttgagcttttgcattgccaatcattccagtcttagcagcatagacatctacatatgttatggcagcctcaggtagctctgttcttagcttgattactctttccttaagcttcttgttgaactcaacagccatttcgttttgggtcttgacacagccatattggtcaacaaaatcaggaggtggattaagattgtagaaaaagttgactggtaagcacccaattggacctgtgttgtgaatccaaaatgaccttcctccttgttgatatatattctaacagtaatcattgactcagtcagtgaatcacactcatcaaaagatgttcattttttttaaaacaacatcacagttcaaaactactcacttggactgctttggctaactggttgacgatatccggtaaggccgccagaagttgttccgaactcagttttcgaaacccaacagaaagatcattctgcccaatatcaaatgtgtaaagtgccttagaaaactcatctggatttggtaatttgcttctttcagaaggtgttttggcagctgtatatgttcaaagcaaatctcagcaaaacatacaaaaatggtctgttcttaattcccttttgcaagagtttactaccttgttcatagagctccttagttcgagctttgaactgattaaactgcacaatctgcatatcaagagaaaatgggctaatcccatactcataaatggtttcattaggccttctaatggtggatcctccggtggcaaagttagctccatgacgataatttgttcctaatgagtttaagtaagcactcaagtatggtaatcctatgcgctcagctgcataattaaacaacaccaactctgttgttaatacacaaaatcttatacagttagttcttattcacttaaatcttacctataaaatctacaataagacggccatcacagtctcttccggatggtttatgaaagaagccttccccatacggcgcaggaatcggttcaaaagcagctgaaatgccaccggtatcggagtttgagtcaccaaagttgtacagcgccggaaaggagcaaggtggtgaggctgctgctgctgctgttggtggttcttcttctacttctcctcccactcccaaaacgcataaaaccaaaaacccaccaaggaatttcctccaaaatcccatttttagagttgccaatcgagtttggctcatgtgatcagaagcccattttaaggataatgagtattgtacgagtgagagagtgagaacaagtttgaagacaaagacaatgttactgttacaggtggggacaaaaggggggtcatgtaaataggcattaataatgactattccatgtgctcatgtaatcttttaccactgtttttctactctacttttgacccttttgcacctattaacatcaccattgatgtgtgtgtaaaatatgcatattcataaagctaattccaatccttgaactttgatttatattaaatcatctctatgaatttttaaggtcgttaaaaatattctcttaattattgagattattggatttaaaaacttttatccaattttaataaaaaaaaaatctaacatggatgaaaattcaagggacataatttagtacacgtcaaagttcgagaagcatgatttggtagatataaaagtctgggaatcatggtttagtacataaacaatcactgaaatagtaaaattgaatgaaattagataaaaatcctaaaatctaacaatctcaatagtttaagagaatttttaacaactaaaaaagttggagggacataattttgtaattgttaaagtttaaaggaaaaaaattctaattagccaatttataatgaataatgtatattttacacccacctataatgaataaataaattaatatttaaatattattacagaccactgcactgcactgagcagtggtatgataggcaaacaatcatctgtttgcaatcttctaaaatctaccactgtccataaaaataaagtgttacactttccaaggtcctcaaatcatgcttctcatggtatattttattaattagcttctggttcatatgggattgttgtttgttatggggtgtaaaactaaactaaaataaagtaaatgtgagaccaaccactaaatcatactaagatgatagatattatataagtgatattttatggaatgagggaccatgaaatcatgaatttaaatgagaagcaaatccttgtcaaaatgtaaaaatggatatggactgaagaaactaattatgtttgatttttattgatttatatatcatatgattgattgtgatggttaggttaaaagaagtcggtgatgtatatatatgcttattaaaattattattattatgtcgttttctgctataaataataagttgacaaaacaaagatgggtgggatttgcttttgccttatcaccgggccaaatttcacgttatctttctttcataattcacagcccaaaacacaagaaataagaatactagaataccccattgactctcataatatccaacatttcattcattgcaaaatgttttttgatattcactagtaaccatgaacaaattctgagattttgaaacatcaaacatatgccacttgtttagtgcactattattattatggttaatactaagcaatattggccaattaacaacattagccactttgaacttttgatcaagttaaaggaacacattaatcaataaatggattatgtttatagtataatcacatagattagttagtgcctaatacatgcttgtgagatgggaaactttggatagagaaagaaccctttattatttggttagtaatccatcgatttgcagcctcagtgtagtgtataccatcccaactgatatgcaaggaaggatctttacatggattaacaaaatactgagtaccattctttagaatattattcccacaatatttacgaaccccatctttaaaggaaccacaacagatattcaagttttcataaaatcctgcatttattgaaacggaagtgttagattatttctttaactctataaatacatattttctgatcacatttatatgtaatgataatcagtttcagacttaatagttagtattgttccaccaaactcacgaatcaatcagatatgctttctttatcagttactataatgttctaagttatatgcaaaatactgattgaagttattaagaatttctaacagcaataccaatcactaatcttaccttaatggtatcagaagttgagaaatttaggctccaaagtgaatcaaatgggtgttattgttagtggggtggctaccattataactataaagaattcaaaatgcttgggatgtatgtatgtatgtattagtattgttacctagtttctttgcattgctgatcaaactgtactttgcagcatacatatctacatatgttaatgcagcaaaaggaagctgtgcctttagttcactaacttttctcttcagctgcctattgaactcttttgccatgtcgttttgagacctgatacaaccattgccatcgagaaaaccagggactggatttcgaacatcgaacaaggtcgatggcaggcaaccaatggggcctgtgttgtgtatccaaaatgtccttgctccttgttgatacagaaactgtaagacatattgttaatctcaatataaacactcatatttattaatgtgaacagatataaactatatatcaatgcagatactaacttggatgcctaaagagaacaaattcatcatatcagggatttctgcaacaagtttttctttagtcatcatcatgttccggaaacctgcagcaaggtcgttttggccaatatcaactatgaaaagagactttgagaagtcttttggtcttggaaagttctttcttatatctgagtttctcttggctgcagatcacaacattgaaacatgaaaacattgtgaacagattatgtctaaatatctaaacttggaatagcagtaatcgtctcatccaaactttgacatgtaccaaatcgtgctcctcaaaactccgtcaacatcaagagcccgttagtaaaattgaaaggagttgaacataaatccttgaatccaacaattttctcaataattggggtgaaatttttaacggattgagaagttcaggaggtacgatttgtcatatgtcaaagttagagtagtaatctatctatataacgaggtaaaattcaaaagtcaaccttgggtgtaaagcatagtggtcctgttcttgaggttggaatactgcacagtttggatatcaaatggaaatgggctaataccacttataaacaaagaatcattagaacgcctgatagtggctccaccagtggcaaagttggcaccatgtctgaatttggtaccaaatgaatccaaatatggactcaagtaaggcaatccaaagtacttagctacataaatacataacacaaataccaattacggattaagtaaatcaataaaactcttacagaaaaatcaaaaaccaaaaaaaaagcaagtctttgagacaaaacaacaaacaggtgaaattcacaaatgagttaccaatgaaatcaacgattaaacggccatcaccaactcttccagctgggctgtgaaagaaagttacaccattgggagctggtcttggaaaaaatgcagctgatatagagccagtatctgaatttgagtccccaaaattgaaaattgctggatatttacaatgaactgaatcaccattcactttttcaactccaagaacccaaataactaaaaagcttacaaaaatgaatctcacactgttaacagtaatacccatttttctaagctcaaaatatgtattgtacagatccataagaccttactatatacatttatatacaagaaaaatgcatgtatagccagtataggaatcatcatattgaaaaagaaaaacccacttgcttttgatttaatacttgggtttccttgatttgttaaagtttatatttttcaatcaatttgtaactgaacaagttatctagctgttcaagtatttttctttgctgctcatattaaattttgttcatttcttcattctcatttatagttatatttaatcttgtttgcattgatgaagatgatcaaaaaaactttacttactaaaatcccattttcatcaagattatataataaatagataatctactacatttcaaaaagtcaacattttaagtacctggaattgagttgacctttagctttggatgttatgtactacatttctacgtggcttcaattcctgctatattttaggcttacattaaaaacttttttcttacacttagtaagtgactgttttaagtaatgtctttttgagaaaaataaataaatacataaataaaaattttgattaagactttactctaaacttgtttttttttttcactagaaagagttgagaagctatggtataaagagtaggtgcttgttttgctatttattaagagtaaaggaagaaaaaaggataagaagttttgttttaaaaagggattaaagaataagaagtggttaaaatttaattgtaaagattattatatttatattgtaattttttttttt

SEQ ID NO: 273179 - DNA, 681 bp, Cannabis indica
taattattaaataaatcgttttgacatttataggatagaattagaaatatggtatttgtgaaataaaagataaatggttgagaaaaatagtagaaatataattagtgtagggcccacatcatggtcggccactaagtccctatttttgctattattttatcatttttttattccatataattcaatcctaaccctaagtgaattagtataaaaagaaaagaatagtctcataattcaactaatgactcaaaacctagtttacatcttctcagacaactagagagttttgagacttcttcttcttcttcctaatttcaaaatcctagagagttcttcacattaaattctctgattcttagtgattgagtgcatgccaacctatagcaagttagtcctcaatcatagtgtgcaagattgtgaagaatccaaataactgaaggagtgtcgtgttggaaatattttaccaggatctagatttactaacaagtatgttgcattaacatcataaatatgaatatctctaaaataatgaaattaaacacataagagtttaaaaaaccttacattggttgcagcgaaataatatgattcctttcgctcagattcctaactcttgttcctttctgtcgcagagtattaccaagatttgagcctagatctctttctctccttcgggtttgg

SEQ ID NO: 273180 - DNA, 584 bp, Cannabis indica
gtttctactttttaaccctaattacccctagatcaatctcagccgtcagatcaaataactccattatttgacgcctgccgtacatcacggattacaatccgtgaaagtacaataacgagacaaaatcatatccctaaatatatatatatcttacttttttaatcacaaatcacaattttaactgaagaattgtctttatattaataaataatttaagtgactaggtagagttattggaaacggaaattataataaaatacccactaaaagaataggcagacattttccatagacttatggaaattttggttttggtagtcttcctcttttgttgaccattttaattttgagactattaatagtgtaattattaaagtgataattatatagtctaaattattattttttaaaaaatatttttactgaaatctacataatacccacataataattaacggagcaacttaaattacagttaaaattcatgtagcaacccacatagaaaccaccagaacaatccaaaccgtaaattttttaaaaaaattaaaaataatatatgggctaattccctttaataaattttc

SEQ ID NO: 273181 - DNA, 837 bp, Cannabis indica
  modified_base (608)..(608): a, c, t, g, unknown or other
cttctaaaaatatttaacactaagtacatattaaaattgaattcccaaaattttaactagctaggaataacatgaaaatctccaataattaaatgaggggtgtcaccattaatttaagaaaaaaagatgaattaaaaaatgaattttttcttacatggatgaccctttttaaaaattataatatttcaaaatatattgtaatgatccgatattaattaatttaattatttattttgggataatttacacaccaaaaataaggttttagaccgctatacagtactaccacgcgcacaatattctctttagatcatgttttcgttatcttaaattatttaaaaaaataaataaacttacgacaactatcgtgtaaattttttgaatagccatgacatatataaaagagttcgttatgtattgagaactaccatagagatgctataatttaaataaaataaataaaaatataaaaatggtgtaaataattattctagaacaaaccgagccgatatagtgaagacagattaaatctgtatctaggactcacttaattaaggactccaattttttttttacttgttttaaaagatacacatttttttttaagngtccaataatttttttttataggaaagccttaattatgacaattgttttttgtatatattaaatatgggtgaaattaatgggtggaatatgatcgaggactgtactgggcaaattaagacaaacagagttatgagttttctgagaagtaggtatttatttttgaccatatttattaaattttacacaggaaattatgtcatattaatgaatgagagaataatgtaaata

SEQ ID NO: 273182 - DNA, 1281 bp, Cannabis indica
tcactttttctcatcttccttcgtgaatacaatgggaggttcctcagttttcaccttcttggaaggttctggggcaaaggccgattgctcgttctttatttctttcacatatcttttttgggcattattgctttcccctacgatatgtggccctttcgaaataaccaggatgtcctctccttccacaggaattggttgtaacctctggttatttgggttattgggcagagtgggctggttgtaaccctggccttgtcttttcacgtattgtttaaaatggcctcgagtgatgagactttctatctcatctttcaattggcaacattaatcagtcgtatgcccaatatccttatggaatttacaatatttgttaggatctcttttgcttttcgaattcctcataggctcgggcttgccgaaggccaccttctgctcatgtgcaaggtaaatattctctcgagtttcattaagctcggtataaatagtatacactggcacatatttgtcatgctttttctgtttctttctatccttcgacggttccttaactccgtcctttcttttcgaaccagaagcccccgagttatcaattctcgtggaaattgatcctgttgaaatattgctgggttcgcctcctgagcttattttcaacagattcatttcctttcgggcttcttctttctgaacaaacacatgagccttttcgttgaaatcagtgatgcttctcactggacatccttgtaagtcatcccacaactctccccttgcagtcaatggatcagtagagatccccacctgaagggttgtaagttgcgtgctatcatccaaatttctaaccctggctgcagccgtgctaaaacagcttaagtaagccttaagtgtctcaccaagctgctcatttatattagtcagcgaggccgcttcgagtcacctatccctagcagcctaaattgctttttgaaatccctggacagtttctcctaggaagttattgaatgatgagtaaacttgttaaaccagctactcgctgctccaacaagcaaggtggggaacaaaatatagcataaattgttcgtcacattactcgctcgcattattgtgttaaagttattaaaatgcgagatcggatctgtggttccgtcataggacgagacatgcgagtttttgaattccgaaggaaaaggagtattcataatatctagatgatacggctcaagctcctcgtcatagtcgtatccagatagtttctctattcccaaacttaatatctcctgaacttgt

SEQ ID NO: 273183 - DNA, 865 bp, Cannabis indica
gccgttagcttgggatcgcaagttaagtttgggagttcaaactttgaacggattttccggtcacctccggcgtccgtttgacgaatcgtcttcaccactaaactcagctcgttgaggagaacaacctacactaaactatttttcccggttcgctactttttccggtgacatttttgtagctccgccccgttccggcgactttccggtgacatcgtgtaccgttttgacaaacggttggcatgagtgtgatatactcgtcaaggtggtcgttttgatatacactagccctattttcggggacgtttttcggtacatcgatttttaccaccactgattattaatgtgcaccgcttaggtgaggcttcggaaccccaaattttaaatatagtcatattatatatcgttggactcagttttgaatgtaaaatgcgataataataattatttaaccatttgatggtatagatgagagtaatatgtaagattggactaaaacaattggagctcgggacttaagagcttaagattgccttttggaaaaaatttatcgactcgaaagatgtagggactcaacttgattattggacttgatttttatatgtgttgtataacattagacatattccaatttttatgatttacaaaattgtttgtaaaattgaaaacttaatctgcatattttttcggactgctctgggggcactgagtgccaaatatatttttgtgtgcaaatatttatgcaagttgtgatttttgggtttatttaaaatacagctgttttgctgccaaattttttttagaaataaaaggaatatgttcttttgatattcttattacttacatgctttggtttatattgattgag

SEQ ID NO: 273184 - DNA, 549 bp, Cannabis indica
ttcttcagagaagaacatcgaaggaggtctcacgaccagggtttattttaggtggttggatgtgtttgaatgaaaaagaagcttatatgtctaaaggtgttttagggtttccgaacaacaaatataaacgacctataactcataggaagggagctgtcatttttgggttataatatccgaaagtcaaaagctttctttgactgggtaaatggtcagatttgaccttggggatttgattaatcactttgctgtgtgtagggcaaagaaggaataaaatttctacaaaaagtattaatagcatttatatatcccatgatgtttcaaaaatactttggaaagttcatctattgaattaattattaatatgtaataaagatattagctattatattacttcaaacaaaggaaagctctagctgtgcttctactttctaatcatctcttggtttcaggcagaaagtcatattcatgtgttatgtgtatgttaaacttttgttaataggacagggagagagtatagattacagaactcgaaatgtgaacctgagt

SEQ ID NO: 273185 - DNA, 1301 bp, Cannabis indica
ccctgcaatatataatccatgttcacttttgccagcaatatatagtagcaaaataaatcagacacataacaagactcaaactcacacgaagtaaatgtatttgagttttttttttaatagttttggatcattttcaggttgacaccaataatctgctaactcaaaaatggcacaacaatgaactcatatttattatgtaaatgacattaagttggttaaataggtcacaaacatattaaatgattgattacataaatcaataaacatgttaacatgttaaatgcctattaaacaagtaaaagttattatgtcaggtgaattcatttataaacaggtcaggtttggattgaattgccacccattgcaagcaaataacgaagcaaagctattatcaaaatcagaaaaagctcaaagttaccacataaagagtttaaactttcaatacctttcttggaaattttcgaacccgccgacttgaaattccgttctctctgcggtacataaccttcaatcgcattagaaggaccaacccaatcctccaaattcaatttcccatcgtgggtttctgtattctccttaatcgttagcttagaaaaacccaaatccccatcattacctaaacccacttcatttttcgaactcgaatccccaatcaacgccaaaactggatcaatcttggaagaatccaaaatcgaacacctttcttcgttcaaactcctaccaaaggtaccgctattgaccacacaatcagaggagcaatacatataagtctcctggagatcatagaccttgtgctccttgagtgagatacggtaacgactcttacgaggtcgatcggaaggaaggggtttggagcaaagagggttgccgcagaggttagcgagagctcgctcggtaacgacgtcgttgtagtcggagcgggagatgacggagccagctgtggaaagctggttctcattggcaacgccttggagaagggagagttggattctgtagacggcgtctttgacagaaagtggaggttggtttttcgccattgcagagggtttagagcaatagggttggttgagttgggttgttgtctcactgagatttttgaagatgattactctaattttataagaccatatcttctatttggtgcaacaatgattcatattaaaataataaaaccaactatttcactaaaataaaattataacataatggtttaaatattttcatttttgcttctatttacttttaaaaattcaaattttagccgtaaaatttctaaacctaagaatctgttagtaatttac

SEQ ID NO: 273186 - DNA, 820 bp, Cannabis indica
acatcccaaaggaaatcctccaactccttcgagtttctactgccattaaaggctttcggtttagggactttcttttttgaggaatgggctgaagatgactcgattccttgggacagatttgctatcgccttttaattactgctacatccgcatcgagagtcatgaatctctctttcacaaaattagacagattcgatagtttgtctaacacccccttcatcttctcatcgatatccatcatggccctgccacaacccgcaacttgatctgatgattccttcaaaaagtctcgagccagcgcctcaagggactccagttgttcagagtgttgttcaccaagaacaaacaaactgacaccatcatcttcgtagggagaaccaaccaactctttgagtctttcaacccgagtagatagttcagcattcgtcaccatgatttctgctattttcccaacatgattcccgctgtgataccagttgtcacaaggctaatttctcacactcaaattttccctgcgatggcctagattcaccctaatctagtcacccaacccaacaacccgttagtatgcacacacactcacggtttagttttgcccagcgtcactcaaaaacacactcttgttatcaagtaaatgcacacaagcataagaacacattgttaggctttatgccctaaataaaattatatttcaatgtaatctctatcatttaaatatcaataaagagataaaagtattttcatcacttatttaatgtgtcatttggttcatgttgtcatttatatatttatttgatttataaattcatcctaaaccctt

SEQ ID NO: 273187 - DNA, 539 bp, Cannabis indica
aatttaggtaaaattataaaattgtaggaaaaaatggaggaaagtaaagatttttctgccattaatgtgggacaccctaaacccagttataggcgactgttttaaaccgttgggaaacccacataagcgacggttttgaaccgtcgcctattctgcccgttttacgacggtcgtatagacgacggttatagaacctgatgggaatactttaaacgattatttaaaaacgtcgggaaatccctttttgtagtagtttgcacacatttttgaatggaaattcacacgctgaatgaaggcgctatgttaaaatcacactatacggtaaacaacttgttaaaacctttaccaagtcatagactaaaactagaaatttccctatcgataaatattgaaggaacacgacataaccagactatgtgaaaacatcatgaaaaacggtaggtcaagtctgtaaaaatagaagaccgttttttatgtattttgagagtaaaattagtagaccatttgcacagaaatgacttgtcatttttaactataga

SEQ ID NO: 273188 - DNA, 615 bp, Cannabis indica
accattctcttggggttttcacaccgtttcgaccatccaagcttcccacattcttcctcaacagttacttgtagtgggcaagcttcatattccctctatttcacttgatttggttgattttgtcatgaatgcataaacattattctttgctttgaacatcctttgattcctatgctagattgttttatttttggtattttgatctgcatgatagccttaggatatctaatgtgtgatttctagacaaaaaagatctgaatctgaccttcgctgtgattctggactctttgagtcatgaagaacacgaagaacatgtttgagttcttgaaaaaacacatgttttgatttatacaagtcctggctggccaaggaggtcttgtttaagacctggccagctaagggtggctgtcaaggggtctggccagctaaggagatgtactgcataagctggccgacctattcttggaacatgggttcctagctggctactagactaggtcaaggggtctggccgaccactaaggcttagaaccctggccagccaaggccaaggctccaatggggcagccaatttgcttccctctactgaccaaggctagggtctcgtgacggcct

SEQ ID NO: 273189 - DNA, 670 bp, Cannabis indica
ttgagattacatttatatgtaattttcttattgatattatgaactacttggtttgttttgtgggccaataattccttattataggatatttatgatttaaattatattttattatattctcgagaataattgaattgaaaacatgtagttcatatcttgttgtgattattgtctttcaatttaattgcttaatgccaatgatattttgttggcttcattttttaagcatgcttagtaacattgacttatttattaagtagtgtatgactaatttcactggcatatttattaagcatcacagtatcaaataaaattgatgactgataatgaaatcatgttattttatagatcacatgctgaagataatttcttaccacactactagacttatttaccatgttgatgtaatactttgatgtttgttattatgaatgttttgttgatgtaaaaggtcaatatcaaagattaaattagatcggtatgttgagatgctatcaaagaactattatttttcaaaattaccacaaatattttcctattgttcaacccatgagtcgcttttaaacaaaattattttgatatataatatatatgtattaaaattaatgtatcccaagtgggagaatgtttgactttttatttagacttacattaacttttattggtttta

SEQ ID NO: 273190 - DNA, 909 bp, Cannabis indica
aaatctctaggtggccttggattccggaaaaaaagagatgaatcaggcctttctggctaaatggggatggaatattctcaatggaagccaatctctgtgctgtcgagttcttacggccaaatatctcaaagggaaagacattcttagttgcaggtataaaggttcagattcttggttctagaaaagtgtcgtgaaggcaacgtctatcttacgacaaggggcttgtaagttggtagctaatggagagaacactaagatctgggaggatccctagattccgcatcgtaaaggcttctgtccgaaaccaagtgggggtacctcttccaatgttaactgtgtggctgaccttatgttaagtaacgggcagtgggatcttcagaaacttcgtgacacatttgaccgagaaacggtctcggatattcttaaaggtggccatccttctgggattggcaccgatagatggatttggacgctagaaagcaagggttgtttctcatctaaatcggcttatctggttcaagcaatggacagagctcctcactgtgaggttgctccgaaactttggaataagctatggaatagtaaaactctggagagacacaagattctgtggtggtgtatcctttctagtgcactcccggttagagcggagattggaaagaggttccatatagaggacaccagctgcccattgtgtggattgggggatgaatccattgaacatctgttcctgtcctgcgatgtggcttttcatttatggcgctcctctccctggggcatttaccctgtgtgtgacactggtatccgcatttgggattaggtcaagttcatttgggatcttaacaacagagggatccgagctgatgatgttttcctttatgcctccattgttgtggatactatctggag

SEQ ID NO: 273191 - DNA, 763 bp, Cannabis indica
atgtgcagcatcgatcagtattttagccagcatacatttatcagtaatcagtacaactctatgtatactattactgctatcaatgtaatctaacaggcataaacaacatgtacgctaaacatgtaataacatatgcatgacattatactaatcttacctcaattctgaattcaggtgtgccggtcaacctgagtggaacaactgctcggcgaattataggctcctaaatcacatcgataataacacgcataagtgactcactaaatcacaacaaggacctaggttttaaaccgaaaacccatctacaacaacttaatatggcaataccctaaactagcagggaatcaaccaactagaaacctgaaacaaacgcgaaacgacaagctaaattttcgggtttccctgctgcaaaatccgggtaaccgattttagaagcattgtaaaactggttagccagtattacccagaaaaatcaaaaacattcaaagcctaaccaaatcatttccaaactcaatcaaactttccagacctgcatattataccccaataaactatttccaagcaataaaacaataacctaagctcagaattcaaaattaccattaatgagccaagcttgagttcaaaatctcaaagcttgctcaaacaacaaactacctatcaaaatatgctcaaaccaacctatttaaacataatttaacttcagaaaacaaaactaaacaccagcagcaacaatcaacaacaaaaactcaaaaacatgcat

SEQ ID NO: 273192 - DNA, 593 bp, Cannabis indica
ttttgtgttgatttggatggtttgatgatggtttatgtccttatttgatgattgtttggaaatcgttgtatatattgtaaaaatattatttatttcgttctagaaatatttttactggaaagtagacaaaaaactaatgaatttaggcttttaaagaacccaatttagattttttatgaattagttatgattttttaaatttggatgaaaatatttgaatcgggtgcacacgtgtgcgcgcgcagacgctcggacagcacgcatgttcagacaggagctgaccgagttttctcggacacaatcctgtctgaatagctgctcacaccgtgtttcctcggcatctgaggctgcatgcagcctcgttcctcgtccaacctcctccatccgcgcgtgcaggggtatgcgttgcctacgcctctgcaccaatttttgttttcatcatatcttttgattcaaaaattatttttcattgaaacaaaattaaaattttggtagaattttgtgttaaatctaaattttcaattaaaaatctaattattagaataaaattaatttttttaattttttaattaattaaaattagttttagatgt

SEQ ID NO: 273193 - DNA, 564 bp, Cannabis indica
taaataaaataagagaatatactaaaaaataagaaaaataggaagaaaaaatagtaaaatgccacttaaactcttcttgtgcattcctttatatatatatatatactaggtagagtttacgtgccaaagtcacgtattttagttttattctaaagaccagtaataaatctacataataagttggtaacaatcaacaaaactgatcaattaatgcacaacatttagtccttattcttccttctaacaatatcaaatcctctaccgcttcaaccattttaatgtacttacacaccatgtaaattatcaagcaagtcggtgattataaatacaaatcttcatcatcacagttctccatcagttggcctccaattcttgtgccaaccaatttaatactaagaaccctgaaatacaggttagtactacaattcctaacaataaaaatagatataaaccattttcaaatcatatgaaaattcaagctatatctgtagcccataattctgtacctcttagctaactggatatagtgacctttgaaatcccactccacgaatgagcatcacc

SEQ ID NO: 273194 - DNA, 1456 bp, Cannabis indica
gagaaaaaatttattaatactctcaaaaattgtcataatgaattgtttggaaatttatgaaatagggaataaaatacctatactaataattgtaaattaaattattttaataactacaacaattaattcagaaattaaagaagataacgagcttcatcttcaacttggacaatcttcacccttctgtccaaccatatgactcaactcgctagatagcaatccaagtttaagcagttggagctaaaatgtaaagaccgcttagttttgtttttggaaattagtagataattagggtttaattataaaactagaatattaattataaattatcattttatggagatttatttaaattcagggtgtattttttatgtcatatatgatattttatgtttttgtatgttatgtactcagcaacattggaacgtggcgtttggctagtataatcacattttagtatttaagtagtagcagggcaagttagttagacattgagaatatcgggaactattcgagctagttgaaatgaccaaaatacccttaagtgacaagggtgctttctggtgtgtgtaagggcaaaattgtctttttggcatttcttacttttgtccttttgtgagttaaattaagccttaatttgatctattaatgttaatattagttagattaatacattatattgattcatttatttaaaataaggaaaaatgaagaaaattcttctctctctccaaactctctttctttctctcaagcaccttagaaccagcaagaggttaaggagttttccagctccaattcaacgattttaacaggcttgtagtgtttcaatcgaaggtataatcccttagtacctttattttttatttcttaatcttaaagttaagattgttgcatgaaataatgagttagggttctatatttataaaggtgtgtttaatttgagttctagtgttgtgcttgtgttattcaggctctgttatattgattttacaggttgttgttgtgttggagtttttgaacagtagctttgctctctaatggtggttcgtgattcttgatgtgttagggttttttattgcatggtttatgttcactatggtgtaattagcaggtctagaaggtttggtttgatttgaggttaatttgaaatgtggggtgattttgtgtgtttcctccactaaactggaattccagttcagagggacctataggaaccggtcgaccggttggtccccaagaaatccaacagaactggattctggttgggaaccggtctgccagttggggcattttcgtgaaccctagtttttccacttttttcaatatttagcgtattaccatgttatccattgatatggaaactttaagcttcaagtttaagtcattgaaaagtgatgtagtgtgtcactcattagttttacgaataatgtgatttaggggcctgtaaatcatc

SEQ ID NO: 273195 - DNA, 968 bp, Cannabis indica
ttgcctatgcctcccgtcagttgaaagattatgaatagcggtacccaactcatgacctaaaacttgctgcagtagtgtttgcttgaagatatggcggcattatctctcccgagagaaatgtgaaatttatactgaccataaaagtctcaaatatttctttactcacaaagttttgaatatgagacagaggcgttagttagagttggttaagaattacgattatgagatcctttaccatcctgggaaagccaatgtagtggttgatgcctgagcaggaagggtctcgggcaggtaactagcatggttcaaattttacctcaattagcagaagacatggtcagatcaagcatcgagtttgttgtaggaaaacttcataaccttatggtgcaatctgatctgttagaacgtattaaagctgctcagttaaccgatctagaattagtaaagatcagagatgaggttttagttagtcaagctgaagactttacaagtgtcaggtagtgggatgctgttattcaagaccacggtttgtgttcctaatagtatggaacttagaaatggaattcttaaagaggctcataccactccatattccctgcatcctggcaccaccaagatgtatcaggatttgaaaccctacttcaggtggagcggaataaagaagaatgtggtagaatttgcatcgagatgcctaacctgtgagcagatcaaggctgaacatcagaaaccagcgggtttgttgccttaaccctacctgagtggaagtgggaagatatcacgatggacttcttggttgggttacttagaaccacgggtctatttgattcaatttgggttgcggtagatcgatttacgaagtctgctcattttctactagttaagacaaccttctcaatggatcaatatgcggatttgtacgttaaagagattgtaagattgcatggtgtgccgaagtccatagtttcgga

SEQ ID NO: 273196 - DNA, 1571 bp, Cannabis indica
tcttgattttgatggttacaagataacattagaagatggaaacttgaaagttgtacgaggtgcatttgtagcgatgaaaggtactcgaaaggtgaatttatacttcttagatgggagtattgttacaggaagagcatctgtctatagcagttttgaagaaaagacatttgattcttcccgtctttaccacatgcgcctagggcattctgcagagaaggctttccaaggcttaatgaagcaaggtctactaaaaggtgctaagaccgaacagcttgatttcagcaaacattttgtgctgggaaagcgaataagggtcaagtttggcactactattcatcacaccaaggaaactctggattatatccatacagacatctggggaccttcaaagaatgcttcacttggaggtaaaagatggtttgtgacttttattgatgattttactagatatgtttgggtatacaccatgcaacacaaagatgaagttctgaatttcattctgaaatggaagacaatgatcgagactcaagtaggcaggaagatcaagaggctcagatctaataaagatggtgaatacaaaccgatccataatgtaattttgtctgagataaaattattgcaaaagaaatttttgtttattgtgttacatcgattgatcaagtagctgacatgcttattaagtaaacatcttttgagggggcatgataaataatgtggagtatctgactgagttctgttacacgaccctttttatttataaagtttgttaaagttgttaatcaacatttaattagttagtcctaatgtagttttcaacgtttgtattgttacaaacttcttccattagtaaagggcttttgtgaaaagttgataaaactttgccaaaacttctgagagcattcttgtttctttcaagatagccttttgcacaaatagctttttcatgattttctttactgctttagaatgtcttaaatttaagccaacaaaaagtatctcataaaaaatatttcatttccattccattcaattccttgttcccttacattgattgtaggttgactatgattactcctctaagcttcttaaaaatatatatattttttaagttttttaagattaaaatatccttttttggaggttgtcttgtaaatatttattactacattgattaaatatgggattggttggtaatatataactacttggacactctcttctcacaggctaacttttgggagcaagctttgcctaagtggttgtatcaatattatgattagtaactcaaaggaaattgtcgatttaattactaattcttgtttaccctaagaggctgagacagaaccatggacaccatttttttaactgctttatgacttttagttttggaagaatgagacaaaattgaatgaaatctcattatttctcattgaatgatgaacagagcaatatatacatgaagatagagtgttgaacaaagaggaaagagtttgttacataacaaactctctaacaaaaaaactaacagctcactcgattaactaagccaactactaactaactaacatcat

SEQ ID NO: 273197 - DNA, 3325 bp, Cannabis indica
aaaaatgtaaaaaaaactgttttgaagtgtaaaaatgaaaaaatcctataatttatttagttatatgtgtaatttatatttttgtaaagctatttaattatatgtacatacaggcccggccctgggcataggcgggctaggcctgtgcctagggcccacctatcccaggggcccaaaaaaaatatttaccttttaaaattataccattttttttactgattttgaaaaataccatatttttttctaaataacggcccaaaatattttttttttctatggcccactaaaagtcagggccggccctgtgtacacattatataaaatatcatatatatgtacgtactatattataaattaattattttataatttaatttataaattcaatattataaatgttaaaagtagaaattcacacaaaaattattctaatattcaatagtgtgaatgtttcttttttcaaaaaaaaaaaattatagatccgctataggggtataacagtaattacatcgactttgaatgtagtggtgactataaatgtgtgataacaataattataaaattataagatgagttttatatagatttattaattatctttttgtcaaatctctattttcttttaactctttaatttttattattttctccattataacatttgtataaaagtggatatttaatttattatttgattaatttattttatgtatagtaaacttattgtgaatgatagaggccactataagtaagatacaataataatatcgactttgaatataataatgattagaaatgaaatacggtgatgacaatggtttcgaaattattaggataattttttttatatagatttattaattatctttttttcatagatctttatttttgtgagaaattttcaatttttattattaaaaaaattatattttaaacaaaatctaacaacatgcgaaatgatatctgtttcctaatttttatataattcttagatagtttccaaataaataaataaatattcaagaatataaaactctatcatggtcatagttttggagaaaaaatcaatttgtatttaattttacaaaataaatattgtgagatcgaatgggaaaagggataatggtcttacagacttacacagtaaagccttagccaagtaggtacacaacaaatataagaaaaagtcaacaatctacactacctatattaatatatatatcttggttccaattatttatttatgtatttaattatttttgtctacattaatttactacaagtaattaattctatctaactagttatacctacttagtgtgattgtcgtgcataagtttactactcataaattcacaacctcatttatattattctctcatcatcataaatttagcaaagaaaaagattctaaaactacttgtacaagtaaccttggtcggctgctttaacatcaccacagaaccctagctatatatatataaccaaatctctcaaacttgactttcttgcaatgccctaatacatctaaaccatagttataaaacgtgtagaaattaactacaattaaaagaaaaaacaaacaaattggtattattggtaaaatctattcttaaatatagtgaagattcaggatttaaagtaagtggggcgtaatatctttttaaagcacggaacagaaataaacttttaaaaaaaaaatttcttggttgaatttgaaccatcctatgtgcaatctagtttaattattatatcaaaattaattttatgtctataaatattatcttttattacaaatatatatcgtaactaataaaaatatatatatattttttgaattttttttttcaagaataactgctctgtctagcttctatgtatatataattaactatatgagatttttgttcacacactaaaattaaatatgttaataataatatataattatatataaattctcaatctcagtactactacctaggttttttagaagcatatgattctttatatatttaagcatttatttgattttattatttatatcgaatattatatatgtgcattataatctgattcactcccaagaatatgttccggccaactaaaattggctgacataaaaaagccaaaaagagagaaagaaaaacaaattaattagagttgaaggaaattctaagttggattaataggaaaaatatttagagtgatgtaattgttgtaactgataattggaaacaattcaaagttctctccatatgttctctatatttgacttagtgattacaaaattttatcatctacatgtactcattttaatgttgaaatttgttttgttttatggttttcaaataagattgtaaattgtcttacacgaaattcttatttttggtctgatcgtatttacatgcagagcaataatatttattatgtttttcaatttcttgtaatgattgatattgctatttataaaagtatcattttcattaaaaaaaaaacaaattaattgtatataaatatataaatataattttaaaaattcatatgaatgtgttttccctctatatatttattctctacatataagagttccctatatataaatataataatacatacatagttagggtcagttcaaggttagggcattagtgaccacgcccaaggcaccctactcactactcatgcctaaaaaaaattcttaaacaaaaagtcttaaatctattttttcaaaaaattatattttatatttttattattatttattaaaaaaataacaaactttttagaaatacatataatttagtttttaagatattacattttataatttatttaaaagaaattaatttattaattttaaatttttcactactacatataatgtgtgattgagacatgaattgtatttcatgagatccgttcgaatactaataacgttatgtaattaatactcttcttttgtagtgttaatttgtagatatatagtgaaagttaaatgtgtgtttctttattgttttggcaatgtaaaatacttatatatatatataataattcgaattattctaggcaggtgtggagttattggctcaatataattaagtggagaaagtttttgtttatctttcccatttgggagtatataaaatatttaaggtcaaatagtcatacatgaatatgaatgaattaataaataaataaacagtaaatataataaaagagaccatatgcatgtctcttcattggctgacatgaagaatcttattcccatggccccatgagaagaagaagggatgtgagctatggaagtctctgctgccaagtg

SEQ ID NO: 273198 - DNA, 1164 bp, Cannabis indica
tttttattttttttaaaatggtatatcaaggtaaacaaaatatatattccctgataaaaatattaatacaccatagatttaaattaatataccatccaataacttaagtttttttcccttgatgatatactttagtaaatagaactaatatactacaatattaaactaatatcatatggcaaaattaatatacacaatctaattttttttctttcttccaaatagtatactaatatacacaaaacagatatatcctagttaaaaatgaatataccaaaaagaaactaatatacaataattaactctaatatatcattgtacaaaaagtagatgtagcatttttgttaaccttatatactgtgtagtcaaataatataccatagtgtaaaaagtaaatacatcacttgttaaacaaatatactatttaatcaaactaatataccataaaaaaaaaaagtaaatataccatttaataaaacttatataccataaataatttttttatttacccggaatcatattttgtctctaattttatctatacaaagttgtatatttttcaataaaaagaataaactaatcaccatcaaaaaaataattatgtaatataactttataattgttgtatacctatttagctagagcttagtaaaagatgctatataaatttaacattagggtatatttattttttttgtactatggtgtatatcaatgttggctatagttcaggtaaaaattaaaaaatataatatattttactcaattaaaaagaaagatagagtttttggaaaaaataaaactggaaaaaaattaataaacaataatgagagatcaaaaaaaataatatagcacgcaaaagtaaggacacatacgtaattttagggaaattttatttgcactaaaaatttctaaagatactcccattttaataatttttattttatataaaatttatatctttaattgtactaaattttttaaactttttcttccaattcatattcttaaaaaataatacctatcaaataaaaataaattacattttaaatattatagactaaaaaaattaaaataaaatattatataaatttacttagaaaaaaaaaatatacatgaagttagaaaaaattatagaaatttaaaatcaaaaataagtaattg

SEQ ID NO: 273199 - DNA, 688 bp, Cannabis indica
tcaagttttggtaaaataagttcacacaccacctatgtctaaaggtgagcatgttatcatcattaacatgctcaaacaaacgatccaacatgcagtgctcaatgtactccatggcaaacattccattcgtttgtggtacaacctcagaggtagctcttctataatgtagtggtaggagctggctgagatcaccgcaatcaaccggaagtacataattgttcagttcaaaataaccactagctcgaattagatttgcaaatagctcgccgtaaggcttcaaatatgactccatgttctgctcagtggtggcaccgatatcacaatcatttacaataatctcccagttatcaatatccacctcaactgccacccagtggtgctctttgggaaggttcaacacaaagtagatataatcttggttctcccaacacggcaagtgtctgtgctctagccccagcacataattaataacggcctcatcccatttcatcttgctcttgtcaccttcataataattccaatatatggagaatatttatggagtagatgtgtccaaaactacacattttcgagtgtacacttctagatagaagtttcgtcttcttctcaataagtgtgccgtgacatcaatttgctgtatttccaaaagaaaaaagttagacagatatcgcatatatgtcgcacaaaa

SEQ ID NO: 273200 - DNA, 905 bp, Cannabis indica
tggcaggtcgacaactagaaagtcttgcataattatggcggataggggtggctcgcccaaggttaatgcgagctcaaatattcctagactagcaatactgtcaccagtgaagccgcaaagatttaccatgcaaggtttcaatttggccttttcgagccccatcttcctcagcgtttcctaaaaaggatttttaccgagctcccattatctattaacaccctctttatccttttattggcgaggtgaatggtaatcaccaatggatcgacgtgaggatatctcaggtttttcttgtcttcctccgtgaatatgattggaggttcttcagttttcaccttcttggaaggttctggggaaaatgtcgactgctcgttctttatctctttcacatatctcttttgggtgttatttctctcccctgcaatatgcggccctcccaaaataatcaggatgtcctctctttcaacaggaagaggttgtaacccctggttgtttgggttgttaggcagactaggttggttgtgtccattgccttgtcttttcacatactgtttgtagtggcctcgagcgatgatactttctatctcatcttttaattggcggcattcttcggtcgtgtgcccaatatccttatggtatttacaatacctgttaggatctcttttgttccttgcatgcctcatgggctcaggcttgccgaaggtaaccttttgctcatgtacgaggtaaatattctcccaagtttcattaagctcggtataaatagtatacattggcacgtacttatcgtgcttcttctgtttcgttttatcttttgacagttccttagaactgtcctttctcttcgaacgagaagccctcgagttatcaactctcgttgacacagtacttgtcgaaacattgct

SEQ ID NO: 273201 - DNA, 1362 bp, Cannabis indica
gctatggatcaatcaggtacacatacctaattattatatcttattgttgtgttctatgttatatacaaatagatcttgggtttattattaatttttctaacatcttattcacatgttagtgaagaattggtgatgtttctcagttggagtatggtcagggatcatattgatctctaggaccggaaccaggataaattcttatgttgttctttgtttaatttctggttttgattcattgtgttgttaattagtttatgttcattattgctgtccaagttgtgagtttattgcaggttttaagattgaatccttaatgttatttccgctggaattacaacacacaataaattaatttgaagttaaaacacatgacaaaatttcctaaacaaattaaatatgataattttacattacttttgttaaaatctagtggaaaagcaaagattacttgagtgcaaatattataatatcactaaaagatcccaagtttaaatcacaagaaattgttagagtggtaatctataactactataaaaaagagaatgatttaggctttttaaagttaaattacaatattgaccttttctttagagaatgatttaggctttctaaagttaaattacaatattgacattttcttttttaaaataaatttatttgaatgcatataatgttaatttgtttttctgcatgtgtttcttactcacgagtctcatgccaagtgtgcaatctaatggagtaattttttttatttttcttttctttttcttctttcttcttctttttctgtagaaaatcccagccctctgtctctctctcgtctcctccttttgcccctttttacaaggcgatggtcacaacctcttctcctcactaccttcaatacctccccgaaatgaaattccatccaactcttctcctccttcacctccaatcccgatttccaaataccctcctcctccttctcgtcagagaaaaccccagaaccctcctccaatcgcatattcgagaaccggcgttgtcgccctttacgctgccgactatgcctaggccgtggactaggaagcgccattgaagagcgccaaggagaagaagaagaatcgaaaaactctgctctttgaatcgtttaatccgccgcctcccgacaccaaaggggttaagcatctttaaatgtcgagtccttttccatttgggagtagagaagagattctcggagaaccgctggagaaatgggagattcgaatattttaaattttgatttggaggaggaaaggagacgcgagaggggcaaagggaggagacgggagagagaaagagggctgggattttttgcaaaagaggaagaagaaagaagaagaaaaa

SEQ ID NO: 273202 - DNA, 912 bp, Cannabis indica
aaccttcacattcttgacattgaattcctttactcttaatctcattttgctgaggatgcttgttggcagttgaaaatttttactagaagaattttcttcgcttctaaaattattcttcttaaaacttttcttgagaaactgagcataaaacttagccaaaagagcaaagtttccatctatgaaacatttagacagatctgaatctttgctaatttcctccttctgaacaaaagccactacaatctcagctttgtccttttctgagtctttgattttcttacccttgtcccatctctgtagagtcatttcatagttttgcagagatccaaccagttcttccaagttaggagcttcaatgtcttttctgaccatcattttgttggagtggacttttccaagagcataagactcattagaaatatcacatagtttggcatgaaactcagtaattgactcattttcttccatggacaaattctcgaaagatttggcaagatctctcaatcctgcctttttttgtagcctcagttccctcattctttattttcaacttttcccatgcatccctagcaatctcaaaacttgaaatgacctttaactgattagtagagacagcattgaacagaccatgtaatgttttgggattaaagttagctcgttccatctcttcagtggtccatgcactagatcttttattatttaccccatcttaatcagtaaaagtgtgtggttaccaacccttaactgcggccatccacaaccgttcatccataactttcaagaattctctcattttgtcttccaataggggtaattagctccttccaacatataggttaagatgtaggtcctcctcctcaaaacatctacatttcttgttgaaattccgtattttaatattcccagtttgat

SEQ ID NO: 273203 - DNA, 1269 bp, Cannabis indica
gtcctaccaatcaattagtacacacataaagttttctatagcaaccaaactcagtagtgtagtccacatttctgactaactacatgactagtctacatattaattttaggcagctaataagttcttcaaagatcaaaattgtactctatagttcaataataagcagattgcataccccaatagaatagttaaataataacataacaaaccactcactgggaagaaggttcaaatccttgtgaaatcccctagactcattgttctcggtctcttcattatcggcaggagtatcggcaacaggtacctgtggtttctcatcttcaacagaagtgatggctttctgagttaaagcgctcaagcaacaacattcccatttgcgtaatctctcaagatcatacctcaaattcaaagcaaatccaaaacgacgactagaccccaaatctgacacacccagttgagaacaaggagctttagcagaaacccagatgggtgaacccattaaagccattaatgagcccaaatttctttgaacccagatcagcaaacacccttaggagaattcagattcatgcgagagagattgtggttcctatggatattgttgttgaattctgaggaaacccagtagcacattgtcaaggtagacgagaatggcggtggattttggaccccaccaaacttttatatatgcagattatacaatggtcgaagtaaaaaagaaatcttggccttttcaaagttggagaaagaatcaacaagtacttcaattgttagacgaagatgacttgtgagaggtaggtgagcagaatgttggctacacgttttcctctcttctctcgggttttaagagagagagagagagatcgaattggagaagccaaagctgtatttatctatctatatctatctatgtatagaattgaattgaataaataaagacgagtttaaaagcaacaaactttttacatattattaattatgacataataatatcacttttttcaacagtgtgtatcgatgaaacaaagtttggagctttgaacctatggaagaaggtaagacttttgagaaaggtgagagctttttttttgtggggtataatggccatttatagcttccaactatattttcacacagtaattttaggtaagaactggaaatggatattccattgctatttttttttcctttttaattctcacttaaattggtttgacccaagtaattctttctgtccaatgatatcaggtaaagtctaactagtgattt

SEQ ID NO: 273204 - DNA, 1905 bp, Cannabis indica
gtggttggggcgttaactagccttagtccacgagtcagttttattcagtaagttctttacttgtaaatgctttaagagatacacatgatgtatgttctcaagtttgcctgagcaaaatatgcaagagagttcaacccataatcaatgagattaatggggtatttgtagtagttggagaattacattaggatttttacttttccctctactggggagtttacaattaaacgatatctttgggctttctcatgaggtctagcccatgaagaatacaatctgctgactaggcagattagagttaagttgatcaggtcaataccatgtccattaatggtgggtgattattatgaattaactacacaacgtttgttatggaaagtttccactttaatcgtgatgtgatattcttgcatgatctgataactggaatttccttatttatatgcgagaataaatagagaaattagaagggtcttccgagaaggcactatcttaccctccaatctcatgataccggaggtgccttctaggctcggtccgacgaaggctgaagacttcacaagtacggaactaagatagctcctggaaaggcatatccaagtgggcttggcccacttcatctttgatgagggtcccgctgatgggtcttgaatgctgacctagagtctatgtgtccaatgccagaaacgcgaataacaatcataccttcaaatatgatcatttccactaaattaatgagagaattgatgttaattacttgatagacacattcatattaatctatttcattactcacaaaaacacatcccttaaaatatcaattataagattaaaaaatatatattatttaattaaatattaaatattcgaatatattaaatttgaattatggtatttaacatataaacataaataaaaataaaaaaataaaatttataataaacttaataaaatagtatattttaattaatttatttatttaaaaacaaaatacacgatatagttttttttttaaaaaaaaacaataaagaatatccattcctatttaaataattacaaacttaaatattcaaacatttaaaaattttaaaaaaaaaactgtaataataaataatagaatttatatccatttattcatagaatctatttcaatatctttttgaatcatttttttttaaaaaaaaaatacaataaagtgaggtggattaagaagacaaaagtaagaacactctctacctcctaattttctaattttttatttatctattttttcaaaaaataaaattaatctatattaattaattaatgataaaaaattattttaaattatcgcagttttcaacatttttttgatctatattaattgataaaaaaaatttaaaaaaataagatcataattatgtatagtatataagtagtactcaacttctacttatttaattaaagcaggatcacatgtttttattaacatttagtgaaggtgcatagcttctttgaatgtctcactaattgactactatgtcttgggacaggacatatcccttactaatccgataaaatatgatgatagcaacatgtgagatacggtgataaaaacaatatagtgagaccacagatcagatacaatattaaatgatggaatataaaactaatgcattatatttatgaagaatactctaatttttttcctacaccaccttatttacttattttaataataacaatttcattttaacaaattaatttaaaattactctctatatatacattagtataatctcaaacttcttaataaataaaataaataataagaacatactaataaactacttcaataattactccaaaaaaaactaaatagaattagtacataaatgttttaattttttttattttttaatttgt

SEQ ID NO: 273205 - DNA, 1023 bp, Cannabis indica
ttaattaaaacttttaattaaattaaaaacataacgtttcattcaaagtaccgctgaatttggggatcctttgtctataaacttttacaacaggcttcaaaatcggcattacaaaatggcgttacatttccaaaacataatcaaaaggtggatcttgtccattaaaagccgatacaaacatttattcaatgcgtattcaaacattacataaacaattattcttcttataagacgaaccaactttgatgcctcataaagcatccttaccactccttacccacgagctacaaatatcactatcattgcctgataaagcaatcgataagtaagaaatctatctacgatttcaaggtgagtaattactcatttcagcaacggtaatgactgtatcattaccccgatcataatcgagtcacaaacgataacaattgtttctcacttgacatgtttagcagtggaagtagcttttcttacctcaatccaatatcaggtgtgcgggacgacctgagtgaaactacgctcgatgatctcgggtcctatgtcacggcaaaaaaactcggtgaacaagttaaccaaactccgaaacaaaccctaattccataatcgaacaaaccctaacccctattggttcaaaaatagcttagacatccctaaaataccctaaactaggttcaacctgagccaaaaactaaattcgaagaaacttggaatttttccctactggttgaccggttcaccagtgacctgtagaatggtcgaccgattctggcaagttgggaaaaatctagttttacaccccaaaaccaaacccaagcttcaccaatcttgcttaaacttcctaaatcagtgtaataacataaaatcaacatatttaaacatcataatccagaaacacatcaaaatacccaatacaccataattgagtggaatttgggttttcaaactcaattcaaaacctagtagtgaagaagataatcaattcacacacaatcaaaccttaaatcaaacatagaaacatattct

SEQ ID NO: 273206 - DNA, 572 bp, Cannabis indica
atgaggacattgagctccagatggacttttcatacgaggaacaatcaaattagatcttggatagaaaagagaaagtattgtgaaacaagaccattttgctagttaaggtgctatggataaacaataaggttgaagaagcgacttgggagttagagtcatagatgcgagaacagtaccctgaattattcaggtaaattttcaggacaaaatttctgtaaggaggggatagttgtaatatctcgaacaatgtacttatgtttatttagacatattttattaaatatgtagttataagtcttaaagtaaggttataatcttattagtgctaattatgagttatttagtgatttttaagaaaatgattaattgagtataatttattaattacaaagattttattggaacatgtgggtattatatataccatttttgaaataaaaatattttcaagtttggcagttctggaaactcgatgaattggccaaggatgtcacgacggtaatagaatgagttttactgggattgtaccagattgtttaagtattcttgtgttgttgaattattcacggtag

SEQ ID NO: 273207 - DNA, 1212 bp, Cannabis indica
agagatctaatagcccactgtaatacataaatttgtccatcctataagatctaataacctactttatttctgaatgttgaggctggcttgaaagatcaaggtgtggattcttcaattaagctcttggattagatgttcgattgttatacggaaagaaacaggaataccctaaaaggcatcaagaggtaattgagtttctttcagtagttaaatttaatctatatacattatgtggagatcattgggtttatggttcatattagataaaaattattttatcaaaattctgcttccgcttttataactctaatatggaccataaaaactaataataaaaagttctcaccaggattgtgtttctaggtcaattgaatcaacaattccctatttgtgatagctgagaagcaagcattctaaatacttttcgacaaggggaaaattattgaattgaatacctagggagagtgaagtaccattctaaggattggccttggtcgcatggaactccttattctcttaaagtgtagggcctatgactctatgaagagttatggtcgcatgccatttccaatttacacaaattatgcgaccagtgccgctaggaagatccatggttgcatgtgagctttgatttctctttaatatgcgaccactggcgacatgttggttcttggtcgcatatttgacttatttctcttcatttgctacacaagaattggccaaaggtattgccctacttgcacaacaatccatttccatatggctttgcgaccactgacacttgggagtgctttggtcgcatatcacatttctcttctagccttgatgatgccatcttgtcttttgtactctattattccaaataagttaagtctttagtgtcactactacaaaaaccccctttagaggcggtttttaagccctttcagcgtcgattttcgcgaaattcgctaccaacgctgatcagggcgacgctaaagggtttataaaaaccgactccataggggtttcctaaatttttttcagctttcattaatatattttttttacatttattaaaaatctaaatttatttttgtattattaattaaattaaattaaagcataaataaaattaaattaaaaagttaaataaatacaaatttacattgctctatatgtttgtatattaggtattttttttattaatattttatattttataattaatat

SEQ ID NO: 273208 - DNA, 819 bp, Cannabis indica
cactgtaattaaaaagtcactgtagcgtgcctaatcattagggcgttacaattttggtaccaaagccgctaggttatttatcgaagaccattaaaacatgtacaatcattatcacagacaagctcaactcacagtttagtaagccttacttgtttagtaagttatgtgattagaaaagcatgttaggaagcatgatagtaatatgttattatttgaatgcattgcctaaaaatccataagtgtggtatttagaaaatttagataatcgatgtctgacctacttgacttatgggttcgtaggctaagtcctacaatatggacgcccaacaaaacacgagaagttgtggtaatatggtcgagatcggacatagttggggaggtcaaaatcccttgaatccttgtggacgcggaaggggccgtagaaggtttcaaggggtggtcatgaaaacccaccaccaactcctcatgactgggagcaaaggtttgcagaaatgcaagcccaaattaatcaacaagaggaagaaatttagaggttgagacagcagggtcctcttgcagtgcatccacagcaagtgccagctgccttggttccagtcgtgccagcagaacaacttgttgttggaaatcgtatagagcctttgtatgaaaggtttcgcaagcagacatctccattttttctaggaggtccagatgtcatgaaggtcgaataatagctcacagtaattgaaataattctgaatttcatgggtgtcatcaagaatgactgagttgacttgtgccaccttccagttcctaaaaaacgtactcgtgtggtgggag

SEQ ID NO: 273209 - DNA, 1103 bp, Cannabis indica
ctcaggtgtttgttcaaaaagaggaagcaagaaaagagatgaagttgttaaagattggcttgggaagtaaacccagcactatctcgacaagtattgcctcgatgaaggctgacaatccaggaggctctaaaaggaaagatgattttaaggaatcaaccaaggacaagaaaaaacagaagaatcacgacaagtacatgccaatctacactatttataccgagcataatgaaactcaggaaactatctatctcgcacatgagcacatggtcacattccgtaaacctgagcccatcaggcacgcgagatacaaaagagatgcaacaaaattttgtaagtatcacaatgacattgtgcatatgatagaagaatttcgtcagctgaaagacgagatagaaagtcttatctcgcgaggttacttttcggcaatatgtgaaaagacaaagaaatggacaaaaccaactaaatccgcccaataacccaagcaacaagagattacaacctcctcctcttgaaggagaggacattcaagttaatttgggagggccacatctccctggagaaagtaacaatgccaaaaagtgatatgtaaaggaagttaagaataagcagtcagtttttgctccagaatcttctaagaaagctaagactaaggaacctccaattgtgttcttgaaggaagatgaaaagcacgtgaggtatcctcacatcgacccactggtgattatcatctaactcgccaataaaaggataaaaagggtgttggtggacaacagaagttcaatgaatgtccttcattaggatacactgaagaaaatggggctggaaaaagaaaagttaaaaccttgcatcgtaaatctatgtggatttacaggcgatagtgtcgcgagtcaaggaataatcgagctttcattaaccgtgggtgaagtgttgggctttttgtgccctaaacaaaactctatttcaatgtaatcttttttattcaattattaataaaaacacagatttaatttcattacttgtttaatgtgttatttggttcatgtgatcatttatttacttatttgatttgtaaattcatccaaatcctaatcacattgatattc

SEQ ID NO: 273210 - DNA, 676 bp, Cannabis indica
taggcccgtgcctagggcccacacgtttcggggacccaaaataaaaaataaaaaaaattattaggcttttatttaactaaaattaagtgtattataaacaataaatatccatagtttagttggttgaggtggaagccataatgttcaaggtcatgagttcaaatcccataacagccccaaaatttatttcgtcttgggcccatatattttcagggccggccctgataacatagttgctaattaatgaaggaaataatttttcacagaggacgtacgagtgtgagtttttattttttacacattaacatgtgagtgtgaattaataatgtaaagaaaaagagaaaatatcaaaattatagaaaatggttgacgaaaccttttaacgtcactgcatacgaattttatatataataataaattttgaaatgtctgtaattttatattatatattattattattagtaatctcgtatttactttattaaatcatatcgtttagcgacataaatattaatggtccgacagcaaggcttgtcttataataatgcattgtcaagtaaacatttttactttttagcattgctaaaacaagctacgtacagccgctgttttttttttttttttacttttacttttattatttagtatatacattataattaaagtaataaataag

SEQ ID NO: 273211 - DNA, 735 bp, Cannabis indica
gctgagagaagtaaaaataccccgacctaccttgcttggggtagacttcaggtcgaagaaccaggcgacctcgtggggggaaggagcatcccatccttgggaagcgtagaggacgaagagagcagacaaatacaatttgggtcgggcagaggccaaagaagtccgccacatccctgaagtacttgggcaagggcatcagcgccccttctggttgtgagcccccgaccaggcgcacgttcccttatcaggatttgtggcgcgattgtcgtgggcgggaatatagcagtccagcttgcccaggtacccgtcctagtcgagagtgcggaggcgtgcctccgaaaccttggacggaggacttacccacctggcgcccaaggcaccctgcctcctatgaggaactgcctcagcaagctcctcactgacgtagtccacaccctcaaccaggacgtctctgtcggcattgactggctgcccggcctcattatactccccaaagtcggggggtccaacctcttcctctccctccgcggcgggaggactgcctggacgcacctcatctagctcctcaacctcctggacctcagcgtcctcctcacggtcctcctccatcaggacggtcgaatcctattcggcatcaggcagagtggcgagccaagccacttgaggataagaagcgtcggccagacgcgtggttttcttcatacgagccatcattgtaaagacctcttagtttaa

SEQ ID NO: 273212 - DNA, 5236 bp, Cannabis indica
tatattatagacaattttagtaaaaaaatatataaatcggttcattcagtatattcgggttattcgggcgggttagaataatattcaacctgtccaatatattcattggacggtttgaatttttcgtaaagttattcgagttgtgttttttgtcggtttattcaatttgatttgtacagtttattcgggttggacgatttgtaaattttgttgaacagccctaatatataatttttttttcccttttttaaattttcgtggtctttttataattttctaaaaatcaaagttttaagtttggtatttcgacgaaacataaataataattaaaagtatattgaaacttgaatggatgaactgtgaacaggggcgttaccttgtcttcccgccgccccaactgctatcgaccactgatgaagacgacgactgtgatatcaaactcgtacgagtatactctattacttacctcttcttactttctctaaccaacaaaacctttcatatgatgcaaaaaagagggtttaacacactctttcactttcactcaattctcaaaaacccctcaccactgctcctcttttcttctcccagaaccccattccataccacttccactcccttcgccaccaggcccctctccacttcttcaccggatgatcttcaagggttggtcgacccggaagatcctttggcgttggagtccttttcagctcacgagtttgctttcttgcgtgactcgttggattccaatgtcgctgattctggctcttccgaaggtaagattgcgtcagcgaagttttccagtgaggctctttgtatttccacggccattagagagaataatgacgggtttggtcaccagactcagagatttcttaggcagtatagggacaagttgagtgaaagtttggtggttgatgtcttgaatctgtacaaaaccctgaattgggtgtcaagtttttcatctgggccggtcgccaaattgggtatagtcacactgttcctgtgtacaatgcattgttagagatgttgaagtgtgatggtaagcgtgcaatacctgaatgttttcttcaagaaattaagagtgatgacagagaggtttttggtaagttgctcaatgttttgattaggaagtattgccgaaatgggtggtggaatgtagcaattgaagaaatggggaggcttaagaattatgggtacaaacctaccagagcaacttacaatgcgttagttcaagtattcacaacagctaatcggttggacactgcacagttggttcaccgggagatgtgggacttggggtttaggatggatgagtttacgttaggttgttttgcccatgcgctttgcaaggttgggaaatggagggaagccctcagtttgattgagaaggaagagtttatgcctgatacaattctctacacaaaaatgatatctgggttgtgtgaagcttccctttttgaagaagctatggacttcttgaacagaatgcggtctagctcttgcattcctaatgttgtgacttataggattttgctttgtggctgtttaagaaaaaaacagcttggtagatgtaagagaattcttaatatgatgattgcggaaggttgttatcccagtcctaagatatttaattctctaatccatgcttactgcagatcagaagattacaattatgcctataaattggtcaagaatatggtaaaatgtggttgtcagcctggatatgttgtttataatatcttgattgggggtatctgtagcaaagaagaattacccagttcagatttgttggatttggctgaaaatgcttatagtgagatgcttgatgcagggattgtgttaaataaggtcaatgttagtaacttcgttaggtgtctttgtggtgccagaaaatttgagaaagccttcaatgttatcagtgatatgataggcaagggttttgttcctgatactagtacatactataaggtgattagttttctgtgcatctccaccaggatagaaaaagctttttcgttgttcgaagaaatgaaaaagaacaatgttgttcccgatgtctatacgtatactattatgattgatagtttttgtaaagctggccttgttcaacaggctcacaatttgtttgatgagatgatactaaatggttgttccccgaatgtggttacttttactgctcttatacatgcataccttaaagctaagaaagtgtccaatgcagatgaactatttcaaatgatgtcaaaagaagggtgtgccccaaatgttgtcacatatacagctttgatagatggacattgtaaagctggtgaaactgaaaaagcttgtctaatttatgaaagaatgacaggtaatgttgacatccctgacttggatatttatttcagaaatggggattgcagttcagaaaaaccgaatgttttcacatatggagctctggtggatggtttgtgcaaagctcataaggtcaaagaggctcgtgatttattaggtgctatgtctgcaggaggttgtgaacctaaccaaattgtgtatgatgctctcatagatggattttgcaaggttggaaagcttgatgaagcacagaatgtattttcaaagatgtcagagcatggctatagtccaaccatatacacttatggttctttgattgataggctgtttaaggataaaagattggatcttgtgttgaaagtattgtctaaaatgctagaaaactcatgcacccccaatgttgttatctatacagagatgattgatggcttgtgtaaagtgggcaagctagatgaagcctataagcttatgttaatgatggaggaaaaaaagtgtcacccaaatgttgtgacttatactgcaatgatagatggttttggaaaagctggtaaaattgacaagtgcctcgaactcttgcaagagatgagcttgaagggttgtgctccaaattttatcacgtacaaagttttaattaatcattgctgtgttgtgggccgcttgcacgaggcgcatgaacttttggatgaaatgaaacaaacatattggccgaagcatatggcaagctaccaaaaggttattgaaggttatagcagagagttcctagtctctcttgggcttttgaatgagatgggtcattctgattcagcgccaatattttcggtatatagtattctgattgataattttctgaaggccggaaatctcgaagtggctttggagttgtttgaagagatttcaccatcaacaccactaacgcctttaagcaacaacatgtacagttctttgattgagagcctttcaaatgcaagtaaggttggcaaggcatttgaactgttcgctgatatgttaagacgtggtggagttccacatctaggtactcttgttcaccttaaaggactcaccaaacataacatgtgggatgaagcacttcaattatcagacagcatacaaaaaattgtctttttattttctagattgctaaatccattgtttctttcaagttaccacattatgcgtttttcaagtttcttgacttaatatttgtattcttgaaaagttaatttttttctaaatgagaataaaattttattaatataattaattatttcaataacaaactcgtgcagaaatttttatgtgatggtttttgtttgctcattgttgtgcttttaggcaagcacccactagaagctttgtgcatcctttgctcctttgttttgtaattagctgagaaattggcttttttttttttatgactggatgtgccatcttgaatttaaatatttgattaaggtctagtgtctgatgtttgttcagaatggtttgcttactgcttacacatggtttggcttctttccattacgacttcttggcttatttcccccttgcttgaatttattttccaatttaggcctgatatagtatcccagcagttgattttgtcagccgtcctctctcattatctggttcttttcccttgtggtgtgtaaaagaatgcgaaattttacttctattgataatttccttgattcttcaattcaatttttccttattttcttttcttaattgtatatacatggttttcttctctttatcatatataacgtccacatgttaaatgaaaagatttagaagtttctaatgatacccatcttgtcaaattccaactgaccaggatatacattggcaacaagaagagacgcctgacggaaactagactctttaggaatagcttattgaggcttggtttgatgactgcgaatggtttctcaaagtttctatgagagagataattattcctgcaggcatacttaaaacctgtggaaatggatgcatattgtgcctaattgaaggattcagcaggattttgaatgttgtactttgtctagtgaagtaacatgagatgcaaaaagcttgaagaaaagaacattcgattccttgcaagaaaagtaaaactgtaagtgattatatttatatgcaatacaatcatttggaagattattgatttggcatttacaacattgttacgaattagataagtatgtttgagcattaatctttttgctgaatattttagtattaaggtgttatgataagtatcatcagttttgacatttctaagatacaagttctctgtgatgtaggaatacaaaggcaaattaagagctgtaaagaattacagaaatccaaagaaagcgtttcatgacatagtattttgtgttgctgctgaggctgattctatatccaagactgggaatgcaagttgagcaagatttccacagtatcttgaataagatcccttgtttgtttgggactccttccaagattccaaaatcgaaacccttctgcttctctctctctctctcatctcaagatctgtaaattgtagcctgcaattgtccatccaaaagaatagccaaaaaaaattgtccattcaaaagtttggaatgcgagtctaatgttgtaaaagaaaacccttcggctaattggcattgtttggtgctcttttattttcaatgttttggctttgtaattgtatatgagaatagaatagaaatttattatttacaagaaagaggatacgttggggtgttagttttattttattttgagaaatgctaaaggtactatagaacattcttctaaggtgtaatatggctattgatgtaatttaataagctaattagtaattttttatcctgaactttgacatgtagtaaatcgtgtcctctgaactttt

SEQ ID NO: 273213 - DNA, 1152 bp, Cannabis indica
actcggcgggagttgttcgagagacggaagtgtgcacgaggaacacgattgcgcaaaaaatgaacccatcgttactcggatggttggaagggtgaccttggcttagagaagtcaaggtgccgcacgggtgttccgctgcctgaaaaggtgagcccgtgacaccttacacaaccctggctaacatcaagcaagaagtcggtgagtatttgcaagattactttaaacgttttaatgttgaagtaactaaggtcgagaaggcccccgagtcttcgttagtttgtatgttgattataggtgtcttaccatgaaccgatttctggatagagttgcaggctcgaagaccagagtcgttggtagaattatttaccatggctgagccgcataagagaatgtgaaaattctctggctgagctagaaagggtgaatgataaacacgagttacccataccacggtcacgatctcgaagtcctagaggaaatacttccagaggaagaagcccgagaagttgcagccctcagaggcagcgaagtccgaagctggccaagtccccctcaaagaaggaaacatctccaaagagaaaaggaggatcgtgctttgtgaactatactgaactagcagtccctcacgatcatatttacgcgattgaggagaagaatggagtcttcagaaagcctcccccgattagagaaaatcgcgacaaaagagatttgaagaagttctgcaagtaccataaagatattggccataccaccctggaatgttggttcctacaggatgagatcaaggaacagatcagacgagaaaaattcaacaagtacaagaaaaatggagaagatcgtacccaagcgggtgataatgatgacacaaacaatgcgagtggttcacgaactcctcgtaatatcttgacgattattggaggaccccatattgctggagattccaagaagttgcaagaacgatatgctaaagaagcaaaagagaaatcgctcaccaacgtgaacaatttaagtgagcgacctgagaagcttttcaagaaagaatgcaacgacataactttcatggagagtgatgccaggtgggttcatcactgatgcgtgtcgtaagccacaacaaatttactatttttttaattccaatacttccaattattt

SEQ ID NO: 273214 - DNA, 2238 bp, Cannabis indica
aatcaatattttagactccgacgagacccgaacccaaatcctccctccacgaccctagtgttgaacctgacctctgacccgaactcgaatccgacaccaaacctaaacccgacttaaataaaataaaaaaataaaaataaaaatgaactttacagaacacacttttattttctgtttttaaaattgaaaaacaaaagtggttgcagaacgcatttttgtttttcaaatacaaaatttttaaaagcaaaaatttaaagtgttaccaaacagcacccaaattttttatttttttgaaatatatcaccacataattaaattttactacattaatatagtaatctatgaggaggcaatagtcaaaccaactactagattagcatccccacccctttagaattgtaattataatctaattctataagccctaacaatatttcttttctatatatatggtagggcctagccgatgtgcaaccaaacattatttcagaagaaaaaaaaacatatataattgcatggtgcatccttatataacatttcatatgacgcctaatctaaattttattgctcaaatattatgaatttataaagtgaattataagtatcaaacattataagtaaaacacaaattatatacataaaaatttgaaagccacgaacttaaaaaaaatagataaaataaaattcatggcaattacacataaatattaaagcaaaagtggcaatcacacataattaatataattgttaaaattaataaattaattataagctatgagcaatcttatattgtacggaataactttatggattatatatacgaaaaaaaaattaagtacctcccattattgatatgcaaattctcattaatgtgtatatctttattctttagatttgtaaaataaaagtgaaaggaatatataagtggtatagaccttctaattagctttcactagctctatttatttgatagaatgaatataagcagtaagcttgattaagtaaatcaaatttgttgaaattatttgtcatataagtatgtaagttaaatttgtatgtaatttatatgtgtacatattgttactctttttatatagtagacattaattaatacaaaaatgctaaagaccaacaccgcttgaggccattataaggtgtcagtaattctgtgatctgtaaggaaaaaaattaggtaagttgtacaatttcatattgcttgggaaatattaagtgtaatgattctaagattgtgtaggtatgaagagggtttaaatagattaatgagtactacctataccaacaaaatacgccttcttggcagttcatcccttaagaactccaaagttaaacgtacttgacctgaaataatcttagaatgggtgacctcctaaaaagttttctcaaaaagcgtatgggtgaggacaaagtacattgtaaactcatatatgttagttttcagggcaagtcgtcaaggaatcaaccaaagtgacgtagtcgtgtacataggaatacatagctgaagcaggggcgtgacaaattgcaatcacacatcgcttggttatgtcaagtgtgatgattctaagactatctaagtacgtatgagacttcacagttgatgagggtttaaatagagacaatgagttgtattttcttttcggtagcccatcacagaatgtaagtacgtatgagacttcacagttgatgagggtttaaatagattgatgggtacatatattaattacttatgacaacaagatgtattttttttttcggtagcccacatcacagaattctaaagttaagcatgtttgactttgagcaatcatagaatgtgtgaccttctggaaagttttttcaaaaagcgtgcaagtacccgtgtatactatataggtattagacttcacatccgaattaaaagcgttataatattgttattggtgaaattaaatataagttatatattttaatctaataactattataaaatatcattaattatttttaaagcagcgacgaataataatattagacactattagtgcctattattgcaacgctcttaataaaaatgttaacattaacaatattaaacgaattagagttgattagctatatatgtaaatatgttagacaaacatttgtatattgcatgttctattataccaattaatccattgccaaagtcaaggtttgcgttctaaaataatttgttactctataaaaaaatgggtaaatacc

SEQ ID NO: 273215 - DNA, 1121 bp, Cannabis indica
gacacaactagaatagaattagaaaaacgaaccaaataatcatccgtctaatttctagattgtttgacaaaagaattaaaataaaatcagataaaacagatttttgacattacaattaaccttaaggatacatatattctattttatccaccgtttaggagacacaacagtagaaactgttgcaacaggttcaattcaacctcgtagtttgagcactcaactattatgtaactacactactaacaacctcttcaatcgtgaaaaacttgttattcccaataatttgatggtgaaccattaaagaacaaagaagaaccaacaacgaaacaaaacaaaataaaaactaatgtcatacagataagactaaaatactcaaaatcatatcatagagacaagactaaaacactcaaaagtcaaaagtatgtcacagacaagactaattgcagtagcaaaaatcgaattgctatagcaaaatacaatcccgaccaagctgcaacccaagtaaagccgacgggcctgatcagagaaaaaagacagcctttgatagctataaatttaggaactaaaaacctaatttttaaacaaaaaataaaaaaatttaaaaatatgaaaaattttattaagaaaaaaaataaaaataaaattatgaaaataaatattgaaattaacacaaaataatgtgagaaatttttttttgaaaaaatattaagactaattttaaaaatgattttaaattaattattttaaaatattaaggtatacttatcattttgtatgatgtaaataaaacttttcttttttatttttatgtggggttgtagttgggcttttgttttcatttgggtaataattaactaaaaaaataaagaaacaaacaaactttgagggaattaataataatggttgaaacaaaatcatcaataattgttgaaacaaacttttgtttttagttttttttttaatatttaattggaaaactattgttggattgttatataagatttaattttggaaaaagaaaaaatattgatatggatattatctaaatcaatgtttggaatcctttctctaaaaagaaaaaaatggaatccttcaataaaatgtttttttaagaaaaaaaa

SEQ ID NO: 273216 - DNA, 794 bp, Cannabis indica
gttatcttccgtccaactggacatacattttccggctaggtgttgctgatactcttcctgttggccatccaagtttgggtaactttggcatcccaattattgtccctactgttacggttgcacgacatacacatcagtacctgtccaggaggaggatgatggcccgcacaaagcagacgatgcgaaaggtcaacgcatctgatcctcatgtggcccaactcgccacattgccaagtgccgaacaagatctgcccgccatggaggaggcagatcatgagggggacgttgaggtacaagagattgaggagcacgacgacgtccgtcctggcagcccttccgaggccgaggaggaaggagtggttgagcctccaaactttggagggtataatgaggtcggggagccggtgtctgcggagggggaagtcttggtcgaaggggaggactacgtcaccgaggagcttactgaagcagttcctcacaagaggcaaggtgccttaggtgccaaatgggtgagccctccgtccaaaataagcgaggcacgcatgaaggccttggataaggctagatatttgggcggactttatgtgttacattccttctccgaatcactgggcaatgaacccacagaaagagatgtgtgcttggtcgagtgctcacataaaatagtgggcaatggtgcccttgcacccgtacttcaggagggtggcggattatttttgcctttgtccgacccagttcactcccaaggccattaagtacttgtctgccctatcatcctctacgccattcaagga

SEQ ID NO: 273217 - DNA, 545 bp, Cannabis indica
aaacccccaaaccagagaaactccaaaccctctctgccaaccacctcgttaatcacctctcatttttccatttttttcaccatttcaactcatttttttttattaaaatcttctattttctatactcaaaattatatactgaaggtagatgtagtggttgtggtggttatacctccgaccaccaattttagtgaagaaaatattaaatctcaacatccattaagatataaatataatttattctaattttagtaatgtacattgctttattttttattttataaattttttgagagtttttttttatattattaagattgtgtgattgtggttgtacgtggtggccgaattttggttagcattggtagttggattgcaggtaaaaatttaaactttaataatatatatgtatatattttatattgtattgaatacgtattgtgtgtgtatgtattgtgaataagaatgtgatataggagagtattttatgtattgtatatgtatatattgaatattttaaactaatagttttgttaaatattgtg

SEQ ID NO: 273218 - DNA, 2717 bp, Cannabis indica
aagggtctttgtttataatttcttaaaacaaaagatacaaattgaaatttaactaaaatagagggaccttttttttgtatcccttatttctctaatgttatttttatttctttttctaacttccccaaaacttttttttttttttggaaaaaaatggctaatgaactaatagtttgtaattcttttggttaggcaataatttatgtcattgagaatgacattctctatgaaggttcatttaccttaaagtaaaggacagacagctacagaatttggcaaaatggtatctctttctctaataagtactatttatttgtttatgcaatgtatgtatataaatatatgggagtaagatagtgtgtttttatatttaaactggtatttatatttatatttatatttataaaggtagataggtagatgagtagcatgattatttggttgttagaatcctgggttttgtgataataattctacttgataaagctgatcggatcctgagttatatgaaaaacatatttcgacttaaatgactactttgtttcaattaaggctttgcctttggtacttggattgaagttagccatatttattaatgctcccaccaactgtaccaataattagctattttcatataatatgttttctcagttcccaacttaattacgtttcttctggttactgggataaactaactatattagtactcttttactacccaagagtttatgtttttaagagactatgcaataattttagtcaatgacatcatgacaaatcatatgtgatatgtgattatatatgctacaaattaatataaataatatatgcttattgcttcggtcagcaaaaagagcacacatatatgtagatatatagaggttaaacatgaacagttaataattataaaaaccgttatagataaaaggcatgtgtgagtgagtataatcatgtcatgcatgataagcacatgatcctagtgatgcttaagcaaagcaacacgttgcaaaggaagaaacttttgcacgctcggatttcaaggttcgaaaaagctcaacaattgatatgaacaacttatatgcacacacatatatatgccataagtatacatatattagttggcccaaaaagggaaaaaaatatgcaagtttattatttgaggtaaagatgcaagtacccacctttagtaccgctacacaccatgatctcaagctatagctatataggctttagctgatttcttttcaatatcatatgtatgaaaattatcactttttctttttattaattagtattatatatattgattgatcagtaattttaacgttagcttaagcaacgtgtgaatcaccaaaccatcttcttttcttctaattcttccatttgacttgtggtccaaacatacttttctaaaatgtgaagttaattaattcttatataatgtatataatatgtataaagctggccggactgtcatgcagtcatgcatatataattatatcttttggaaattataatattatggcatgcttcaaccggaagtgggctatcagtgggaatgccctgataaaagagtttttagcctaatttaatcagtagagttggatcgactttgggcttttcttattaggacaatgctatcagactatcagtattatatattataatcactcttactcctcaatatatatgactgagggaatagtagttttatgagaaattaatgctcgaagatattattagtacttagtattcttttcttatgtgttatatatgtaattaataaatatttgattcatataatttagtataataatttttaaaaaatataactagtcaatcatagtgtgctacctctaaaaaatactagccactgcacatatccaatagcaatgctctaattttattgggatgtctgtacatgagtttagatagctatgaagtttggaaatcacctcccaatataaacaagattgaacatgaatattaatttatgcagaataaaattcaaataagctagcaaagtttaaaatataataaactcaaatataaaattaccagggtttctctctctcgcatgtcgtctgtgacgatacaaagaatacgaaacgacttcaatcgtctttgtaaggcttcattgcgatttcagtcactgtggtttcaatcgtctctgttcgttggcgacgactgacggacgtttgttgacggtttctcccctgctcgttgtcgacgacggacggacgtttctcccctgctcgtttaggcgctgacagacggcaacaacttagggaggggtttcttgattgtgctattgcagactaatgattttgtttctactattgcagaatcgagaattgtcttgtcttttgacatggttatatagtttctttggggtttcttggtgctgtttcttcatggtgtttctgttctgtttttgtttttctctggtctttacacggtaatggagaaactaaaaggggcggacataactattgcggatgaagaggatgttgttgtcctacgatgcaagcgctacgagggctaatgactatgacgataggtggtgtattatgagcagatttttgattgataaggcaatagattttgagactatgaaacacttgacggcttcattatggcagccggggaaggggatgtttgtgaagaaattggacactaatcggtacttgttccaattttatcatgagattgatatc

SEQ ID NO: 273219 - DNA, 242 bp, Cannabis indica
tttggccagaagacatcaaggtggttcgggaattttgacatgtttttcccgacaaaattccaagtttaccaccttagagagagattgattttgttattgatttggcacctggagtagaaccggtttctaaagccccttacagaatggcttttgcagaacttaaagaattaaaaattcaactccaggggttgcttgacatagggttttctcggcccagtgtgtcaccctggggagctctagta

SEQ ID NO: 273220 - DNA, 367 bp, Cannabis indica
gtagatatcaaaatttggagatcattatttagtaaatggacaatcaccgaattagaaaaattgaatgaaattagacaaataattcttaaatccaacaatctcaatagttcaggagaaatttttagcggccaaaaaaattctgggggtatgattttgtacatgtcaaagttcagggggcaaaaatcctaattaacttttagttttttttaagattaatgataaaaagcacctgtgatgactagtacctatcgttatttgcacaattaagtatcagatttcatataaatcaattaaaaaacttttaagaaatatcactaatcaagatgtcacctctaagtggtgctagataccactagtatccaataat

SEQ ID NO: 273221 - DNA, 555 bp, Cannabis indica
tataattaatgtacaattaatatctttattcttcctctataggttgatgttttcacattaattttattatacaaaaactatttgtatttttttaattaaaaaaaaaaagaaaaaccttttgtattcttgtaatttttttaaaaaaaaaatatttatattctttgtataactcttatttatgtgatacttgatgcaccatattatatatagatataaaatgaatgagtaaaaggtagtatgtgccaccaattatatatggagtttaaacacgatgacaataaatgtttctttggtgtttatgcatctccactcttgtgcattctatacaccataccaatctcttctcttttagttttaataagatatgtaacttgcttttaattacatgtaagttgtaaattgttataactttttctttttcattttagatacatgaactcaatatatataatttgtaacaccctaaccaacagggacgccacgtgtgtgtttttataaaatttttatttgaatactatataattataccaaaagtgtgggtaattaaatttttga

SEQ ID NO: 273222 - DNA, 1534 bp, Cannabis indica
taaaacaccagtaaaacacaaaacagaataactcaaaacaacagtagaacaccagtaaaacatcaatagaacactagtgaaaacttaacacagtatactgcagtatgaaacttataaaaaacacagtaaaaaagtaaaaaataccgcctagcagtatttttgtaaaaaaataacaaaagttagtataccatgtaaatttccctcacataattatctattcaaaaatataaaacaaaataaaacgatgacaaaaataataacatatatatatcattttaaatagtaaattttaaaaatctaatttagtagcatttttcaaatcactaattttgttttttttatttgaataaaataatatatttttaattaaattaaatacttttaatgatattttaagtgtcaataaaactcaatacagtgacatttcaagttatatatagtgatactagaataagttatatttttgacaaatgctactagtttaacaaatctcttaaggttagaaattgtaacattttcaaatgttacttacatgttatgtcttcgaacttttcttgtcatgcttaacaaatatattttttatgttatctcataccaatttaatattatacatgtgtatttgagtctatatttttttgtgccacattgagcttgtgcctgttgaattcaagtagttgtgatagtttcatgttgtatcaataagcctaacccgcattacaacactagttttgggataaaaatccttataaccccaaaaaatgaaggtttttttttttttatctgataaaacataggcacgaaagcatgccaaagaaagtactggtgaaaatggtggtggtgaagcctatcttatcttaattgaaggttgaacccagctactaaagaaagaaactaatcaagtagcttggcctttacacttcaccttttttctttatttttattttttgtctttgttttttgaaaaataaagtagaaattacttattattaggtagccaattagataagaaagagtgaaacatcaataaatgaaaaaacagttgcttgtctcctttgtggttgttctctaaggatccccaatcagaggctgcaccctctcaccatgtcaattctcattctctttgtcccttcttttctaatctttatggtaaacacctttcattatggtaacttaaactttctcttcacataaaaccaaacatttttcatcttaatttttgactatacataaagggtgttgatgaaagtacatacatctatgatgtatattgtctgtatatataatatagtcatgaatgagtagttatttgtactggacttttgtgtacgtgtatatgtattagataaatatatgtttttttttttcctgaagagatttatacatgttatgatacatatacacacgactaaagatcaatttcattactactagggaatctatatatatatatatatatatatatataatgacatcctagttctatttgttttcctttcttctattattatatagtgggtattatacatacctcact

SEQ ID NO: 273223 - DNA, 612 bp, Cannabis indica
aaaaataaaaaactaaactttaaataaaactaatatttacgtgcctcggcacgtaacttctacctaatatatatatataccctaaaactaaaactaatcatttaaaaaaaatctcaatcataattaaaattgagctttgtgcggttatattctccaaattatgatatttattttttatttttttttctaatataattattagttagtttaaaaaaacctattttttgtcaagtttttcttataatttaaacattcatgatatttttttttaatgaaataataaatttttaaacatttacgactattttaaattcaaatcctaaatttaatacttaaaattttactaataaactacaaaaacacacaaaaatatgtgtataattaataatatcatataataataaaaaattaaacacgaggacaggggtgttatttctattcctgtcctgtttaattcggggatagaaaattgtttccttctcatgacaggtacccacgggacatatgccaactttccatccttattcatagtaaatgatgatgagatggaaagccgacataaaaaaataacaataatttaaaatgaatcgagatataaaataatgtatatga

SEQ ID NO: 273224 - DNA, 878 bp, Cannabis indica
atattgacttagaaagatacgacggtaagattataatatcttaaccaagatcaatatcggtcccagtccaatgtatactccatacatccgaaactagtatactttgccaatgttcttccagaacatttcacttatccaaggtgtaagtacacttcatcgctgattatcacatcagtgtaaatcgagtgcactgatgaatcagggacattgtcttttgaagcacataatcacaatcacattccactgtgttgacatcactgtaattgtgaatgactatatgttctggacttaacagattttgtatatattaaaccataaaaatgaaaactacatgtaaacataaatgacttctaatcttatatcgataacaaatcaaattagattgaaatagattttatttagggcataaaatcccaacaaactcccacttgcactaacataaaacaagtagtgcatttcaatcaatgaattgtcttgatatccatatcaagtgtagtatatttgactcaacccaaattacaggaactgtaagtctgttgtaagctactactttctgcaccattacttcctttgtgttcataaaatattatgcaacattatttactatatgcattactcatccaggaatactgaattcaatactgtttttaaagtgcatctgaataaacagaagacatatctatcattgtatccgaaaattggaatagagataacacaatgtagatttttctttaattgaataactttccagtattttcgaaattgcaaagttatgtatcttcactgatggaccttaaattatcatagatggatttttacatcctgctagaataattcttccacccccaaagtaaccaccatctcaaatcctttatgag

SEQ ID NO: 273225 - DNA, 809 bp, Cannabis indica
agcaaaatattcacctacctttgagtcagttaatataagcatcaattacaaacacacaaccatcttaatatttaaataaaataatctacacaaaagaggtcactttggcgagatattgtttcaattaatttactcaaaatattagacataatagagagacggaaggactttagcctatatgtaggcttaaaccctcactcaaatatatacatcaaattttttacatatagatatattcatatattaattcacttcactcaatttattaaagctcaattcacaaaagccctcactcaatatcttaatcatgattcatgagcctaccatcattctaatcaagcccattttaaaagtagcccattacaaataataaaaaaaataacacttttttaaaaaataaaataatactattgacaatgttttattttattttgttgaagataaaaatttgaaatgatacatttatcagttatttttattagttttgacttaatatttattcaagccctcactcaaccaaatttctggcttcatcactaaacataaaccaacacgaaaatttaaatttaattatttgaacaataataataataataataataataataataataataataataataataatatattaaactgtgcttataatagaatatcatgatgagaaaaaaaacgaaacaatatgcctttttttttattcaatcatatgtatggaaaagtagatatgtacaagcgtatatcaccaaataacaaagggaaatttacaaaattatgcattaaaaatcctaatattttatgcttaaacc

SEQ ID NO: 273226 - DNA, 5348 bp, Cannabis indica
cttgagatttttagattaataatgtatatactatatccttatgattattattgcttagatctacatatccttatgctctgttggttgaagcttatttagttttttttttttttttaaactaatggcttaagcttcatgtttgaagtagagcaatgtgataacataaatgaatgtcagttatatataattttatttttggtatgtttattttttgatagtgaagaattgtttgagtttcattcttgagtttctctaatatgtttatatttgatggagacaaggtaaaataaattgaccaaattaggatttttgtagtcaatggaggatggaactcaagggagtataaagctctacaggtgcagcagtggtgatggtgaatcggagaatgatgtggttgatttgacaagtcaagtacaccttctgccttgtaatatcaagtttgacggcccttgctctgttgctgattatttcaaacccaaatccactggtaaacaacctgttattgctgtaagagtatgttttgttctagtagtttagaggttttagagaatttgtgttgatggttttcttggggttgattaaaaggtgtggaaattgagggactaaagttagaggaagctcatttcagaggaaggaagctgcaggggactacactttctcttccagaagggtactctggtatgtgatttatgcatatatttttataaatatggtctaaatatattgatattagttatgagaaatttctataatttataggtttattaatattcttgcactagcagtccagtcttcattcgtttcgcctgaaactttaggtgtattttgactcgaagcgtggtgcctaggtaatatgaacacctaatgttttttttctgtgtgtgtgtaaagaaattaagaattagtggcctaagaattggggatatcactcctcagacatatttttggatgaatagttatgaatgtttttggtattttattgttttggcctcaacatcatcaatgtcaagatattgttctgcaagctttttattggtaggaggaaactatggaaagttagatttgatttggtagccttttttgactcttttgagataatatggttttaagaactttcattttctgatttattctgagagattggagtttttggttttaattaaagatgatagcttatcatctcttatgactttaaattgttttaattaaagatttggtttcagctatgtttcttttcaaaaaaagaaaattagaagagaatgctaaccactaggaccttcattgggtgtcttaagcaaaggcttatccgtcttctacttttcctttcatcaagaatcaatcttgttcctgaatgaaagtagttatcattgtctttttaatttcaatgaggcttgttaactttcttgtattattcctttattgaactataatctctttaagaagaaacatcactaattatctatatcggtatttgttgcaggatttgttttgggaaagaggggactagggaagagaaaagcttccagcatggttggagaggattcaaaccgttgggaaatgaatgcaagttaaaatttaacatattggaaacacgatagccttccctcacatcaagatacatttgttcgttcttttcactggcttgctgttgcaaaagctgtaagtagtatagtatccactctacatccttaatatgtacaaccttcaatactgagagaagaatctttgtatgttatgtcccgagtttttcgatgtttatagtgcccgttcataacatgatacatagaatcctgcaaatataaaatggtatgtagatcatacatattacaaggtttatactagagtattttggcaattgaaattttggtactcaattgatctatgtgacccaattttaggttatttcttctttagagcatgctactcttagatttattcatggcaattgacatgttaagttacgagtgcagatgcatcagccggttgaagctgaagatttggtttctgcttctgttgcactagagaagatgaagtagaagaactagacaccttctataatttggtacttttgtctgaattgctgtgttagtagtgttatgacaagcccttcaatgttctcagaaattaattaatgaaattcttgtttgaattaactatttgtaattctgatttaattctatgtattaatgttaagacaacaacactaatttgttaatagtaacagatgtgccatatataatatattccattcattctctttcaccttaatttctcactttatgtaaaaatcaataacttgacatttgagacaattaaatttgatttttatgaaataaattatctcaagacttattattattttctagtgatttcactataacttggaattcatttcttgaaattcacactatgtaatgcaatttgattgaacaataataatttatacttctttattgataataatgaatgtgtcacatgagaaaatgagttttacaaaggccataaaactcatcccaaaacacatgttttggttatgttatgataggatgaatcaaagaacatgaagtgactttgtttttttgtatttattttcattttcagacacacataaatatattatatatgatgaaaaaatgccatgaggattaactaacaaccaaccaaaattaatggcttatattgatgaattgtggctcagtctaacattccatgtgtcaccttcatcaatcttttccaccaacaacaatgcgagacaaggcctatacatacatcttttgctgtggaccctccaatgttcatcaaatttcaaatcctaaacaaaacattaagtcattataccaatctgacctcctattctgccattagccatggccaaaaattacaatgtttaatataaataaagagagttgtctttagcatggtcttggtttgatgaagagttctcttttgagcccttgttgttaaccaccactacaactgacaatgaaaggcttcacacagtcaataaattcagaggttctaatcccgagcttcagatcaacctcaccgccacccaaccagaagaaattggggttaagttttgtaatcgcttcgtccaaaatcacctgaaatcaaagcaataccaatcaaaacaaggtgtcaattataatttctgtcgcgtagtctagttggtttctcatgcagctctctatctatttaacctttccagcatgtgatgaaaagagagattttcattatttcaacgtcaaatgttccccaaattcttttaaagtgatagtgttccctacacagatgcatgtgctaacaactcatggttttttgctgtccataaacctagctacactattctaactgaattgtcaatccatatctctatcatacaataaatagggtggaccaccctattataatctagacttttttatcacttcagaacggtgttgtattgatggaccataattagaaatgaccatcatccaattgctggaagttaagtttgaatgaaataactcacaacaagagttttcttactattgcaaacataaaccaaactcccttttgtcatcacaaaacgttgttatcaatggggtacataaagcaacactgacttaaagcaaatcctcggcaatcaaatcgaaaggggtaatgagttagacctatctccagcattaagagacaataatcaagcagtttgtcactgaattatttgtcaatgcatgccgagaacaaaaatattcagacaggttcccaaaaatattcagacatgtacccgaaaatattcagcatgagagtattgctttcagacagaagttctctgcaagttcacttttccatttttatcatattcacacttttaaaatatctactgtatcttagtggtttgctgctctaattcatacaaaaaataattgtcaaagtctttattctcatgtctattccaacctgaagtgagctcattccttttatacgcaattacacatgatatattaatttgtggggaaagaatgtgtaccggaatgtctgtcttcaaaccaacacatgttacagcattgtgctcgtatccagtcaactttgctgaagtctcctcaggtgcaagcctcactgagtgaaagagggagaaaaaatagcaatcagtatcatcttctgagatatattaagataccaaagcattgagacctcagtattttttattgttatatgtaccagaagaaccacagagacaattcaacatttttttaagagcttccactatgacaggcagaaggtaatttaaaaaaaaagtctttcaagtaaatgggccaagaactagacagatcatttgaaaaagaacctaaacgcaagcaagggacatgtctagccaaaaagaacttaaatgttagcaatagacatgtctagacatgtcaataaatgatgtaaggttgcaaatatacacaatagttgacaaagtcaataccgtaagacaactaccaagatgaaaacgagtactccgggatttcagaagaaaagttggtaagcagtattagaatacaggcaatccaaagtccagcaatgttgccatatgatgcctatttcaatcaattgttcaagggtttctcattctaactgaccattaaaaaaaatactttgttgtttatctatcaaacctacaagttaagtattttataattcaaatactagagactgtttacatacactagaggcaaatacaataacataataagtattgctttagtagtacagaaacttacagttaaatttcttttttgctatcttgccatcattgagtgaatacaagaaatttttaacagtttcagcattgaatcgagcagtatactgcaatacaacaattaaaaagaactaagtcaatgtatcattacattcaggtagcaagtacaattgaacttttttaatctctttactttaccagaaaactaaaacctacctgaacaacaacaacatagtattttgaattgttgcgatcactgcaatctgtaacattagatggagcttgagtattgacctgttggagaacaatatgtttagaaggcctgacctttggactttaaaagttggcgtcagtggtacccgaatagagagaaagggctcaattcagatatcctttttcgcaacgtttgctgcaactgtatacagtctttggagaaacagaaacaatagtatatataattgcttttcttgtactgttacaatgattgatagggagattaaaaggagtttgcaagctagaatactcactgtattgcacaaaaaacccacaaggaatgagcatagcctcttagattacattagaaggatgtaattattttgtttttaaattaatgaaggttttt

SEQ ID NO: 273227 - DNA, 851 bp, Cannabis indica
actcttatgacactcctattaaaatagatagaaacctggtcgccaaaaaatatctttaaagtgtctaataatggtacatatttttctttatttatatgtaaaaagaataattggtaaaatccagcaaactttttttttctctttcccaaggaatcaaaacacaaaattgagaatgtaataatttttcaagtatctattgtaaaatgtacaaggcctagacaatacaaaatctataaattaataacatcagaacaatcactaaatctcagcagattgggaatggggcaacctacccatcctcaaggatctctttatgaacatgcatgcatgaggtactgcagtatttgtaattgtaccgatggaaaggaactttaccagccaatgacacactacaacaggagcaatttatatcaccagctaacccacttttggtcgttgtgctatcattgccttgaccattaactgctgctgctgctgcagccattctcctctcggcagcagctgctctcttttccctctcagcagcctgtgccctttttagttcctcctggaaacagaaaccccaacaaattaagacgttaaatttaagcattgttggtgaattttgaaacttatttatgtatggtgtacaaagattgaaattaaaagagagaatcgaggaaaattacacagcattttcgtccaatgtaaataacaattataaatggagctagtaaaaaatatctcaacggctttcaacactaaataagttgcgagaagaatttatggatgcattccttcaaagatttaaacttaacctctttcgaaatccgtgaaactgaagtaggttgagtctgtcgtttgactgatga

SEQ ID NO: 273228 - DNA, 1184 bp, Cannabis indica
catggttgattatgttcttggagagacggccggcctcagcagcaagctaaaaaataatgcaagtataagaaagaatctccaaaaaagaaaacaataaggggaaaagcaaactacaaaacacttaccacagtgagggagtggctgagatcctggacttggtagatggagttcaaggatgcacaagcagcgaaccgcttaggtgcacaccgggtaagctgagacgcaaactcgccagtcatctccgcagcaaagggagctaaggtgggcccaaggaagcgaccgaaccagtccgacagggggtccaaatttaggtcccacggattctggtattccgggttgttgatggtgttttgcatctcaacccgcaagaccctcctaagggcttccacctcagcatacccccgggagtattcgtccatggcgtagttgtgtttagctatccggagctcctgtctcgcctcatctccaggaaccggagtcagcacaatattgggaggggcagtatgttcttccatgggagagaccccaccatcgagaccgtgggccggagtatcagctctccgaggccgcttgggctcctcctgggcaatcattttgcctttacgtttgcgaatcagagcaatttcttgctcttcttcaccttcttcagcttcctcaggaagagcccggagccctcctgcaccttcttcaacttcctcagaaaagccccattgcttttcttgaccttctcccggcagcacctcctcgtcatccactaaatcaatagtgtctggaggagcactggaagaaatctttaaagcgggggccatcggggaagaagtaaagggaggaggagcctcaggagtgtgaaccccggcaagttcggccaaaatggcgtccatagaagcacctgctacaacaaaagaaagcaagtgttagaacatccgtgggaaaccaccaacacaagatatgacaagcaagctagtcctaccctgactctctaattcggccctagcaaagttccgaattttgatgctggcagcatcatctccgagatagctgtccgaaggccggaaccagctggatgtaatgtaagctgaagggcctaagggaacgggctccggaggaccagaacccatccgggaccgacctaggaaatctcctaagtttgaaaaataaaactccttcaaatggtctccccaccg

SEQ ID NO: 273229 - DNA, 1799 bp, Cannabis indica
cgcataagattccaagtgtttcttcgcagagaacgattaggttctccgtacatccccgtgagtcgccattcatgaaaatttcgttgacgaaccaccatatcaatgtagttctgagaaaaacccagcacctcagcatcattcttatccttccacaacattgctaaacctcctccccttccctgagcatttaccgaaaagagaccttcataagccagttaagaagaaagcaactccagtcttggtttcaaacagagtgtcgcacaaaggaaaagaaaagtgagcttcttttgataaatcatatctttaaggaattgaatagtccctaggttctcaagcccatgacaattccaacttagtgtactcataatgactggcgagcccgatcggtcgagcctgccattgtgacgttttttgaaagagtagtattagtatcgcccatattcacatcagaaccctccttaggcccaacaggcgcaatattaatatctttacctattcttttatgttttgagtccaaaaagagcatttcctcctctccaacatttgaattaattccctctgttgtcccatcaaaaatactgaaattctccctccctttactcccacggttatctcccatatgattactcatatatcccataataatataaggaattatttgattaccatgattctctccaagactcctggaaatcggattgacatctccattaaacacttgaaaatcagggattccattcgttctctctcacttgagaccaacccccaccggactgccatagcttctagtattggatgaactcgatcgtaaccatttagatcccatcgcatgttgtgttcttcttggcgtcgccttcataaaagtgccatacggtttaacaatcgtagcaattggttgaataaacagatgagaaaaaaattgctcagtatggccaatgatcccataaataaagcaaaatgtaggcacaaactcatactggaaattaatccaaaaccagtctcctccaacatgttgcaacttcattctacatttaaatggtttttttatatcaagcccaacccgaagccacaagtagtctctctaaactgcattaaaattattctcattagacttaataaagctcccaatataatttctagctagcatcccgaaccactcgttccgttttgaaacctgatctgatatcatgtaattgcacctagatttcaagatgatgcaatcgtactgccctaggaacatctcctggtttcagcctctcaaaaataaggggagcatttttaatcgtccatgggctcctatcaatcactctttgaatgtctatgtcatgatagaactgaaaaatatacttatttcccccaaatccttcgcatacatacccatcccatacttctaaagcaccgccattaagttttgcattgtcatgaaatttattggcgtatctatcaagaaacgctcgactatattccatctggtattaacctcggcatcttcatttttgtgaggatatccttaaatattagatggagcataaaatgatttctttaaaagtatttttagaattttcttaagtatccatgtgagacaagaaaggattttaaaagacaaagatctttatttaagcctgcgagatatctttttcttctcttcttatgttcatatattatgtattatcattggagagtgttgtactcctttttcttcaacttctcatataatcatgatgttatacatttatacgtatacacttacaatatcatattatcatctaataataaacaagtaaaaaaaaaaactccag

SEQ ID NO: 273230 - DNA, 1412 bp, Cannabis indica
tgaaacgatgatttcctttgagcttggcttgatagagataaatgattgagatctcatttccgtaatttatctccattcatctatagaggatccttgactattaggattgtaaccatggataatcataacgtatctatattgtggtacatatagagcgttctatataactaagagtgctattcaattccaaatctatagtggcgcaaggcaaaattaataagttgagaatttacttggtgaattctagatctacttattgaatgctcagttatataagcccatggtccccttactagttgaaattatactgcttgcagactcagttatttgatctttgttaatcaaatataattctaaaattagactatgtcttatttatgaattttcactaagcaagggctaattgtgaagaaaagacgttttgagatcaatttggtaattaagagactttgtatggtctaattaataaattatataaatgacaattttatttagtaattaattataattattaaataaatagttttagcatttgttgtcgaacaaaattcgcaacaccaaatgtatgtaatattactaatgacaagaagaaaattgcttgaagaacaattgcgagtattcaacctagaacggcgagtactcgaactggcaatatgaaatgcttaacagaaaatttgaaacattaataagatagaggattatagtggttcagtcagatcacggtctgcttagtccactgtagcaagagtttcgtaggtccatttcacggtggatggtggatcacccctttatatacaaagcaggtgtccaattagttatacaaatattccattcattgtcaatccgtttacacattgaattacaataactaaacttattaacgtaaacatcaataaatgaatagcaattactaaattcagcaacatatgcgcccttttaacatgcgagttgactgttcatattctaacgttaagctcgcgggcctaacacttaattgcgtttaggacgtctgcgttcttatgtagtcgcctttgtggacatcgtatgacgagctgacagaacctagacatgcgagtctatatcggcttatcaaggctgttgggtcatcgggaccaactcgcattataaagaatgatctttatgcttacgcaggaatatggagaggatactcgcacatatcctgatatatgcgagttagatccattctcctatcccgcataatacgagttatagttatgcgatcagacttgggtcatactcgcagtatctcgctgactttatcttgggcgaggtttaaacttcgaggagtctcttacagacgtctcagctttcattggaaaatctgagtacacgtgtcctctaaataagagtctggtctcgagtttctaggtgagagaaatctcactatatca

SEQ ID NO: 273231 - DNA, 2056 bp, Cannabis indica
tttctctactaaacaaactcagcagagcaaaaaaggatttttacttcaagtctgtcatgagattcccaccaaaggcatccgaacagcttcatctctggaaatcatttaggcttcaagcagtgagtaagttttcaatcttctcctcttttaactttgcatgtttaatttctgagttttcattgtagaaaatgccattattcttgacttattgtagaagatagattgaaaatctaggctcaaaactttgtggtcttctctgtaatagtccgtatggcttcatagtttacgaaatttgcctttaatctcacattgttcgtctttcactttgctcattcgaagctttgtgaaatttaacccgaaactcaaaaatttcaaactttagggttttgacttgatttttatacattttttgtccttttaatctattgagtactcctggtcggcatatttgcctgtttattgtttgatatcccggccaaacactcatctcgtgtgttttcttttttaaattaaccgtggtgagtttttgggaggcaaacaccgaattgaccagggtttgcttcaacttctgtatgaggatcagcctcgtcttcgcgccagtccgtcgtcttcgagtgacggactttctaactcgagctttgaagattaggaggtgagtagtgatctttctcctactccataaatcgtagtgcaacaccattattactcctactagattgccagagagggatacggacgcttcatttgggaagtacaaaaaggttggaagcattatcttccgtccaactagagatacattgtccggtcaggtgttgctgatactcttcctattggtcgtccaagtttgggtaacttcggcatcccaattgttgtccctgttgttcaggttgcacgacatacacatcagtacccgtcttagaggaggatgatggcccgcacaaagcagatgatgcggaaggtcaacgcttctgatcctcatgtcgcccagcttgccacatttccaagtgtcgaacaagatctgcccgccatggaggagggagatcatgaggaggacattgaggtccaagagattaaggagcaggatgacatctgtcctggcagccgttccgaggctgaggaggaaggagtggctgagcctccaaactttggagggtataatgaggccaggaagtcgatgtttgtgaagggtaaagtcttggtcgaaggggaggactacgtcatcgaggagcttactcaagtagtttctcacaaaggcaatgtgccttaggtgccaaatgggtgagtcctccgtccaaaataagcgaggcacgcatgaaggccttagataaggctggatatttgggcggactggagtgttacattccttctttgaatcaccgggtgacaaactcgtagagagggatgtgtgcttggtcgggtgctcacacaaaacaaggggcaatggtgccttgcacccgtaattgaagagggtggcagactattttcacctttgtccgacccagttcactcccaagggcattaagtacctatctaccctcttcgtcctctacgccattcaaggatggggtatgccttcccaacacgaggtcaattagttctttcacttgaagtctacccctaagcaaagcaggttggggtacttctgttggaatttattttaccaggatcttagatctactcacaagtatgttgtttaacaccctaaatatgaactttctaaaacgataaattaaacacatataaagttaagaaaaccttacattgatgcagcggaattaatgtctccttccactcagatctctaacccttgtatcctttctgtagcagagtataatcaagatctgagcccgaatgtccttcttctttgagtttgatccttcacagtcttccaatctatgattgagttactgcttgctgtgtgtgggcacttactctttcactagggtcgaaatttaatgaagagagaaaagagaagaggtttcggccaggtatagaaagtagggaaggctcagttttttctgaagagagaaatttctgtcagataactattgatgtg

SEQ ID NO: 273232 - DNA, 875 bp, Cannabis indica
aaattactaaagcattcattacaattactccccccgttaaaaggattttgccctcaaaatctaacctgaatagctctggatgttgagttctcatgtcagactccaactcccaggtggcttcctccaccttgttgtttctccagagcactttgaccaaggcaatggtattttcagaagaactttctcctatctatcaaggatctgaacaggctgctcttcataggataagtctgactgcagttcaagggcttcataacttaagatatgagtcgggtctgaaacatatttcctcaacattgagatatggaatacatcatggacagccgacagtgttggtggtaaggctagccaatacgctacctgcccgacctactcaagtatctgaaatggcccaatgaacctaaggcttgacttaccctgcttcccaaagcgttttacatccttcattggtgaaacccacaggaaaacatattcccctacctgaaatgtgacatctctgcgcttcagatcagcataacttttctgcctgctttgagaagcaagcattcgagccttgatcttgtctatagcttcattggtcctctaaactaactatggaccaagtacttcctttctccagtttcatcccaatggataggggagtgaaattttctaccatatagcatctcataggggagccatccctattgtactcttgtagctattgttgtaggagaatttaattaaaggcttatacttactccatgaaccctcaaagtccatgacacaagctcgcaacaaatcatctagtatatgaattgttctttctgagtgaccatcaatctaagagtgaaatactgtgctaaacttcagcttggtacccatagctttctgaa

SEQ ID NO: 273233 - DNA, 976 bp, Cannabis indica
tgacccgctaggccaaaagaaggagccgggccgggccgggccgggccaaagtgatgtcgggccgggccgggtttgtggcgggccgggccgggcccggcccgactgacattcctactcattatatcttaaaactctaaattccatgataaatccatcattttaatttcatttaacatctttcttctcattttcagttcgtattataaattttgccatttaaatctaaaataaatagtttacaagcgtattctgcacaaaatgaatataattaacaaaaacacctctcaaacactttataaaatgcactttataaaactagtctatcaactgtcaaagaggtcatttggttgaaaggtctttcaagagttgggattggatcaaagaagtgtatagtgcactgtgatagtcaaagtgcactacacttgagcaaaaatcaagtcttctatgagaggactagacatatcggcataagaccgttttacccgagatgtcatcatagaaggaaaggtgaagctagccaatattgttaatgaagagaacctagcagagacatgctcaccaaaatcctccccacaacaaaatttagacatattgtttagttctgctgcatgtttcagcagattatgcttaaacatgcttctattttagtttttctgtaatgcctagattagcaattaggtggagaaattgttagttaattaattgctatattctcagtgttttggtctcttgatctgagttagttaatgttagttgtctctagggacggtcagctagactggctatttattctgttatttcaacaggtattgaacacttgtaaattgtaactagtacagtagaacctctatccaagaatacacttgggaccaagaaaataatattttaattgagaggttataactaaatagagttacacttaaaaaaaaaatcaaaattgtaaagtcctttttttggcaagttaggtgacaaaata

SEQ ID NO: 273234 - DNA, 505 bp, Cannabis indica
tcctcactcgcacgcttcctgggaaaacttcccaggatgtcacccatcctgaaattgcttcaggtcaagcacgcttcactatggagttctttagtgatggactaccgaaaaacaagatgaaccttgttgatacaggtagtaccaatcaatctatttaagctctcttcaactgtgcatcccatacctacacagtctcagaatcatcccacttgaccttccccagacgatgtgggatttcacagcttacccagtatttccccttacggatcacaggactacagactgtcacaacattggtgagaagtgttggaaacatgtattttggggtgccattgttcgcacataatgccacatgggctatggcattgttcaccaacctcacacacttaatgacactactcaattctgagtaaagtgtactagcttgtcttgtgagccaattttagacacgataactttataattgagctatgactatgagccacactacaaaattttttacttt

SEQ ID NO: 273235 - DNA, 909 bp, Cannabis indica
aaatagtcacccatatatatatatatatagcttctttttacagctttttgatcataataaattattatcagcatgcatcgatccatctctctctaatacactactacaaaattggcttttcccaacagtttataactgtcttttatactttttccatcggttcctaaaaccgttggctatgtgggtgtcataaaaatacggaattttaaaagacagtttataactgttgggaaaagccactttaaataacagtttacaaccgttgggaaaaatcactttaaatgactgtttataactgttggcaaaactattatgtagattaaattaaattaatttctaatatatttttttaaatattaaatatatataataatattaattttcaataaaaaaatataataattaaaataaaatatattaattaaaataaatcaaattaatgtattttcatatttcacaatatacattacatacaattcagaaaaaaaaataaaaaaaaaataataaatatcaatattacaactaaatctaaaaaaaattatacaggagaagaactaaacaaatattctagacattcttgatggagctcatctgcaccatcgccctggcaaacttagcagcccacaatgagccatggtgggcattctactacaccattctcgatgtcgactcaaggtgatcttcgaagtacccgttatcaagatgaagaggagtgcgagactcaaggggcaccgtcagatcaacaccgccgttactcgtcatcatcggaggcgaacacttgatctttaaaaaggttgtgtatctatggtccctgagagggtcttgaggatgagaatgtatgtgcaaagaaaaaatagagaaaaagaagagaagaaaaatgtaccaccaattgagataagtatattgaag

SEQ ID NO: 273236 - DNA, 1995 bp, Cannabis indica
cttaatttttaaaaatagaaaaacaaaagtgattatcgaacgttatttttgtttttagaaaattaaaattttaaaaacaaaaaatttactttaatttttgtgattcaaaaatttagaaataaaaatgttaccaaacgccacctatacatttttactaattttaatgaataaatttttgataaaaaattctataaataaatttgtaataattcttttatttaaattcttattaaatttaaaatatattgacaaaatcgaaattaaaaaaagaaacgataaaaaaaattcacttgtatgggattatttatcgcaccctgctggatggaataaataatcccagacaaatggaattagctggattagttatctaaacttccagtatgcccaaacactggactagacaaattagcctgtctaatccagtctagtcttgcgtaccaaacggacccttagtgatcaaacaaaacttacaaggacaaattgcctgggttcgtagaaacttcaaaataaaaaagataaacaagtcttgagtttagctagcatgaatattgccaagttggataatcaactaacctgtggaaacatagaaaatgccagtaagaaatatataatgccaccaataaaatcaaattgccagttcttctttctaaacttcaaaatatttcctagagcaatctgcattgaatagaaaacagcatcccaccatggttaaaagaaaattatcatgttgtgtctctattgaaaattagtacgagataaattacaaacatcaaatataaataaaataccctgcttgaatcttcaaaagaaggataagcagccttgcagtcatagggagtgccatataacttgttaaaactagcaaagacatgagttggatgtaaaaaagccccaccacaaccatttacaagtaaatgttgcacatggacaggccccagtccatctgatttaacaaatgaatggcgcatataatgatgcaaatctccagacattcgaagtttacaccgtcctttcaaataatcacaaatcaggtgtgatacattctttccagaaacatcattccagtaccaatcaagaagccagttcggttcatgggtcataatgatcacagaatcattatctccaaccttaatatcacatggagagatgaaaatgcaaaagttgatcagtacatgtttcaagaagctacatatcacaaataaaagataaaatataaatgaaagcttaggtgcaatgcaacgtcaatggcataactatgtgcgcacacatgtatcaaatgtatcaacgtcaatggcataacgggaacataggaatcatatcattataatctctccaagtcttgagaaaactattgcaacaaaatttgaagacatctccagttttacaaacaacgtaagatgaaagtggctcataaaaacaaataatgtcttaagttgattttactaagtgtgctgattcttatgactatgtggcctgatcataaactcgtagaataacaaaaattatatattcatcataacttctgcagatgtactaattgaccagcacattgaaagtaattccatgagaatgagatggtgctacacttgcataaggctaggaacatacaatagtgaatctttttttgttttttgcctaactgtattggaacattaagaaagcaaaagaaaattaccttttccttaatcagttctgaaaagaatttgaattggtagacatcaatatctccatgaagtgccaaatcgagaccaaatacccaccatccttttggaagttgcaaagcaaaataactcttcttttgaggcataaaccacccacccaaccagcttttatgacatatatacctcataaaggtatgaagaccatcaaaccaatctgcaatgcacaaaagagttgtccaatcgttgattcaattaaaattatctcctgtgatgtaaaaatgaaaaaaaaaatgaaaagaaaaaaaaaaagaacgctgataacaaaaactaacca

SEQ ID NO: 273237 - DNA, 667 bp, Cannabis indica
gcatttgtaatatattgttgttacacggtttattgatatagaaagagactctattttcagggtgataggactgcggaaattttgacagctgatacggttaagcctagtgtcaagaaactcattgaagaagagatggttaatgagcagggcatgaagaaagagactagggatgctgtagaggaacctaagcagtcagaatctgcttatgaaggtgatgtaaagatggatcctaagaggattaggaagactcggaagaaaagccgtgatatggatgtgcaaaatgtgcaatctgagtgctcttgtaaacataatgctgaccaccaatctataaaagatctagctatagatgagataatggaagagttctctcgccggattcaccaaaaaagtattagtttcaggaaggatggcttgaatggtgaaactcctgagctattaactgacaagcattctgattttgaggagaaattgaatggggtaattaaggaatttataattcagaagtttacagatgggaaatgtctcaaagaagaccagaaaatccacctccaattcagggaactcgtcgataaactacagctcaccagctcagatgaggaattgttgctgaagctcttacaggatccacaatctttgctggttaagtatgttcaaggcttgcatgaat

SEQ ID NO: 273238 - DNA, 852 bp, Cannabis indica
tatatatgatatcaaattttatggatatataaatatatgatattttattataaattaaaatttaacataatattaaatatctaaaattaatataaatacaatataatataataccacctaataaatacaaatgagtcctaaatcaatagtttagtaaaacggcaattttatatagatgtcccaattccaagtaagaaggacagtaatcataatgtgcagtttaattttaattttctttttactaaaaaatgttattgtagtcattatatatgatttataattttaaaacaaactgcaaagtattttaaaaaaatttataataagtacgcatacaataaactatttcaatcttattttcagtattttaaattattcttatagttttgaaaattcgcaagatactttaaatatacatcgtcatataaaaagagactaattagaatttttgccccctgaactttgatatgtatcaaatcatgccactgaacttttaaggtcgttaaaaatgccccctgaactattgagattgttagttttaaggacttttgtctaatttcattcaattttactatttcagtaattgtttatgtactaaactatgctccccaaactttgatatctaccaaatgatgcccattgtactttaacatgtactaaatcatatcccctaaatttttatctatgttagatttttttactaaaattgaaaaaaaaatccttaaaacaataacataaagaaataaacaataactcatcaaatctatacaataacattaaaaaaataatcttcaaatccatacaaaataagaaataaacaatattaattatcaaaaaataagtgcacaaatgtgc

SEQ ID NO: 273239 - DNA, 1444 bp, Cannabis indica
agggatgtatgaccaaggacaagcccgttaaagttagcacgcctccgacaaaacctaaagagagaagatggttgtacaacaagcagtggagacactatttctctcactctatacaagctggcatctgatcaacactcctccattacccttttgatacgctaacccttatagtacaatcaaaactttgtccctttatttttgagaccacttgtattttagagccgttagagttcaagtataaaaatcacatttgaacacttgtaaaggggttgaaatataatcatttttaagtgaacttagaaatattttttccattgatgttctgagtttctcttaagcttttcattttcaccattttgcatctgattttctaacgaaagtttagttgacgagtttttactgtcaacagcttatattttgatgaatttgctttgttatttaatttattagtgagtcaaaactatattattttttaaagtaattggcggtaaatatttcttatattttaatttttatacactggcaaaatcgttttaaatttacttttttatacaaatttgagacgtcaattaaatatcacagttaaatatcactatgcaacctatatatacgtgaaagtaaaacttcaaagcccatacaataataatccaattgatatttaatagtgatatctagctgacacctcaaatttgcaaataaaagtaaacacaagaagattttgctaccaaagaaaaaaataagacgattaagtgtaaaaaaatcaaaacataaaaatatttcacattttttttaaaaaaaaatggttacatatattacaattaatgaatatattagagcacatagtatattaataattttaaatttatttacaatcaacaactccattcatactcaccaaccatttacattcataataaggaagattatccaactatcttttagagaacgagtagcaccacctaaaaatacaaataatttaataaaatgaaaatttaatgatctcattatatttttaataaatgagattcatctcttttatcatatttttgttgatattaaattatatttttaataaatgattaatatgcatttaagtgaatatatatttctatttttaatcaagtgagttgtgtagttacaattcgagaagagtgattttcattgcaataggaattgtcactgctttagctgcaactaaaagtcactaaagcgggtttgcaagtggaaattcagcgacgattttaacgctttagtattgagtcagattatcttaaaattgtcaaattactcaaaaaagagaaagagagctagagcatattaggagattgttgttacatgataatgttgctagtctttcgtttgtataccgtaaaattaatcaagtagctcacaatttagccattcaagttttggttattaaattagtattacgtgaattgagatt

SEQ ID NO: 273240 - DNA, 1172 bp, Cannabis indica
aaaaattcttttatatgccaaaataaataaggtgcataagtgctttccttttaaaaaaatggtgcaacatataaatttcattatatataaatgaacaatgcaaatatgttatatattgtacctgcacattatatttagtgcagctatagtgtcaacgttggaatactaaaaaaatgaattttggcatcaaacataatgtgcgttggagaagaaactctaacaatattgataagagaaatgagcatttttatttagatagttagaatttttttctctccaactttagcataaattaaattgtgctcctaaaccttctagactattaaaaatcatctctaaactattaagattgttaaactaaacacttaatatagtatatatatagactatttctgtttcaaccacaacaccaaacgctaatcaaattatattaatttactaaaattattacaattattatatccaattaattatatataaacttaatttacaaacataaatataataataataataataataataataataataataataataaggatgtcgttcatgctccagtgacatatatgccatgtagcataaacgacaaaattccttcaattgtgattaatatagtattatgttgtgcatctgaacttttcagatcattaaaaaattctttataaattattgtgattattaaatttaatgactttctgttcaattctaatcaattttactaaagtgtagattgtctatgtaccaaatggtgcccccaaactttgttatgtaccgaattatattctcgaactttgacacgtaccaaatagtgcccttaaatttctattcacgccaggcatctgctaataaaatttttttaaaaaaaaatctttaaatttaataatttcaataatttaaaaaatatttttaatagtctaaaaaattcaccttttggcacattaaatttttggattaaaaaattttaattgacctttttatttatttattttgtttagggttggccaatgaaatgacatggatttgaaaagaagagtagcactcggcgcttggagcgtcatgcatttcaataatatatattatcaaagtgtgtgaaagtcattatgggaggcaagcagggcaggtccctcttctaaacgaaatcattttttaaattccttgttagtttt

SEQ ID NO: 273241 - DNA, 1803 bp, Cannabis indica
gctgccaatctcaacttgactgagattgagacaaaattcattcctttactgaaccatctgaactgcctgaagatgaaaacagggaagagccttctgctttccttgctatcaaactgctaactacgcgccatttcaaccctgaagctttcaaaaagcgtttaaaagaaatgtggccaaaacgcttcttaatcaatgtgctggaaaaagagcccaatttctttaccgtggaattcagatgctttggtgatcgcagaagggtactcattggacagccatggcatttttattttaaacttattgtgatgtccccccttgaagctggctcggttgtcacaacggatatgctcacttcaacaccgttttgaatccaagtttcgggtattttcctcaaacgttccccggcccttgctagaaaactgggggaggttttaggccggtttatagaggttgacactgcctctctcaaggaaacctggggtgcttatcttcgggttagaattgagatcgatgttactcaacctcttccccgtggcacaggcttccactttcaaggtatggcatccccggtttggttagaatttcgtttcgaaaatctacctgacttttgccatttcagtggccgccttaaccatatcgtaaatcattgccctgagtttctagcaaaatgtgattcctcttctgccccaccaccgcttcaatatgatcacaccttaggagccaaaatccgcatcacttccaatccgttttacatagccagcactagaactcgccttcgccctcatgtcactcaccctgtttccctagcccctcctccaagcccacggcctcccactaaccaaattattgctgaaccatcttttaatgacccatcttctgagtatggtgctcaatattttcatcaacctcgaaccactcctgtgggctgctacatgactcaagttcctcaacacaataccttcatacgtgatcttaatggagcaaatgtttctccatccttctcggcttggccaacttctagcaatgttgtggaccttgatagcccttctcaaccccataggcctgctccccccttggcttataccattcccaatgaccaaaacacacataacaacagtatccctgaacaagttgcaccatctaatcctattgtggcaacccctgctatcactaatgccatgaacacttctgatgctactggttatactgtaccagtctcacaagcttttgctactataatggcggatctcaatgctaaccagccacttcactttgccatgggatcttcatcctcaccagccacggcctcaacttctggccgtcgttataagccaaagcgtcgccctagcattaacgagattaaatttcggaaaattctcaagcgtactcgtgatcttgcttgttctttggatgaaggatacattgatgaggcgggtgctgcccagcgcacccgccaagcgccatgatcgtcatcagttggaatgctcgcggattagtgctttaagtggtttaaatctcaacttagtttttctaatggtttagaagtccctagggttggtcttagtggtggccttttgttgttatggactcatgatgttgatgtaacacttttgtcttataatataagtcattttcattgttaccttaagcccaaccaattttctgctttttattttactggcttttatggggcaccgaattatcaaaataaaacccattcttggaaagttctccatagagttggatccactatccataactctccttggttgataatgggtgacttcaatgactatttaaactcgc

SEQ ID NO: 273242 - DNA, 1761 bp, Cannabis indica
gacctgacaccaataacagaaattactacctaattacaactgttataactaaccaaaccgacacttgcaccagtatataaaccccacaaattccacctggtttatttacttgtgcaagtaagaactctgagcagattaatataggcaaaactgttccatcaataaaattttctttcaagagtgaaggatcagcaatctccaatatttagcggcttcacgcagagcctgaacttctttccagtgactgctttggtgaacatatcagtagggatttcatgagtgtttatcttcttcactttgaccaatttgctagcaataatgtctctaatgaagtgtagtttgatgtcaatatgttttacatgggatttttcatgagatgaatggcactttggttgtcacaatgtatgaacaagttatcagattttatccctatttcagatgttaaaccttttagccagatggcttctttcacagcctctgttgcagccatgtactcggcttcagtggaggacaaagcaacaaccttttgtaggtttgctttccaactgacacagcctccaaacacagtgaaaacaaaaccagatagagatctcctagtgtctaaattccctgaataatcagcatccacaaaaccagtgacagtatcaccattgttgctgtcatttccaagtatcagacctgtcttgagtgtgcctttgagatatctcagtatccatttcagacccttccaatgttcttctccagggtcactaataaacctgcttacaacactcatgctatgagccaaatcaggtctactacacaccatagcatatattaggcacccaactccattaccatagggtatactttccatatgctttctctcatcatctgtctgtggtgactggtcttgagacagtttcaaagattgagcaagaggggtgattactggtttggcatctttcatgccaagcttgtcaattaccttcttgagataattttcttgagataggttgatagtgtgaggcctatttctctttatttcaatgcctagaattttcttggctggcctcaagtctttcttttcaaattcaacactaagttgggatttcaagcttttaatcttccttcttatttttcctactgatcaggtttctcatcataaccctcaggtatctccatgtaaatcttctcctctaggttgccatgtaagaatgctgttctgacatccatttgatccacctcaagatcaaatctagcagccatggataaacaagtctgatggtagtttgtttgaaaactggtgaaaatatatcattgtaatcaatgccttcctgttgggtaaatcccttagcaactaaccttgctttaaaccttggaccctcacaaccaggtacaccatctttttgtttgaagagtcatctgcacttgattattctctggttttctggtcttttaaccactatccatgtcttgttcctctttaatgccagtttttcttccttaatggcaagcaaccaagctgtactatttttttctagtgacagcttcattgtagctagatggctcatcactatccatgtcttcagccacactaagagcataggcagtgaattcaacgtagccaaacttgtcaggtggctttgtagttcttctttctctatctcgagcgagttggtagctgctgagactggtttgagtgtctctggtagtgctatcttcattaatgctttcaatattttcagtaggtatagatgaggttgtgtccacctcaatttg

SEQ ID NO: 273243 - DNA, 2776 bp, Cannabis indica
tgaaaaagagcaggtaaacaactcgacactggatgcaaccatggcagatctgttcaaagctctactttcgccaagatcaccattataggctattaaacgtcaagaagaggtcaacaaggattttgaattcttcctgagtgctaatcagcaatgctctgcaagtattcaacaaggtaacattgttactccacaaattttaagatctggaaatgttgtgagaaatttggataattctttcaagagttctggtaacacacaaaaggtcaaaatcactttagagtacattttggagttcctctatagtgtgttatgtccttggtgctaatccacctctatcagttcttgaaggttttataaggcaggtttggtaaggtaaagttgataaagtgggatcattgtcatacagagtgtttatggtccgttttgacacagtggaaagtagagatgaaatgctcaatggaggatatgtcttcttcaataacagacctgtagtgatgaaagcttggatccaaatgttaattttaagaaagaagacattagaacggttcctatatggatccgactccctaacttagacttgaagttttggactgaaaggtctttattcaaaattgtggggcaattggggacacctttacaagatgatcacgtgactaaagaaagaaacaaactcagctatcctagggtgctaatataagtatcgatacaacatgattttcctgctcaaatccccattgaagatgaacatggttacaatgtgatagcctatgttacttatgaatggaaaccgctactttgtaatcactataaaggcttgggacacgcaataacggaccatcgaaagaaggaaggaaagaaacaactgtggaaggtcaaaaagagggtaaaccacctggtgcagaagaagaaaaagttataaataaggaaggttttgaaaaatttagtaaaggtagaaaaggaaaaggcaaagatataatgagtgagacacaattatgcaattcgtttaatgtcgtaaccgaaatacttgattgtgtaaatgatgggacaaaggacatagcagaaatttctcataaacagacagagtcacccacaagaggacctaatgtgttacctacaatagagaaaacaagaggagggggagttcctcctcttcggaatagataaaattgtaagctggaacgttcgagggatcaataaccaacacaaaccaaaccaagtaaagaacatgataaatgttcacaaggttgggcttgttggtcttctcgagacaagagttaaggcccaaaagcttggggtcttatatgtaattatgttttgaggatggtgtttcacttcaaatattgcatgacatgaaggaggaagaataatagtggtctggaacccttctagtttcactgtaagcattctcaattgtactagttaacttattcatctatatgtctcaaccttagatggtaagcacatgctttttgttacctttgtttattctttcaatgacctggaagggagaaagatactctggtcagatttaaagacaatagctactcaagattcattgatgattttgggagatttcaatgagattttgaacaaggaagaaagaactggcaagagagtaacatataatgcagcaacaaacttcattgactgtgtgaactactgccaattagaagacattaaattcagtggagttccttaacatggaacaataaacggcaagggaatgatagaatttggtctaagatagacagagtacttgcaaactgaattggttaaatcaatttcccaatgctgaagccattttcttagtagaatgactattcaatcatactcttgtaattatttttgtgtatctcgaatttcttggtggaaaaaagcctttcaaatattttttttatgcggtcctcccatctacggtatgtagaaatagtgaagggagttcggaaccaacaaatttctggcaccaagatgtttcaagtcatctccaaacttaagattctaaaagcagctctcaaagatttgaataagaggaaatactctaatattcaagaagctgctgcacaagctaaagaagagttgtatgatgtacaaaagaagttacaagcatagcctatgaaacacgaactaattgacaaggaaatggctgctagacagaattatggttacttgcttaagggtctgtcatctttccttcaacagaaatcaaaaataagttggatcaaagatggggacaaaaatactgcgatctttcatgccaacatcagagagagaaggaagaaaaatagaatactgttccattgaagataaacatggaacaagagtagatgatccaacacaagttacagaggcctttctttcattttatcaccaacttcttggtaataaaatagaaaataggaggacagtaattgctggagttatgaaacatggccccttagtcactaagcaacagggtgaatggttggtgaaggagtattcaaaggatgaagttaagaaggtattttttgagattcctggaaccaaggcaccaggcccggatgattactctagctattttttccaatagaactgggacttaattggttaagatatatgtgaagctatgttatcattcctacattctggacatattctcaaagaaatcaacacaatcgtattcacacttaaaagtagatgtcctaatacagttagtgatttcagacctattgcgtgttacaatgtaatctacaaggctgcaaccaagctgattcgttcaagactaaaaaccattcttctt

SEQ ID NO: 273244 - DNA, 1140 bp, Cannabis indica
catgggggttttatgccacttttattttatgcacaaatctaagccatttcatgcccaaatgagtcaagtccttgttggtttccttagcagatacacgtctctagggtgaaaacgcttgcgcgggcccatgaaccctagtttaggcagacgtgggtgtgtgagtcccagtccaaatggttggttgatgtttttgagtcccctagaggtgttgtgggaccctcaagtagaggtcttaacttatttagcctttgtgagtcttaatcaaagtcgcagggttgactttagtgtcttcaaggtactcttggcttgtgggctcttgtgcaagagtaaccattttattttttggcgaaaattaggtatgactttttctccccaaaagtatttacatgtaagccttcaagtaatgcttttgcactttttccaaggcttgcgcaaaaaatacttttttgtagagtacatgaatgttacttctcttcaggagatttgtggatgggcacaaccaatgtccttcattgaattgaaaaggtgtgcatgggcacgagcaatattttttattattgtgaagatgtgtgcatgggcacgaccaatttccttggacttgtatgtgtggagttcttaaagcatgtggcttcttattagaatgttagctgagttatatctcacatctcatgtagtagtcgagtagagttatgtctcttgctcgattttgggacttttgcaaggtttaaaactttttgcttaagttttttaattcagagtagagtttatctctttcttgaatttgaaaatttaacaaaattttgaaatctcttgcttaagttttgagtgttgagtagaattgtatccctttcccaaactcatccatgagtagagttaaatctcttgctcaagttgattgggaagtaaggtctacggtgagcagaattgaattctcttgttttacactttttggttgtgccttgatgttgggacccacatgtgtggatttgtaaatgtccacatctttggaactttttaagcatatataacttaatttatttagtatcttggtaactttggaacttaagtttaatatattttttggcgcgtattttattccgatgcttattatctttgcaacatggggttttaaagataaca

SEQ ID NO: 273245 - DNA, 816 bp, Cannabis indica
ctgaatgataatatttaaaaatattatttataaattacatttttttttgtaggagcccaaattttaaattagaacagggcttccaaaatgtttaagacggccctgatataaaatgtgtttatgtgacagaattcttgatttaacgatttttttggttttcatacgttaatttaacagaatttcctaatacttaacaaaatatgctttattataattttataatattattatatatatttaaaaataaaaatgatgtagataaaaattatatagatattttatataaaaaaattaattgaaatttaaaatacttaaaatattacagatattttatgtaagcaaattttaatattttaaatattttatattagtcttctggtcatatttagtgtgcttatattattattattattattattttctttttgaccactgtataagtggagtgaaatctaatgatttttatgattttatggatcgatgcatttcgcataatttttaaatgatcttaaaatataatttatataaattgttttttcatatcaaaattgaaaatatttttagtcaaactatatttgtaaagtaagtcaaactgatcttgaaatataatttatataaattattttttaatatcaaaatcgaaaataattttagtcaaactatatttgtaaggtaagtcaaacttaatatgtcatgattatataaagtattaattattggtaggagttatatatacaccgaaattactccaatagttaaaaaaaattctcaaaaatcaaaatatcaaagctcattttaaattttttttaagaaaat

SEQ ID NO: 273246 - DNA, 732 bp, Cannabis indica
ttttagtgtacagctaattaaacatcaataagtatcatttatatatatatattttaattttgcctttcaaaatatgcacatttgtctcatttgaaaggctaacatataaatattgagaattgttaaaaaatgttatttctaatgttattagtataattgagtatcatctcttttataatttaaaataataacatcaactaatcacaagaccttatatatgatgataaataattggtcaattttttgtcaccagcaagctagtactataatcatttgttaattattagtaaattatatatgcttaattaaatattcattttattatctttattagcgtggtctctaacacataatattctctttcttttttcttaataattattaattaatataccaaattcacatcaactatcaagtcgtaccggcgttctcattttgtccctttttatagaggaaattttatgggtctttttaatctaatcatttgatttattatataaataaatgtaaagtaacatatatcattataattatatttaaacattaactcgatttatatataatgaaagacttattactttccttgaacattctgattatcttttaattattattgtgcattcatgctggtttatttagaattggaagtgtaggcagaaagatagaataggctgagtgtttttattaatatatataatacaacatacacattaaagacttaattaacaaaga

SEQ ID NO: 273247 - DNA, 1686 bp, Cannabis indica
ctcatccttgcaaaacgtacgtatcataattagtaaataatatgcagaccacatagaagtgagggggaattgtctgtgaaaaatgtatatgtattttacatatatttataataaaagataatatttatattaatattggtgtaataattaagttagatgatagagttcgaattccactaagtattttttttaaatttacttttgcccttaactaccttacaaaaaaataatacacccattttaaattttagatccgccatagtataataatagcttacttatttatttttaaaagagatacactaataataaattttactgaaagtcaaaacaaatgtaatctcgtaaaatattagtacaagataattacatataaatataagagaaatgttaaaagatattactagtgcctaatatttttaagtgtcatatcattattggtacaattatgtatcgggtcccatataatttaatgtattaatttttaagaaatatcgctaaataattgtagggcgatacatctaaaagctattgggcaagtgctctaaatatagctattaatattagaagagtgctaataaaactctctatccactctcttttgcactctttttttgatatgataaaaaagaccatattttgagcaagatttatttttgcttaatatatagttatgatattctaatattttacaattgtttattgagatttttgaaaactgatttaaataatagctgagcatttttacgtgctcaggtgttagttatccctagtccacgagtccatatattaggccaaaaggctttgatatatattacaatgggatcttacaagttcaagaaccatagcttcttgccatcttttctcacttggctttttctagcttagagaagaagaaaatctaaaagatgtgccgtgaatcctcccttgcatgaagatataaatggatatatttataggctaggattcggatccgagcatacccgtgacttgctagggttttgtgcaaactaggcctattattggagtaaatacatgaaatacatgacttttcgacccactggcagtattctgactcgtggggtgaaggtatccttacaactagggaccacgcggtctgtgacatatgtcatgtcgtaccagtgtaccgttgtgtcacatacatgccgttggacaaaagggatgctttccctttgtggtgtgcacactataatgttctgacataagagaacagatttgatacagggattaggcgtcagagggcagccacatcactctacaaaaggcttccggaagggcctcttggaataccatctctggatgtgtcccaatattcactcgaagggctttatttattctgtttttaggaaggctgaagaccttccgaatttggatgagtcttgtcctcggaggagagccttctgggcttcagatgggcccgggcccattacgtctggactgggccttccctcatttaaggacattaattcaggccatttgagattaatcatactttgtaaatgtcacgtgtcactcttctaaaaacacgaataacaacaattatatcattctaactaaaattttataaaaattcgttatttattataatttaagaaaaaattatatttttgggaggaaaaaataactacttaaaagaattagcaaagtacaatacatatatttaag

SEQ ID NO: 273248 - DNA, 842 bp, Cannabis indica
attaaatgagaggtgactgttcaaataaggtcatgttcctcccagagatcccttggcgttcccctggtctccgggagtacgtggagcctttacctctcctccaggagcgtatattcttgtttgacactcttgaaactaagagacttagtcgattgatctaagagtcacacctcttggatccatgtgtcgttgtcatattggtccacgtattttgggcaaaattaagggcaacaatatagtatgcctgtgttatcttttcaggtgtgttctgacatgttggcgcggtatagtcacaatcaggtttttcgggctgaaccgggttcgggcccaaaatgcaattttgggaattaaatattggtattttatttcgtattggataatctgaatttttatttgaaaataaatgagtgtgaaatgacaattatgctcttgtatattaaagtggatgttatttggccctaggggcattttggtcttttgacctttattgatttacatttgataaatagaatttttagagagaaaggaaatcaatttctagttgcttcccctctcacccgacccccctccctctctctcaaacccttgattttgggaagaacttgcttgaatttggcttggatttgaagctttatgtttgtggagttttgggctttgcttggttgaattgaggtagcttcctttactgaatttgattgaagttttgttgaattttaattgtgttagaagcatgttttgggttgtgttgttcttgagtgcatgctatgagaattgatgcttagctttgttgattttgagtgtgaataacatgatattgttgtggttttattcttgagttgtgg

SEQ ID NO: 273249 - DNA, 1264 bp, Cannabis indica
aaaataccacatatttttctaacataagggcccaaaaaaagtttctttccctatggcccactttgtttcagggccggccctgagtatgtgggtcaatgagccgcgagctctttgaataattcataatctaccctttctaaatattgtcattcgtgtattctgtgtatcccaagatggaccatctttatttttcattcatctcgctaatctcattagtcagtagttattattcatggctcaccgttgtctttaagaaggtgagttcgaatatttctaccaagtgtatttttcgagacaagttgtctgaatgtatttattattgtataatttgggctggttcatattccagcttcattacacgtgtcaacaccatattgcaactcgaaatatgggtataacaataataataaaaataatatttagtaaaagattatcttatcatttcttagctactaagaaatctctaatcctatagtatttagtcaaccccgagtactccaaaatacccctataattctaaaattgacttgtctcaattatcccatcaaaattgctaactgaacacgttgtgatatttttggcttccgattggtctccaagatcgccaaacctgaaaatatttttattccacaaataactcacattataccaaatcatcgaaggatatcgaagattatgctcaaaacaacaaaaaaaattttagtatagagaggtattttatggaacaacaataccaaagcatcaatttattttgtggctttcggtattacatagactacaagtgaaagagacattattcagattcattatagcatcatatgatatatgtttgttgtgtggtatgcataagaaaaccagagattatttgttttttgcatgccatctgagtaaggcctttttgaacaatcttgagatggaacacattagcatcttcaatcttgagattgtcgagatggcttaaagtaaccaaatttaggaagcaggttatggtgacttcagtagcagcgatggtgtatcatttgtggaactgccaaaatgaagcattatggattcaaaaaatttatacaacaacaattttaacaaaaataattaagcaagatgtaaagtataaaattagaggtataatgccaacaaaaatacaattcattgatagagtttggtttaattttatgtattagaattagcatgccaacgtgataggtgttgcataggttgtaatttaagtattatgcaatacaaagttttgacttacccaaaaaaaaaa

SEQ ID NO: 273250 - DNA, 692 bp, Cannabis indica
gtaattatagcttcttccatgatcattattatgtttcaaaaccgtagtttggttgttgttgcaagaaagaacaaaagcattatttgactttgatacacagctgggtggatcggtatctagtcggaaaggagaggttatattatggatatttccacaagatgaaaaacaaggactactttctgtggtctcatggaatatagttgttatcattatcatgagcagaatgagatttgaggattccattatacacaaaaacatgggttagtgttattgaaacacatgtatatatatcattattaatactacctctagactatagtcaagtcaatggctactttatttctttatttattattattattttttatataaatcacacctaattaccaaaatcttattgggggttatagttgtagttagtatgtgtaagagcatctccacataagtgatctaaatgtaaaatatagttccttttattaaaagtctaatttaatagtgtgctaaactatgatttgaaaattttatataatcaatagtaatctaaatttacataagggaaattttatttacaccccaaaaatttagaaatacaccccattttaataaattttattttgtataaatttatatctactaagttttttcaacttttttttttctaattctatattcttaaaaaaataatacctatc

SEQ ID NO: 273251 - DNA, 1116 bp, Cannabis indica
agctatataggttggtttggtggtttttttattaaaaaatgtttttctttctgacacagtgtggtgtagaaggactgatgagcttgtggatgggccaaacgcttcacacatcacaccaaaggctcttgacagatgggaaaatagactaagtgatctctttgaaggtcggccttttgatatgtatgatgctgctctgtctcatacagtctcaaaataccctgttgatattcaggtatagtaatcttattgctcaatttagtagccatgccatgccatgccatgacagagtccatataatgttattaagagctttgctgttgttaatttggacagccctttaaggacatgatagaaggaatgagattagacttgagaaaatcaagatacaacaactttgatgaactatacctttattgttactatgttgctggaactgttgggcttatgagtgttccagttatgggaatagcaccagaatcaaaggcttcaactgagagtgtttacaatgctgcattggctcttggcatagctaatcaactcactaacatacttagagatgttggagaagagtaagatctcatcttcttttctacttcttctcttttaactacttgacttaaaaactgatcctatactgatgatgatgatgatttgttattgcagtgctagaagaggaagagtgtatctcccacaagacgaattagtgcgagcagggttatcagatgaagacatttttcggggtaaagtaaccgataaatggaggaatttcatgaagggacaaataaagagagcaagaatgttctttgatgaggctgagaagggtgtttgtgagctaagctcagctagtagatggcctgtgtgggcatcattgttgctatatcgacagatattggatgcaattgaagccaatgattatgataactttactaaacgtgcttatgtaggaaaagcaaagaaacttctatctttacctttggcttataccaaagcagtactcattggcccttcctcctcttcaacaacattctcctagttcaatttggtgtcttgatcatgttttcattcaagtctccaaaatttgtaaatttcttcttataatactgcagaaaaaaaaaa

SEQ ID NO: 273252 - DNA, 1354 bp, Cannabis indica
tttgtaggatgctaggccaattttggagatgactggaacagtgccctcttatttgcgtacacttctaatgtccttgtcccctcggaatctcaattgttctggccgcagtttgatcaacactaagtcacctgccttgaactccagcggtcggcgtttctgatctgcccacttattcattcttcgtgaagctttctctaagtatgcttgggcaatctctgttttcttcttccagtcttttgtaaaattaaaggcccgcggattccgtccgtggtattcatccactgtgtggggtaacagtggttgctgtccgttcacaacttcaaaagggctcttgtttgatgaagaactcttctgagagttgaaacaaaattgagctacatctagtagttgcggccaattcttctgttggcattgacaaagtgccgcaaatactcctccaacatcccattgaatctttctgtctgcccatctgtctgtggatggtagctcgaggagatgttcatctgtgacccaagaagcttgaataattcggaccagaaggtccctgtgaatcttcgatctcggtcacttactatattctggggtactccccagtactttactatatgcttgaagaaaagttgagctgtctcttctgccggacactgcttcgacaccgggatgaaggttgcatacttagaaaatctatccacaatcaccaagattgcattcaagtccccagtcttcggcaaacctgagatgaaatcaagcgagacactctcccatggtctgcttgggaccgacagaggttctaacaaccctggcgtcttatgcctctccactttgtcttgttggcagacgagacaggtccttgtgtagtccaccacatcttcccgcatctgcggccaatagtacccatgcttcaaaagggcatgtgtcctatgccacccttgatgacccgcccacaacgtgtcatgacactcactcagcagcgtcctccttagatcgcctgcctttggaacgaacaaccgcccacctttggcccacaagaggtcatcctctacccaaaactgagttgtctttccctttcttgcgagagtcatgatgttctttgcaactgggtccttctccaagttctccttgatgcgctctttgattggtgtacccacttggctagctgacatgcccgctaacacctttagtgccgccaactctgctttacgactaagggcatcagctgcctgattaagcgtccagccttgtgctcgaagtagaagtcgaattctgccaagaattcctgccatctggcctgcttgggagtcagttttggctgtgtgaggaaatgactaacagcagtattgtccgtcttcaccac

SEQ ID NO: 273253 - DNA, 1690 bp, Cannabis indica
aatggaattaacaaatataattataaatggtggaagaaaaaaaaatggaaaagttaatgtatagtgtaatataaatgtgtgtggtaaaataaaaagaaagtagaattttggtgagatattttaaaaagagtaaaaaaattattgggagtgctctattaattagttctttttaaatttacattaatattataatttaaaatacatttacgtaaattaaaaaatattttcaaaactaatgagttgtcatgtaatataacaagctgccattttatctataaattattttgtacacatttttgttattttaaaatttaattagttatgagaaataaataaataaatgaaacgattttctctctctctcttcgttcgttgcagttctctcggagctggtgcaatggcgaaaacgaggtccaagatggtgggaaagtcgaaaatctctaataggaaacctaaaaagaaaggtccgaattcatctgctgatgttatgaagaccaaatcaatggaagaaattcttggtgtcgaaccagtggagttctcggatgaggaagataaccgaacagaggtggatctggtgcaaccgttatctccagattcatcactgagattgatcaaacaacaggatgagatagctgctgattttggttatttcctggctgcaaacagggaatgccaaaattctatctcgaagggcattcgcacaactcctccgattctgcgagctgaaccagtattgcgaagcttagaaaaggagtttgttaattcgaagaaggaggagaaggtgaagattactatggatgatatcgaagaggaggtgtcgtattggcaatcagctattgtgtgctatgtccttggtgctaacccaccattgtctgttcttgaaggctttgcaagaaggatttggagggacaaggtggacaagataggtatgatttcatatggtattttcctaattcgttttacaagtattaaggatagggatgagattctagctggtggatatatcttctttaacaaaaggcctgtcattatgaaggcttgggatcccaatcttaatcttaagaaagaagatattagaaccattcccatttggattcaattggaggatttggagctcaagtattgggggcagaaatcattgtttaagatagtaggtcagttaggaaaaccaataatggttgatgaggttacaagggaaagggataagcttctttttccccgaatcctcatagaggtgtcactagaacaagaatttcctaggctgatctactttgaaaatgaatatggggaggatatatcagtgatggttaaagatgaatggaagcctattctttgcaaacattgcaaaggaatggggcattccacggaggagtgtagaaggaaggaagcaaagaatcaagagtgggttgtcaagggtaagcaaaaacaggggaatgatgaaatgaagaatgtagtagatgaagagggctttaagcaggttgtgaatggttggaaacctaaagagaagttaattcctgctgatccatcatcatcaaatcaatttggtgtattgcagaatgatatagctcaaaagctccaggaatttaaagtccgtgaccatgaaggagggctagaagatgttataacgggaggagggggagaacctcctcattgtaatggataaaattctaagttagaacgtccggggaat

SEQ ID NO: 273254 - DNA, 1062 bp, Cannabis indica
gttgacatcagacatgtaccaatattgaccgaattgcagatggcctaaccaagtctgtttcaagcaataggttcagctcttttcgacacaaactcagaattgaagcatctcagaattgaagatgcttcaattctaagtttgagggggagtgtcaagggtgtcaaatatgttaaaacagttagtgaagtactctaattgtttctctggtagtttgttagtgagttgtctcagctcattctctcttccatcttgtatatattgatccttgtatgattctctcgattgtaatgaattcaattcactctttctttcatttctttctctctattttttttgtctttctttctctttcgttttgtcttcagctaatgtctaagaagtttaataggagctcacattttgaacccagaagactttctaaacaataaacttgggaatttttttttttttttgcaaagtgaacttggaattttgattaagatttatagttgtcaatttttcatatattttttttcagaaatatttacttcttaatttcaattttcttctccatatgagtttatcgaacaactggaaaacttatttttgctttcgtgctacaaatgatgtttgttgggtgtgcaaccaaaattctacattgactaaaaataaaaaagattgttgatataaagaatggacaatatctctactggtatgatgccttttggaaaggtgccctaaaacaaatctgtaagggcttagacccaaagctgacaatattataccaatgtgaagatacagtgtccctcctaacaattttcttgtgtgaaaagacttttcttatccacaaacttatcatatagatttgtaatgctaacattgaaaatgcaatcagtaattgcaactttaattttgggctcactcttacatagttaaccttctttcgcaaataataaaatataatatcaatatggtaacttctctgttaaatctactcatagatggtagatctcctaaccaaacaacaactcagagataccgataaccttttcaagtgccgtttgaaggcacctctcctcaaaa

SEQ ID NO: 273255 - DNA, 733 bp, Cannabis indica
gccaaaaatagaattaacaatttcaaaatcttctttttaatatgaaaatatcaaacaaaataaaagaagaacaatttcattttataaaaattgtacaatccaacttttatgatattttttttccacttaataaaacagtgttacattatctcatgtttccacttaattccatgtgtagaatattccaatctttctcaattttcttttatatacctatttatttatttatttattttcataatgggcaaagataatactaaaaatattttacaactatacaaagtattaatacagataaaaatttatacaaaaaattaacatcatactattactacagatattacatttatttgtaaggcgagtgatgtacttacatttaattaagtcatttaataataaaaggtatccaaacataaataaataatctaaataacaagtaaaactagagattgttaaataataaatactatatgtgtttttgagaagactatgctttaacaaaagtagataaatttcaatgaaaaggttcttcactttttttttttgtttgtatatatgctttttaggtctagtcataaatacatagatgaactatatgttccccaatttattataggttaggagagaaataattgaaattctttgaaacaattcccccttttattttccttataatattatgtataggccgaatattgtactatatattcctattatttttttttttttgtaa

SEQ ID NO: 273256 - DNA, 863 bp, Cannabis indica
catggcttcgcttgtccgaatttgggggcatggacgaagtcatgaagaccctgcaggatctgactgctgaaaggcggacgtaccaagaggatgctgagcgacgggaggcccttgccaaggccaagttcgaggaagaggccaggcggagggaagcccaagcggaggcgatgatccgggaggaggccattcggagggacaagctggaggccaagcaccaggaggagctgagggcggagggcgaggctgttgccaaggccagacgcgagctccgggaggctagggaagccttagatgaaatggccgccaaggtgaagtccctagaggaagtgcaccaggcggacttggagtctagggccaacttggccgtggagctgaaggagctcaaggacttcaaagaccaagccttgaagaaggctaagaaagatgagctcctttctcccgtctcttgcagccggtgcgtcaagcgcttcgacgatggcgtttacatggcctggtcaacaaatggccagaatatcaagctcgacttctaccccaaacccgcggagatgattgctaaattccgggagaagaagaagaagcttgacgccatgctggaggcgcgcattggtcctcgccttcctcctcgaattgactaggccgttatgaattcaaccagatttttcttatctcttttttttaattattttacagccaattctcttacatttaagacaatttttattcatatggctgttctattttctaaggggaaacatcggttaaggcctatccccgggccctttgtatatatttacaattattttttgacctgcccttagggctaggatttttttatatatatatgatcttatttgatgcacata

SEQ ID NO: 273257 - DNA, 486 bp, Cannabis indica
ttttataggatatcttaaatatacatgaatatgaaaaatagactaattttttttttctagatgtcgaaacaataaaaagtgcatcagtacattctttttaaaggggtgcattgtagaatcaccctatattatatattttgtgtatctaatttggtcaaagggataatagccgacaataattctatatagccatagtcataatttttttttgaggggaatatagtcacaatactatgtatatacatagcttagattttgggatttttacacttaggtgcttaatttggccattttttttacatttatgtttatttacagttatttaaacttttttaaaaaattatttttcaattttaaattttaaaaggtttgttaattacaaaattacctgtgcaattacaaaattacctgtgcatgctgatgccacgcgccatctttccctttttgttttctttcattcttttttcgattttttttctctttatt

SEQ ID NO: 273258 - DNA, 505 bp, Cannabis indica
tatgctactagaattatataccaaacagtctctaatagtaagggaattattcttttacatttgtttatttaatttattaaattttaaaaataaagaacttaattaaataaggaagaaaaaaaaaagagaacttctcctaccaatttcttaagaaatactattaagggaatgaattttatttatttttattttattttttaatattaaattaaaataacaattttatcatttaaaatatgtcatatattctagtttaactcaaaaaagtaatttagttaatttaaacattttaattacgtttctacaagataaatctctatcattctatttccaaacaattttagtaaacaacatattataaatattaattgcaattattctttatttattttgttatactaattttttttaaaaaaattctaaatattatggtgattttttttatttaaagaattttatgactttagtttgatgagttctttatttagtataaagagagattttt

SEQ ID NO: 273259 - DNA, 537 bp, Cannabis indica
ttttttttagttatttcatgtttactcaattatgtttatcttcttaaaatttatttcgacaattgcattttttaactttaaatataaataatgtatttttatttttttaaatctaatttttttaattagaaattaagaataataattatatatataaaaaagaacggtttggacgggttaacccgaccaaaccgataaaattattgggcgggttgaagtttttctaatttttaattgggcggtttacaattgaatatttgcaacccgatatttatatgtgattggtaaaaatataccataacctgcctaaattgaccgacaatcctactaaaaaaagaggattagttttatttgggtaatattggagacttgggagaaaagaagaagaagaagaagaagatgggagacagagctaaaaaataatgaaaaataaaataaagtatgcgtttattatgtcatggatgtggtcactcattactacatttccatgctggtcactagggttgtacatcggtcggtttaaggggtttatcctat

SEQ ID NO: 273260 - DNA, 854 bp, Cannabis indica
agggatccactttaagaaagattcccgtcaggttctcaagtactaggacagatcttcccctaatggagggaggacagaccttttcccaaagttcaaacggcgagaacaaccagatcgcgacaaccattggcttgaggggccagctagggatctatggctcaacagcaacccccactgtagaaccactggtcggccagacatcagcatgagtacccatggctgaccagggtataacacttcctccccaaggggactgaggtgcgtagaggttgatctttgatcgacgaggaccgagactaggtggaaacaccaaaaatggaaattcaagaagtgaaaccaatcactttaggcgtctaggtccaccaaactctagcaattggtgtgatctacctccgatcaatacatagccaacaccagtcgaccgaggagtcacgggaggccagaccctgcccaatgcaagtttggcgagccatggaggcatcacaggcggccagaccctaccccttgtaggtttggctagccatggaggagtattgggcagccagacccttcccaatgtaggtctggccggccaagcacaacatttgggtttaaacctagctagcctaggccgactcccatacctggggatggccagccagggtctacatgttgggattttacgccctaaaaacccatttcagtacaatctgatttgttatcaatagaagattagaagtcatttatgtttacatgtagttttcatgtttatggtttaatgtatacaatttctgttaagttcagaacatatagttattcacaattacaatgatatcaacacagtggaaagtaattgtgattatttgcttcaaaag

SEQ ID NO: 273261 - DNA, 543 bp, Cannabis indica
ttaagagaattactaaaagaaaataacatagaatatccctaattaatcgtgggatgccacatgtagaaagtgctgagaactgttggtgctcaatagtaatgttagaggatattagacactaatggtaccctttagcatttctctaatataaaatacatttaggtatctctgctctctaatattattattaattaattagaataattgtggtaaaagttcctaaaaatttgaggttgatgcagagtaatccctaactttaaaaattggcagtgaaaatacccaagatcgacaaagttgtaactctgttagtccgttagagtaagtaacgtgacacgtggacaccccaaatttaatcccaacctttttagtttctattttcccttaaaatctaaaactaataactaaaacaaataaataaaacctaaaacaaataaataaacaaatcaaaaattaattaaattgattgaattaaaacaaaaaatagaaaaaatagaaaaaaaaagaaacaaaaaaaaaagatcatagttcatttcaaaatccata

SEQ ID NO: 273262 - DNA, 706 bp, Cannabis indica
ttatttgatagttattttaattattaaataaatagttttgccatttatagggttgaaagtgcaaaaagtggtatttgtgaaaaatagataaaacagttgagaaaaatgacaaaacccaaactattgtggggcccattaagtggccggtcatcaaaagggtttttccctctatttttatcaattttttattcctgataattcaaccctaaccctattgaagatagtacaaaaggaaggctatggtctcattatccaactaatgcctccaaagctaaaaacagttttctctctaggtttgatgagacctcttccttcttcttcctcttcaatttcgaaacactatagcctatcttcacaaatattttcaagccattagtgattgagtacatgcccacacataacaagttggtcctcaatcatagtgtgtaagactgtgaagaatccaaacacaaggaaggagtttcgggctcagatcttggtgatatgctgctatagaaaggatacaagggttagagatctgagcggaaggagtcatttaattccgctacacccactgtaaggtttctcaaactttatatgtgtttaatttcattgttttagaaattcatatttaggatgtaaaataatatacatggtaataacaactggcctcagagccatggtaatgatttactttcatgaactatggatttaaaacgatgtttgt

SEQ ID NO: 273263 - DNA, 980 bp, Cannabis indica
acgttcatacgacaatactatcgaccataatgtcagcctatactcaatattctagtaatactctaggatattgatgtgacagcatcgatcagtatttagtcaacatacatttatcagtaatcagtacaactctaagtatactattactactatcgatgtaatctaatagaaataaacaacatgtatcctaaacatgtaataacatatgcatgacattataccaatcttatctgaattctgaattcaggtgtgccagtcaacctgaatggaacaactgctcgacgaattataggctctcaaatcacatcaataataatacgaataagtgactcgctaaatcacaattgggacttaggtttaaaccaaaaccttaacaactacaacttaatatggaaataccctaaactagtagggaattaaccaactagaaatttgaaactaacgcaaatcaacaagctaaattttttaggaatcccaacagcaaaaaccggttacctggttttcccctgaaaacccaaaaaaaatcaaagctttacaaaacgattccaaactcacccaaactttccagacctccatattatacccagtaaaccattttcaagcaataaaataactacccaagctcagaattgaaaacaccattaaagctccaagtttgagttctaaaactcaaaacttgactaaacttactatcaaccactaaatcacgcttaattaaacataatctaacataattaaacctcagtaaacaataacaaacaactacaacaacaacagcagcaaaaactacaaattcatgcaaaattccaaacttgaaactcaagaaagctaaagagggagctgcttaaatactttaccttgccttaggttcactacaaccttgctgaattccctaattgagcaacaaaaaccagcaaaccctagctggtctaggggtttggagagagagagaaagagagagttgaaagagagaccttttt

SEQ ID NO: 273264 - DNA, 1145 bp, Cannabis indica
tgtattttcaaatttttctgtttcttttctagcaacttatcccaagtgatttcacctttgtcatattttaatgaacatcatatgtttaaattataggatgcactttttttcctctaaattttaacaaaccatcctatctgatgacgttgttttcagcactacaagtaattaatacaagcaaaacccatcaactattttcctgtattccttccctgaagcacaccatatcttagtgtttcatttggtttgctcttttagtgtatatgttttctgagaatcagttttctctcccatgtaataaacagaggcaaatcagaaaaggattgtggaagcaggtggtcttacttccttgctgatgcttcttagaacctatgaggatgaaactattcgtagagtggcagctggtgctatagctaatcttgcaatgaatggtactagttaattatgttgtttacaatcaagtgtggggcctttctttgttgcacttatgtttgaacttatatttggtatttagtttgcttttatctttcgtgattacagaagccaatcaagagcttataatggaccaagggggaattagtttgttatcaataacagcagctgatgctgacgatcctcaaactctccgcatggttgctggagctattgctaatttgtgtggcaacggtatgctcttatcctttgatgtgtcattttttctatcacttgcactcattttgttaatcatgtttactcaaaaataaaataaaatagataagctacaaaccactctaaggaccgaaggtggcattaaggccttgttgggaatcgttagatgtgggcatcctgatgttctttctcaagttgcacgtggtgtagcaaactttgcaaaatgcgagtctcgagcatctacacatggtaagcaaatgtgtttacttgctctttgatggtggcatcaaatgatgtaacttttacactattgtttcacaggcttgaaagctggcagatcatttttaatagaggatggtgcacttccttggattgtacagaatgctaacaatgaggctgcgccaatccgacgccacattgagcttgcactttgtcatttggcacaacatggtatattgcacgttgcgtttgtatataaaatttcacaagcgcttgca

SEQ ID NO: 273265 - DNA, 678 bp, Cannabis indica
catacttctcttatataattgtaataaaaaaaaatacaaaattaatactaacgaaagtaactttaaaaaatgatgtagaagtaaaagaatattgttgactgaggttttcggcaaccaattaaataatgtacaagaagatctgtagaaagtttaatgcaggagatttttacgtggttggggcattaaggagttttagtccacgagtcttttttatttatgagagtatttattacagagaatgttcttggtggatttctctcctattttctctcttcgattccttaaacaaaatagttcgaccccttttcaatctgtttgtggggtatttatagtatttttctgggagaatccctagaaatagatcgcttgtctttctgtgttagcttcataggggcacatattcctggcagatacaaaatagaaaatacatgacctataccgtaggtatcttaggagttaggtggatataatcttttatccactcttgactaatgtgattcctcataatgtagtcgtcactagactcatcgattgtagtgtaatcgtcgtaaaaggggggttaagccatctgtcatgtcgtttatggaggcttcaatacgtcttcacccatgcgacatgaaatgcgaagtgatcgtacgagtaatctctttacctcccagaactgccttagcatgactc

SEQ ID NO: 273266 - DNA, 533 bp, Cannabis indica
aagtggaaccctatttcggtatcggttagttatttcgtttcgaaactggtgactccgatacactacacctaacatgattacatactttgtgtcacgggacccctaaacatctacagtgatagtgtcactacagcgagggtacatcgacaccactaagtataaacctgtttcagtttcggtttgttatttcgttacgaaattggtgactctgatacactagacctaatttgattacatacttttagtcacgggacccctaatcatctacattgatagtgtccctgttgcgagtgtacatcggcactgcaatgtcgaaccctatttctttatcaattagtgattgttttacgaaactggtgactcttatagacaacacctaacttcattacatactttgtgtcacgagtcctctaaacatctacagtgatgtgtgactacggcgagtgtacatcgacaccaataagtagaaccctattttggtatcgattagtgatttcgctacaaaacttgtgactccaataccgtacacctaa

SEQ ID NO: 273267 - DNA, 1933 bp, Cannabis indica
caggaaaaataaaaagaacaaattttttaggcttggtcctcatttccttttgtgatttatctcaactagtgatgctcacattctatggtcaacagaaaacgtggtaactaaagaaatcttgattttattccttgtatgagaagattgaataactttatatataaatatattttatgtgtgcagttgacattcccttggatatttgcaaattaataaatatgcagcggctggtaagttcttaagtagagatatttatgattatcattcactattttgcattatttttatgaagctgaagtaaatttacaaggttttaaattcgctcacagataactaaaatattcaggagttattagacagtaatgtgtactagaatcatatcttgctgtttttgaggaaatagaccaatgatcaatttacttaggagataacatattccattggtcttctacacattatgtgcacttgtttgtttaagttcctgtgactatcattacccgaagttccgtatcttggctaaattacaattcactgctcatcttgtcagagtactcaaccatttagtcttatttctcacataaaagtgattactgataatgtgttactaatcttcgctttgactctggaccatctacttgttgtttttatccctgtaaaaaacattatttagctagagaaatgattcatctttggtattcatgttgtcaggttttagctgataatcttattcagtctctgccaataaatttggggaaactgcagtctctaaaagttatgacacttgatggaaatcgaatttcttccttgcctgatgaatgtaattttcttctctaaatatgtaagaagatcttttaatagaagtttttttttcttccttttttgatgtccctgtctgtgaacctattgggtttgtttcttgcaaagtgtttcgtggtttctttactatatgcatatatactgtggtcagttgggcagctagtgaggctcgaacgactgtccatctcaaggaactccttagaatatttgcctgaaactattggcagcttgcgaaatgtaagtgcttttctcacaatttttagcttctgaatgattgtgcttatttggttgtttgtgtgtgacaattcatgttgcctatatgtctaagtatcatcatacccaatgtacttgtggagttgatctcatgaaaatcacgacccattggatttcttcttcctaaaagtattgagtaaaggggtatgatttgtagaagagaaaccaaataaggatgttggttttttgctgtcaagtgttggattttctagttattatcatgtttgctgatatgaattctttcatccgaacataagggtgtgtcctcttttattttcttcacagaatgctgcaactgctactaagggttttattttccttcaggggctagattatgtatatttaattagaagggttggagttagggtttgttttttagatgatctagaatttgagtgggtgagatagggttaaattgtgactatgatacctgttgatcagatgtgactttgaacagaatatgcatgcatgggaatttaatttcatcataaaaaagtttccatgtgggatattgtgatgttttcttcattattatgaaaaatctaggctttattcctttctcttcaaatgcagttgcaacttttagatgtctcaaataacaaattaaagtctcttccagaatcaattgggagctgtttctctttggaagaactacaagctaatggtaaacttttcttgtgaatatttattaaatttctacggttcaaatttatgcagaatttcctcattttcaagctcttacttgtgtaaccatcagagatatttctggaatcagaaattagatgtatttgaagtcatcacgcctcctgtttctgtagtaattttatttatttgttttttgttt

SEQ ID NO: 273268 - DNA, 640 bp, Cannabis indica
gaaaattgagaatagaaaagtgggaagaaaaatattgttatctaccaattttttcctcaataatttggaaagaaattgtagagagaagtctcacacaaataacatacaagtgaaaaaaattaaggtggcgtttggttggaggtaataaatagaatgaaatgaaaaataaacaactttaattcaattcttttgtttagttgtattttaaagtattggaatgatattttaatggaaggtcttttccaccattttggtagaaaatgactattccattttataaagaaaggaaagaccatttcaaattccaatgtaacaagagaaaaatttaataatttttttttcaattttttttatgcattttaaatttcattctatttttattctcattcatattcttatattttcatttctcctgaccaaacgccatctaaattatatttataataaagtattgtattaataatttacgaataatatagtaattttgcaatactaaaaaaaaaagtctttctccataccgaacaattaggattgtattttttttcttaaagtattgtgaatctatccaataggaattttgacatttatgacacgtttactatacagtattccgaatcagaataaactaatggagaaatgt

SEQ ID NO: 273269 - DNA, 633 bp, Cannabis indica
tgtaaaaattattaattgaattttttattttgttaaatgataaaataaattttgtattttttaaaatttgaaaaataagactctgaacagatttttttagtcaaaataaaatataataataatccgatctaaaaatattacgacaaaactggttatattttctatatttgttcgtattagaaattatcttcaagttaattatactaaaaaaaattattgaaaattgagttcaagactatttttatcattttagaaaatataaagtcttttttatcatttaatataatagagagtccaattaacaacttttataaaatacaaaattcaaaatagtatttaattgattcaattgcgttttgtctactttgattgttaccactattaaataattttacgtattttatttagattcagatataaggaatccaatgttgtttcaaataataataataataatagtttaactaaaagcgaataaaaacaaaaattgtggaaaatggtggtaataagagatgttttgcaaactaatttagtttagtttctttcactaaaatatttagggaaatttacaaaaatactgaaatctgagttaacttttacaaaaatactgttacacgattttttttttaaaat

SEQ ID NO: 273270 - DNA, 882 bp, Cannabis indica
tttagcggcataagtacccaatatttataaaactgtaatttttcttcagttttgtcagtacagactccgttttaaatttattaaagtaacatttggaagtaatgtttctgtctagacccaatgatcaagaatctagaccttatatgtggcatgtttaagaaaataacagggtttgtacggacgaaattagagaaaatttacagttttacgaacattagctatttgacacttacaaacttaatactttgggtactcatgcacctatttaccttttttttttttataatgcagggtaaatgaaaggggcaaaagcgtaaaatggacgaaaacccacctagtgaatgacgatgattccgaggtaaactctcctatttaaaaccctaacacaactaaaagctctctcactctgtcccatttctccatctctcccatccaaaaagaaaagctttcaaatcttcactacctgacaatgtcttgctacaagggcaaatatgctggtatacatactcgtatatatatatatatattttatatgtctatcatcttttagattgcattgttttctgattctataactacatttcttagatctgtaattctttttttcctcaaagttttcaccttgattttggatacggtttgactaagtaggtttattaatttagagggatgatctgaatggattcatcattaataaatcaattacgattttgaatcggtttttctattgcgaaatcatattttacttcgatggtttagaccaatatcaattgtttatggggaaaagattagaactttggttattgtttatttatgatttgttatctttgtgtgtattgtagatgagctcatcgccaatgctgcttacatcggtacccctgg

SEQ ID NO: 273271 - DNA, 505 bp, Cannabis indica
tcataaaatttaaattttccttgacggttcttcatttattttttgatttggttaccaattaagaagttttttggtttcattattggcagaatagaaatgggacacctttatggaggcagttccttatgtcgaacatcaattctcatagagatgcacgccatgttcaaattctctacgaataaataacatgaaatctatggtttatcaatcctcaaagtttgagctggaaccggatcagtggcggacaaagtttaaattcaatatggactttccaagaggaggagagagagagattaccagttgccggctgcgtgaagacgtcgttagaagaagcgagagaggatgaggatgagagagacagtgactgagtcttagaatttaaagggtttttttttttaacttttacttttaataaaaatctggtaattatgttttaataaaaacctgccactaaaactttagttttttttttaattaaaataaaataaataatctgctaatattt

SEQ ID NO: 273272 - DNA, 659 bp, Cannabis indica
ggatattactggccaactataaacaagtacacccatgaatttctcaagatgtgtgataaatgtcagagattctcgcatataccacgcataccaccagcggaactaagaatgatgacctctcctaatccataagtaatatggggaattcatttaattggggcactacccatagggtgcggaggagcaaagtatgcagtcatgtctgtcaatttctttgcaaaatggacggaggctgaacctccagtgtccataacctggaaaaaagttcttgactttgtagtcagaaacataatttgtaggtttggaatacccattaagatagtatcagataacgggactcaatttgatgctgaattattcactgagttttgtgagaggaataaaattaataaaagcttctcgtcagtatccaggcctcaagcgaatggcaagtaaaagctgttaataagaccttgaaggatactatcaagagaaactagacgctgctaaaggtagatgggtcgatgaactacctcaattactttgggctcataggtcaactaagaagacaacaacaagacatactccattctcgctagcatttagctcggagacaatgctgccggtagaagtaaatatcgtgactcacagacaagattttataattaagaagaaaacca

SEQ ID NO: 273273 - DNA, 1156 bp, Cannabis indica
ggatgccaagtataattagcccttgacgagtacacccgggggcacgctgaggtggaggccttgaggagggttttgcgagaggaggtgcaaaactctcttaacgaggagaactaccggaatccgtgggatctgaacatggaccccctgacggactggttcaaccgtttcctcgggcccaccttggccccttttgcctccgagatgaccagtgagtacgtctcccagctgactcggtgcgcgcctaaacggtacgctgcttgtgcatccttgaactctgtctaccaggttcaggacatcagccatgccttggctgcggtaagtactttgtgatttatttctttcctcattattttacttaaggccttcactcactcttacttccttttccagattactgcagaggccggccgcctttccaaaaccataattaatcatggcttcgtcttgtccgaatttgggggcatagacgaggtcgtgaagatcctgcaggacttgtctgctgaaaggcgggcgttccaggaggaggctgagcggaaggaggctcttgctaaggcaaagttcgaggaagaggctaagcaaagggaagcccaggcggaggcgatgatccgagaggaggtccttcggagggataggctggaggcgaagcaccgggaagcgttgagggcggagggcgaggctactgccaaggcgaagcgcgagcttcgggaggccaaggaggccttagacgagatggtcgccaaggtgaggtccttagaggaattgcaccaggcggacttggagtccagggctaacttagccgtggagatgaaggagctcaaggactttaaagaccaagccttaaagaaggctaagagagacgagctcctctcccctatttcctgaagccgctgtattaagcgctttgatgacggtgtctacatggcctggtcgacaaatggccagagtaccaagcttcacttctacccaaaacctgtggatatgattgccaaatttcgggagaagaagaagaagcttgacgccatgcttgaggtgcgtattggtcctcgccttactcctcgcattgatgaggccatttgaatccagctcacttcaaccaagctttttattatctcttttttttttttttgttacatatttgctgctgccttagaacaat

SEQ ID NO: 273274 - DNA, 834 bp, Cannabis indica
gtaaatttttccctattcagtgtagatcatctacagaggatctttaactattaggattataacaatggataatcataaggtatctatatcatggtacatatagagcgttctatataattgagagtgctaaaaagaatcatccttcagatctcatccttggaaacttggatgagagcatggttacaagaagaaaatatgctaatataattcaattcttatgttttgtttcttctttagaaccaaaatctataaaagaagcactagtggatgaagactagtttcttgcaatgcaggatgagctacatcagtttgttcgaaacaaagttttgaaaatgattccaagaccaccatttgtgaatatcattggaatcaagtggatcttcaaaaataagagtgatgagtttgggactatcattcgaaacaaggaaaggttgattacccaaggatacactcaggttgagggtattgactttgataaaagatttgcttcagtagtaggactggaatctatcaggttacttctttccacagcttgcattctcggttttaaattgtatccaatggatgtcaaatctgcatttttgaatggttttttgaaggaagaagtgtatgttgaacaacctaaagggtttgaggatcctcattttcttgatcatgtttatagattagacaaagctttgtatggcttgaaacaagcaccacgtgcttggtatgagcgtctaactaaatttttgctttctcgtgattacaaaaggggaaatgttgataaaacactttttaccaaaaacattaatattgatgttatttttgctcagatatatgttgatgatattg

SEQ ID NO: 273275 - DNA, 1440 bp, Cannabis indica
gttgttagagaatatttgaaaaaaaaaattaaaaatctaaaaaatctcctaaatatcctaaattctaactaaaattcaaatatcttatcaattttcaaatttttagtttattcaaataatttaaatgaattaaatatctaataagataatataatataatatcttaatttaaaattttagatatttctaatcttataatttaataaattaaatgtaataaaaaaataaacaatttaaaaaataagatattttatggttaggatattatcaattttatctaataattaaataaaacaaaatatcctaagtttgaaattttctttattgttagaaaccctaaaatttctattcaaacctaaattaataaatttttcaaaaatttcatgttattttgccaaaaaaaaaaataattaaaataaatatctaataagataaaatgtcaaaactaacatttttctaatcttataatttaatttaataaaatatatttttcaaaaataacaaattttgaaaatctgatatggttagcaaatttgaaatttaaactagattatttttaaattttattaatattttaatatcaaaataagatcatttcaaattttaataataaaataagtaatatatgatcttataataaaaataaataaaataatcaaaaatttcaaaattaattataaggctatttttgtggaacaattaaaattttcaaattcaaaggctactaatatctaaaactaattttaattaattaaaaaattaataaaaataaattttgttctgataattagatttttaattgaaaatatagattctacacaaaattctaccaaaattcgaattttgtttcaatgaaaaatgatttttgaatcaaaagatatgaatgaaaacaagtttggggcacaggggtatgcattgcatacccctacgcgcgcggaatggggcttttaaccgagacaggaggttgcacgcagcctcaacggccgagggaactcggcatgacacaagctttagacagcctgtgtctgagtttccttggacagggcttgtctgaagccgcgtgaatgccgagtgaatcccctcgtgcgcgcgcacatgtgcaaccaagtttcagatattttcatccaaattcaaaaaatcataactaattcataaaaaatccaaattgagttctgtaaaaccctaaattcattaattctttgtctaaattccagcaaaaatatttcaaatttacaatatacattgcgctttccatacaatcatcaaatttgcacataaaccaacatgaaaccatccaaatcaacacaacatcattttaaatcaatatttcatgaaagtaaatcattaccatggctctgaagccatttgttggattatagttttaccagaatctaaatttactaccatgtatgtgtttaacatcgtaaatatgaatttcta

SEQ ID NO: 273276 - DNA, 1164 bp, Cannabis indica
tccaattctccatgtagaaaggctttcttcacacccatctgccatagcctccagtctttactagctgcaagtactagtagaacctgtactgttgtaatcttagctactgggctaaatgtctcagcatgatctagcccatattgttgagagagtcctcaagctaactgagccttatatctctcgatttgatccatcaggaagagttgttaccttgtatacccatatgaaagaaatgggttttacgtccttaggctttggcaccggctcctaagtttgatttttctctaaagcaactatttcttctttcatagcttcaagccacttggagtttggtatgcctcctcatatgactatggctcattaaacttctcttctttagctacaacaacattggcgtaattgggatttggcctccgtgcttttattaatcttcaaatttctggttggccatcatttggattatcttctactctctaatgcactcatgtatgccagggactctacgttgtatattcgttgtcttcttcactctgttcttcttcatccgtttctatagttgaaggtaactcaacaatctgctcccccattttcttctacaaattctattccatttcattggtaccttttgcggtgaccaccatgatgaagctttgttgaataccacatttcttgagatataacactttctagttgtagggtcacaacatttctgccatttccattggctatcgtatcccacaaagatacaccgtatttccttcttgttgaattttctacgtaggtggattggcacgaatacatagcacacacatccaaatactcaaaagtggcttactgcaggtttattatagccccacaatttctcaaagggtgaaatgaaccctaacttttcttgaggaagtctattgatggcatgagcagctgtcttcatgccttctacccaaaatttccttggaacattcttcgtgtgtagcatgctttgacatgtccttacaaggtggcaattcttcctctctgctactccatctattgtggagtatttgcacatgtgaattgatggcgtatgcaacattctcgaagatacttaagaaattcaccttaggtatattcgccaccgttgtctgtctaggtattagtttttcttgccgaatttgttgggatttt

SEQ ID NO: 273277 - DNA, 1455 bp, Cannabis indica
tgcaaaaaattgtatttagctggacattttacatggcccaggctccaaaagccgtgactgcaaatcagagacgtaaaaacaataatttaaagtatgggtggtcattaaattttgaaaatcaatgttgttaatacttgagcataataaaaagattgactatttcaacgtacaaaaaaaaaaaaaaaatttgactatttgtcaaggtgcgggattcaaatcgtatttttcattccgaattttgacatttactaaattatgctttctgaaatttttttggcttttaaaattttttctttgaactattgagattgttagatttaaggacttgtttaattttagtaaaaaataaacagtaaaattgaatgaaattaaacaaaagtctttaaatctaacaatctcaatagttcaggagaaatttttaacggccaagaaaattcagggagcatgatttggtacatgtcaaatttatagggaaaaaaaaaatcttaattagcctttaatttttcttgatgttgatagtgagaattttggatgggagttgctggacttttaatacgattgcttttgtgtttcactgccttcttaggatactccttgttagattgctttgaataaattggacatgtgggttcaaatcatgatgttatgattggctattgatcataccatctcattagggatgttagtaactatattggaagctttattagggctcgggtcaccataaatatcaaaaaacctctaaagagacgaattaatatacaaatgaacagatgatgattctgggtaaattttaaatatgagtgggtctctttattttattatatctatggggttattggacattcgaaaaggttttgcaaatagttgtttgtgaaatctcccattgaaattactaaaccatatagtgattggatgcgtgctaatttgttcaaacataatcggtatactgttggtgctaagtggcttagtcccaatagagcattccctttgccagaaagcagtggtagttcggttgctgccactaggaatacaatcatgatagaatttaatggaatgttgactgggggaagaaaggtgggattctaattgatttgggggtagtaattcggggaggtaatttgggtgaaggtgaagatactcgctactctaatatatctaatccataaaagaatattaatgaaaggggaaaaggtcatgctgttatggaatatggagagaatatgagacgaaatgagaatgttaaaaaaattggcattgtaattgtggagtccaaaaggaggagaactgacggagatacaatagatgagaatgaggctaaggaaattgatttgggccagattaagcaagggttgtcaaaaagcttgcagtccatgggccttggtgtaatggtgcacctacaaccatgagtgttttaagttggaactgctttggaaacccttgggcttttcaatt

SEQ ID NO: 273278 - DNA, 730 bp, Cannabis indica
aaaaaaaatattagtttcactaaataaaaaaaatactaattattttattttagatccaaataaaaagtataatttttttatttatttatatctatatattttagcattgatattaagcatcagtaataccaataccaccgtgaggtaacttttttgttaataattagtgatattttacaaaaattatgaaattaaaatctttaaaacccaatatttaattgcaatatatagcagacacctcatacgtaatggttagacatcactaccatttcttttaaccaaagactaaataaactggtaatataagtaaaattaaccaactaactacacaaattattatattttattattagttattattttcatatttaaaagttaccatgtattgttatttaagatagcttcacattcttttagcttcacattcttttagtaactttcgctacctttaaatatatatgataaaattacagagttatgataaagtatacttaatatcaaaattagtagagtcaatttttttaatattaacaattctaatattgattaagatactatttggtttctttataagttcttttaggaatttatcaaaactgtttcaataaaattaacttatttagaatactacaaggtaacttttaaatatgaaattagaaaataatttataatctattaaagtttgtttaattttatagtttgattactttttcgttaacaaaatataaaa

SEQ ID NO: 273279 - DNA, 838 bp, Cannabis indica
tattttggtcgtttataggaatttttatttgttaccacattattcttccgccataagtgaggtttttcaatgaacttaggaagaggtcactcgtggacatgtgatcttcttgtcttctccatttgctgtactttggttgttcttagttatacagtagtataatatttgaggttttatactatgatgatgatcattgtgggaaaattataattaatggtacataatcaaaataactaaaattttaaattcgtaatgacaagattaataaacacaaatagtaatcggagaaaaaataggaatgaacagagtatgggaaaccagaaaacaattaaaacatgaaacaaaaaaattaacaccaagatatatactagttcaagtctaatagatcggtatgctctatggctctactccagttttggaacactaccacaccttttttattgattaagaacatgtacaatacagtcaaaatcgattctctgatgagttctctcaaagtgtttcaactctcacactattacccaagaatctaacacataatggaggtatctacggaaattccagaagtgtgacagaagtactgtaaccgggaattaaacttaaatattttcgctgcaaattactcatacttatatttatttgtgagtgtttcttgttcaatgttattattgcaaatttcatccataaaatgaacaagacaaaaccatacattaatcattaataatacgtgtacatatatttgtttgaattacccaaattatgttaatttctaacttgcctaatatgatgtctttgttccaactctcttttatctaatgctaaatattcttcttagcct

SEQ ID NO: 273280 - DNA, 1017 bp, Cannabis indica
ggggacctaacggtgaaagaggtggtgatgtgaacctagttgaaagaacatgcacctgcggcgtgtttacgttattgaaactcccctccttcatgcatgtgtcgcggcattgaaaacaaatacaagtgtgtacacgctttgctcaccttattattcgaaagaaacgtggaagaagatttacgatgataccatcaatcttgctggtgacgaggatgattgggttctcccagaacacatcaagaatatgaaagttggggtacctgtggaaaagaagcctgtaggtcgtccaaggaaaagcaacgctggaagaagacaggagaactgtttcccgtctggtgataaaaaaggatctgtacctcgaaactgcagccgctgtggcagttcaggccacaacagagcaacatgcaaagcccgcatttgaggcgtagtatacttattcgttgtaataacatgttttctatttcaggttcgaaactgctttaaaataatattgaggatgaatattttttgttgtgaatcaaagacaatgttaaatatttttacaagactaagaataagtatgagacaccgttagactaatgttaagtttctttaaaatacattatttatgctccatatttatagaatattatttattgctctaaatatatgatgtatgatgtatgtaaaaatgtgttgtaaattaaaaaaaagtaaaatttaagtgatatgttttaaaaaatacaataaaaaactattggaattgctttaatgccaaaattaatttataataatttgtaggtagtggaatatggttcatccaaaagaagagaaagtctatttatacataactgtaattttaattactacaaaatatacaatgtcaccataattatacatataatcagctgacattttagtaaaacaaaatcaacacaccaccgttcacggaacaaacttgatccggctccgtgacatcggtaatccacgtcgcatcatgagatgctcacatactcaatgcaataaatgccacaatca

SEQ ID NO: 273281 - DNA, 1730 bp, Cannabis indica
actccaaaccaaacttaggcccatcccccctcacgtgaagctgatttaataaattgggcggggtcccgacaatttaattgagaggctttaatttcatttaaatgcccacttggcatacacggcccacagctaggcccctccccatttaaatttttccttgtcaactataatcgacccagtgaaggaaagagctggcccaatgtcttccttactaagcccaacacccttatttgacccaaggtgcaaagtcaaggtctggtccaccacttttaaattagaacaaggaaatttctgaacccccttttgtctattgtcttctccaacgcgaaacttattgcccagagaggaaatggtaggcatgcgattgacagggagccgtttgggacgccacaatttctgagacgccagctttcccatagcagataactgaccagtccccttcaccgtacgcttcgagccgcgcaccaccccaatcggacgagacgatctaaacccacttccatccatggtcgacggcaaggacttcctctgatacacttcacgctcagaccgaggaggaagagccagagcaggggagacagaatttgcaccagaataaacatcacgataggaggaaacgattgatagccacggtccaaacattggatagggaattccattaacattcgccactgtgaccggagaagagagagcacatcctctcctttggtgacctagtttaccacaattataacaaaatattcccagcctctcatatttaaactgaagccattaacaaccccctgtttccagttcaaaaaaacaaccagagaatagtggttgctggatatccaactcaaccgaaactcttagaaacttactccacagagccggcgcaccctcttccaaggccactgtgataaccttgccagccttgccccccaaaagcttaccattctccactgaaaaataatctcgtgggaggttgtggatttgtaaccaaatattcatcgaatcaaacgacaccgagagcaagtttctaggagaccacgctgtgaggatcaaagagtagcctcgaacacaccacggtccgttatcgagagcccaggcacgatcttctgcacacacaaaaccaaactcaaagcagtttggaatattggaagcctcatacaaagcaaccacattcactttaaacttccaagatttgtctacaaaatccttgacagatgcttcattgacattcatgggggccacaacttttcccaaaagacacaaggaggggagtgcctgttgagaagaagcacacggagccaactttatagttgattccacgcaagaaaagcacttccccattccattgaatgcagggttggtggcattaactatctccatatcgacagcaaaagacaaggcaccaaacaccaaccttaaaataacaataaaatgcaaacaaccaacccaccaaagacaccccaaagaaccacaaaactacacaatctccccccagagaaatagaactaacccgcccgacaaaggaaacaacaatctcacaaaggctcacaaaagctacacacaacaagacactcaaacacgaccactgaccaaaacaaaactgactacaacgaactagacccaaagaaacaacaggaaggcagaaagcaacaagaaagtgatagaagatcactctctaaactcactcaccaccctcacaagacactctctctctctagacacactctctctctctctct

SEQ ID NO: 273282 - DNA, 661 bp, Cannabis indica
ggaagttgattgatgtgtgatagaaaagaaaaaaagagaaagaagagagtggaagttgattgatgtgtgatgggggatgacacatgtgtctgtgcatgagaatggtgtgtaagtggtattattgtaataaaataaagatggtaagtaaaaatgttgatgtaggcgtgtaggagtaaaacagtaataaaatgtgcaaaacagaattttggtgtaaaaatttctattataatcttaataaactaattaggtaataattagaaatttataaaaataattaaataagcgtaatttattaattgtagagattttatttggctatataggtaaaataaataatacttgttaaataaaatatttttagcttcaacaacagtgaaaaaccaatcaattggctagaaatgtcatcgcgatattagtgggtgtcttagtggtactaggagtttatatggtatggttagaattttgagttaggcaggttatttataaatgacaattttacccctagccttttaaagattccttaaggtggaagtaagggtaatatagtcttttctatttaagttaatctatagaaactttgttttttagtgaatttctagagatttaagttggggtgagtttatttaggataagaatgatattgaggataaatttaaaacat

SEQ ID NO: 273283 - DNA, 547 bp, Cannabis indica
tcattgttctcaaataagccaatgcagtcttctttcaaaataaataaataaataaataagtactcactaaattttaaattgaaaatcttaaaataaagatatacataataaatacattttaaaagcaagcaattcaatatataaacagtttggtaataggatataccaatatatcacatctaaatagaataaacaagtgtgtgatcatcataaatcatttaaagtcatggaactgaagcttaacatccaaaactttcaaaggattacacaacatagaacaatgtgttaaattgtagaatcataaatgtgttcacgattaaccactatcaccacttaaaatcgttctaaatttaaaatcttgatacaaataataaataaaaagcaagcacctcatgctagcagagaaaaaatatttgataaatttcggggtcactccaatgtaccacaataggagacttattaaaatcagggttgtttttgattaagtagagaaacacatttaaagtgtcatcattttcaatttggatatatttgtgattgtagtagt

SEQ ID NO: 273284 - DNA, 3158 bp, Cannabis indica
acttgatcaatccaccccttacaatggcactgagggtttagctgttggagatggtaagaaattaatgatttcccacacaggttcaaccttcttacccaattcttccttagctttaaagtccattcttcatgttcctcaaatcacaaaaaacttagttagtatttccaagttaactaaagataatgatgttttccttgaatttcacaaatattgttgctttgtgaaggacaagcaaacgggggctgtgcttctcaaagggaaacataaaaatggtctttactctcttggtgatacttcttgttcatcaaaagactctgctgaatgctttcttgccaagtccgaaatgtgtccatctcatttctcatgtactgctattaatcattgtaataaagagattcaaaaatctctaacctgctgtaattctgaattcagtaataaaagtacatgtttgttttccactttgccttctgtttttattacttacaaacaaatgatgttaataattggcaccaaaaactaggacacccatctaaagccactcttagcaaactattatccaaagtgtctcacaatggcaccattcaaaacttacacttctgcaatgcttgtatattagggaaaagtcacactttgcccttctctatgtccactggtcgtgccaataaaccccttgctttgatcgatacggatctatggggaccatctcacctagcatccaaagaaggtttcaaatattacattattttgtggatgatttcaataggttctcttggatataccctctaatagttaaatctcaagcctttgatatgttcattagattcaaaagcagggtggaaaaacaatttgagttgcctattaatgcagtgcaagctgatggtggtggtgagtatagaccctttgccaagttcttgacaaatcaaggaatcttgttcagccatccttgccctcatactcatgagaaaaatggaagagttgagagaaagcatagacatgtgactgaaacaggtctcactttacgtgctcatgcgggtcttgatctcacatattggtggcatgctttctcttgtgccactttcacaataaacaggttaccaacacctgtccttggcaacattagtccttttcaatgtctgtttggtcaagaacccgattactccatacttaaaccattcgtatgtatgcatgttttccccacttaaggccttataatgcacacaagatggacatgagatcccaacagtgcctattcttgggatactcatcttatcacaaaggttacttgtgtgagaataatcaagggaggatttacatagcaagaaatgtggtttttgatgaaggcacttttcctggccaacacaactctcatcacagcaacaatcaggtaaattcccacactcaatccacttcctttccttctgcatctttttacaccagccaagctaatgtgtttcctaatgcatctctttcatctggtgaaattgtgaggaacactactactcccctcactggtgctggtgctggtgaacaagttgcagctcgaaatgatagttccactgctgctgttgagactcaacataatgtcactacagggactttacttcgtgccatactgttcaggtaccaaatctagcctctactaaaccaaataactcaatatctgcacctatatttgccaaaaatcaacctccatgtgcaactcaacctcaaacagatcccttaccatcaaacaatacctccattcaaccaaacacagactcacacaccaacaactaaaccagaacccattctatgaccacaagatctcaaaatggcataagaaaacccaaggcctatctttcaacaaaacatctatgcctgaagctttgctacctactgaaccaaagtttgttaaagaagcccttaaagatcccaagtggcatgcctctatgtcaacagaaaacaaagccttgaaaaagagctagaacttggacattagttcctagaactgatgacatgcaagtcatatccaacaaatggatttttcgtgtgaaactaaatgctgatggctctcttgatagataaaagtctcggttagtggctagaggttacttacaagttccaggcattgactatgaagaaactttctctccagttgtcaaaccagtgactgtccgaacagtgctttctttggctgtctcaaacaattggcaagttaaacaactcgatgtgagtaatgcctttttagatggttctttaaatgaagttgtgtacatgcaacagccacctggttttgaagatgaggaacatcctgattatgtttgtttactaaattacaaataattaaaaacctaattaaataatcataattaattaaatcaaataaatacataaaggagaaaacaaaaagagtacattatcttaataatattattacctaatagctagagaataaataacattgtcgtacgtaggtgtacccctggaaagtacgtactaaagattgtatatataattaattagtctgaataattaatatgtcaaggttaattaatttagttatatcacatgtgatatagagagtagattaattaatggtgaaattattttaaaccaaattaattaagtaatatacgtacaaacaagaagaagaagaagaagaagatagaagagtatatataattaattaacaagaaagtaattaatttgagacaaattaaacatacaattatatatatatatacactgtatatatggattaatatgattattacaagtgtaattaattatgagatttaatatatattgcaacttataaaaatattattaagttttgccaaattaaagtacataaataaatttgctggatatatatatcttgtctgcagaatgacaaggtatatagctcttccaatttataagacacaccctttcaaacgtacaaggaaaattaaaaagaaaacaaataacgtacaacagaatatgtatagagttaacattcctattaatgtatgaacttataagttggagcttcaaattctttaatcattcggtattctaataagaatcactaaataaccaagacacaattagatcccaagactcaagatccatatccgcggctattttctgtggtagctgacgctgatcaggctgagagtgagactgatgatcattca

SEQ ID NO: 273285 - DNA, 1577 bp, Cannabis indica
ttcttatcttatacagctgtttatactttaataaatgaaaataataataataaaaaaatctattatatttatatattatttttatttttggataacaaaaatcttcatatcttattgtgtaggaattaggaaaagatatcctaatcacgagtgggttagtttagttgtgtagcaaaaataaaataaaaatgaaattaaaaagacaaccttcaatctcaaccgttcagatatattatgatgacttaatcttggccgtccatttacacatccttttgctataaatagagccccctggcaaaggtctcggatcttctgatcatttttctatgagttctgattagattggtttggttttgatcttcttccaatttagggtttatcatcatccgaagaagaatcggtttgtacattaatggttgaaacctggacttaatttcctcactaggcaaatccttgtttgcaactccgcgtttggctttgttaccctaatttctcaaatcgttttgatggcatcttcttcggattcatggatgaaagaatacagtgaagcagtgaagcttgctgatgatatcaatgggatgatatcggaacgaagttcactgtctggatcaggcccagaaatgcagcgtcatagctctgctataaggagaaagattacaattttaggcactagacttgatagcttacactcccttctatcaaagcttcctgggaagcaccctttgtaagttaattaactccattgatgttttctatcaaagctttctgattaaatatggtgatattagtaaagtctgggtcttggtttgaaacttgtttatgttgcttattacttgttcacagatcagataaagagatgaatcgacgtaaagacatgcttggaaatcttaagtcaaaagtgtcacaaatggcttcaacattgaacatgtcaaactttgctaatagggacagtttacttggtcctgaaataaagcctgctgatgccatgggcaaggcacctggtttggacaataatgggcttgttggtttccaaagacaagtgatgagagagcaagatgaagggcttgagaagttggaggagactgttataagcacaaaacatattgcattggcagttaatgaagaactagatttacacactagacttattgatgatttggactaccatgtggatgttacagactctagactgcgcagagtgcaaaagaccttggcaattatgaacaagcgcaccaagggtggttgctcctgcatgtgcatgttgttatctgttgttgggattgtggctttggctgctatcatatttctgctagtcaaatacctttaataagaaagaatcacgagattacaacacttgtgcttctttgtgtggtttgacttttactataatggctgtgatatagtatattgtttttgtgcatttgtgaagatttgtggataattcaaattacttgtttggtgtgtcatttggcaccattttctcaattgaattttcaggttgtgttgatttgataaactgcggcctttcttccttgtgggtttgacatagtatcatcttccctgcttttatctctcct

SEQ ID NO: 273286 - DNA, 1582 bp, Cannabis indica
ttatcggttggaagatcgagtttgcctgcataaaggacaacttgttcttcagattctgtgtcctttttcgtagcattttttacttctatggctctacaaggtgagccaggacatgaaatattggtgttgctggtggcatggagtaaacttttaagcttcaattgctgtgatattaaagcttgagccacagttttcgatggaaatttcttattctgagaaagatgtatgcagatttcggctgagagcttctcatatttcaatgcacagcatattttcgtcttttcttcttcagacaatcctgaatgaacctatgataaacagatccaacataaagtttagaaaaggaacatagaactagattaactagttcaagtttaattcaaaggttatggaaaaatggagaaatgtaaacgagttttgagatcaatgcaatacctctagatacatgtccaaagcacgataaacctcattataggagtctcgagcagattctggcagggccatgatcaaagccaagaattttgaaggttttaaataaggatccggggccacttcagcaatatacaaatccatcaagccagcaaccttactcaacctcatagcagatgcttgacacaaccctccacgcagaaatgccttgaataatctcagaacaagattcacatcatacaagtaatttgctccatgaggggatgaaacaagcaaattatctaatgttgcttgatccaactgtgaaccaatcatatcctccaacttgtttctgctacttttggctatcttcaaattcagggaaacccggtgaatctcaaacaaacttttgcaggatacacagctttgatcaagaatgtaaagcatgtcaaccacggtatccacaattttgcacttctcactggatgagacagtgtaaagctttgatttgtggtagtaaaaaaggaatctactaagtagggcatggtcaaattttcgagaaaccatagtcttggccagcatttcaaccaaaacaggactcataaatatgagatcttcaaaccaccaagaggttcttgaaaagactgtctttaaactctcggtgcttttagagtcacatgaaaaccgaaccccggagctgtctggagaagaagtagatggacaaggactcgcttcgcttgtcaaagacagtctccaacaagagaatccaagcatctctcaagtactcctgaagactctgaggctggaagtaagctttgacattgcttcacaaccataagaagctcagaccaagaccagtatctcatatcttcaagatttctctgtttgttccatcaaattacctgttccagacacagaactcttcatctccatgaactcagccgcacaacgcagaggggtaatatttgtaggggttatctgagtcataccggtgctgtagcagaacttcaacatcagctcaaaacactctgccccacccggaaagtcatggagtactatttttagactacttgttgtacctttggacttgccaaataatttattcaaccttcctgaatatgaagctattatattctacaaatggtcaagagaaaacagattagaattcttcaag

SEQ ID NO: 273287 - DNA, 810 bp, Cannabis indica
gtttttccataccttgtaaggagctttgttcagctatttgtaagattgaattccacatgttgtagtgccctaatgttaaggcacgctacagtactttttcaattacaatgccatctttgctaataaaagaattttcttgaaaaacgtgtcaaattaaaacttttatattaattaataaactttataatatacaaaaccatttacaagttttgggatcccattttcaaactttttaacataatacttcaaaatacataatattcatgtcgcacagcgactacaaaatacaactccacatgtcccgagaccgaacactccaggtcgcgctgcttagacatgtacaacctcatcctagctcagggtcactcttgttcagctttcgcctttcctttacctccacatggaagcagaactgtgagtcgagagactcagtaagaaaaacatataatatatcatataatttctgacttgtatttagggacccatacacctatttacaaggctcaacagaatagatgagtaagaacattccatactagggtatagccattataccacacacactacgtacctcactatacgagtgttggtagtgtttgtttcataccctgagtaccactgagtgatataccacacacactcagtactttcccgtacttgcgttggtatcactgtaatgtactctcaaataacattcactataccaatcctataccttaactgtacaagtgttggtagtgcaactaacactttaagcatgcatatacacataaacgtatacatatatactcagatattgatatcacacat

SEQ ID NO: 273288 - DNA, 1294 bp, Cannabis indica
ttttttttttttttaaacataattttcaccaaaaaaatataagagaataaaatgaaaagaaaaaaaagaactttatctggatctacttcaactcttcaccttttttcttttctatcttgtatgaaaaaaaaaattggagtgtgcacagttagtgttttggtcagatctatagtcatttaaaacattattaaaaataagcaagaaataatttgatgcagcccaaatattaactattaccatacatctagtcctttatcacctttagatttattatctacgatttgtaaaagcttccagggacaaaactaatgtccctatatccaataaatatatatatataataaataattatcctactaaattttcaccttttacacttatattataaaataaattaacattgtataaattattttaaacttaatatataataatttttaattaattagttttttttttatagatatacatattattattgggttaatttttaaaatactaaatcgttgaataaattgaattagaataaaaaaaatgtaacaaatgataaattttataaaaaaaaattatcatgtttatgattcactacaagaaataaaagcatcactgacgccacaattactaatgacaaaatgtcctcactaaaaacaaggatattactaatgacatatacataatcgttagtgataatgataaatttatcactgatgacaatgtcgtcaataaatattggcaaattgaaattttcccgttgcgtttaggtaggcttctttcctctaaattaatcaccaacaattttgtcgttagtgattgtcgttggtgaaaaacatgtagaaaaaaatacctcgagcccctccttctccccatttctattttcatttcatcttctcccttctcctccttcttcatttcatttcatttcatcttttcctctttccatttcatcttctcccttcttcatttttctctccaaatttgaaagtctctccattttttcccctttcatattatcaccgacgaagtattaccaacgacatgtcgccatttgataattattactgacgaaaatacaccctttcactgatgaaatttctcctcattgaagagctagggtgatttttgtagtgatttaaaaaccgttgtcatcaccgaatctcacttgcagtcgcatcattgtctctcacttgtcatcgtcattatcttttccaataggtttattttgtacataaagaacatcaaacaataagttaactactcacttttataaatgagtgaattgttggaaattatttta

SEQ ID NO: 273289 - DNA, 4155 bp, Cannabis indica
tattgtctgaatcaagcagcatcctcttaccttgatggtccccagaataaccattttttcatgtccaagctgatcctcagaaccaggcactgatcttgtaagtgggcagtgaatgtaaaagaacaacatccatgcctttctttcggttgtcttctgcccaactggattttattggcttctggtttttggcattcaaacttttgtcatcaatctgatctttattgaaatgaagatccccatctattgaccgtttctttcgagggacattcctattattagaataaggaagttccttttcaccttccacttgcgagcttgacttcctagatcctaattttgagttcccactacttctacttgatcctttctgatagacaggagacgaatctcgggacagaagtttcctaccctgcgagtttgaaaccagcggctttgaaagtgaattatctttatcacctaggcagttctgtttttgataattttgcctaagaatggaagaattttgtgaagaagatttcttattcagattcttttgagtattctgttgacttcgaaaggttggacttgacgacttatgctcattctgttgtcttggggtcacttcacttctagagctatttaagttgagaccttctcttttctgaacgttgacctttgcttgtatagcaagtgaaatagactttcctttattctttagaccagaagaaccttcttctttattagagatcttgaaaggagtatcaacagatccattccagctcttgttcattgattgtcccttaagatacttggcagcatttgactcagctggcctttgagatacttcagcaagcctggatgttctatgagcagcttccactttctgttttaagttttgtactttcatggttgccgacgaagaaccgagcaaagggactttttgtgtggcctccgccttttctttgagagcatgaaccttcaagggtatggaagaagaccctacaagaggcattttggctttggtagtaacttgaggtccaggctcaataatttttgctgcagcttccattatgtgagccacattattactcgaaacaaatccaggacttttgataggagacaaaagtttatggtgcgtaactggaatggacttagcagatttacggggtaaaacttcagtttggaacttctcaattggcctgcttggtgtcttcttgggcttgaactcaactaaattcgaggaattttcaccatcatcctttctaagcatgttcccagagaacatcatttgattgtcctggtaatattcaaaatttcttctgtggtaatgagcatcttgaagagattgagtatcaaaatatggggtagagtagggctcttgaaaattagaagtgggcaaagagtccaaccccattagcctggctactacactaggagctctacttccgtcttcatccgtaactgatgaagcacaactgtactcaccactgcatttgaagcttgtccctactccagtttcatcgtcatctacctgcaaaaccaataagcacatacaatcatagattcaatcaccgaatagacagatgcaatagaaagaaatgatagctagctagctgctctcctaccaatgatagacgagttgttggcaaattcccatcactcctctttccctgcttaaattgctctgataaaatgaaatgaaaagttattataacctaaaccaccaagaagaaccaagattaaccaagattaagaccctataaaatgaaaggaaacaaatagagttgttcaagtgccatattacatgtgcttgtacctggtaaatcatacttgtttgagaataactttttccgtgattttgctgtccagtcaaagagatgaaagaaaccaccaacataaccggcgccattttttgaaccttctttctcaaaccccatctttattgaagcagaaacaaggctactttaacatttatctattgcagtggaggcaattagaaacacattctgtaacaattgtctgcaagagatatagcatatgacttgttgaaccgttttttgaaatttgttcaaataagaaaaacacttaaatgcatcgataataaactatattgaagtagagtatcctatgacattgagcacacaaatcataaacccatcaataagagtttgtactctgccatatcttgtcttggtttatattatctcaagcacaaaactttgtaattgcaaatcatttcctctaatttgttagcataaactgaaccacttttcgaaatttgtccaattaagaaaacactcgtgcatttataatagatttatattgaagtaaagtgtcctatgacattgagcatacaactcataaacccatcaataagactttctactctgccatatatctatcttgatttctctcaaaatcataaaaggaaacacagcggactaactcatcctatttgatccaaagttccaaattaagtgtacactaaagtacaaagttacaaactactataagccctcaaaatattgttagacaattgagagagaaagagagaagcttggatcttctatgcacccaaaaagatcaaaattcattacaacattagtaaataattcaagtcaaccacataagtagaagacatcccagaaaaagagtgtcttaacaaacaatgcaataatcaacacagagctaccattgtaccaaattatctgggaaaattttaaacagaaaccttggcataaaaaattaacccagaaatcaaaaacaaaaaatcacacacaaaaccaatcaaacaaccaaaaagcttgtaggcccagaaaggaaaaaagagaaaaagcaagaaacttacgtgaaatcaggaagcaatgccagctaactcgtctctatcacccataaatatgccgaaactttgtgagagtaagcttcaaagacaaagataacccaacaattaaaattcacagacgatctgaacccacttatcaaaatggaaaattcttgatacccttttcttcattcaaacaattagagagaggagaggagagagattctcactgtgtagtgagaaagaagcatacaagttgaagcaataaatgaaagacaaatagatgaaatttcatatatttttatttttttggaattataaaaataatttgcaacaaaaggttaaaaaaaacaaactataacgtctctttggagagaggggggcttgatttcaaattccaaacgggactcctcgattatgataaagttacccagagtttatagtctttcaaatcactatccaatgaaattattacacgtgctcatcacttgctttttggtttgtctgtatgtcgccgtcgttggtcagcactagcagcctaaattgtaggaagcaacatgccacgtgtacatctaatttatttggttactggtcattttccaagttcaaaactttttctgtcgtttcaataggaaaacgacatgtcgtttacaaggaagaaaatgggaagaaagaaagtgatggagagaagcaaagattgtttggtaaaagaaaaaagaaaatttctccctaaaatatattttttagtataaattgtggcgaaattcttaatatttttattttacttgcacttaatctcaaaatttattttttggtgataaaatttattttaaaaatattaaatattaaattttaaaaaataaaagataattattttggtttaaaaatgatcgattttttttttgtttatatagaaatgataattaatttttattgaaaaaccccattatattaatacatatttaatatatttaccaatacataggaaagaattaattttttttttcttttgaaagaaaccatgtattaatatcatattttatatttttacaatacatacaaaagaaatacatttttctggaaaaaaaaaaaataacaccacatactatttttttttaaatttatttctacttttttattgtattttttatatgttgtatactgtgtacagtataaaattatgcatattaccatttgatattattttgtcatcattattttatttattttttatttatttttttatattattcttttaagagtaatttgcggccaaagtccctatactttgaggtccgttacagattaacccccttacttaaaaaattaggactaaattccccaaactccacaat

SEQ ID NO: 273290 - DNA, 632 bp, Cannabis indica
tggtaaaactgtaaaacaagtgatccagggcagatctaatttaacagttcatttctatattatgacttcaaattatttttatactatcttacttatattccaatataattttgtagagcgcattcgacgctagaggtcgttacgccaaagaaaattatccatttagaccctgtatgtggccgccaaattcccgaagaaattactcaaatgatcggaaggtaataatttaacgacatcttatgtaacaaatttaaattactcaaatgctaatataattttcaaaacagtgcattcagatatataagggacgcacatgagtatcttggcccgtggcaaggaatttcacaagcaaattgtccaagacaacctaaaagccaagtggatagaatgattgatggcggtgattcacggtgacgattaaggttgaaaggtccaagaatttttcttccttatgtaatttttttagattaacttgtagttagatttattaacttattaatattttggactaattttacattaatgtttgtgtaatatttaattacttttatgaaatgaaattatgtattttagccaattttaaaattaatataaataatattaatttaccttttaaaaaataaatatgtaat

SEQ ID NO: 273291 - DNA, 528 bp, Cannabis indica
tgatgaaattgaagaaaaaagagcttctgcaaacctaaagctagtgactattcagaaaaaagtagctagacacttcaacaagtaagatagggcaagaaagttctttgtgggagatatggtccttcaaagagtgtccttaaacataaaagaaagttcaactggtgtgcttggacctaactggggagggccatatcaagtaacagatgtcacaagttctggagcatataaatgtggtcggtatgacaaaaacattgaacgagttctagtaccaaggtatttgattggggaatatttgaggaaatactgccaatcagtgtacaaggtctgatgagcctcacaaagtacatgatgctagaacacccacttttaactaggtggccttcttagtgggctcactcaaaggtttagaaaaacaagtggtactcaagttagatgaccactcctaaattacagtattttcaaaaatcatttgtcatgagcaatgtctcttggatggattatatcattcaattgttttatgttttatgt

SEQ ID NO: 273292 - DNA, 1336 bp, Cannabis indica
tgcattgcattaatgttggctccatgttatcccaaaagatgaagtcttcttgtttcatggtgtttagtatgggttaaatttcttctaataatggtctccactgaaaaatgtggctttgatacgtgttttcaaaatcttatataactattgaattcatttaagaaaagtcatagtcataaggaagcaatgaggtcaacagagagttttgttgtgtgtgtcctgatgttagtgcactggatattgttgcatgccacgtgattaattttgacttacttattttactttgtctgacaaaagtctactgagttagcttccgactgaaaaaggaaatggaattttcctagacatgatgcgaagcctaatttggaagagaaccattagcagcagaggtggcttttaggtgtcattatgtttaatagttatactatactgtcttgttagcttcataatgtaaaattttgttatgttttgaaaactattgcaatattttgtcttgcaagttggatggtagattattttatttctttttacggtccaattttttcgtgaaatcattgcaactacagtttctttctattattacttctacaggttcagcttttgactgacaatattcaacttatattggattctgtgcggatgtcgagtgctgtggaagtacaggtatttggacaaattacatgtttggttctcatagagtttgagatttgatggttcttttccagtcttggattgcatcataatgacatttttttaatagtcacgtgaaatgtttttctgtgctaatcttgtttttccttaccttgtatttaccagggtgacaaagtaaggaggcgcactgattggagcagatggttattaccccaaactcagcttcctaccgttcaaagtccccgtactcctggaagttcctccagtcaaagagttgcacttgaagagctgagtattaacaacagtaacagtgcttcaaacacctaccaacctcagctttccaatggcgatggaagtgctcaagctggagcggaacgctcgttttctggaagaaattaaagtaagaaatgtgcatcaatgcacatattctttgataaagaaatgaaggggaggataggggaggagttggatgagcatgggggttctaatgagtgtcctacaatggcatgatgaaacatgctgtcttgcggggaaaatacaatgacagaatagaatgggtaaggacaaccactaattaaggaacagaagaaaaaaaaaaaagaaaaaaaaaattagtactcttttatgactaatttagtggcatgagttttatgggatattgaatgttttttgatggggtgttttc

SEQ ID NO: 273293 - DNA, 2803 bp, Cannabis indica
taagtgttcgtttcattagacgatcaacaaaccgagctgctcactttgttgctaggcgctctcggtttttatctgattgtagcatttataggaatgatattcctactaagcttcatgctcttttgtatgatgaatgctaaatttcaatgaagttgatatttcattttcaataataaaaaaaaagtttgttttagtgtcttaaacaaaaaagaaatgtttgtttagtgtataaaaatgtaaatgatctttttgggttgttattgttaaacgggccttaaatgggccttcgtctgacctatgtccagcccaaccatcacttctcctccttctccgcatactgttcgtcctccgctaccgccattgatttcaggggatggtagattcctgattctcgaatctccactcacaaagctctaatttttcaagcgacacagcggtctatctcaaaaacccagaaaacaccatttccatttcttcattctgttgaaaatgggtgacaacaaaagaaaacgtggtcgaaaacccaaatctccagcaaacgataccactactaccttggattttcagtacaacaatcaaaccacatctaccacctcttctgctgccgtaaatgacgttgtttcagttcctacttccgaaacctccgatctcggcggtacccaagcatcgcgccgttcccgtggccgaccaagaaagggagaagaacaggtcgagaaggagaaacaaaggtcgagacacgtggagcaaaacggcgagggagcacactccatggccgtggtggcggtgccgtcgctaacggtaccgaagtgggaaaatgttgttagggttgttccgtcgatggacgcggtggtgaaggtgttctgcgtacacacggagccgaatttctcgttgccatggcagaggaagagacagtacagctcgagtagtagtgggttcatcattgggggaagaagggttttgaccaatgctcattctgtggagcatcatactcaggttaagctcaagaaacgtgggtctgataccaagtacttggccactgtgctagctattgggaccgaatgtgatattggtatgtaaatttttgttctttttggttatacggtctatggttttgagtttttctagcatgaactacttaattagtagcattttcccttacatacttagctatttgtggttggagcgtgatcataatacaagtttaagaaactgttctattacaactatcagaaatagtaggagtatgatcagaatacatgtttaatacactgtttgattgcaaagatcagaaatggtaggagtgtgatcagaatacatgtttaatacactgtttgattacaaagaccagaaatggttggagtatgatcagaatacatgtttaatacactggttgattgcaaagatcagaaatggtaggagtgtgatcagaatacacgttaaagagattgtttgtttacaaaaatcagaaacagatatccttttttagcttggcattattgttattcagctaactgagtttctggactctaggatgtagtttattatagtacaacaatatcaagaaactgagtaaatggtttgctttgatttgacttttgagaacaggcctctttttttttccttttgagaaagaaggtaatggaatgatgaatgaagccatgattcatgttttttacgttctatttcattttgttttgctttctttcgttcttttattttattggcttatttgaagtttcactgtattgttaatttgttatgtattcttattgaatcatttcttaatttatcagatttgacattaagagaaaagaccttttactgaacttcttcaggtgcttgtgacatgtttccaaatcttatgcaagttaacaatcctgttattctttattttcttccttattttttaagtagtttaaacattgtttttggttaatggtttgttaagttttcgtcattccatgtcataattattgagattatactgagtttagtaggaaagaaaagtaattttgaccaaaacgtgttattacgatggaagttatgagttagttctggttgccttgtctgtgaaaggcattaaatatggtgtaagtgaacatgcaaattaaatagcaattattcatgcagtcagttattcaatgcgaacttaaaaattaaaatcacttaaaatgtaactaagaagttcctttccaatttgctgatgcttcagcaatgctgtctgtgagtgatgatgagttttgggaaggtgtttcaccattggagtttggagatctccccgcgcttcaagatgctgtgacagttgtgggttatcctattgggggtgatacaatctctgtgacaagtggagttgtatcacgtatggagatattatcttatgctcatggatcgactgagcttttggggttgcaggtgaagcactcaatatttcatctgtccttacaatatgctgggttatcttttttcttcatttcctcatttcacttcatttctacagatagatgctgctatcaactctggaaactcgggggggcctgcattcaatgacaagggaaactgtgtcggtattgcatttcagtcactaaaacatgaagatgtagagaatataggctatgtcataccaacaaccgtcattacacactttattaaagattacgagaggaatggtgcatatacaggtagttttggtctcttgagtttacaccaccgtctcctataaggaaaatgtacatgactatatttactcttcttatcagggtttccgattcttggagttgagtggcagaagatggaaaatcctgat

SEQ ID NO: 273294 - DNA, 594 bp, Cannabis indica
tacacaatcgatgaccgcatctttttgctccttctcggcgttgtcacaatagtagccctggtcttcaccggtgtgtggctcaatgtgctgatctcggtcttgattggtgccgcgctcgttggattacattccgtcatcagaggcatagagtatttgtattcagacgagcaagaagctgcggagggtgggttgctttcggtcgtcgggagtcccccgcgtacacgggtttagtcttcgttttctacccccaattcctggtgttgcaacacttttaaagaatttttgagtaattagggttatggtgatagttcaattttaggtttcagaaaaaatcttgaaaggaagaaacttgagaattgttttgcttgttttctttcccctaatatctctgtgtacatgtactactagtgggaaatgataatttttattttatttcttattcttttgtgttgttttgaaagtgaatcaattactaattagtacaatatatcaagagtatttggtcaaggcatgtaggctattttctatgttgttctcttactaattagtgtttaaaaaattatggtgttgctttttcttggttttttttttttt

SEQ ID NO: 273295 - DNA, 882 bp, Cannabis indica
acacccaaaaatggacggaaagagctaactgctaacagaagctggctttaggaggttttaccaccaaaattttagattagggggttagttgtaaaaaacctgcctactttaaggggttttaccgcaaataaccctatgatatattgcattatttgaacaaataatgtaatcaaagtctccaaagtttagtagcaattttggacaaactaaaaattaaaatactctttgtatattaaactaatctcgagtttataagtcagcttcttttctttatttgtttttaattatttaataatttaaagatggtgagattaaactccataatagagttttgataaataaataactgctatattttgtgtaattcaaactaaaaaattggagaaattagaatcttgaaacctcatattatgtaccaattacggcctatatatgcacctcaaaatcatgttattaagcattttatattatgttccaacctaaatattagatcgaatatagcgacgtccaacatttgacaatttatttgtttactttttaatatcacatcacattcaatatcacgatttgtaaatactacaataaaaaagctggctaagcaaattgaaatggttatttataaatcacaataatgatactgttataaatattaataataattatgtgtaaatcttttatttattatcattaattgtaatcattcatttttcctttttctagttttttttttttttttataaagaacctcagttcagattatattgaaagaacctcagttttcctttttcttagttattttactcttatatttgtataaatagagcttcacctggaataaacaagtgaaaaattctcactcactttttctttctctcttcatct

SEQ ID NO: 273296 - DNA, 674 bp, Cannabis indica
catctagcctctccaatatatttccatttcacattcattgttctagtatgagcatttcattctataatttgcccaaacaaacatgaaactccagtaaagcatataacgcaatatttgttgagaatgatttcgaagccaatccatactaaaactgaaatgatcgcagcacagaaaccaaccattccatatcgcttcctctctaatcgggaagcaagctaaaaagaaaagtaaaagatacctcttgcttccatgaagggagggttcgtagctgaccagaggcctcagctacggcttttttcttacgagtggtgatatcttcttcacgctcaatcggcgttccgtagaaaacgtagtcttcttcatccgaattcattttgtagaacaaaactaattgatttaaacaattaatgaatgaaattgactgaaagagaaaagttgaaatcgaagatgaatatgatgaaattagggcttcagagcagcaaatgagtgaagcatttcttgcaaacgagtcctcgacctgtagggtagagtcggagtctagagacaagaaaagaaggggcgtttttctttctttttttttttttttcaaagtaaagaaggggtgtgtttggaaataactcattttcatttagggtatgtttggaagtaactgttacactatattttaaaatgca

SEQ ID NO: 273297 - DNA, 496 bp, Cannabis indica
aactttaaacaagaatcatcatcctccctaaatgggaaatttatttcataatttaaatccataacatttcatataacaatattcagcataaagaaattaaaaggaatagagaaagaaactattggtggaataactctggatcttcactttgatttcctctgctcttcttgccgctttctgctgtgtttaggtctctaaaatcacttcccctaattttccaattcgcagtttttctattttatattttgatttttttaaggttcgtttggtacaaaaatacactcagtcgtacggactctcgctgcggccataagatgtcttgctgcggctagattagcttctgacaaccacggttctgcgttgactttatggccgtggagcaggggtatctggccgcggcgactgggacagccaaaatcatcggttctgtcttcaagttatcgccacgacgacaatgatctagccggagccataagtgcgtcaagctgaaaatggc

SEQ ID NO: 273298 - DNA, 1340 bp, Cannabis indica
tccctatcatatccccatgactccaggcgaattaatcctggttcgctttcaaaaagcttattaactgctatttgagctgttcgtccagttcatcccaatgtacacacatttggtgggatttcctaggtcgagtataacctcctccaattcttcaatttattttagcaggtttctttcatcttgaaatcgaggatcagatcttcctctttcttctcttgtcttcccctgccaagatcgtcatcaactgatgatcgacccttctatgctgcaactctatgcgatagcaattgcaagtgagcatctggtcaccacgcaccactcccacgccatctggtgtatggaactttcaagataggtgcttgatcgaactaactgcccctagtccgatcagtgctggacgatccaacaatatgttgtaagccgagggcaggtcgacaaccaagaactcttgcataacagtagcagttaaaggtgccttgcctacagttaaggcgagctcgattatgctaaggctagcgatgctatccccggtgaatccgtaaagattcaccatacaaggccttaacttggcctttttgagccccattttcattatagtctccatataaatgatatttaccgagctgccattatctattaacactctgttgatcctcttattggccagttgaatggttatgaccagcagatcgacgtgaagatatctcacgttcttctcgtcttcctctttgaatgtaatatggggttccttagttttcaccttcttgcaaggttttgttgggttttataccctaaataaaactccatttcaatgtaatctttattattcaattatcaataaagagacagaagtattttcatcatttattgtgtcatttggttcatgttatcatttatttgttaatttgatttataaattcatccaaactcttatcacatttatgttcttatttattgtgtcgtcagcacagtggaaagtaataaggattatgtgattaaatatatattcctagatttatcagtacacagggtttaactgatatgataatctacaacatagtttacttacaccttggataagtgctatgtcctttccagggcattggttaaagtaaagcttgggttggatgcatggagtatgcaccggaagggacaaatattgaactttgtatagatatgataaatttaccgtaatatctattcaattcaatattacctagttgatcctagatcaaatgatcttaatccggacatggttaggttccatctcaagagtattatacatgctctttaatttgttagttaagcctacttttgggtcatggtgatatgtacatttt

SEQ ID NO: 273299 - DNA, 956 bp, Cannabis indica
tcttctaaaataaaaatatactacttatatattaattctactataatgaaatatacaatactaatttctttatatatttcttctaatatttaaataaaatcatagtagttaatttatataaagattatgttttggtatattggtaaagacttatcaatctatctttttggtcacaagttcaaatctcaatagaccattttttgtatttctttttttttttaagctaactatatctatccttagcactcagcaatatctatcctatgcattacatcaatattattctaaaattattctaagtaattaaggattatctaaatatatatataaaaaaaatattcttataaaagtaagttaaagaaagcataccttataccaaaaattatgtacttgacttccgataaagtcactttcgataaaatcctaacaaccaagtttaagagaaactaaaattaaatattatcctaattctaccgaaatttcgacagcataacggctataattgaacgtttccaaaaaaaatcaaacctattaataacaacaaaacacaactcaaaacaatataaaataatcacaacaacatttagcaagataaaagcttaccacccatccgactatagtacatgtattcacagaacctacttcatcactatggatgaatatttaagatattcaaactcatctaacatgcatattattctatccatcgatccggcgcagtacaatatattgcagaacctacttcactatacatgaatatttaagatattcaaactctactaaacattcataattaatttataataaaagttagtaaatgtatacctcgagctacctagaaaccgatcaacaccaaataagtcggatccttgcaaattgacctcacaacctacaacataaagaaatactacaaaattaccaatttctttatttagctacttactagttatataatt

SEQ ID NO: 273300 - DNA, 1089 bp, Cannabis indica
ccccaagaaacaagtgccaatttctattctcatcttccccatcaagagagaaaattagaaaacctaagtcttgttttcttggaaaatcattacccaaaatcaccacaaagattatctctacaagatggattaaaatcatcactatctatgaattaaggtacgcttccgccatttgaattcttctctttgaatcaacaaaggtattctttagatctatagttatacacttataattatatgtaaagtgtttatctatagaattgaattttgttgttgcatattttatgagtgatatataatataacataaattcattcctaaatccaaaatatgcattagtgtatagagtaaagtcacgtttttgatattcaaattatagcccctaaaaaaaagaccaaatgatgatcgaattgatagattggctaagaaactcatgtcagtaaatataaatggatcaatgttatctcagataaatacaataaactgtagcttctttccacatagttttattatcaaaatatcatcaaataacaaaaatataaataaggaatcatataacaaaaatataaataaagaatatatatatatatatatgttgattttataaatactaacacatgatgatgaagacatgaggttacatccattaccacctatcaacatcaagatgagtttgatggtcatcattcatgaataaaagtgttggttgaaagaaaataatgtggttaagtagtagaagaaaagggatgagagattgtttttttttttaaacagatgagagattagtttaaaaaaaaaaaaaacaaataagagagaggatggagacttcgagagataagaatatgatttagggttataaataaagttgagtgtgcagtcagtatatgagtataagtacatttttttaatataaagaatttttatttatatggtttttacaatttaagtgattatgcaagagttttcttttttaatgttttttttttgttttagaagatcattaatttaaagaaaaataaaaaatgtgatatatatggttttaaaatttaagtgattatgcaagattatttttaagagtttttttttttt

SEQ ID NO: 273301 - DNA, 767 bp, Cannabis indica
tcaaggctccaggcacccatgccggtcgagccactagtattggcctcaccattggctcttgggatattgcctaagagacgtgcaggagggtaacaactaaactcaccctctcgcactgacctaacttggcatgcttgccccagttagattccacaggtcttcagtatatcacctgtgtagcctgagatagatcgcaccttcgattctattaactcagtttcaaaggtgacgctgggatcctggggagtctttgatgtacgtggcttgggagacattattcaaagtccaagtcacctggttcaaaagcaatcgtgactttgggtaaaaataaaggctttgccaaaggaataaaggacatactggtaggttctggccaggccgcatctcacaagaaacggcgtttgcctttgatgatttcttgtaagaagcgcctgtggcaactagcattatcttcctggtgggtcttcactaaatgttccctaaccctagcatcattcaactctaatttggaggtggttttaggattgggtttatacaggacgattgattctgtaggaaattcaggttctatatcttctggatgataaattcaagaaccagagcgggacattgctgcaagaagaaagcagtctcgatacctaaaaagaattttatcaaacctgaaggtggtaagttgaaggttctgaaaaaacctacgtattccctgaaccctaatgttgacccaaatacagttcaaccctaaaaactactaaaaccaaatgagatgg

SEQ ID NO: 273302 - DNA, 1305 bp, Cannabis indica
gagttcctcattcataacacactgcgaaagggagttaataaatgcctctctataggacaaaggcttagaaagacaatgaataaatgccaaaaaaaagggtaaaagaagcagaataagaagagtatgtaaaatttggttagctagtagacttaagaatgcattgatgatagtgatgaggagggtccacaatctaaagaggatttggaatagctacaggaggagggggaggagcattttcaagttctgaagtaccagtatctaatggaggatcgatttcaagttgcaaagttctagtatctaacagaggagtaattttgggttgcgaagtaccaatatttaattcttgagacctgtcaataggacgcaggcgagagtaatgaagaggaaaaagaactgtagaattagtggataattcagactcagactcagagaatgggtcaaatatgtgaataagatctgatttttatcaaattatgaggattaccatgaatagaaaagaaaggtaatgctcaagaaaaactacatgacgagatacatacaatgttttagaaactagatatcaaaacaacggttaccctttttcccttccccacaaccgagaaacatacaaagagcagagggtgacgacaactttgtacgctctacaataggaagaagcacaaaacatgtagaaccaaagaatcttaaagaagaatagtcaggaatacaattatatagtttctcaaaaggagacaaacccaaaatgacaaaaggcagaatcatattaattaggtgaactgcagttagaactacctccccccaaaactgactaagagcaaaagatgacaacagaagagaacgagtagtttcaataatgtgtctatgctttctttcagccacactattttgttcaggtttatcagtacaagaagtttgatacacagtgccatctaaggcaagtgaatcgataaatttattcgaagtatactcaccaccttggtcacatctaaaacatagtctagtctcccaggtaagctggtaacaaacaagtcaaagaactcatgcaatacatttaagctagagcttaaccatctcaggactgagatcaactgatctatgattaactaagtgatattaacttagaaaagatataatggtaagtttatgatatcttttccactgttaatatcgattcagtctgatgtatagctgatacatctgatcctgatttactttactaatgtcttggaaaagatattctacttacccaagtatacataaaccttatcgttgattatcacgtcagtgtaaatccagtgcactgat

SEQ ID NO: 273303 - DNA, 660 bp, Cannabis indica
cgtacggcctgtcgcgtacgggcccacttaattttttgtctgtattttagaaaataccttattttttacttaattttactaaataacggaacccaaaaattaactttttaccctatacgcccaccactatttcgacgggccggccctgtctctaaagtaaataattattttacaaaggaatgatgtgaattctctattttactaaaattatattttattttttttttgctgtaaatttttaaaattattaatttgtcaaacttgaatatgtaatttttttttacaaaatatacatagtactaactactcaatactcttgaaaatcgcattgaattgtaaagaaaaaaaaaaaacctcaatttgtttagaaattatgtgacaggtcaagatgaggttttggctacattgaatagaaccgaaaaaaaaaaataatgatcagtttcagtcatcacttaacaaaaaatattgggatgtgggaagcaatacaaaatacaaaattactacaagaaagaattttgcctatctaactaaattaaaatgaaagtgtgctaacgatcagctaataagattgttcattgtgttgctggagagacttgttctatgtcagattgtatttttagtgaacttgatgctccttaaagcttttgaataaaatcactt

SEQ ID NO: 273304 - DNA, 963 bp, Cannabis indica
taaaaaaaaaaaaaattaaaggattaacttctattacaatctcttagttaacctctatacctgaaaacacataccgaaatattttttttttctaattttttttcttagcggtgttctttatgcttacaacatcatccctgtaatatttgaaaattttcgaatagtttatagtgttgaaaatatgtttgaaattttttgaacgcacgtggtaaactggaatattaagaactttattttcgacattgtaaactatttagattttttcaaaaattataggaacgatactgtaactataacgaatatggatgtgaaagaaaaattgaaaaaaaaaacatattctaacatgtgatttcagacgtgaaggctgactaagagattgtaataggaatttataattaacactcctcaaaaaattaagattaaattaatttaaaaatcagtcacttaagaattttgtattaattttaatatttattttaattttatttcataaatttttttaataaaattttatataattttttattttaatttttttttgttatagtatttaaaatataattatttttatttgatatgcatattttttttaagaaaattaattgggagaaaaaaaatttaaaaaaaaaataatataattaaatatataaattttatgtaaaataaaaattattaaaataaagtaaacttacaaaattttaggatgcaaataaaattttacatattgtcccactatctaaaaataaaatttacataagtcactaaactttgtaagtagtctttttttagcctcaaatacttattaataaaattataatttttgtctagttgtgacaatgccaattctattagtgttatgaatattcatgatacaagcactgtaatttttaactctatttttaaatcaaattatatatgcgaattttgtaatttctcaaatagtatttttttcagcattgttac

SEQ ID NO: 273305 - DNA, 512 bp, Cannabis indica
caactactacctaacattcattaagaatagagtgagttcttaatcaataatattaaaagttaaaatagtcacacatatataattatatatataacatccaagcctaggaacaactctttagctggattttaattgagcttaactgctttaataaacatccaggctttgatgattcttcctttttctcaacccctttaaaatcattggacaactcagtttttttataggatttttagagttggtagaataatttggattgttttttaatatttttattgtgaaattgtgttggagttttgctcaaattttttatttttttctttatttatctatatttgttaagttacaattttttttaggtaattattaattgtagaaaaaggaaagtctttgtcctcaagttgtctttaacccaaattttgtaactttataaatatgtgttttgtgtgtgagagaggtatgtgtgtagagaaaaaaagtaagggcgcatttggaaagccacttgggaattg

SEQ ID NO: 273306 - DNA, 1318 bp, Cannabis indica
atttgtcctccaactcaatgattaacaattggataggatcctcttgcttttgattgagttgttggcgtaaatcaggttttttctggttcaattgctcacgaagatccgactgttgtggatcatagttacttacagaccttgtccttgagtaactttcagttctagttgtgtatgtactctctcgatcaatactacgatgagttctatcctctcctcaggtagatcgactatgggttcttgtacatcccgagcttgaacttgcctcgtcacgtactggccttctcctttgggaacgggtcgatacatgccccctgctgggatttgtatgtgccccttccctattattttaagaagggcgttggcggtgtctcggtggcaacccacctaccctaggttgagtcctaggatctctcttgtcaccacgagggatttcctgttccttagtttggggttgccttttgctcgcattcctgcgagaggattttggtaaatcatggtttccattccgctaggctataaatcccaagggtctacgtggtacttcttcacgaggtgcttggtcctctggttgttcatcttctggcgcatcctcagtttccccaggttgttcttcttaagctgtctcctgcttcatggttcataagtcgcgaggtttgcctcgtggcctcctcactccaggatcaacttggttttgtgcattgttttcctgagctgtcctggctacggctgcctcccgttccaactcaacgtttcgttggtttgcctcctctaaacgtcgtcggagttgacgattttccaactcaactaacggtacatatctggtggggtcataggcacccctactcccaggaaaaccgccagcgtttgtattgggtacttcattctcagtttttaggttttggtcaccttcacattggcttctgctcgaacgtgttgaccgtgtagatcgtattgttcgtgaattggggggcctccgtgagcctgctggctcttttccagagcgatgagtagtttcttcaggatgagtattgtcgttttccccattatcagtcatggagaaaaatttccttttgtttaggatggatttttctaatcttttttcacgtaggctcaatgaaagcaccaaactgttaacactgattttcgttaaggataataagcctattttcgtgataggattagcagataaattatcataaatttaagaaagaataataaagtagaaataacaccaggtttttttacgtagttttgtacttaactctgcatagtccacgagtcaatcttattaagacttttctgatacacaactagggct

SEQ ID NO: 273307 - DNA, 1486 bp, Cannabis indica
atcaataataaaaaaattgaatatcaaattacaagtctttatatattaaggtgttctgaaaaaataaaaaattctaattaaggaatgtgttataactgctctcttctttttctttttcaaatccctcactctacgtacgtggtagcttcttaaaaattaccctatatctgtctgtgtatgtatatacatacatatgaattttcattaaattgactaagtcgtacctaaccccttgatgaaaaggtaaaaggtttcattttctgagttgggcatttaagtatagtcacattaatgagctgaaataagttgtaaaaacagctggggagttgggagaaagttaattatattactagccaataaattccaagaaacacacgtatacataaggtggtggtggtgcctagtctagcaatattctttaatgaaaattgataatgctatttgaggaacaaatagttactgaaagtgatttgttatattattattatatatacatatatattgatattgaataattaagtatttggtgggttggcaggattcgaggtgagctcagtggcatgttgtgcaactggaatgttcgaaatgggttatgcttgcaatcgaaatgatatgttcacttgcactgatgccaacaaatacgtcttctgggattcattccatcccaccgaaaaaactagtcatattatcgctgactttctattaaagaatgttctcactcagtttctttaatcacactacacaacactacttatatcctacctatatatcatacctaattaattaatgcttaagtactatttttaatctatttaagctatatataatcatggtcaaaatatattatattctttcagcttaaaccttaaactataataaattctctctacatataattataattaagattaggtatcttgttaatatatttataactagtacttattacttatattattatcttgttaatttctctagtaatgtttgcttcgtttaggttatcttggaattaatagctacgtatagtcctttcaaactttgggtatgtatgtgtagagtaaagctataatgtaaaatatttcttatataataatattgtgatcctttcagaaaaataaaataaagaaacaattgaatattattgtgatgaaaattttatgttgtcttgtaaattacatcttcaacttttaacaaccgaaagacatgggataatttaaagtatttacatacaggtggagtcagccacgatttggtatttggatattttttgcatcaataatctgataatgactggttattcaattctgaaaattaaaattattcatttgcaattttctttagagatattgtcttaattgaatttttttccaatgtattttaaatatttcatacagtaccaaataaattattggatattcttttaatgattttagtataggtgggattattaaaaaaaaataataaaaataggcattgatatatatgt

SEQ ID NO: 273308 - DNA, 1435 bp, Cannabis indica
tacaagagaattaagatcatacattatgaataaaataagtcagtgttgacgaagaaatctggccaacactcgctcgctaaattaaaaagaggaaatagaagttaagtaaaggaaataagagatacacaaaatatttatactagtttactctctgtatcgcgatgataataaaactatgtctactttgagtttttattgctcgcaagaatacaagaaaattaactaaggcaagagctcatatttctatagagagaaactagagagattctctgaccttatggacacttttagaatgtgaaaaatgagctagtggagctctccttttataggaaatgaggtccattaaaatgaccataaaatatgaagaaaaaaaattgggttgagcttggccattgacgatgatcgaatggtgaaaatgactttggatgatgattgccaatttttagagctcaaatatcatctattagattattttcggatataatctgcgaaaataaatcgcacttgtcttgggggataaattttggacttgaaatcttcaaaattgcaatataggtgtgagacatgacttgaaagagcttgaaaagagcttaaaactaacgcaagttgaattgcattagtcggattaatattgagggagttatagttattttactaaaggttattcagcacctagcgcccaagttgacgtactaacgtcaacttggacattgtatgagtggagaaacgtgctcaacttgtatttttcaatgcctaagttatatgttgaaatcacttagtcaattttttagttttggtgaagtcgttctccagttctcgtagacctcgcttttccgcaaaatcgagtagactcaaaacttcctaatttgtgaccaatctgccaatagtctactttgccaaaaattgaagtatgaatttgacttgtcacaagtcgtagctgttgtttactactgaaaatagttagatgctcgagacggaaccaggatcgaatgagtagaacctagcgcattaggctatatgttaacctaggcgttgggtactccttggggagcttcttggggctcattttgatacttatgacattcaagattgcgaacaagatgcaaagacaaaggtctgatactttgtcagatttttgacgagggcccaaagttttatcagtctcgaagaggcttacactcgtgcttttcgagtggcttcggtaccttcaatcaatgtgagtagttctgcactgcaattatctgttctatctattctacctctcgaaaccagtatacaactccaaccgtctatggaccctctacctcagggtatgcgcctccaaaaacaagtttcttcagttttggaactacacataccaaatacagtgtcgctcccgagaagatatatacgaaccaaaaattagaagttctagagttaggcctgagtcagtccc

SEQ ID NO: 273309 - DNA, 863 bp, Cannabis indica
atttttcatgttagtttctcaaattactaaatttcattagtagatttttaacactataaaataaatgtaaatattacctgaagagacttgttgagccttgtgtttggtgttcttagcagtatcagaaacagtttgataagctttatgaacaccaccatctttacccaattcatcaccatttgtgtccttaaacccaagcccttcagtgatcttctccttagcccattccgtccaactctccgagctctctttcgcctctttcgccttctccgccgccttgttctctgtttcatgtagtttttctttcattttctcgtaattatgagacacttcttcttgcttagtagaagccccataactggggacaacaatcaccatagccataataatagccaaacataacaaatgcctaaaaggcaataaactcttagaagccataactcgttttttttttaataagagaatgtttgaagattgggatgtatatggaggttattataaatgttggcgaagagggttgtggaagaattatgcatgggattgtgaaatgacacgtagagtggtataggctacgtggagagttttgagttactgggtgtttgacacgtgtcgtgtcgtgacattataggtgtcaaccgtacatataccgaaatgatttctttacatttaagtatcaaaaaatatttgttcttctttattggatcggtgagtgtaagcatttgatagggtcagattagatctgtacaaacctgtgctgtgtttccatataacaaagaggataacaagtaattgcaaacacagtttcataaataaataaagaaataaaaaaggaaatacagcttccttggataagaagtttagag

SEQ ID NO: 273310 - DNA, 5709 bp, Cannabis indica
ctaaagttgaaatgatgcttaaagaattgcaaagaaaatcaattctccttcttctcatttctctcctttaaatgatgtaattcgttgtgtcaaaagagaagccaatagcatgtcacataacattgctagaagagtagctagctaggaatgttaccaacttaccattgccagctgatttattattgtgactcagacttattgcattactgaaggaagaatagttacttgaaaaaaattaaataaatcgttgataacaaagaaataacaagtcaaaagagagcacaaacattatgtaatatactctgattgccgaatcgcgagaattttgtgggtgaaagtaatgtttcggcacaaatatataagtaatgttttatatctatttatatatataaagtaatatagtaagccattttttgagggtaccaaatgatttatttattaaatgaaattatttatactatatattttttctctgaaacggaattatttatatatttgaacaattttaattatttatgtttggttgaatgtattcattaaataatattttctcaacctttatttattcagtaataaatattaaattcttaattaaaataaaaaaaataataaattcattgccactgtaaaaacataaaaacttttaaaagagatatattgatgcagcctctacttgtttcggcattcaaaaaaaattttagtctaatttttttttcatatccatgtacgttatagctatttaagatatcctacaaaattttgagaaattcagaataatttacaatacataaaataatgttcaaacagtctattttacacgcgtataaaataaaatagtcacgtgtgcaacacactgtttgaacccaattttcagcgtgttaaactttttcgaatttcttaaacttttaccgaatgtcttaaataaccataatttacataaccatgaaaaaaaaaaaattgactaaaaaattacttcggatactaaaatagatagaaatgtatcaatataccttttttaagagagtgcattatagaatttcccaaaacttcatttatatctatctattggcttacttaaactgtaccctggctaggctagttgctctcatttcatgtgccacactctgcagtgaccttttctttagtaatttatttaatctactaatgtaaatatatccctctatacattctacaaatacccgaaaccacatacacatgcagtgttcttcaacaccattttcacattcactctcccctttttacacagatcaccgtcacttattcatcttcgattttgagcccaataatactatgattcttgcccctctctcgaactctaagtagattcgagggctgacatctggaaaaggaaaaaaaaagcaaagatcttgattcaaaaggtgtctgtatgtgtttactattggctgaatttcattggtttttgactctgacccaagtgagttaagccacagttgatgtggttaaatgcccttttggctagtttttgggttgaatgaatgaaatgggtcggtgtggattgttgatttggtggtgaattgagagaagaatctgtgaaagatgcggcggcggcaggccgattaccggcgctcagttaggaggaggtttcctcattggatctgggttcttcttggattgttctctattgcaggcctgtatttgttcgtagttcaccataaccagaatgaagatcgggtagaacagccgatactggtaagagaatagagaggacccttttaatgctttgatgtgtttctattgagtcaatctgttatgtaattgatcataagtgcttttagagtaatgcccacttgatcatgatgcattgaattggcgtgtgttttcgaactatgtcgtttgaattgatctcaattttttgtgctgaaattttgattgaaatatgaaaatgaaaagatgggaggggcatctggttttttgtttttgaacttttgggatttgttgctctgcggtagacaggaggctttttaaatgactaaattcaatagtttggtttcaattctgattgttgactgaactgactgatgactcacaatggtattgatcttattgggtgatttggctattgatctagctatgatctttcagcatacgaaagcaataatttccttttgtatagcttcaagtacggatcaaatgatatctcaaatggcactttgtttttcactcgtttgctattgcagtattctgcaaatgtacgatctttacacgtattgctgttatggcaaaatggcaaatcactaatatttgaatttatactaaatatttatgccaaaatacattctgagtggaatttctggtcaagattttgtagaatctctttgtagttattaccaattttgtgaccgaagaaatgaacattttaaacttcagggaactagatagttcatgacaatatcaaatgcgcttagtcaagtgattgccaaaacatatttcatgcaatatagctatgttccaacttgtttcattcattattatggcacagaaccgctattgcaacttttccgttttgctagatctctgcagtcacatatattgctgaaagtgtttaagtgtttctttttcatatatacataggaaatttctacaacagaagcatctcatgttttgacaatttaaaattatagctcaaattattttgtattgacagtgtacattgtagctatagtaggcattgcaccttaaaaaaaatataaataatttatgatgccaaaacaaggttctaacattcagttgctcgtgtttctttttctttttttttttatatgcgtgcaattgctcattttgatcagtattgtaaattgtacgaaaattttaaaatttggtggaatgattactataattataacgtaaaacatcatataaaaaattagctccctatattcatataatttattattccttttctatgcatgcaatatttgtaatgaggcttctcattgggaattttatttcatatatgtaaactcactcacttcactatagattaattcacgctacatgatattcttaacaatctctagtgagagtcatataatagtcagaactacagctaacatatggttatattattgttgtttcctctttgtggttggattttttatttggaattaatatagttttgaagaacttacattcagttacacaacaaatatatcataattataatcgaagttttttattcttttttgaattgatagaacttcaaagaacaaaaagatgtgctataattacgaaatttaccattatggttgtgaaaagtttttctgattttctgtgagcatgaaatgccttaccacgaaattgagcttgtaataatttgataatagttagtgatagtcataccaacatgagaattttgatggcagctttggcaattttgagaaaagataagctggagcaatttttgagggcataaataagcaattgttaattatcagtaagttgcaagagatcggttgttatttccttaaggagctaagaattttttgtaagacttaagcagctaagaatgattacaccatttaagtgatatagtctgtagatatggcaagtattacatgaaatgttttcaagttagtattaataggagaaatagatagacattagctataatactcgagtgttgttgtctttaattcatggtttcatacgtgatattacacatagcaaactgttcttggttgatacagttgttgatttctgtgagatgatgcttaaagtggaaatattcagcactgcaaacatgtggttcagtgattctaacattagaggccatatattcttttgtctgaaacactatatctttgaactactctctaaactaataaagtgaagattaggttaggtttaggagataaaatggtattattctttagtaaaacaatatttttgatgcggttacagtatttattttatcactttgtgggtatattagtcataagacattatattatatgaattatcaattgcatactgcaaagttcatcagtggtttttcaatggcaggagaaaaatacaagaatccaacaagttgcccgggaagatttaaattttacacaagaaatattgagtgctacctcattttctcggcaattggcagagcaaatcacactagctaaagcatatgtcattattgccaaggagcacaacaaccttcatcttgcttggcaacttagcacaaagattagaagctctcaacttttgctatcaaaagcagctatgcggggagagcctttaacatttgaggaagcagaaccaataatcaagagcctgtcatctctaatatttaaagcacaagacactcattacgacattgcaacaacaataatgacaatgaagtctcatattcaagcccttgaagagcgtgcaaatgcagcaactgttcaaagtactgtgtttggccaactagcagctgaagcattgccgaaaagcctcaattgcctaattgttaagcttaccactgattggcttttgaagtcatatatgccagaacttgcaaatgaaaatagaaactctccacggcttgtggataacaatctctaccatttctgcatattttcagataatgtgctggccacatcagttgttgtcaactccactatctccaatgctgagcatccaaaacagttggtcttccacattgttacaaatagaatcaactatggtgcaatgcaggcttggttcctgagcaatgactttaaaggatctacaatagaagtgcaaagtattgaggaacttgcatggctgaatgcatcctatgctccagttgtcaaacagcttgttgatactaattcacggacctattattttggggcctttcaagattcaaaagctgagccaaaactgcacaatcccaagtatctgtctttgctaaatcacctgaggttttatatcccacagatctatccacagctagagaaggtagtttttcttgatgatgatgttgttgtccaaaaggatctgaccccacttttttcgttggatctacatggaaatgtgaatggggcagtagaaacttgtcttgaagcattccatcggtattacaagtatcttaacttctcaaactcagtcataagctccaaaattgacccacaagcgtgtggatgggcatttggcatgaatgtgtttgatctaatcgcatggaggaaagcaaatgtaactgcaaggtatcattactggcaggagcaaaatagtgatgggacactttggaagctgggaactcttcctcctggtcttctgactttttatggtcttacagagcccctggaccggagatggcatgtcttaggattgggttatgatatcaatatcgataatagactgattgagagcgcagctgtcattcatttcaatgggaacatgaaaccatggctgaagttggccattggcaggtacaagcctttgtgggagcggtatgtaaaccaaagcaacccttgtatcgaagaatgcatcacaagttaaaagtatgctactttcccgctggtgatactttctgtgatctacacaacttttttgaaacttccaatctgggatcacattactgtagagtcagaagtagaaaattttgactttgttaggaagttatgcttcttctccattatagtattttacaagagcaacaagatttgttttatacaatagaaacatgaaacgtactaggcaaaacagtgt

SEQ ID NO: 273311 - DNA, 952 bp, Cannabis indica
gaagatgtggattaaatgtgtgacaagctatacagtaaaggcaattgaatagcctaattagtgagctgtctgggctcgaaccaaatggtaaggaaaagaatcctttattgtcataatactagaaacatgtaaattctgctatgcaagatgtgattagacaacaaggggaagcagacccgagatctgagaggatgacaagttcatcttgtatctattcttgtactaccgacacatcctaatgtaccactggatatggtgaaatatatgaacctaatctacgagcagatcagtaagtggaaacttattgaaccactaattatgggatagaataaaaggttctaaggtgaccattatagtggtcaaagttaaaataagaaatggcaatcttattctgagtgttcaagatgaaaaaaggcaccatttgggctaatgtagagtcatatcttattattgtggtgtagtgggtcatctaaaaagaacctacccaaagttaagaaagattgatgttaaaaaagaaaagtgtacgagtcctgcccaagtgacaattatgaatcaaggggacccgggtatcggtccttcggctaactcaagttagacttttatgggtaatattatagttgttgtttccattgatatcaatatcaaacattgtacactcaatgagaggatatcaaaatatctaaataagcagtgcgtgtatgttatttagtggtaacttatctgacagggtagacagattagaaaaatggcaatatgagttaaatttgctgatattcctaagtagaacataggatataagtaggtaatgggggtatccatctaattgatttagagaacaaaatcttttgatataaagtgatctagtgttagtataagtgggacaatttatgagtattgtcgaaaaccctaggtgaattaaaggcaactgtaacaccctaactaatttaggcgt

SEQ ID NO: 273312 - DNA, 637 bp, Cannabis indica
gcttttcaagatgagagcatttccagaaatatctccattacgccattcgaatactctccgctcgattaaggccctccattgctcccgactcggctgctattgctgagtccatcaagcgccgactcgctaatcaaggtaagtcttcccaggccctcactttttccgagctttacaacaaattcgaatccaaaaccggtcctggaagtgttaataacaagtgggcagttcttcattattttcttaatattatatctgaggataggaagaacactacgacccagttggattcttcgtcgattttactgcccaatctggcgtttaacgatgccgaattaggtaacgatttaagggtttctcgtaaaagaggcagtaaggaaaagggttggaataatggggttttgttggtcccaaaggacccggatcgagaatctaagagagattgcgtttaaggagtttgtaaatttgttgaaagaagagaatgaaatttccgaagaggtttcagcttgcgttcgcccctttgatgaagatcaaacaaaatccttctgctattaaagagaacgaagataagttgggtaaggttctacaagtttacgataagagactgggggagagttgtttcttgggtggggatgaattt

SEQ ID NO: 273313 - DNA, 616 bp, Cannabis indica
agaaaaaaatctcaatcaactatatggcaactactagatcaaaaaatgttatcccactaaagcttctaattgatacaaaagagaaaagggttttgtttgctgaagctggaaaggatttcactgattttctcttctctcttctgtctatgcctgttggtaccatcataaggctcttgtctactaagggcatggttggtaccttgggaaaactctatcaaagcttagagaacctaagtgagacttacatccaaactaatgtggataaggatatccttcttaagccaaagtcttctgccctaggacaatcttcaactcatctcttgttgactaatgaagataccacttctcatgtgaaagtgttttactcttgtggtaaaacttttggtagtaattattactcatctagtacatgtccttgtcataacaagtatgtatctgatgatccgacaaccatttgccctagttgtggaagtttggtcaataaggttctcacttttgtgccacccccaaaatatgccaaagtgggaggatcatcatcttctggggctgaggtggaaggtgggtttgtgaaaggagtggttacttatatgattatggacgatcttgaagtgaagcc

SEQ ID NO: 273314 - DNA, 1002 bp, Cannabis indica
ctctacaaagagtatacaattttgaacgatcatatcggaacatagaggccaattgaaagtacaaacgacgtattaacctaaaactataagggtcctggataaaggaagcgatttcagtcatccctattcaatcaaatgttcaaacaaaagggtgaaagtttcatagaacctagtcaagactacaagcgatatgtgttaaatgtcttatttctacaaaacattcagaatcactccaagccctgaaatcctattcatcaacaattcaaggtaaacatgtaaggattgaaagtgaatgccaaaccctaacaataatcaaaattctagaaaggtaaaagaaacatacttgaagaagaattagaaaaagacaaagaacttgaggaaggccgagaatttagggaaaaaattctagcgtgatgtgatagtcacaaggaaactttcatcgaaggaatttggtcaagaagtagaatcctagactgaattagacgaatcttactagggaggttttcaacctccacttgaatatctagtgttctctatggtggtgaagaatcgataattagagctggggttggtgctcctggattttctcaccaacaaatttgaaggagaagatgaatacaatgattaatgtagtactctaaggttctctcgtctatcgttgtcttctctctggaagtttgaactcagtttgaaattggggtaaaagtggtgaacgaacatgtttacaccatatttatacacataaatggcgatctatgtattcccaaatcaacgaccaggattatgctcaaagaaaaagcaaggaatatccaatggtttaggaaaacagtcagacatttaatgcaatgttttgaattgagaaaattcaaatgatgatatttttatcaacttctatttcaccaagcttcgccaaacgcacctcattggtgaaagttaccaccatgaaccgacgatacactgccatatgctgctctatttcaaaaaatggagagttgtcaacca

SEQ ID NO: 273315 - DNA, 1751 bp, Cannabis indica
aaaaaaaaaaaaaacttttacttccaatcttttcttaaccacaatctttttttttctcaattgtcttttttcacaattgatttggacttgttaattgtgtggtgaaactcacaagcaataaaagtgtaaaaaaaaattttggtatgagaattatatattatgttgttatgtggttacacaaaatttagtatataatctaccaaattgctaaaattattagtgtaattaagtattgaatcaagataataacttttaaccaatatcacctacaatgattaacactaacataattatatgttggtacaagtggtaattgtgtgttaaagtctaaaacctctaattccaactcaaaaggcaaaaatgataaagaagtaattacatgataaagtgcaaaaattattacataattgaaccaaacaaatctttaagaaatttgatttgaaatgcattaaacctacatacaatgtcatctataatacatctcaaactcaaattgattcaacaaaaacaatgcaaaatcatcaatagaacaaaatgtaataaacaaaaaaagatggcacaaaaatcttgaacaaacatcatttaatcaatataacttctttcttgttcaaaatttttctcagtagttagtactctagctagtttgttcttggggtagcccattcgactcgaaggataagattatcataaccatatccattgagtttattaatggctcgctgagcatcttcgattaacaaagttaacaaacccgaaacctctgctcattccagtcttttgatccacagcacgtaaacacggctcacagcaccgaaaggtcgaagagctcaagcaagtcaggctcacgagtatcttccgaaaggtttgtgacccgaacagagttctcatcgttccttcgtctcatatcagtgccgcctctctctgccaccgctcctcctctcataccaggaggaacataagttcccttccctgaactaggagcggctcctggagccgctccatcggatggaccagccttattatcaacaaacacttcagatggggctgcgagatccttgtaagggcatctcgaagtccaatggtcacctttctttccacatgttctacaaaccatgagaacagcaccgcctttcgcactcaatggatccccggaattcttagcttcttcccccttgctacctatataatattataatccaactttcaaaaacaaaaatttatgaattgaaatagaatcagttgaacaatcattgtggaatgataataaagtaccgagagccctaggtcgctcgaggatgatctcctcagtggataccacggtgagcttgctgccaacttcttccttcaccgcgtcaccaaacttgggccaggagcgacgctctacagcccgcttgctgagacgagcattggctagctttctagttcttgtgatagtggtgatcttaaccttattaccctcgtcattgaatttgtattcaacaaccttcttgattccgttctcatcgggtccaatgacctgacgaggtggcaagagaaagtcaaggtcttcgccatcatcttcttcgagctctccccacctaagcttggtcaccatctttgtctgcagatatggaagattagggttttgtttctcataacaaactcaaaacaacaatcaagcaaaattgcatatcttttattttgacaatttcatatgattttaaaacaagaacacacatatggaatgaacaatatcaataataaactcataa

SEQ ID NO: 273316 - DNA, 504 bp, Cannabis indica
acgactccgcgccggttggctaaaaatccagtcaacacttatatttctaaaataatataattatcaccctgaggttaattttcaacaactttttttaatataactaacttgaagacaatatctagcacaaacagatgtaaaaaaatgtaaccagttttatcataacacttctatatcaggttattatcaagttttattttgacaaaaaatcagttcaaagtactatttagtactgtttaccaaaatatttgaaaacaaataatttaaatgtaagagctaaagaattataattcagaaataaaaacactcacgctttttacatggttggggtgttaacaagccttattccacgagtcaatattattaagttaggctagaaaagtcttagggattacaagaaggtatgaacactctatattttgcctgggcaaatgagtaaagaatttctagccatttgcatgcagggttcgttacatatttatagtgcataaatgtcatactagt

SEQ ID NO: 273317 - DNA, 5127 bp, Cannabis indica
tattaattgaattttttattttgataaattaaacctttctagtttttaaaatagtataaaataatatcttaaatttaattataatatatattgtctactttagacataagtcctcattgttttaaaaaatctcataggaatagaaatatatctatacttatatactcatgatctttattatttctagagattttgattgcacatccaaaacacatatataattggattttatattaaacgtgtcataattatcttaataaaaaatcttgatatatatataaagaatagtatatatatatatcctaataatataaattatataattatagaagagattattttataattttttttataatgtggaaatggtaagatagaattgggagcaggtaagagtccgtatgagtattgatcggttggtcccataatgaaggggacagtcccacgggaacatggtgttcttagcctcgaccccatacctcccactccgacgtacttcttttccaatctatgcacacccttcttctctcttatatgtatatattttttgctatagttatattattccttcctgtttgccagcccattcctcccaatatttgtaaaacatatatttattatttttgtttggctgacaagactccacttgtttcagctgctagccatttcatgacattacatgactacgtacctctccacagcattattatttgattattaattaatgataatggggacaaaaagaaaaaagaacatatatattaggaataagaagaagcatgcaaatccagttattagtttacacttcccaaagaaaaaagaacattactttacaggtgcacacacatacacacatattattgatagtgtgtcaagtctctcttttattaaaaggtatattctacagttaaaaagattaagtactacatatacattgacccaataaaggactacaaattgttatcaaatggcatcatcaatcgcgtcagatgacaataaattaaattatatataaatagagagagaatcataatttttaaggttgaggaaattgcatgcatatgaaaactaattatatgcctagaattactaaaggaatgagtactacataactacgtagctacatattaaccacaagtggtctatgaactatatgataattttattaaaaactataaaatcactactggtacgtactataacaataagtcatatcattctatgtagtagtactagtactactaattaaaaaagtgccttaagatctgaatttacatgatctaatggataaaaagagtgacacagaggcttttttttaattaatgtatacatcggtaacgttctagaactgagctccgcataatcagatcacccatgtgttatatatataaatagacctctttaccattcaataaactaattaaacaggtttagttattacttaataaaataagtcttcaagaagaaaaaaaatgagcaaaagagagagagaatgttttcttgctagtggggtatgcttgtgaattattattaatttttttaatataaaagagaataaagtttgaggcacaaggaattataggctagatacaaagaagtaaactaaagtgggaaggagaggagtatttccagagagataaaagccgtttttgggaacttgaaccagttgaaaaaaaaaagaaaaaaaccactctgatcaaccaactagcttggccaccaaatgaaattcataaaagcttggtacatatatacttttttctacttctaaagctcatttcagcccatttattctctctctttctctttctctcttttagcccatactctactactacacttcctcctttgcatgcctaacgatctttcctctgccttttctcttcccattatcttctagtctttttccacttataaacagtactcctacaaaatgagggtaagcactattttttactctgcaaagtttcatttttattaaacccaattaatagtgtggactgtggtggtcttgttttgttttaatgcagctgtttggctggatgcaaaataagcttaatggaaaacaaacaaccaagaatacaaatacagttccagcaactagtaagtactctagcttttcccactttctatcttagctgaacatatatttttcacttgtttatttggatctgaattttatgtttatacctatataaatcatgtgtatgtatagattatatattaattaagttagtcaatacatttgcatatatatactctgtttttgttacgatgcatatatagatgttaaagcatgcatattgaaggtggtggaaatatggtcaagagtattggccaatcacaataccacctttagaaaagggtctttctatataaaaaataaaatacataatttatttttatcaaacgtgtctataaaatgttgttttgatttagagcaaaataaataaataaaaataatacggttttgaccaagtttagatctgataattcataagtcaccaacaacttgattttggatatcaaaagggtcaagtatttggatctgataattagaaaagcctggaaaattaaattaaaaatagaaaaatgaagataataatattatattataattacatataaacctccattattagcagatccccagggagagagagtactactcaatagatttttaacaattaagtactgacatgagaaggtacatacttgaatattaattaatcataacaacgaacttgatgaaaaactgcatatctataagaaactagaaactgaccacaatctagcttgattaatctattatatttatttttaataagcactagttgaataactttgtaaataaaatattttataccttgaatgcaatattgtctaatttttcacgagtaacatatatatataattaatatttgaaatttttgtctaatttattgtgttaatttgtctagattatgcaaagcaagagcctcgagaagagtttagtgattggccacaaggattgctatcaattggaacgtttggtaacgatgatatcaaagaaatttcagctgagagccaacaaaataataacgataatgataatattgttaaggaaaatcaatgttcagctgaggaaatatttgatattactcctgaagaggttggaaaattacaaaaagagttaacaaagttgttatctcggaagccaaacatggaaaaggaaattgctgatcttcctttggatagattcttaaactgcccatcaagcttggaagttgataggagaattagcaatgccctttgtacaagtgttgtgtcatcatcatcagataatgattataataaagatgaagatattgacaaaaccattagtgtcattcttggtaaatgcagagaggcaatttctgctgggaaaaataagaaggataatattggaaagaagtctatttcttttcttctaaagaagatgtttgtttgtgggagtggctttggaccaactcctagtttgagagattcactgcaagagtccacaatggagaaggtatatacatacatacatacatcatcaccattttctcactttaattaatcaactcactatttatgcggcccattattatgcattgggtcccaacgagccaggccttttgcattggcccattcatcatgaacaaaaccaatatccacttttagtttttatctcatataatatgataaatatattaattaatggtaaatatttgtatatacagcttttgaggacaatgcttcacaagaagatggcccctcaaaatcctaacagggcatcctcagcaaagaaatacttgggagacaaaccgattactccaaagaagagaactaataatgataatgatcaagatcaagatcaacataatgagaagagacgggagagaactgatgatggaggcaaatgggttaagacagattctgaatgtaagtatatatactagttaattattatttgaattaaatatcagtactcaatactaatggcctcttttgattttcattacagatattgttctagagatttgagtctgctcccctcacttgatcgatagcagctagcattcttatttcaaggtataacaaattacttatttacattttcaataagcctccactatacaatatatatgcatatggaaccatttccaataaaaaaaataatacatatatcaataataataataatctaattattcttttcttattttatgcaggttattcttaagtctgtattacatatgccttgtatttagtcagaggacttggaattaattgatctgaaatatcacagccgtacgttttgaaatgattaaatatcacaaaaataaatgaatatataaaaaataccatggccaataattaaaatcatcaatgttggtctgttcctattaattgaagaagaagacgatgatgagatcagtacaaaatcggctgaaacagcatataattatatctagctctgtgtttttggtgacagaattgagtcccgttttttcatggtataaatgtaactgaggatttcaatcccagttgcaattaatcatgttatatatattatataaattatgaaaaactaatattgttaaaagggtttctgtacgtatagtataccattctggtcgagctatacgtttttccagctacaattttcgatctctgtttatgtaatttactgtgtatttttttttagctgaaatgcttctatctgtaagatattttgaggttatcaataacagtattagattgacctttttatatattccttttgtcttgatatttcactttcaagaatatgttcatgaatctgatcaatcaatcacaataacaaataaagcactatatatccaatccaactttaattaagtctctctctctgtctctatatatattcaaaagttgatattcatgaccgtacatatatgtagttatactaaatgtgtatataaaatctatgataaagcacatataaattgaacttatttaagtggaggtatttatattgtaaaatactgatatgatcactttgttgtccaagttgaattcaccttataccgaccagatttggtacatcgttaaaatcacctactttttttttttttgtatcacttt

SEQ ID NO: 273318 - DNA, 567 bp, Cannabis indica
taaatcagataacaagaaaaaataatcagaaaagaatttaacaatataataagtgccaccaatctgaccgcaatacatttatatcacagaacctatttcactacggatgaatatctaatatattcaaactcctctaatagctctataattagtaaaaatttattggtcaataatgtacctttagctagcaatcaatgatcaccgatattttgatttatttactaataacaatccacaacctacaatattaaatgcaatacaaaaaaagtttaaattaaaattaagtgagaatagtaacaagtaaatgctttgcaaagcaaacttactcatccttgagcttttgagttttctctggatatgtctcatgcatgtttcttttgaattgctgacttatcgttccaacgagaagtggagtattattttgcggcattcatgagtcaaatgaaaatctccaattgctcagttacaattagaaagaagaaaagtatatcaatgtactattaaaattgacatatataagggacctaatgttaattcagatgacagtgatttttttttttaaaaaaa

SEQ ID NO: 273319 - DNA, 815 bp, Cannabis indica
gaaggaaaatgctcggagggaatctaagaaggtgcagccaatctaatgaccacaagaaaaggggacaagatcagcctggacagtcaagtcaagacaagaggtacaaaactgataacgaccaccgatctattggaaacagtggacgcaaatgcatgttacaaatgcggaaaagaaggtcatattaaacgtaattgtccattgtggggacaaactgagaacaaggaagattcaaaggaagacgataaatatgttccaacgagggtcttcgctataaaagaagcaggacagattgatgacaagtcttgaggtataagacattgagtcttcgctttacaaaaaaaaaaatcgagtagaatttcgggacgaaatttctttttaggaggggataattgtaatatccgctttcttgggtgattaatttttttcttcctttaatcttagtttattttgtttgtcaatggggataatttactattttgaatatttatgagtttagtggagtatgaattttttgttttagtgacaataaaatttattattttttttattttattttaagggtatgcataatactagataaataattaaattattggagataatttaatattttattatttatgaaaattattgtaggcatattaataataaaaatatgggtaaatatattataccatattgtttaatttattattggtaataataatattattattattactattattattattattactattattattattattactattactatcattattattatttattattattatcattatttttactattattattat

SEQ ID NO: 273320 - DNA, 507 bp, Cannabis indica
tttttttttaggttagttaatatttaatataggttaaaaaatgaaagaaaaaagtgattatttaggttgagtttagattaattattggattaattaatattagtattttttttcatatggtattgttgatatttggattatcatttttaacaaaaaaaaaaaataataataaataaaaaaatttacgtgatgtatctttgtagtttttttgttttttttttttttgaggttagttaatgttaatatttaattaatatggttaaatagttaaaaaattaataatagtactaaaaaattagaaaagaaatatgagattaattagctaattaaaaaattaagagaattaaggagaaaaaagaaaagatgattttgaaacatttttagaccgccccatcactcatacttctcctttatatagatatatagatatatagatagatagatatatagataggaaatattattttaatagtaggatttagactttattatgatactaatattagt

SEQ ID NO: 273321 - DNA, 554 bp, Cannabis indica
atttattaaaaaaataataaattctctaaactaataaagagaaaaaaataggtagcaatcaaaaaaaaatattttaattattattattaaaaataatatatatatgtgtattgtaaaaaaaatgtatttaaaagtattagaaagatattgtgtcaaaaaataaaattcaaatacaactcatgtagctcgtttataaatggtagagtgaaatacgatgatgacaataataaatttgaatatattgacaacatatggtgataataacagttttgaattaacgaagccccgactacaagacaatgatacaaaaattttgagatcatatatatagtcaatatttttctatagatttattaattatctttttttagacctcaattttgtgtaaaggttcttcaaattttcttttacactataatgtttgaagatatatctttatttcttttatttattaaggaggaggtttcaatagttacatcaaatatgtaacaatcatggttacatttattgttaaccattaatagagtattgttgaatgattgtaattaatttag

SEQ ID NO: 273322 - DNA, 983 bp, Cannabis indica
attaaattagaaaaaataataataataactaacaagaagaaattttctctctttttttttaggcccttggactgagtgagagagtaatgtcttgaaacaccttaagcctcttttcaatgacttattattattattatgatgattgtcacttgttgttgttgggtcacctaaaacagctgcaagaattgcatcttcaaagtccttgttatcaggcaatgaggataacatatcattattcatcttctgagctgatgaaactgagttgttagacagttttctagtcttgttattctctgataaaacaacagctgcaacagaaactggttttgtgttctcacatgttgttgttgttatgattcccattgaattggtagctgcatttcctgatcttgttctcttaagggtctcaggaaattgatgagaagttgaagaacaaagtggctctcttgtgaatttagttgagtaatatggttgtgcagcaatgttcagtgagttcaaaatacttggatgaagttgttgttgttgctgttgttttgttgttgtttttggcattgctaatatgttagaattggcattttcgtctgcgaaatcgtcttgtgagagtgttttgattgaatctgttgttgttgttgttggaaaagtgatgtgatctttgcaaggttgaggttgccaaattgatgatgagccaaggaaagcatcgaaaaggcgactttgttcgactctatcacctcctttgttcaacatttctgattcaagatctttgagcatttgttgtgctctttcataggctttgagatgggaatctgtgcctcttggaccatctgccatggcgggtttaacacggcggagattctcttttgcctccgttattcggccttgtttcattaagcaaataccaaggttgcacattttgtgttgtctggtgaaattgctaatgctcttctgtaagcatcttctgcttcaatgtagtggtttgttgcatc

SEQ ID NO: 273323 - DNA, 489 bp, Cannabis indica
ttgatgtgaaacgagagtatttgcgtgacctatgtgacaattagattattgcttaatgctgatttcatgtgattctaattaagagattaattagagaacatgtgatttagatcctagaagatctgaaaggagctaggttaaactgcataatctgtcattcacatcaggaaaaaggatagtaattaggcatttacaattgggtaaacatatcaacaagattctcttccatatcttctcattttgattgatttctatcgatctacttaagcttcttgaatttttattccgtttttaatcctaaaaactattggtttgccaaatagaatcataaatttagtctagtggtattcaatccaatttcctgtggttcgatctcacctgtgtgagtttactacttgattacgtgcacttgcgtactgctcataattttcgtaataaccaacaatctaacttttcatgaacgcagaaaacatatcgagctagattgcc

SEQ ID NO: 273324 - DNA, 6426 bp, Cannabis indica
aaaaaaaaataagaatttttcaattatatagtgtagttttcttttttactgaaaaattgagtttttatactgtgtttgccgattttagaagctataagaagcccagcagaaagggacaagatatatatggttgtcaacgctgaatttcataaaactcatcaattatatatgtatgaatcattattaatattatgatgatgatggtgattatatggagaggttgtaacttgcaatacaggacataataaccgtccatctcccttttcaagctacacgcaatgaaatatatgtgtgcactacttaacattaattccttatatatatacatatagttaaacacacacacgtacgagcacaaaaaagtagaagaggggtatcatataaatctcaatttttgtaatgaaagccaattatttaaaacagtgaatatggaaataagaaaaacatatatatcatgaaaatatccttagttcataagctatatagcaaggtagtgaaataataagtgtcccatatatgtatacacattggtttcaattaaaactcttgataattagatacttttctcccttgaaaattaatgtaaaggtcagtgcttgattgatcaatctaacaaaaaaaaacattattaaagggcgctcccgcagcattaaccaaattatggcagactgggtcttttcaaaaactaatcatgtatacttcactataatatatatataattatatatttgtgaatggaaacttggagtgagtgcaaagatgtgcaagtcaataaagtaaaagatttcattgcccaaaataaaaccagaatacaaatgtttacaagagtatattcatgtttttgttttcccccaaaactaataataataataataataaaatctctgcctcttttcttaacaacttattggatcgggacaacatggtagctaaagtagtactattcattcactataagcataaaaacatgaatataccctatataataatatataaatatatatataaatacataggtctctgtgctatactgcagtaccctaattcccaaagcacaaagggcttaattggtagttactgtatattatatatagtactaataatttagtgtatatatttacaattaaactaatgacatgcggcacaaatttattttaatcagcacttacaatttaataatacgttgagaatattggtccagggacacctttttcaacgttacatgatattatataaattataattctcttttttttctttaatttaaacatgcccaatcttatttacaagtaacagttccactaaaaattatagctatgtatttttatatatattaataaaaatagaggggttctctctacttgagtattgttctgcaaagggagcggagtgatgttttgactagacttgacgaggctctgaaattggtaagactacatttatatatatacatatatagtaaccatttatatatgtggtgatcggattagaaaagtggtcacatgcattcaaaaactcgtatatatatttttttatcttttatatgaatataaatgaatatgtaaccacaaaaaaactgacaaagtcctgcaaatacgccatgcactgcatcttttaatttctctatctcgattttgacgaaatgaataatcctttcacaatcacatgcatggactgacaatggcactcattataccacatgctcatgcaaactatacactatatcaaacccatatttcttttattctattcttttcttttgtctatattatcatctactttatcagccacacaaaaagaaaaattaaataatttaattccctagcttctacaaaaataaataaataaatgtatctcctctataaaaattagtttggatatagtagggatagaatttggtgtatgtagtagaagaagaatggtattattctatgatgatggtattgatgatgataccatgacgtacgatatgaattgggagccaaacacctactttctttttgttttctcatttaattatttattgtttggaattatatgtattgttatatttgtttggggttaattatattatgatatgggaaatatgatatgattttcaattacatagcggctccaactatttagtggtggtggggtccgaggcaagtgaagtgcaaactcccactttcttcaatgggaacatgcacacattgtaaagctattgtaattttggtcccactttagtacgctattgaatcaaaatccaatggactctaatgcatgaaaatcatctctttctttctctctcttaaagtcatgagagcatccatcccatgcatgattattacgtatacatcagaatattatcatgcttatatattatttgctttcgatcattttcttttttccattcccatttataaaaacagaaaaaaaatttcgatggttttggatggtcagtttaactttcttttttggccaattccgctagtggtcggtgtggtccttacaacgttttggattattactattaacctcatattcgtacacttgagagagactggccgtgcatcaacttcggtcccttttaaaattaatttgcatgccttctaatacttaaattaattacagagacaaaagatatatatatgtatatataatatataatagggtatatatatatatatgatagtagtggaaatagtgaaaataaaggttttccactactgtacacaccaaattaagaataaaaaatacaaagggtttaatttcttttgggtagaaaactatcgccatcataagcctttgctttcatgcttttattcaaagttaattttaagtccattctatgccatgtactgtaggccacgcctcttttacctcagcctccctgttactccttttttggttgctcatatatatataattgtatatttatacacgtatatagaagcgcatgacatgagagttctaaaattctctaaactttataactttatctttgacaaattaaaaagctaaaaacaccttaatttcccttttggagaaaagggtaattattaattgtagtactagatttctacataattataattagcatatagagagagagagagagaaagatttacatagcaaggaacaataatgttaggcagggcactcacataacactactatacaggagatttctactctgcggctgactactgctgattgaggccaatacaagaaatctcatttttaccattacaatttgttattgtgctggtaaaagtaacttttataaaaaaagtcaaaattttatcagcacatatttacagtagctaaaatttaaatttaccaatgcatttacgttctggcaaaaattattttcgctagcacttttcattttgtactcgcaaaaattttaatgccaacattgatttgataacccctcttgtcaacacatcagaagtaaattctattttacctgcgcaatactaaacttttaccagcacataaaagtgacatttcttatttaccaaaaaaaaataatatttcttgtggtgggtatttgtttctatgtacctacataaaaaataattaaaaatatatatatgtgtgtgatggtatttctaaaaaaaattatttgaaatttctgtactatttgcaacatgttattagtaaaatgcaaatttgtaagaaaaaaaatgtgtctatgttatcagtgttttcgaatgaggacacgtgtaattttaaaagtggtactagcttaattacttcacgcccaatggcacgctcaactaagataatgagtcagattcattagcaaagtcatcttttctaggtgatatggacagatgaatcgtcctgtcgagacaattctccagcacagtgtgaatctgaaaaacatcagttagagcatctggagaagtaatcagcaagcatctagacatccagctccatatcatattcattagttaccagatctcacgatatcaggacttaactcccaagatctcatctgatgatcatattttccaagaatagaaagatagtaattagcgatcaaacatttaatgtgtctttattatctacaaaagtatgacactgttttgacatctatcaatatgatgtggcatccacatcagcatacaacatatccctcatgtgttaggctccattagatgggcccaagttattttattatttatatttaccccatcattgggaaagtctcacgattaagaaccctagcactataaatataagaatactcattcatgaaaatggttggaatctcattcctcaaattgctcaagcgaattttagggtttaaacacttgattaaatcataagacttttccagtcttatcataataatatatacctgtggactaatgctcgttaacgctccaactatgtaaaagactctggtgttatttcgttattattcatctatttctttatctttcacatatattttattggtttctaaaaatctcagtaaatatattgctgctttcattaagagctgaagaaagtaatgagatacaatcaaagattgtatactgcaaccttggtactcacacgaaacaaaactagcggttgcgatggatacactcctatggatgatgtagatcctgctacttaggcaaagataagagttgatagagatccaacagaagcaaccagttctcttggtaaaaagactcaacgtaatgaaaaatatgttgataaaaatcccatcaatgaggattgagagaaagatcctgagggcgacaatcctaaagatggtggaaaagataaagaagatgaggaatattattacgagccaaatcttgtagtcgttggaatggccaaagaactcgctaaaaccaagctgaaattggcggcacaagaaaaattctcccaccaaatgcaagaaaccttggccagactgaaggtcgaatttgagccagagaatgtggtttccgatgaagatatttcttatgatcctactcctcaggacaataatactacaaagagaatggaccttaaagatctcagagcttttgatccaaacaagggtgaatgaaaaggtgtcatgcgagaacctccaagaaagactgctccaactgctccgcacaacaacacgaatgatgtcggccaacctgtgcataaaaagaaggtagccaatgctccagggtaaggcaatcgtattgatttaagaggctaagttgtgcaaaataataggcctagttatcaagtacaaaatcctactgtttgctaaagaaaaaaaatcatcctagtaattttttttgagcgaaccaatgatggggcaaataaaactcattcactttcttgtggatgtctttcaataaatgacctcccagaacgtttaaatacgaagaaataaaatgctaaaggtgagagtgcaaggccccacagaaacgacctcagaaaccacatcaatggccaagtttgtgaatgtgaatcctaagacgccaaaacgaaacacctcaaagatcaaattactgatttaaccaagtttgtagaatgtcttgcccaaaagcaaaatgggacaatatctaattcagaagaagaagatacaaaactatgtgtaagaagaatgatagaggcacccttgtcgaaacactttagaatgcctcagatggagatgtacgaaagcaagatggacccaagggcccacttatctaaatacatctgacagatgcaagtagcaaaagcaagtgattacgcaaatgactctattttttattgaatttgaaaaaatctgctaaagactggtggaagagattatctgctggatctgttcatagatgtaaggatctacaaataatgtttaagatgcaattcatacccacaaaggattatgacatggagatcgatgcatcaagcgacaactaggagagagtctctaaaagtacattcagagaatgatggatgcatctgccaaaactaaagttaatgactatatgaagttcgtggccttaacctgagggatatttactggatcatttttgtggggagaattacaatgaaagaggtttgacactttatttgatttcttataaagggtctaaggtttcattaatttggaagaagtttatgttcacgcatatggagtacttccagttgttgagttttgtgccctaaataaaacttatttcaatataatcagatttaattactaattagtataagatcgaaaatcacttttatgttgcatggttcacatgatttatttcatgattatatttaatgtataaattctatcaagtccagaacatatataaatatattatatttgttcatgattatagtgtcgttagcacagtggaatataatcatgattatatgttcaaaagtttaattcccattatttgtcagtttactggatttagactggcatgataatcgacgataaggtatacttacaccttagataagtttcatgtcctt

SEQ ID NO: 273325 - DNA, 564 bp, Cannabis indica
actcagcacggcatatcatttacacaacatatatcactagggtaataaccctaggctattaaaccgctcatgttagggtgataaccttaatcctggttactaattactcacatatataatttccaatatatgcgcccccacgcataactctacgtgctaactactgtcttacctaatgtcccgcaatagtagagattccaaatcctagggtgctcctgaccaggtattggtaatcctagtcacaatactggatttcacaaatagggttaacccttgattccacatttataaaatacatacatggcattcgaaatacaggtaatcacatagagctaagaacgagctttccaacggtatatagaactcccaaaacagagttcggatcataaagttatatattttcaaagttaacattcaaatctgcccagaaactcgagggcgggtcgcggcatgcaaaagccatgccgcggcacctgggaccaactcccaggttctgcataaataggcgggtcgcggcatgctaaaagccatatcgcggctactgggttccaaacttagaaacca

SEQ ID NO: 273326 - DNA, 2316 bp, Cannabis indica
ctatattctatgttatctgaaatgaatttacaagagccaggaggttttatatacaacctgagcaaagtcggttttaaaggagaaaaaacaaagcctaacagtctaactaatcagtaacagatacacagaacccgagaattaaggctaagtaaatatctaatacaaatatctaatatatatatgggtgcacacttcttaatgggtattacctatatctatttatatatgggtatttatatatttttaaaattaatatttatattttaaatttatttagtatccatcaataggtaacacttgagaagtgtcctattcatctacatgtatgtatgagacaaattttgtcaaaatatacaatttaaccagttaccagcatacacaaccaaagtttgttacagaaaagccatagcgttaaaattaatttatatagttgtgtcttatgaactaaaatggtaatggctttgttggttaatccgtaaacgtttgtagcaaagcttaacaaaagaaaaagaaaagaaagacaaccaattaggtagaatagcagttatatataaaagttgagtatcgaaacatagtggtgtacgttggtaacaaagcacattaataaatattaatgcagctaattaaaattgacaacttaaaaggcctgcctaattaacgtatatgaatgtgcctcttatctcaatatatatatataaggtaattagggaataaatgaaatttataagggtagtgatctaatatagtaagggcagtaaacagtagataatggcaagcagtgatcaagagagtggtattcctgtggttagtagtaatattaataagcatgaatccgtaattagaggatcacaaaagttagtgttaatgtctacggtaaaacagattgtgtgccttggattatggttctttactactattctcctcttgatagccttaattattcttgccactaactccaaccatgaactcacactcaactttcagactctatatgcttacaggtatatacgccatcgccaatcaatgtatctcatatattaaacatggtcatgaattttttttaatattaaaatttaaatttaaaactcattttttatccaatttccatattaaatttttttttacattagtttctttttaaacaataaaatagaataaatatttatgtttcttaaataattattattgtagtgcttttaactattgtatttatcaaaaaaatattatataaaattaaaagtattaacattaaattcaaattataatcagtaataaattttgaatattattatattttcctttataaatagttcttaattcaaatatgttttaataaaaaaataatgttatttattaaataacatctaaaaataaaaaactaatatatattattaaaatatatacataactaaaataaaaaataaaaatataacattatttttacaaaagaaactaagaaaaattaagaatataaaaatgaaaaactaatattaacctaatatatatatgtgaacatgttatatttttcttatgattgtgatgttgacatttttacgtgtgtttttaacatatacagatacatgctttctgtgattgtgtttggcttggtatattccctctggcgacttggattctcaatctacctttttatagccaatgtgaagggatactttttgatagacttctacggtgacaaggtgaattcatttgaatcttagtattagttttacttaattttattcatgatcactaacataattaaatagctaataactatttattaaagttagatttacttaatatatatgcacaatgtagtatgtacattggacaagagttaattatatgtaaaaaatgatgtcacagactgatgagtctgctacttatatttttgttgataacagttgtgctggtacgatctcctctctgcctgtgatatttcgatataaatctaagtagcctagaattaatgttgattttcagaaaatgatctacacaattaatctttgagtttgcgattttagtttatcaatcattaaatatattgaaataaaaagagaaagaatgtcattatttttctagtaagataataaatattttataaacttgagaagtaatactaaagttgtctgtacagattatatcgtactttttagccacgggtacagcggcaggattggctgtaaccaaagatttgaatgcatttttcaatcaacaattggaggattatgaaattgacgaattttgctcaaaggggtacgcatcggcgagtctcgtcctcattgcattcctatgcaccgccattttatcagtcat

SEQ ID NO: 273327 - DNA, 472 bp, Cannabis indica
gtagaaaaagttagggcaaaattttgattagagaagaatggagactatcgtaaaatgatagaggtaagattatagaatgattgaaaaaagaggtaaacataatagattttgaaaaaaaggtaaaaattaaaggcatcaatttaaaagatgtatgtagtataatttcctcaataaacttagcagtagcatatcgaaccgggctaggcctatccgtgttaactatcttgagcccaactctaaattgatttcgttttttttttttttgaaataagttgaggaatacttctttttttgtattgattaatcaaaaacatcatcatattatatttcattaaaatgtattcacttttgtaagtaggttgcctaatataccctcgccctccacttaagtatagcacataatttacattaacctaaggggtataatgaggaaattatctataaaagtgagtattgttgggttttgtgccct

SEQ ID NO: 273328 - DNA, 585 bp, Cannabis indica
aaaaaaaaataaatagaaaacaaagaaaaagaagagaaatttttattatttaagttacttggaagctaagtaacttcatcatcttcaactcctctccttctccctctcgtgcaagcttgaaccagccattaggggaattcttttctttataaaacctaccatttcagagctaaactcaaccaccaagccaacctagaaccttgaggtaagttcctccttttgttttggtgaattactaggtttctaaagctaggtttttgttagtttttgtaagttttcagggctgtaggcttagatgagatctgagtatgctatcttagttggattatgtttgtttgtgtatgttttaattgaattcatggctgttgggatggttttgtgagtgaggaagctaaatgaaatgagtttccttcacttgagcttatgattttgagttagagattaaactactgtaatttgatgcttgggatatgttatatttatgttattatactattttggaaggtttgagcaggtttggaagaggttggattggtttttggggtgaaaaaccagaaattccctactgccaggaaaaaacgatcg

SEQ ID NO: 273329 - DNA, 1060 bp, Cannabis indica
tcaccagtagtgaaacacacctcaattcgaatgttgttagctttgacaactttggatgacttggaattggagcaaatggatgtgaaaacaaaatttttgcatggggaattagatgaaaaaattcacatgaagcaaccataaggttatgaggtaaagggataagaagactatgttttcttgtttaagaaatcactttatggtctcaagcagtcccctaggcaatggtacaaaaaatttgatgagtacatcaccaaattagggttcaagaaaagtgtctatgactgctttgtttatgtcaagagctcaaatgttaaatttgtggtgtatctactattatatgtagatgatatgctaatagcaagtaaatgcagtgaaaaaatcaagaaggtgaagcaattgttgagctctgagtttgaaatgaaagatcctggtctagccaagaaaattcttggaatggaaatactgagagaaagaaaagataaaagtttagttctatctctaaagtgatgcacagatttggtttcccagatgcaaaactagtcagtgcacctttggcacaacactttaaattgtcaaagactcaatcacccaccacaatgaggaacataagcaaatggagtctattcccgacactaatctagtgggaagcctcatgtacataattatatgcactaggcctaatctctttcacagcctaagtggtagatttatgggaaatctagaacaagatcattggaatgcagtgaagtgggtcatgagataactcagaggaacatcaagcatgggactcaagtacaaattagagtcatccaaccaagaagtgcaaggctttgtcgactctgactatgctggagatatggatactcgaaggtcacaaactggttacattttcactctaaaccagcgtgctataagctggaaagccaacctacaatctatagtggcattgtccaccactgaagcaagaaatcgaggctgcattcctaacatatatgttaatgaattataatgttaatataatttttaaaacaaagcatacgagattataggggtatcaaat

SEQ ID NO: 273330 - DNA, 1525 bp, Cannabis indica
tcggatgccactaatttgagttcgaaaatcaacaacccgctctattggccgaacaaactcatcatagatacatttccccattgattgacctggcatggaagcaacactagtcagagacaggaaagtaacaaaaagctttgctaaattatttgacatttaagaataggctgtctcacacaataagacagtaacataacatgtacatatattccaactagtttagtctgatactgcaaaagggaaaaactaaacaatcctctaatatgttactaagataccaacacaggactttcaagttcaagtatcaaaatcaaagagtctagtatacaaatgagcaggaggtgccgaaaaacaaactgaccagagtagctctcccaagagcgcttttgtttccttgaccaacgccaaccatttcacaatccatggctatggcatctgttacactgtcaaaaaatttataagatcagattctcagaagcatggtattttctttttgtcctttcgaaagaagagagtccaagctaaaaataggattactagaaaagagagtgtttcaatagttgctccacacattttctagtattgtaaactacatatttcccaataccaaactaagatattcatatacaaatatatataatataaatattttacaacagctagacaaaccattacagtagaattacctaaaatcatcattaacaggagtaagaggattgactgaaatttgggaatccgacctctcctttcgcttccctgaaaaataaaaaacaatcaattcatcaaaacaaagaaaatcatcaattaaactgttaaccccattgaccccaatacccagaaaacaaattttcttaaagtgaaacaatagctaataaagcaagttacaaaaaagtagtcataataacaaattgagtaaagaaacattttttaggtacctaatatgcgagtctccgattcttctgtgtcatcagattgttttgaaggttttgagccatggctaggcagtgtctgtaaaaagaaaaaaaattaaaattaagaagaaggttatgaagtgacatattatatgatatataaggtttgtatagagtagaacttataagaaagcacctttagaagattagcccagttggggttgagcggtggcttattggactttcttctgggttgagtacccatcttcttccgattccgactccgagtgccgtagcgacttcccaagtctcagtgaccaccaaaaacaacgaaggagaacgaacgagactagttgagtaccgtaccgctctagtgaaacgaccccgtttctatgggttcttttgtgtttctaatatttttattttattttattattaggttaagttaaacaacaatagtactttactacctcatttttttttatttttcatatttatttggctaattagtaatttttctctgaactttgacatgtagtaaatcgtgcccctgaacttttttggttgttaaaaattacccccgaactattgagattgttaaatttaaagacttt

SEQ ID NO: 273331 - DNA, 646 bp, Cannabis indica
cttgtcttgaatgttgaagtgcagcttttggacatcagaattcctgcttttcattgcgctgactgcgttcagcgaatcactctggaagatgacatttttgaagccgaggtttatggctgttgccgcaccttcgcatatagcttctacctcccctggcagcgggtcactgaagtgtgatttgaacgttgagatgccgaggatagttccataagtgtctctaagtacagctgcccccgtagactgagattgaccaatggccacatcagaattacaagcaatccacccttccggaggtggagtccactcagttttgagggggtcggtgcactcctgaatagagtccaactcccacagcctgctatttataaggtcaattcgcactttcaaagggataggttgttttccgtggaggattgagtttctatctttccaaataacttcaaagataagagcagcccctcctaggaatcgattgagagtcatagcatttggtctgttatctcgctcaataaatgtaacgcccttacttacgtaaaataagatgccataaataaactggcgttaagatactaatgttgcctttattttaaaaaaaacacttttcaaaacatgggtacccagttgaaaataaagtattaccacttag

SEQ ID NO: 273332 - DNA, 540 bp, Cannabis indica
taaagagttatgcgcgttttagtactaaaatgcatgttttgaacctgcccaatttttggcctaccctttttcaataggtagtccgttattcacagaataggtagttcgtttttcccaaaatttattttgaaatgcgtggtaacggctataaacggctacttttcacccaacactatataaacttgttttttactcaaaaatacaagttggctgagcatttatgtcatacacctaacatatctaagtgagattaatgagcttccaagtttaaaatcaaacaaacacttttcacacactttgagccaaaattttgtgtttattcaacttgagtgtgcttgcttatcactctaggttttcattgtattaactcaattctagagtgattttgcttgtaatttcaaacacatattcatattatgactgaggtgagggtgacactggtattgtaaacaacctggttataatgagattggcactacaacaatccgagaaagaggttaatagtcctcagtggtgcgaaactattgtaagaggtttgga

SEQ ID NO: 273333 - DNA, 1632 bp, Cannabis indica
ctaatgaactcgttcttgtttctagtgcgtttccgtgtataggtatttttgagcctcgtgttgcggaggctatggccttggttcatggcctttccctttgtctagggtataagaaagttattgttttctttgattgtcttcgatcgtatggtttttgttgtgaatagtaaagatagcacttgcaacaatgagtttgatattgtgcttaataatattttctatttatggaagtcttttgaggggatatttttgtctggttgcaagaggtctaaaaatattattacttattctttagcaaaacaagcttttgtaatagataagttgttaggatatgggataagataatgaggttccattttaaaactaattggtaataggaggagtagttcattcatcttatatatgataacacatataagcaatgtgagactaactctaaccattctggcatttggcttagaaagtgtgagtataacgaacgacctttaagagaccacaagatcgaacgtgacatttgaaagaatcctataaggtcaaatatcaaaaaatttatgggtgtacatgtcgagaaatttgtgaattttaaaacaggtcaaagaccccaacacaaggtcccaaatggaggttaaaggggagatagcggaagtttggctcgtctgtttagaccggcggcactttgggctcacaacggaacacaaatggctctttttatggctcacctttttagatcggtagcactttggactcaacaaatcacaagtggctttgataccattttagaatttgggataagatcaatgatatttcatctcaaaactaattgacaatggaaggagtagctcattcatcttatatatgataatttattttcacacataaacaatgtgagactaactctaatatgagtctcgtatttggtagttggggctctccctatgaattttgttgtttaatttttgatcccctttggctttctatctttttattagaattattacattttttcaaaaaaaaaagaagaaaaaaaatgttagcaaaaaaacaagtttatcaaaagaacaccttgaaataataataataataataataataataataataataataataataataaattaatatttttgcccctgaactttgacatgtaccaaatcatgccccctgaacttttaaggtcgttaaaaatgctccatgaactatagagattgttggatttaaggacatctgtctaattttagtaagaaaatctaatatgtatgaaagttcaaagggcatgatttagtacatgtcaaagtttgaggggtatgatttggtatattaaaaccacaatggtttaatacataaacaatcactgaaatagtaaaattgaatgaaattagacaaaagtccttaaatctgacaatctcaatagttcaaggagcattgacatgatttggtacatgtcaaagtttaaggggcaaaaatcataattagcttaaataaataaataaataaaaagaattattgatatattttgatggtatgtaaataccttgtgatgttcttctactagtactaatcaatgcaatctaagcttattacttcaaccactatgtttttttttttttcaaaatttttttgtttttataa

SEQ ID NO: 273334 - DNA, 745 bp, Cannabis indica
tggaaaccccaatgtcctaagcttcttgcaaagaaacaaggtatttctttctataaactgatgtgttttagtgaattattatccatttggattattaattctggactactaaccttgtttatttgtttttcttcttacagctcaagcttcttaaactcaggtgctatcttagcgagttggatctgaaagctggacaaagggatggagttcgtccaagataaagaagaagctcatttatttattttttgaattaattgtttcaattttaaaacaatttggatttcaagtttgggattttattccctgttttttctcataatgttgcaaacaattttttaatttataattaagtttttttacaaataaattgcaatctatgagttgagcttcattactttatcttataaatcaattaccaattattatatttattatgtttgtatgtgtatgtgtttttattattgatacaaattctatagttatttaaactctttacagagttattactacataaacactagaaattatttctatgtttatgaataattgttaattctaaaacaattattaagaatttgtttaataaaaagatcttttgatctgataggggtggagaaaaagttaagaataatatgcagttcaacgatcttttatatctaatgaactctggattatattcaactccacataatctctataacacttagagaatcatgatctctacaacctttaggggtggatcata

SEQ ID NO: 273335 - DNA, 757 bp, Cannabis indica
attggattggatcggatgagaaaaaaaaggttggattggatcggatgcccaccccagtattatctaaaaaaaatgacacttgtcattagaatatatataaggagagtgcaaaaaagagtgtaaaatagagtgtgattagtactcctttactagaggataaaaggtatatatcgtctagacccaaaaatgatccatgtgtcactcagagaagcgccatgtcaccctatgtgtatttaggataagagtgtcattctctattttaggaggtattttgtaattaaattataactttatttaattatttttatagtccttgtaatacttgtattttgttggttattatttccgggcactactttttccaacaatctacaagcctcacttgtgcgctagagccctaaaacacaactcttttcttatgaagaaaagtctattaaacaataagaaagctccaattatatcatgcaactcttggccgaacaaaggtccccaaggatccagctacttcaatacatagtcttaaaaaatactttgtttaatagtttatttcaacagaacaaacaatattatatgttagtagaaccatcaacctactgtcgaagtaaacgagaaagactaaatcaatcagccggcaactctttctttgttttttttttgggctttatttctgcaattcctttaatttcacatattctaatattacaaacaatcacgcaaaatctaccttgatagtctcgtcgatcccattggcattttt

SEQ ID NO: 273336 - DNA, 625 bp, Cannabis indica
ttttttttaaaaaaaaggataaaatgggaagttcatgtaatcaatggaattaatttgtacaaattagtggagggtctaaattttgatattgaaagttttattaggggcaaaatttccctttagaatttgagtattataaatatacttatttaatacaataatagagtttgtactgttgaaattgaaaaaaaaaattacaattttataaacattgaatacttatgttcttaaaaaaattattaagtttattccatttacaaactcaaaattttaaataattatacaactacttatcctaaaagaaaataaattaaacaacaaacgctaacttttaacttcatttattaccatttcgtattattcgtttttttttttacaaagataacatcattgcgatagcacccatatatttcagctcccttgtattttatcaaataaacaacccaccttagcaatcattttccaaatttattattgaagatactctaagaagctatgtttctgcccatgtggtgcttccataacccttataatggattttcaagtttatggaaggtgatatataaaagaacccattttattaattcttacgctgcaattggaacttatcggcagaaaagaatcc

SEQ ID NO: 273337 - DNA, 562 bp, Cannabis indica
agggtttcataagtattttgggtagcgggactatttattcagggcgttacacttatcaagagcttttttgccctttttttttcatgaagggttgatccccaatgatttgaaccgcatagtaattttgtcttattcccaaattagattctccttcctcagttgctcattataggcccattacttgttgaaatgtgttatacaagtatatttctaagatgatgtgtttgcatttaagtgaagttttgccttctctagttcacaaaaacaaagggatcaaaaatagacaactcactcataatgttctaaaattccaagacctcctcaaaggttatactaggaagaatatcttagctatatgtctcatgaaggtagacttgagtaaggcgtatgacacaatagattgagctattatggctgatctgttaaaagggctttattccccagaagttcattaagtggatattgatttgcttatgtagaacatcctatacactcatgctaaatagaagactacatggtaccttcaaaggaaaaaaggtactatctcactaggttctagatt

SEQ ID NO: 273338 - DNA, 2843 bp, Cannabis indica
caaagaactataaagacaagaaaaaaaatccaaaaaaaagttttaacaatgaaactgctgtactctccttccctttcaaacatttagtaaaactaacattggatgacacatcttagtgacatggcataagattttttctatcataaagttaacatattgaaaataaaaataaaaaagctattattttcaatcatattatgtgaaaaaatgtaacctgcaactcagtcttcaatccaccgtagatttggttgtcaagcttcagcaagacagtcacacaaggacgcattacagctgggtcttctacggccaagccatccaactgaaagaacaaacagttcagaaaatgcgtgaatcattgataaaatttgttgcacaaaaagcattgatgcacagaaagcattacctatgaaactacaatgtagagctacaacatagataagtttcaacttccaactgtacttacttgcaaagccttaaataaatgatcttcgaacaaatggccatcaaatgaagagggtatggcacaattctagcacaagcaaatggtaacaaattaattaacagtaggatgtggtatgattcaagattacccaggtaggaaatatttaggagatctatcaacttacctctagtagaaggcataggatatcaacctcaatgtttgacaactgcaggctggatgtatcagatttacaatgatattgactgcgtcttctcaaaagttgagataagaatgactcaagttccttaacatgtacaacagtactgccaactcctttgagcaaagataaaatcataagctgccagaacataaagcccatcaacatctccacaaaatatgtactacattgtaataaataaatataacaattatgcaaagatgaataaccgaaacaattaaaagaataatagcaaggaaaataaatgtgtaacttagaaacaatgtgcaaaaataaaatgtaaagctaatcatcatagggctagctaacctttgaataatcagagagcttaagagctgaacccaaaatgaacgcaagaatcttttccctggtgggttgatcaaacctgcacagaagaaagagacatatgatagttattgctgggcatgaaaggtaacaaaaattctggagattcttattggtcctttattattcactagtactacccttagaagcacaaaataatttagaggaagaagtcatcggattggtaaaatggaaaatagaaattatataatcaaacaagaaaaaacaagaacatgtgaagcaatatatgacagttcatataacttgaaatctcacaatgtgcaggttatcaatgaatattgcaaccaaatatttcttacttttttagctattctaaatggataatgaaacaataaaaataaaaactgtactaatcaacagaaaacaaataccataataacaacagatgataccaccataataagaagagatgaatacctttgctcaatattcttttgtaccaacaagctatggcaggatgagccaagcaaagatgccataagtgaaggaaggaattttctgtcagacaaaattagcctcttttgctgaactatcaagtccaaaagtttatcaagaaaatgactccaagttgcttggtttcctggcatttaaacaaaatcagtatatgcaaaaattgaagtacgcatcaggaaacagataaacaggagaccatgtcataccatttttcttgctggaacagtcaatatgtgcccataatgcacgtaatccttccacacaattcatagctgcaattcttacatcctagaagagaaacagatcccataaggtaaaaccattttagcacagaaacaaaccacaaacagttctttcatagaagaaatgtctaattacaccggccactgacattacatgtataaactaaatccggtaaagtaagatacctgatgtaagtcttaacgtactcaaattaatatatacttgaaagctaatcatacctatttattatttcccaaccaattctaaatctacttaatatttttcaattaaacaagactcaaataattatatagttatgggcaaacgttaaaaaccaaaattctacaaattttataaaaaaaactacatgggggcacacttattaaattagtagcatatgtcctttaccacatctgatacctcaggtttaaaaatatgtgccaacaccagatatgatacttgtagttaatgaaaaatatataatagcttaaatgcatacaaaagaagattaaaacaaaaaaccctttttaattccacaacattaaaacaaaggcagtactgaccgacagaaacaagagatcaaacagatacctggttaaaactagacagtggaacaagaattgagggaaattcagcaagaagttgaccacaaaactgcaatcttccttctggctgacaacaaagatatgtgaaacagtggagactctcaacttgagctgcaacaggaacatctgcaatacaaaatcgtacatcagcataagagagaaatctattgagaagattttaaagctacacaggatccaatgcagattgatctaataaaatcaaatcagtatagaggacaaatgtaaaatcactaaaccaaaataactcaggcactttcctttgcaataaacattaaaataaaatgacattggacgacagtataaatgacacttgaaacagaaatcgcagtaagcaccttgttctgtgaaaagcctgcacaaaaattggaaaggagaagcattgaactttgtgacaaggtagagacgatgatccttgaaacatgattaaactgagaggctgaaaaaaacacaaacaggtcctcgagtccacttcttg

SEQ ID NO: 273339 - DNA, 5052 bp, Cannabis indica
tggctaagagttttactcaagtgcaaggaagaaactacactaaaatcttctcacttgtggtaaaatacatgacgataagattgatgttgtccttggcagctcaaatggagtttgaagttgaacaacttgatgttaaaactacttttctgaatggattcttggatgaagaaatctacatgaagcaaccacttgcatttcaggtggaagggaaatgagataagttagtttgcaagttgaacatgtccttacattatttgatacagtccccaagacaatggaacaaaagatttgatagttatatgtaacaaattaagttcaaacaatgagcatatgatcactttttataattcaagaatttggaacaatctacaattgtgttctttttgctctatgtagatgacatgctcaaaatgagaaaagaccaatcattgatcaaaagtatcaaaaccaagctcaagagagagtttgagatgaaggagcttggaccagttcaaaatatacttggtattgaagtttcaaggaacatgaaggaagggacaatgaacttaaagtagtttgggtacatcaagaagttcaacatggaagatgcaaagagtacatccattccattaggtggacagtttgtcttgccaaaggaacaatgtccgaacagtgtgaaagagaaagaggaaatgaaggatgtaccctatgcaatggttttaggatgcttaatgtatgtaatggtgagcaccaggacagacatggctcatgctataagcatcctgaaccagttcatgtcaaatctagttcttgaaaattggaaggccctcaaattgttattaaggttcttgaagggcacttgggattatggtctgacctatgagaaagcaaaatgataactagagttgaaaggattcgtggatgttgactatgctttgaataaagaaatgagaaaatcaaccacttcctacgttttcctgaaaaattggaactgtatatgctaaaaaggcccagttaaagtctgtggttgccttttccactacgaaagcagaattttgggccaccacgaaagcattgaaggaagctttatggctctggggaattttatttgtattgaaacaaataaaaggttgagtgattgtgtacttagatagctagtcttccatcaaccttttcaagaatcgattttatcatgaaaagagaaaacatatagacataagactctactggattatagagaagattaaagaagggctggttgatttggagaaggtcagaagagaagataatcctactaacgttgggactaaggtcttgcaagtaaacaaatttaagcactacttggacttgatcaatctcaaaagttagtagattaagatttatggaaacaccaaccatgatggctgaattctttcttcattgctttcaatattttttaatttgaagaaactaggtggaatttatggtatagttcctccaaataaaaatatctctaaaagttattctggttatggaaagttatgtgtcttctagaagggagttctcagaagtttaactcttccttctagaggaagtctcgtggaatgacatgtgtctttcagaagggtattcccagatgcctattatgtccacctagagggagtcttcaggaaagctagtcttcctctgaaaagaaatttcggatggctagctattccttcttagaagagagttatgaatagtcgactccagttgtgcttgtcctatctgggaagtctcttcagcatatgctttagtctgtcttctagaaagtgtacatgtcatccagaagcaattcatcttaagctagcatggagatattgttacgtacaaagaattttttaagtttgttaaatcgtagctaacttaacaacttataaagcacttgcaaccacacactttaggaactatatcttgaacctataaataccatcgacacttagcatttcagaagatagaagaagatcagacgagttttgagaggtgatcttgagagagtcattaagaggtagagagagaggtatagagaaaagagagagattggattttgattttgtatgaagaatcttctatagatgaagaagattccttggtaagagtgtgatagaaaaacatattttgagagaatccaacaaagaatctatattgtgccttgttcttgctcaatcaataaagagaatttcggtggtactatagaattagagtagagccatatatcatatcaatctataggacttgaacaagtacatatcttggtgttgattttatattttactgctttaattgtttttaggtttaatactctcttcattcctgttttatttctaagtgtttagtgttatttgttaatcttgtcattacttattgtttattgattatgtttaatttgatttatacactaaatgtaaatttctcacataaaccatcaaataacagtattggaatataatttctccaaacatcgaaagtggaaactcgatctcttaccgctatggaaaaagtactagtaacctaatgtaataattttataagaaattttttggtactaccgaaaggagagcatcaattagtgtcccttcctatcttcaatatatatgtagatattcagttatttctgtaatatttttatgtgacgatgtggacatagaaaagaaacaccagtgaaaatgggaggactaaagaactaccaattttgtatatcacgagtgatgaccaaactttttgggttaataatgaatgaatgtacacaagtatatagtctcgtacgtgaggtctttctccttctactattgctactgctatgctcactgtgatttgtaaatctattagctgtactatcttgagaacaaatagggttttaattattttaccaattttttaattctttctagaaagactaaaaccatcaaactcatcatatggtccccccacattcttcatcttattacaaataattttaattttggtttataatttttgtgatgatgatgatcataataaaaaatgatatctatctatgatctatctctagctgtgtaatttgtttaattaattaaaatattcctatcaattgtactacatattcagaatgagtggaggacatttgtgcacgtttcatgtttgggatttgatcaaaccaaaacagtacctaaaaagaatagataattaacttcatttaattagtgtttgattagctcacgcattaggtttaattatgattgtcgctctatttcacggcaattaataagctatatactagtgctatgctactactgctacgctttgcctccttcagattaattttaattggacttatggatacttctttcttattaacaatatactttaggttcggtcatataataaatcttacaacttctaacagtaccccaataacctatatatattctaatttgtaattgactagatcgacctaatttgtctaagtaaacaccaaccctctccaatagggttgtaatatatgtgtatcaattatataatgagaaatgttaaaagtatggtatttctagcacttatgctatattattattagtgtaattaagtattaaatttcatataatttaaaatattaacttttaataaatattttcaattattggtagggtgtcactttttttttctttttgaaataggtatgatgtcacttctaggtgaagttaaaaataatatccaataacaatatttttgtataattttatgagctagaacattggagtttaacgaacagaacaacattaaacattaaggaaaaccctataagaatgttaggtcatataattaaatatatgggtttacataaaagtaaaggacgtgggatgctaatttaatttttttgtggttattatttgtacataaataaatcatcatgaaaagaataagctattctacgtatattttttttttattcttagctatacattatgcttggatatttttatatcatttaacaaatcttatacatactaataattttagctgtgcactacgtactggcttcgttctgcgaaaactgaaaacatatactttttcattgcaataatatatataaaataaaaatgaaatttaattgtaagcagggtcgtttaaaaagcaataattattgcttaaatataattatgtgtagttgcaaattttaaattgaatagtggaccataaatatcaagaatcattaacaattttatatgtatataaatgaaactaaaagaagatggtcaagttgttggacagaggctctggcagtactacttgtggaatactttttccagtatatttaacaataatcatgaaatgttcattttaggtactaatgtgtaagtttaattagttaacaacacttttattaattttcaaatacttattggtacggtcgatgactgacaaccatccatacaaatttatcctcactttaaattaatataatttcatttcgtttcttgttttatattcaattcaacttctaagataagtaaaaaaaaaacaaaaaaatactagataatattatatatctatatatatatatattaattttaaatatttatatacctggaacacttgttaatgggtattaccgatgaatgattattaaataaatttaactataaatattaattttaaaaatatcatgaccatcgaaattttgatctaataacgaataataaaatcacaaatttaaatttgtatgcttaatttaactacgtaattaaaaaaaatatcaaataatattatatgtatacctaaccaaaattagtttagagacatcaaaagatactctttttatttcattcttggtgataaacagagatgaggtagtaatagtaaccccatgagttttaaaaaattgtgtattttaatgtctttacatttaaataataatcaactccactatacttattttcttccagagagagatcctcctcaccaagctgcttataaaatgcttaagtaaatgtacctttatttatttactaggaaacaaaagccgcgcgttgcgcggtcttaaaaaaatcataaactataattattattgaaaaaagt

SEQ ID NO: 273340 - DNA, 2061 bp, Cannabis indica
tttttaagcccttagcctggtattccattagtactttgtttacaatcaattgcgaatcactatggcatataagatttttaaccttcagcacttcagctatcttcaaaccaacgatcaaggcttcatacttaacctcgttgtttgaagtgtcgaagtgaaatcttaaagcatagtgaaacttgaagccttctagaaaaattagtataacccctgcacccgagccatgctcattggatgctccatccacatacaacttccaagtatccgcgtctggctgaacaagcagattttcttctagagttattccttctataaggaaatctgccaaagcctggcccttaatggatgttcatgggtgaaaagttatgtcaaactgtcacagttcaattgaacattttatcaatcttccagaagcatctggttttggtaaaacttatctcaggggttgatcagttaacaccttaatcggatgtgcctgaaagtaaggccgtaacttgcgagatgcatggattaggcataaggcaagtttttcaagagggggatacctcgattctaccccaaataacttcttactaacatagtaaacatgttgctggtgctttccctctttttgcactattacaacactaattgcgttttctgagacaacaaagtagaggagtaatgtctctccagttattggttttgccagaactggaggtgtcgacaaatgcctctttatgctcttaaaggtatcctcccttctatccactcaaatttttttcttcctcgcaatacattaaaagatggtatacacttatcagttaacctcgaaatgaatctgttaagtgctgccattcttcctgttaacgcctgaacttcctttggtttaatatctatcaaagccttgatcttctgaagatttgcttcagtgcccctcgcgctgactatgaatcctaaaaatttttaatgaggaaactccaaaggaacactttttgggttaagtttcatattttactttttcaataacttaaagcactctgcgaggtctattgtgtgatccccactctttatcgatttcaccaacatatcattgacgtagacttccatatttcttcctatttgtctcgcaaacatttcattcacaagtcgctgatatgttgccctagcatttttaaaacaaaacggcatgactttataacagtaaagtcccatgttgcttacgaagcttgtatgttcttggtcagggacatgcatttttatcttgttatatctagaatatgcgtccatgaacgacagaagcttgtgtccagcagttgcatccactaactggtcgatccttggtagtggaaagcaatccattagacatgccttatttaagttcgagacgtcaatacaagttctccaagttccatttggttttgggatgagaaaagggttggatgtccacgaggggtaaaacgcctcgcgtataaagttgttaaccaacaacttatccacttcttgcttgagtgccccttgtctctcaaaatctaagggtcatctcaatagtctcttggctgggtaatttgggttgacatttaagtggtgacagataatcttaggcctgttatatctgagtggctccaggcgaactgatcctagtttccctcaaaaaacttattagttgctatttgaattgttcatctaggttcttcctaataaacacacactttgtgggatttcctggatctagaacaacctcttccaattcctcaatcagtttcaatagattttaatcgtcttgaatctgaggatcaaggtcctcatccttcttctcgccttcttaaatcacgactaccattagttggtgaccaacttttctattctgcagctatatgcactagcattcacgagccaacatttggtcacctcacaccactcccacacctatcagtgtctaaaagttcacggataagtgcttaattgaactaattgcccctactccaattaatgttggaggacctagcaatatgttgtaagttgatggcagatcgaccattaaaattcttgcattattgtggtggataaaggtgcctcgcc

SEQ ID NO: 273341 - DNA, 1581 bp, Cannabis indica
ttaattgtaaaaaaatttcctatcggtagaaaacttttattagatcctaccataattttaccatatatattactacaataaggagactatagtaataagcaattgttttactcacttcaatttttttttttttataattgttagtaacagtatataattttacttttttaagactaataaaaatagcttttagccatgagtttttaacatattatcaagtgataccttttaggtgcaaaaaaattaattttgtttatttatcattattttattgctatattttttaaaatatatattttttcaccttctacaaatgtttcgtaaaaataaataataataataataataataataataataataacataactaaattttaaaataacactaaaaaacaaaattgacccatgtagtctgtgacacaaataaaaaaaacagttaatggttactatcattatttttttcatgtacgaaagtatactttttcaaaaaaaaaattatacttcttcaaaaaagaaaaatgaagaaaataataatatgatcatttattggcttggtgacaagacaacacagcttagttagttttttctactttttatttttaattacttacagaatcagatcatttacacacacaaaaaataagctactaatatatcccaaaaaaaaaaaattaaaaaaaataaattttttctcactttttagtgacattaagttttttattttttttaaaaaaaaaatatagatgtgatatgtataatgtatgatagtataagatagtaaaaagagggagaaataggacccttttatgtgttaatattattattggtttaattaagtatcacgtcttatataatttaatgtaataactttttaaaaaatatcactaactaatcgcaagaccacacgtctagaaaatacttgagagtacttaatagctgctcaaaaagaggtatgagattaccttggccacaacagcatcagcagaaggaacttgttgaaacatgtcacccccaacatgagtgacaccaggataagctggagcagtggaaatcacatgaggcctatcaaaattaatccctttaatatgaggatatgatttcactatttctgaaataaatctcccagtcccaccaccaacatcaaccacagatccaatcccattgaaaagatcatcaccacaatgactcaataatgtccttattgtaattcgcgccgtgcatgccatcgcgttgttaagcaatttattgtacagaggatttttcgcagcgaaatcaaactgcaggcacccgagttctttctctaacggagcgagtccaccttctctgatgaactcgctcagtttgtgccacgggtttgcgtgccacgggtggttttcactgattaacatgggagccagtgtcatgattgaggcatctgagtcagatgttggagctggctcgtggaggagccagctcgacaactttgtgggcccgtaaagggtttcacctgacactttgtctccttgggaagtgaaattttgcgacggacgagtaaacgcaggactctgaagaggtgtgacgcgttgtgggggatgggcgc

SEQ ID NO: 273342 - DNA, 1021 bp, Cannabis indica
taacagtggtcttagatggatgaccagtctgtatgccaacaagaaagtttggaattaggtacattagaactagaatgaaaacatgaaaattgtgctattaggatgagtattaagtgattggtgtgaggatgcagctaagttgtggcttgactgagaagggatactgggttgttcgaacttgtataggccattttcaacattcccaaccaacaaaatcttcatattgacctgatctttcacataacagtggttagggtgaaattcaaagaaaacatggttatctttggcaaatttattaacacagagaatgtttttagtgatggcaggtacataaagaagattatttaaataaagaggatgagaactaaaagggggaattaagaatagtggaaccagtatgttttatgtgcaaacctgagccttttcccatgtaaaatctgatcacctccttggaattcttgcaggttttggagattggtaacatcgggtgtgatatggtgagtagctcctgagtccagataccaacttgaatcatttacagtctctgcagtagctaccatagcttgcatctcagccagattggcagatcccccattaaaggtttgaaaacactcaggaccagtgaaagttttatcaaacggataaaagcatttggtgacagtattaccttgtttatggcataattggcattgaacttttgtgttgttgttggaaccacgaccacctgaactggaaggacgatatccaccacaagatggcctatagttcccagtaaagggagggtacagggggaggtaatagaccatagcaattgtatagtggtgtaggatatgaaccaaagacagggaaattgggacgagaattgaaggacatacctctgcctggatttgacacaagggggagtatagtagggaccaagcctgggtgtggtagatttagattgagttgcaagatttgcttcaggcttggctatgtcaagttctgaatctgccatttcattgcgaacttcttgtgccattaa

SEQ ID NO: 273343 - DNA, 2656 bp, Cannabis indica
acaaataataaaaaattaacaagaatattttcttatgtatttctgtaaataaaattattaaaatatttaaaattttatacaattatattttataattttttattattttttgaaataattccaagaaaatatattcagttaatttctttaacaccaaaggtccaaaaacacggctcaaaaatgatagcttgacggtggcattaagccagccaagccaagtcatcgaatccacgtggaaagaaagaaaaggcagagaatgagaaccagtgggacccacaatcacgtggtcaatagtgggcatgacacgtcaactctaaggttggtcccacaagtagtatgggttttttaaatctttctctcacacacacacgtacgaacataggtttctgtgacgcacgtgtggagccgactgacactgcaaaaataaaaagtacagtgagataagaaaatgagtgtggtccccactcaaaacacaacactcttgccttgtccatatctgtaccgttcaaactgaacatcacacgtcagatcaatccccccgaaacaaatgtcaccacctttttttacacctccacaaccgtcagatctatcggggattgaataatctgacggctgcaataaatcaagatatatattgctaattagaattgtaaatataattaattttagagtaggagtaggagtaggaccatgctataattctacatgggtggtttttttcagtctttggctgaaacgatttgtcaataatgggggcatcaaatattatcagtatgagttggaccctttttaattattttattaagaaaattttgtacctaaattcattcttcttttttaattaaccattaaaaatttgatgtggtttagagtttactttgactagtaatattaacatttcaatgacttgatcttctttactacgtttttttgaggtattttgacttgaaataaagatgaagaaaaagaaaaaggaattcaaaagtaaaattttgaaaaaataaggtcaaattattgtcaattttcacgtgggcagggctttaaattaagttggagatatattctaataattaaaattaataatgttggtttaggctaattaatgacgtatatttacaaacatatataatgtccccacaatattatgtgtttgaaaaaataagagaaaagacataaaaaattcaatattgaattgggtaaataagtagtaatgtatgtatactaaccaaccaatccatgtgctttagtgaacaacaaataacattcacttctattaaaatgctcaatcatggggtcctatacatataactatataataagatattttatatgtttgtatacctactatagatagataaacacaacaattttcttaataaatacacacactttttttatggcaatgtttattaaatatatgcatataaatcaatttataaattttactacttgaacatattatttagtaactaatgtaatgtactgtgtactacgtattaattgatgggttgttttctaaatgaaaaaattgacttatattgtcattaaaaaaaaatacattcgaaccccaaataagatgataacaaagtattaagtatttttttaagagaacctctttaggttagatcaaagaaatgtcatcaagagaaggtagagggattttttccattttaaaaaagtttaatgtctattctaggagtatgtttaaccaattcatctatcaacaactgacataagagagagatgactccggaaagctagttaataagattttaatatcaaaaaagatactcctacttaatttggtatactttgaacgactctcaagccaatacactaagacaatgaaaatttaaaaaattcccgtgataaataatctaatatcttgggttcatttcaatcttacccttcttcctaaaagagcgttaataaacttgtaacacaaaatcatccattacattacaaccatcaatcatgcatcttttaatgtaataatttttaaaaaataaattataattaattttttttttcattgatatttttgaataactaattgagtgaagtaaactatacttaacataagtaaatttaattaacacactatttaatgataatattaattattaagttaattccatcaatatctaatatataaatataaactattcctaacattaataactaagaaattacaaaataataaaaccatatttaaaattaggctaaatttattatggtacgaaataaatatatttaatgtaattaggaatgaatcatttgagagattaattttaattgaatactaattgattttagaaaaattactttaaaacttgacacaaatacttaacaaagcaattaaaattaattgactacaaattaattttagaaaaaatactaaaataattagactaaatgaaaaaatccttttttttttgaaaagcaagactaaatcaacacaaacaagcgttaaacttttttctttattaaaaaaaaagttaggattgaaatttgaaaatcatataaaaataccattaaaaagcttgaaaaaaaaataaacaaaaatattgtctttaaaaatagaaaaaaataagctcatttttgtcttagaaatagaattttcgttttatagaaatattgattgattgatatgcac

SEQ ID NO: 273344 - DNA, 2936 bp, Cannabis indica
gtttatacatgtattattaatattattatcatgttttttgtgtgtgtaatttcttaacttttgttggtactattatccaccatcagattaatgatgagtatgcaagagatgattatgctttactttattattctgtgtatatgagtttaaattaaaatcagacacatttctcattcattattaaatggaattgctaagtatctttaaaatcttaataacaaagtccatgaaaactacaaaaacagagttttctacttctagcattatgaagaaaagacatgcacaaacaattaccagttttgatatttagaactaataataacatgttcagtctcaatgaattgaattttgttaaactaactttttaagggagcaaaatttacagtcataatccgcaaaaaaaatgctattcattttaaactccatttttagtttatgaataaaataattcgtataagaatagaagtttttttttcttttatttttttgatagtatataagaataaaagttttgtcgtattcgttaagtaaattagttaagtatattcgtaggggatatattgttgagagttttataaagcaatttttatttggaatcagccagctgcggaggcaatatctctatatttatagtgtattattattagtatacttgatacaacctctagatattttccttttctttccaaaagcataaaaagcaatctatggtgtcctctcactccttgtctaatgctctttcccattatagaaatctggtggtgtgatgttatttgtcattaccataagaatgagagagatagttaaaatggattctttggtggccaagataaaaagttatatatagtaagttcttccattgtcattatcataccactattagtgtgatattctcctctccatgatttttcttttttatcaactctccactctatgatttaataactgaaatgcaatcaaattataattataattataattataattatttttccagctgtatctcaattccttgataatttccccctcattaaaaattgtgttaacacggcaaacatcaaattggaaaatttaattttcactcaattagacactgtattttgtatttttcttataattattatttgatttagaaatatggtgaaagacattgtgttttgacaatggcaccgtgcttagtgatcgaaggagaaatttttggttttggggacaggggactctgtttaatgctttgtactggggaattagttatgttgtaacttctacctggaaaactttattgtaaatatgaattttgagaggctatttgttaaaatattataatgattttaaaaaatatagcacaaaattttcaagaattttggggtgtggctatcttttacaaaaataaatcaatataccagagactagctaacccttgggcagcccaataactacttatcagttatgtgtactcggaatttggtaatgccctgcttaaatcttaacaagttaatataggcccaaaatagtttagtttgacaaatagatctttcatgtcatttttttcaatggctcgacgaaaatattagttaatgaaatgtcgtacaaagtttatggtcttcaggtcataatgcagagaggattaattgtaaagtatgcagaattcctcagagcattatatgtattttctccaactattagttgaaatattgatgaggaaaatatatttataaaaatacaaattttaaattaaaaaaaaatacaaaatgcaatcaggaattagaaatgttttgaaaactcaacatataaaattcttattttagctaaaataaagggatgttgctgtctttatatcccttcattaatcgttaaaaatatttaagcagctctaataacagtaccagaaagcccataaaaacattcttaaatatatgcttagatatttaaaagtacatattgttatatgtctatgtcatacagagaaccgaagatagatctaaattaaaggaacacaacacaacaacttatatatatatataactcaatttttgacgtagttcatctctatataacatattcttaaatgttgtaacagttacagcagtaatcatttcttatcttttcttggattcaaatgatgaatacatcatcagacagatggtaatgaagatgaactagtacttattcataacatatataaataggtaaggataccatgagactagctagtagtactgtagtagataggcgaggcaatgatcagcaattggggtaggacactccacattgggaggcaactctcttggcattagcagagtttacatactgacccaggcttggatctttgaggtacccacaaaagcaaggcttctgttcgttgagcttgctgcagcattgggtggacggatttgccccactggtgatggctggcaggcacgagctcatctccatcacgctgcaagtcactgcctctgctactggtgcttccgacaccaccagtactactgcagccgctaccaccaccatcacccacgccaaagaggataacttcttagccattttttgtttttatctttttatgttgaatttggtacattttgagtagagttgttagtatggtatttatagagggaggagtggattgcttggtaatgaaatttttgtttagaaaaaggagaaacatttataacaccggtttgcgtatcaactactccacatggggactggtgattcatatttactgcttttgatgcctactatttatctgcacagaaatttctgacttatgtgtcagttttttttactggcttagagataactgaacctatttaattttaatctacaattttttatcgaacccatttattttgtttaaaaaataataaaaaatggctaatctttaaaacaattccaaaagtactctttattttataactaaatattagagtactcct

SEQ ID NO: 273345 - DNA, 573 bp, Cannabis indica
gtctaatttttttttcatattcatatatacgttatagctagagaacctacaaaattttgagaaattcagaataatttacaatataaaaaataatgttcaaaatgtctattttacacgcgtataaaataaaatagtcacgagtgcaacacactgtttgaacatatttttcggcatttaaacttttccaaatttcttaaaattttgcaggatgtcttaaataactataacgtacctgaccataaaaaaaatttgactaaaaaattatttcgggtcttaaaacagataagggtgcatctatatatctatttcaaaggggtgcattatagaatttccccttattatttattttgaatgcttttcttttgatcgcacagtaatttctcaagtattttgaaacggttttcttctgatgatataattagttttcactcaaatttgttcagttatttaggtagatataatttaaattacattatatcaatttaaaaccttatatttacattatttgtagtttatttattattaaagtgtattagttatcgattattaaagttgtaaagttattgagtgatt

SEQ ID NO: 273346 - DNA, 551 bp, Cannabis indica
attacatgttgatggaagcttcaatgacaaactgtctggtgcagggatttccctcataacaccttggggcaacaattgcatggagaaatcaaatttggcttcaaagcctctaacaatgagcctaaatatgaagccctaatcactggcctcaagctggtgcacaaagtatgagctgaccacttgaaaaaatatagcgactctgagctagtcgtaaatcaagtcttgtgtgaatacacagctcaaggtaaaataatgatagcttatttgagaaagaaccaaaactttctaagtcatctcaaaggctataaaataaggtaaatccccaatgaagagaatgcaacagtatatgcacttgctcgtctagcaaggagcaccattaccgataaggcaaacttcgtgccagtacagttgttgaaagaatgcaacaatactatccttgaagaaattgacaagtgtggacgacattgctacatggattaaccctattacaacttacctccaaacaagagccttgcctgaaaataaaaacgaggcaaaaaagatgagaagaa

SEQ ID NO: 273347 - DNA, 1207 bp, Cannabis indica
tttttttttttaaatgggcgggtcgcacttaaattttagcaacccgaactttagattgagttagaaaatatataggataaaccgcccaaaccgaccgatgtacagccctagtaaatacggatttgattttttgatacgatacgaaattggtataagtccagaaggcacgagcatgattaggtacagaaaaatatgagtttaaacatgatactacaaattagcatgatacaacacgaaaaatatatttttaagcacgaatcgataaggcatgagaaacacgaaaaatatgatacataagcacgaatagactatccaaaagacacattacacaacaaacctgaaaagtacaaagcagctactttcgaagtaacagaaagaaaagcaacaactaaagtgggagagtcagagctgaaaagaggattcctcacttttttctttcattcaaaaccgtgcatgaaacttctatctcgcacggctcttaagtgataaatttatactttatataataatataaatttattaattatatataagttaaattaataataaaaccttaatataagaattttataattctataattaaaactattaaaatatgaaaagcttatattatatattaatttatgtatgtaatgtgacataaaaatttgagtatttataagtaaatatgaaaattccactgatgcaaataattttttatatgattgtttgtaaaatattgttgaaaaattatataaatctaattaaagttataaaatatacacatactttagtaatggtataaagcagtatgacttgtttaaaaaatactagcccatacaagtaaaatacgacacaaattcaaatacaacacaaaaatactaagcctataagtcgtaacagacttaccttttaaaaatattagcagtactcatattttttttttgtgacagaacatgatacgactcatttttttttaaacactaataaatatgggcaggactagcttggcacaacactattctactctactctaccatacactctctctcacccactaattaacctaaccaaaataattttttttacttctacaccttttctaatttaatttacttcaatttatttttagtcaacagacacatcccaccctccctaaacgacaattcccaatgaacaaaaaaaaagtagcaaaagaagaataaataacaaaaagaaaagaaaaa

SEQ ID NO: 273348 - DNA, 752 bp, Cannabis indica
tttgttgtaagaaaataaaatctgtatttgatatattaaattcttgtaattctatggctaacaattttgttttgtttatccaagctatatttggaatgaagtggtctctaatcacatatgctctaactaagccatgattttgaaggactttatgttggtgtctataaaatcttacagtgaagaacaagcacattaaccttgtaggtagtactgtgcatctgttaaatttgcacattctctgttttgttttcttgaacaacgaagcttcactttttccttgatgtatatatatagcaagcaagctacttttgagtgttttggtggcagaggctcctaacttataaagtgatgactaagagcataatttatcaaataatactgttttttggtggcagaggctcttaacttatcgtatgatctagttcaaacagggtaagatgcgcagcttttctcagcagttcgatgatgaaagagccatctaggactattttggtgaattcttttagaatttaggtgaattgtctcagagtaacactatggcaccacaggttagatataatctccaatgtgattgctttgtatctcaatttcaatgtgtgattaagctttttcttaataactataattgttgtatatatttaatgaaatttggtaagcgtatttatgtatatccttgaatcatttttatttcattgttgtgtttaaatatctctaattagtatcacagatgatgatgtggccaaaatagtttt

SEQ ID NO: 273349 - DNA, 623 bp, Cannabis indica
tgaatacaagatgacatgaaggtcagccagaacattatcctcaagaattctacgatcagagtagaatcgagagcgtctagccacaaaatgggtcactcgatttgctgatcgtttaataaaacgtaaattagtattaagtgaagaagacaataaaattttacaatcattagtaatcaagccaaagacagaagacatttattgtttactaaagattgcttgaacagtgagtaagctgtcagtttctacctcgatcgtgctccaccctttaacttttagccagctaagggcctcctttacccctaaagcataaacaacctcagccgtgtaagtcccacggtaatatctggcaataaagtcaataatttggccatttggcaataaatttacttaagagtgaagaaaaggacattttagtcttttaccttaagatttatattagttaaataagaaaaattccaaaattcatttaaagaaatataatctgattttttaagtagataaacaaaagtagaaattacactatatataggaaaattttaagagtttacctttttatggcataattaaataaaactaaggggttatgggtttttttgttttttttacatttatatgggattttt

SEQ ID NO: 273350 - DNA, 676 bp, Cannabis indica
agatcctggtaaaataaattccaacaatatcctcatcaccaagtgaaaaagtttcaaagaaaggttttgatgcaaattggaagatcatacctttttcaagcgattcaatggactccagtacgcttccactaatctataatgctattgtttaactctcatgaattaattagggctaaattaagttttacagtgttcataacaggattaacctatttttcaatctgcaaagtttctttaatagtatgggttcattacccaatacatatacctaatacacccaaataatagtgtatgacaggtttaagaaactaagcattattgaacatggggtggagcctgcgtaacaaactccacaatttcctaaatctttttcagttgatactctttaacggtagtgtgcatatcgaatagtgttctaaccaaagttgtttcttaaacatattttgacttatgataaagttaaaaaccgactttatgacatgtactcattttagaaatgtccgtatacatttagagtacaatcgtcaaaagaaagatctaggcccaaatacaataaataagcatttcatcataaatactataatgtctaagggttacatatcttattatccatctcacaacactaaaattatagatttaaaaattgaattgaatagtgggagcgatcgatctagga

SEQ ID NO: 273351 - DNA, 1071 bp, Cannabis indica
tgcttagtaatggtgaaaacacgatcgtctacttctccttgtgtaaacttcctttgtaaacatattttgcaaaactgccttagtcttataaaatgtggtgcctgttgcatttatttttattttttttctgtaatttcttagtattgtatataatattttagtttatatacagattgtataagttaacgtttattgtatttattgatacatagttatatgtagttgttgtaatgtattattgttaaaatatatacataatagttattatttggtttgtggtttactagtttaagtttttgtgttttggtttaaagtattcgataattttgcattttgtgtgtatatagtatacaataaggtgtgttgtctataaggatttatgtttatatgtgtgtttgcataaattagtgtatattgtgcataattttgtatactgaatgtgtgtacattgtataaataatgtatattatgttctctgatttgggatgtatacttagattcactactacaaaatactcttttcatgtccctttataaagtccaacaaaaatagtgttggacacgaaaaatattttggggagttttatagtccaacatagttggacttaaaaaaaatattatcatggccaagaatgttagactagaaaaatgataatggacgttatagttgaaggtttctatttatatatttttatttatttttttaattttaagaatggaccacacgtccaacattgttggacttttggtccaattaaactccccaccaaattcttctcccttcaacttcgaacgagcggcaaacccaacaaaaatgggagaaaaataaagcggtaaaataatttaattttttcaatctcccgcctctatcaaatcaaatcaaagaaatcagaccaaatcaaagagaaccctaacaaatgcccatatcttctatgttagataaattaacaattaacccaagatctatttgtatataacatagaacacaatagtaagatataataattaggtatgtgtacctgattgatccatagcaattatctctgattgatccacagcagttactccaat

SEQ ID NO: 273352 - DNA, 902 bp, Cannabis indica
taaagtgactttttccaacatttaccgtcatttaaagtaactttttgccacagttataaaccgtcatttaaagtttcgcatttttatgacacccacatagccaacggttttaggaaccgttggaaaataatataaaaggcagttataaatcgttgagaatagcccttttgtagtagtggtttcctcttctgctcaaccacggagcccctaccacctccgccataaatggaaatatggcaagtggtatcctgacctcctgccataaccttttgaggtcttaaaataaattctttagggcttacagtccaaagaacattcttcatatcttaatcttcctaaaggactgtaggttcatgcatccaaattttctcatgaaatgtttccacttggttaccagccatactacgctcctctggtaataccaaatcaagaatggttggcatatgaggtaaaggtacaacaggagatctttgttgtttcaacctctgaatctcctcatcatgtcgttgaatcatagcttccatttctgcgaacctttgctccaaatccaacggagcttgtgacggatgaccatcactcccgtcagaaaccctccaagggatttcaccttgattatagggagaacttagactccattctctccaaccgttactagccctgaccacattatcctgactctccatattgcaccaggtgtccattctataggacaaacctgccaattagtaagtcagtctggtcaggcaacggcccaattacaaacttactacaacacttatggattcaaaggcaacacatttaaaataaataaccacaatctaatatgcttactaacatgctttaataaccacatttaattctaaacaagtaggggcttactggatcgtgagccgagctttctc

SEQ ID NO: 273353 - DNA, 504 bp, Cannabis indica
ttggttagttatatgaatatattgaatttagtttaaaatttcagttgttacatctactaatagttgtttcttacaaatattactattaatgaacaattcattgttgtaaatggttaaaaaaatagagaaaatgtttcttaaagatgacccatttacaaaaacttagttgcatttcagttaaataatagttgagctacaataatgattttgtataataaatatagggttcggaattgtcaatacatgacttgaacagagcaaagtcgataataataaatttcttttctattacatacgaagtaatttttttctaaatttttatgttagttggctcgcaacatatataacagttgtataaaagtttcattacaatttttcaccagttgacttacaataattaaacttttatactctcagaaaaaagatgcaattctattccttatctgtggtgaatccttaccctcaaaacaagttgttacagcagtaacaatgttcaagaaacac

SEQ ID NO: 273354 - DNA, 690 bp, Cannabis indica
ttttttacacatttctatcaaaatcaagtttatattacacttagtgtattagagcacaattgtaaaatttgagtcagatataatattgattgatttttttaagccgaatttagcaccaaatctacaccatcaattggagatgatctcacatgtcttattagagcatctctagctaataaagatacaaaattaaaatatagttcacttaacaaaaacaagtactaaaatggtgtgttaaaaaatgtgtaaattttgcacttaataaatattatgtcaaattagcacaacatttgttatgatacaaaatttacattataataaatacactattttttttatttatttttatgtcatttaaaattttattaatttatttaactatattaaattatggataatttatatttttattttattattttatacaataaaattgatgatagagttattgtttttatatttttaataaaatattaattaaacattaaattttaaatctaagctttatagcatctccaatggtaaaactttagaaaatgcttagtgaggtagacatattatgtggtaaaatattaagatgttataccattagagagaaaatgatgtcattttagaaaatgtgcatggatgctatgttgtagcattgatgctatttattttttttaataaaaattgaaactaaaaagttat

SEQ ID NO: 273355 - DNA, 1048 bp, Cannabis indica
aataatctcgattacattgaaatagagttttatttagggcataaaacccaacatggacttcattggattttgtttctagatctggaaggcctttaggagtttttttttttttaattttttgtttaattttttttgagaaaaaattatttattttatttgttttaaattaattatgatgtatgatatttacttattgtaatttacatattctactatgtatatttgatatcagtaatacgtacttattgtaatatatataatgtaatatgtaatttatggtgtaatagctatatatcgaaatgcattatttaaatttattttttttttcttatttattgattcatatatatatatatataatttttcagtaattttataattataattttaatataaaaaatataaaaaaaattatttaatattttttttttaaaaaaatgatagcatttatgtctggtaaagctggacgtgatacatatatcttggccgacaaccactttcacgtccactccagttggaccagaaatgtttttctagtccaatattgttggactagaaaaataccctttttatgtcccttgatattatgtccaacataaactagactcaaaaaacttatctagtccaactttaatggacataaaatggggtttttgtagtagtgtcctttcaggcttcttccttctaaacgaatacttgagccctttcattgaactccgtgatgcttcttactggatgacattgtaagtcatcccacaactcgccccctgcggttaatggataagtagagatccctgttggaaaccttaaaaattatttaagatgagccggttttgtatttctcacatgtgtttgttatttgctaaatgcttgataacttctgaattgtgtgtgaatttatattgaacaatgttattttctgttattagttgtagtctaatttcgaatctccattgttggtctaactaagcttgttgttttaatgggacaaatccctaatggattgtcatccattagacaaacataacagtgttagatcccgatacat

SEQ ID NO: 273356 - DNA, 1140 bp, Cannabis indica
aaaaaaaaaaaacaattaattttagtacggtcttatcattggggagaaaaacttctttattttatttttttttcataataatgtatcaactctaattttttttaaaaaaaaataaataatttattttgttaaaaataaatttcaaataattatttatcaagggtaggttatttacttgcaactttttttttcaagtatcattatgattacaaaatataacctatttaaatattttagaaaagctttatattttaggaggaatggtgtatgtggggacatgttgtcggttcttgtttattattttgagtattttgttatattggattggcaagcttgggacctcgcaacaatatgatacattacaattttgagctgatggagaggtcaatttttgagtgttcttcattggttatccaagactaattttggacaaaaatagttgtaatgtcgttaaggagcgagttgtaaaagcatcacctgaacatttgagctttcgattaatgttaaaggttgttgtagcagtagagttgttgttagggatcatcaaggtcggagtggtagcgtatgataagtttttctttctcttccttactctcttgttgtgcctgaattatgtcattcgtgatgaggctgtggctatgctggtgtggcatcctaaattgagtggtcctttggatgtgttagtggttgagatctttagggagacacttgatgtggtagttatcagtgtttgtctaagataatcctaaatttctaaacttagaggtactatgcttcgttgtatcataggaatcgctcagcttattttttttttgctgcaaggagtccattgaaaaatatttttaatccattgatataatccttttaagacaccaagaaaaaatatttacaatgctggcattgtttacaaaataaatttataacaaaaacatttgatgagtgaaaaatgtcatatataggtgtccaccctcatgaggaaacattcaagaaagaaactagaatgaggcctcccattggatgatcaaatcaaaattcttcatttgacttggcaaataaactttttgaaacgaaattcgattgaagtaggatacgggaatcagaaatctcttcactttccttccatctccaacatagcctctt

SEQ ID NO: 273357 - DNA, 488 bp, Cannabis indica
gtttggcatcattatctatatggaaaaaagtgtgagatctacactaattacaagagcctcaagtacttttcactcaagaagatttaaatatgaggccacgacgatgtttagaactggtcaaagattatgactgcgagattctctatcaccttggaaaagaaaatgtggtagcggatgctctaagtcgaaaaggtccagggcaagtttatgaattaaagaagattctagcagaatcggctaaatatatgactagagcgggaattgagtttgtggtcggaaaacttgctaacatcaccctacagtctgatttgttagaaagaattagaacgaccagcaaaatgattcggagctacaggggtacaaagagaagttagaaactggatcagcaaaagattttttgctttcatctgatgggttattacgatacacgaacaatatttgtgtaccggccgacaaaaatatcagacaggagattcttgatgagtctc

SEQ ID NO: 273358 - DNA, 657 bp, Cannabis indica
acgattattttttagttgttctactattgttttaattgtcctgttttgttattttacggttgttttataaaaagacatttatttaaaaaatcaggatagatattcattcgatccaattcatactattttgctaatagtgcatctgatgatctgttaagtgtgaattttatattttagatctaatcctttcatagtaattcaaatctagtccaatccaatctgtaatatacggatttgattagttatttttgattgattactttttaatatatattaaattatttaataattatctttttttttgcataattaaccacaaaaataaaataaattattgtcattttatgtctcaaataacaaattaaataaacaaaacaaaaaaataaatgcaaagcaaaaaaaaaaaaaattatatgtatagagatgtttaatgttaagtagtcaaaaatgcatatttattagtgtaaaaatacaaaataaattaattctatataatatttcatgaaattaatgtaatatatttttatttgaaaatattgtagtgttgagttaattttgtaagaaaatagcattttatgacacaaataagagaaagaaataaataaaaaaagaaattaagaaaatgcattgtttttatttaaagaaatacaaattaat

SEQ ID NO: 273359 - DNA, 836 bp, Cannabis indica
tgagaaaataagatggaaaatttaaaacaatgaaaaaattgcaaagtggggcccaatatcaatccatggccggcaactccataccaatttacgatttaattttttcattattttaatgccaaattgcaaagtgtgtaaggcattgaagaattgagtttcaagagaaggagattcgggctcagatcttggtgatactctgctacaaaatggaaacaagggttagagtcctgagcggaaggagacattatattgcgctgcaaccactgtaaggttcctaaaactttatatgtgtttatttcatatcgttttagaagttcatgtttaggatgttaataacctacttgtagtaaatatagatcttggtaaaataattctaacaactggcctcagagccatggtaattgatttattttcaagaaatttggacttaaaacgatatatgtgtgatttggatggtttcatgttgatctatgtgttttttacgattttttgatatttgtgaattttttacgaaaaataattggattttcgttctggacttatttttgttggatagttttaaaagaattaagcaatttacttttttacaaatcttaatttcgattttatttgaattagttatgattttttgaagttttgaaaaaagataggggtggtgtcgccccatacgcccgtggatccaagtaatcactcggtcacgtgcgcttcaaacacgaggttgtccaacttttttcggtctgaagcctcggttttgtctgaaattaggggctccgcgcgcagatgaggctgcataccatcctcatcaaatctaattttttcaattttcttcaattttt

SEQ ID NO: 273360 - DNA, 1061 bp, Cannabis indica
actatctcatttagaggagaaagagattgtcctgacaaccctcatgttttattaattggagcacaagaatagaaagtatcaccttaataagttcttcttgcatctgaaggtactccaatttcctcctcctttctgacacagaatcctctgatggcaattcagtaactccaacagttcccacaacctcatctggcagtgaagataaggtagcttgaacagcttcctctggtttcacctttccagatacggtgaatgccctgaatgagaccacaaagcaaggcatatctatcatacacaccatccacaaaaacatttaaccaaaatactattgagcaatattttatgtaatattaaattacctggaaaggattaaaagtgaagatggcacagagtgattaagagacaaatccaaccaatcccgaagctgcataaacaaattaaccatttaatgatcaacactatctttcgagtccagtgtcctagttaaatcagaatatttttccctcccaattacttgcttacacatttcacccaagttagccactaaaaaagtaagaggacttggcataagaaaaaagaaaaacctgctggcgcatttcctcaactgaaagcaatccaagcatgcctctctctctacaatcttcacgaagttcagcctctgacagcgactccacaccttctgcttgtattaatttatcatccgctttgatcctgacaggaaaagaaaataaacaacaacccccagttagtttctttcatcgaaaggaataagatgcaagctcagttcaattactgtaagttccaaggatctcggagtttctaaggaagatgcttactaaactcgtttgaaagtcacaaacatatagaacactgctattattttccaatcatcagaagttcattcagttatactttgaagtaagataacaatgaaaaacaaaaacctgaatactaaaatagaactgtatcatgtacaacccagagcaaggtttcagagcagaaacagtctgtcagattgtaaaatatttgcttcccaagaagccagagatctagtagaacac

SEQ ID NO: 273361 - DNA, 1160 bp, Cannabis indica
acccttctatactttcaatgaccacatgagctagatggttctgaaaaaataaacactctaaccttattgagtagggttctttcgaaaaaaaaaaaattaccgtactatgtagggcattgattgacacaatctttttctagtcattgctttgttcttacactctctcaattatcagttcacttggaaggagtttagttgagaataatgatatagaatagaaagaatatatttttatttcattctcttatttgattgtaacttttttttttaaaaaaaaaaaagcaacaattttattaaaaaaaaggcacaaggtcaaaagagtcacaaacaatacaaaaagaccagtcttaaagatcgaaaggtaaaccgggccaccaaatttgagaaacatcaaaaagataaagcaataagagctaaaaaaatgagccataacattatgagtttgaatacaatgagagaatgaaatatctaaaaaagacgagaggtctttttaatgtcatacacaattgtaccaaactcggtaggtctcttataaatgcttgagatactattttagatcatgtgttttgtaaaagttgccaattaaaccctttattttgttaaatggcaaaataaacattatattttccaaaatgataagaataagaccttgaactcatttttcaacaattttattttttaatataacaaactttaagataatttctaatatgaacaaatacagaaaatgtaaccagatttgtcataacacttctagatcgaattattattaagttttattttgataaaaaattaattcaggatcctatttgtacaattttaaaaaatacaggatctattttgtcatttaataaaacagatggaccaattggtaacttttacaaaacacacggtccaaaatagtatttaccttattttaattacaatattgtcattagttattttttaaatatttaatttatttatgtacattaaaaatattttgctttttatgataatctacaacataaaatgctaacgtgcactgaagcaaaataacaaatattataataagagaaatactaaaagacaccagtggtccctagcaccttcttacatgttactatcgttattggttcagctaagtatcaggtgagctgttacttccaggctcaacttcc

SEQ ID NO: 273362 - DNA, 368 bp, Cannabis indica
gtgaagattggccgagtgatggtgcgattgagtactggaagagactgtggcagctaaatgttccagctaaggttcaccatttggtttggcgtgtcatttcgggtactcttccaactaaactacagctttctaatcgacatgtacatgtcgatcttacgtgtccaatgtgcaacaaagctcctgaatcgatttcgcatgttctttttggttgtgagtttgctcactcctgctggaatattgcagcagctgctgctgctggtgtaactgaaggggagttcctcacgtggttctgtgatattctgcagcaaggaagcaggcagatagcagaggaatctgctatgatattgtggcggatttggatggcgagg

SEQ ID NO: 273363 - DNA, 782 bp, Cannabis indica
tttttttttttttgtgttttttatgtatttgtgaaatgatccattaattaaatggaccaaataaaagataaataggctcaacaaaatacacttggctgaaatcactatatggtggcccatatttaatttttgccattttattttaccattaattaaatcaaatctatttaaatgtcaaatttaatttaataattataaataattatcaaataaaaaataatttaaatatattattaatttaacttttaaagtgtcataatttttaaatttaaccttatttctcttttcttctcaatatagtccaatcttaattagtgaaaattctcaaattagacatagttaatttttaattttaattgattaaataaatcaattaattgagtcatcaagaaaatatttatcccaagtaatgtaggtaccatcggcctataaaattaagttctcaagaagttgatatgaaatttatagagtaaacttcatcacttattaattctgcatgactccaccataaatccagaattgcactcttaattacacagaatacactatatatccaatatagatacgttatgaattatcttttgtttcaatcaaactaattaatgatcctttatagacagtgtacattgagtaggtacaaaattaccattttacccttcaatgattttatcctttaaacacttagttactcgtaattgatatttcagtaaactaatgtaattacttaaaatgagtactcgacatttaactcatttagccaagctcaaaggaaactatcgttt

SEQ ID NO: 273364 - DNA, 1825 bp, Cannabis indica
acttttactatcgatgtatgatgtatatatatatatagccacatgacccctatacataaatggtaacgaagaccctttcttaacaaagaaaattcgactcacaacaataatattagttttatattctataaatataactctaactgattattacaactgcgcgagtagcatggcggtgaacataacttccatcaaaacggcttcgaatggagtgtggcaaggggacaatcccttacactatgccttccctttgttgatacttcaaaccactttgatcctcatcctcagccgcttccttgcctttcttctcaagcccctccgccaacctaaagtcatcgccgaagatcatcgtacgttatacgtataacatatatggttatcatcgtttcatatttcaatatctgtcgttttgcgatagattactaattccttaggattattatatttatatgcgcttgtgtgtgttttgaaatatttggaaatgatcaggggggaattcttctggggccctcagctttaggacgaaacgaggaatacttaaaccgcatattccctaaatggagcaatcccatactggagtctgtcgcaagtatcggactgctcttctttcttttcctagtcggattagagctcgatctcagctctatccaccgtagtggccgcaaagctttcggcatagccctcgccgggattactctccctttcgtttgcggcatcggcgttgcttttgtacttcgcaaaacagtcgaaggagctgaccaagtcggttacgctccattcctagtcttcatgggtgtgtctctctccatcactgccttcccggtacttgctcgcattcttgctgagcttaaactccttaccacagaagtaggggagactgccatggctgcagctgctttcaacgatgtagctgcatggatcctcctcgcgctggccgttgcactagctggtaacggagacggtgagggtggaaaaagtccattggtgtcgctctgggtgctgatatcaggcgttgttttcgtggtgtttatgatgatggttgttcaaccgatcatgaaatgggtggccaggcgatgctcttcggaaggcgaggtggtggacgaggcgtacatatgcttgactcttggaggggtcatggtctctgggttcttgaccgacctcatcggaatccattccatatttggggccttcgtttttgggttgacgattcctaagggagggaactttgctgacaggctaatcgagaggattgaggacttcgtgtctggcttgctgctgccgctttacttcgcgtcgagtgggttgaagaccaacgtggctaagatcagtggtgggaaggcatggggcttgttggtgcttgttataaccactgcctgtgctgggaagatcatcggcactttcgttgtcgccatgatggttaggattccagttagggagtccctcacccttggtgtcctcatgaacaccaaaggcttggttgagctcattgttctcaacattggcaaggagaaaaaggtcagattctttattatattataatttatttgacaaattataattcacattgagtaatagataaataataaaaggtaccgtgtttagtagcctcgtaagtgttaatatcgttattctaattaaattttgagttttatatagtttaatgtaataattttgaaagaatagcactaaccaatcacaaaataaaacttttaaaaagtaataaacagtattggtacccaataataatgctcttagtaataatatagtcttcactaatttaataattttcttgttaagtactccacaagcactttttagtcttcta

SEQ ID NO: 273365 - DNA, 997 bp, Cannabis indica
tagtagttattttattgaagatactactaacatacatttaaaatctaaattttaaaagctatttttaaaccttcaaaaatacttctattgctagttaagtaactaatgaatttcaattctaaattttttacctaagccaattttaacacccacaaacagaaactcaacaaaataaggctcaaatttaattatggtctttttacagtagcaaaatgcaatttttaattatttgagcgatcaaaggtaattattttgctaataaacttttttaaaacggttatttttactataaactcaaagggttttttaccctttttggagattaaccgtggcatttttactgggttcgaattatattaccgatgattcaattaagaaagaaaatataatttcaaagagtgaaaagatcagtactatgatagtatgatcctcttcactttattaaaaatggttttcaatttatgattctgccatttaattacctttaaataattaattattatgtctaataatagtgtagatctccttcaaaaaaaaattaaaaaaaataaaaaaatcaaagaataataataccttcagagaagaagaagaagaagaagattctcagttgataagcttgttgttcgttgtttcgcctgaaaaatacataaaaaaaaagtgaagaaatctaaataagtgatggaagggtgaaaagaattttgggggttttgtttgggttgatttgaatttagttttgaaaatgaatgaagaagaagaagagaagaataatggagaaagttgaaatgagaaaactgtggactgtttgtttgtggtttctctctttctctttctctctcttgaaatgggtttaacagctaagattactgattgggtccagttgggattgtttctttgtggggtggagtgatctggtacagcgtggattatactactaccatgtacagaattgttaaagagaattgctaaaaaggtattagtagtgtctagtacatttata

SEQ ID NO: 273366 - DNA, 897 bp, Cannabis indica
ctctctctctctctctatttttgaatcctttctctctttctcttcaatttttgagccacatattgatagagtacatacccacagataacaagtctagtactcaatcatagtgtataagactgtgaagaatctaccacatgaaggagaatcaggctcagatcttgataatactctgtgatagaaagcaacaagggttagagatctgagtggaaggagacattaaattctactgcaatcaatataagctttcttgaactttatatgtgtttattttctattgttctagaaatttatatttaggatgttaaacaacatagatggtagtacatctaaatcctggtaaaacaatccccaacagatgttagattagcattaatttaatatacttgagtagtaaataagatcctagttaaaaagtttccaacagattatgaagtttctctccttaggtggtttcttcctccaacggagtagatcaactgaattgtgttgtcaaagttgaggggaggctttgtgtgctagtgctacaatggttgcaaaaaatcactcgggtgaggtgatttgggtggttgccaagtgtttggatatttgtgaccttttttgtgggatgggctgatttgggggttttcttctttcttttttttttttttttttttttacatataaatgtatttatcattactacatactagtataactaattttttttttattaagaaaatcagataatctgtatatacttgtatagctaaatatatatatttatattttttttttctatgactgtattttttttttttaaagtaagaaaacccctcaatcagtgagcatgtatgttcacttccagtattttgaaaccctacgacctcccagtacagcatcaactcagctttcttc

SEQ ID NO: 273367 - DNA, 704 bp, Cannabis indica
tacttccccagttcctgctaaaagaaaactagatgctggtacttcgaagagcactaaatcaaaatatcatcgacctgtgttggagaactccgactctgattttgagttggagccagagttcgaaagtctcccaaatctgataagatttttttttctattgatattcgtgtgttgttttaggattttttcaagttgattattattttccattttcttctttttcttttttttcatcagtttatttttgtttagtcctccttattttatgggtttttatttgtttgactatgtgtcttgttgttgttttggttttgttttgttttgttaactcttagggaaagggtaaataccaagtcaagattgttcaatcaactgatctgcttgaagacataattgggaaaagagttgttgaggtgtgtgattttattattttagttctaagtgtttttttatgcttgttttttatattcttaatttttttttgtttgttttagttttgttttagttagtgttttctttatatttttttattaggattgggaatccaagtacacccgatcagaatactaccattctagagttataacctctggttattactctgttattgtaagatattaaaaaaaaattcttactgaaacccaattaaatatgttttcaagaattgtatcagaagttaaattttgattgcgtagtagctgagg

SEQ ID NO: 273368 - DNA, 511 bp, Cannabis indica
tcgagaaaggttcatttccataattgggaaatacaaaaagaatatacacaaaagggatgaatggaatgaacctgtgctaatctggtgagcagtttctggaatttctacacctaaatgatcttcatcataaaccttgggaggacgagactcaagttcatcgccataggagtccatatcaggctctgcagagtcttgtgctcctcccaagagtaactgcgtgttttcgtgaaccacctcgttctccgaggaagatatatataccacagcagccagcctagagttatatgtataatatctcactctgattcaatcttgtaacgaatatttcctaaaatatagtaataattttatttaattttctttcaaaatattaaaaagaaaatgagaaatatcgatgaggggtgtgtgttttctgcaaattattgtatggcttgattgtagttacaagctcttatttttatttaattttagtcgtaaaaaaataatagaaagaaaagaaggaagaaaaatt

SEQ ID NO: 273369 - DNA, 1041 bp, Cannabis indica
ttatttgtttaggggtaaaattaaatgaaaaagtggtgtaagtattttgcatgatgcaaaatatgctagcatgtttttagtggataattttattttaagcatataatcaaattttccattatatttacatatttagtatttaaatttttgttatattttctatctattttggtttagaatcaaaataatgggtagaaattttatttgttgttgtcatccagtgttttgtactgcttttatggttggatataaatctaaattttaaaaagaaactatgacctttttaacaaaaaaaaaaaacatatgaaaagcctggaggccatatgcttggtatccgtctaaattccgtgaaacccgtccagttaaaactcggacccaaacctggtaaaatctggtactatgtcggacccaacctgaacccgataaaattatagttccaagtattgattgatgctagttgtatttagaaatattcacattagatatcaaattttaatcaaaactattacaagtatattttatatatttaaatgaaatttggatttttttttatctgccacaaaaatgtagttttcttttcctttactttgtttttcccactccaattgaaggcaacgtaaataagagaccacgttgcatggtaagcatttgaatacgtggacggtcctgccttaaaaccaagtaaagtaaggatgtttatccttctcaaatgtcacttcccatttagctggactttatcatcatataaaaattcttctgtgtcacatgcaaataatttgatatgttattgtgaaaacaaattatagcacgagccacattaccttattttgattggaattttccaatttagattattagttgcaagaaagtgaccaaatgataataccactttccaaaactagaaagattcattttcaaccacaaccaaattcaaatcaagaaacatataacaccgatcgaagaaagagaggggtcataataacagtgccctctcactacactaaactacacacccatcaattcattgttcaaaaaaaaaaa

SEQ ID NO: 273370 - DNA, 656 bp, Cannabis indica
actcttttgtccactcaaactttttgttgcctcgcgatatgtcgaacaatggcacacacttatcagttgacttcgaaatgaatctgttaagtcaagccattcttcctgtcagggcttgtacttcattaggcttcgtcggtgatggcatgtttattaatgccttaattttttttaggattcgcctcaataccccttgcgttaactatgaatcccgaaattttcctgaggaaactccaaaggaacattttttcaagtttagcttcatgttatacttctttaatatcttaaagcatttcgcaatgtctgaagtatgatccttacttttgattgattttaccaacatatcatcgacgtaaacctccatgttttgccctatttggtttgccaacatttcgttcaccaatcgctgatatgttgccctagcattttttagtctgaatggcatgactttataataatagagtcccatgttggttacgaagcttatatgttcttaatctggaacgtacatttttatcttgttatatcaagaatatgcgtccataaatgacataagctcgtgcgcaagagttgcatccactaactggtcgaacctaggaagtgggaaacaatctttcggacaggccttgttcagatcagagaagtcaatacaagtt

SEQ ID NO: 273371 - DNA, 755 bp, Cannabis indica
gataggtgtggatcgaaagtccgatagagatatagctttaataccatgttgagacatgaggttctatctcaaaaccaattggtgatgagtggagtaatccatgttcttatatatgattcaatatttttacatttgatcgtgggacaatattgtccaataatcatggattcaaatctaagacttctaaaatattagtaaattgtattaccattacgctatacttaaaaaataaataaataaaataattgaaatgaaatgaaatgtaaaggaaagttatttatacaactatatatgtccataacagagtaacaattggttacaatattgtaactaaattataatagacactaacatctgaattagctccctctaaccaactctaattaactagtctttaattactaaaacactttattcatcggtggtcgaaagtggcccgtatgtgtcggaaagaagatacaaaggaagagagagagagggcctggggtttttagggtaggcaattctcatggtggcctctgttttgtttgtcatggaatgggttcctagagttttggggcgcgttgggaagcctatatatggtggtactggtttcgatattcgacaattggagggggctagattgggtaatgagccacacaagaaggaagagaaaaatcgggtgggaaggagaaaataccaagaaatgtttaaatctagggtttcaaattattttgtttatcattagtacccttttttcaaaataataataataa

SEQ ID NO: 273372 - DNA, 804 bp, Cannabis indica
ctcttagagttgggtcctggattcgggtaccgggttgggtgaacatattgttcgtccagacccccccttctattcaaatgatctatgagatcatgagccgtccccagtctgttgaatactgaaacactaggctgtctcagtgactggttgatttggccggtatgttggccagaactgtcagtttggatggagttattaggtataactccacttaaggaatcgccagataaggtttggccgcctaccacttggcccacagttggaacctgtgaccggggattggacggctgaccgttaagagtctgggcagtattcccaacaggattttcttctatgccgcccaatgggatactagacatagcggttggttgctgattaacaacttgataggctttccgtatcagtacggtagtctgtcttgttcggtccttgatggctgcctgctgagccttcaatgtttccatctccctatccctccattcaatgaaccgacgcctctgctcttcgaacgcaaggttcactgcagtacggagctcctcctgatcatgatgtaaggtattagtatgaccttgcatgagtccaagagcattgtggaggttttggatctcggtatcatttcctatggtcgtgtgaacattggttgcggatgggattccagtagtgtgagtaccctgatcggctgtcgaattagtataggcatggcaaaaagatccattcattcgggtcaggtcagtgatccgatctgacggatcattactgatccgaaacattcggatagttattggatcttggatcagatccgac

SEQ ID NO: 273373 - DNA, 1508 bp, Cannabis indica
tccgaggaagaagaagacgaaaaatagagagcatgtaagctgttggtcggcgtagagaaagaagagaacgaagaagaagatggaaaagaagcctgcgatgaaccatcagatttgcagaacaacgagctgagccgcctaaactcggggcgtgaagatgggagaagattgagtttggtaaagtcagtacgagtgagtcgagggaggaaaggagaagggttggaatggaatttcaaagggattggagacgaagaagagaggagcctttccatggcttccttctctctctaaaactctctcctctgtctctgcaaacaatagagagaaagcgaggtggttgaagaagaagataaagtatgggtaacagaaaactcacaattaggaaaatttatttattttattttattattaatttttcaatttatttatttatttttaaaataaacaaatgaagtggaaaactggaaaatacattcatcctcaaaaaatagaaaaataaaaaataaatacatacatactcaataaaaaataaataaataaattcaacattatatttgaattaaaaaattataatatattccaaaactaagtaacatattttatttatcaaaatattaatcaattttgtcaatgaaatttcgcttaaattttaaattggtgctctaataatttttttttctttgcaaatttacaacctggaaaattaagagataccacatgcaaaaatataactaaccgttgacttttgaactaagtggttttttttctaacaaataaagattaagataacataggtagctaccctttaaccaagtttattatttaacattagtatttttgttatttaatttgttagtgagttatttatgttaagtaaatctgattattaggttagcaggtatattagataagtatgctataaaagttaaaattagttaagtaaaacaccttctctcttcaactcactctctctctctctctcaccctcaagaggcaacaaggaacctggttttcagctccaattcagaggactctagcaaggatttagtgtttcaattcatggtataaccccttagcaccattctctttgattttcctaagttctaagctaggttttgtgtttaattttagagttagggttgttgtagttatgttttgcttttatttgagtattttgaagttatatcgatgatagttaggggtgagcatcatccaatcaaatccaattgaaccgaaccgaatcgatccaatctaatccaattacaaaaagttggatatccaattacaattggattggattggatgctaaaagttggattctaattggattggatcagttattggatgtcaatctcgaaatccaattaaaaactaatcaaatccaattacatttatatatattaaaaaattatttatataataaaaaatattaaaaaatataataaatatttattagattttcattagattttttttttatgttgaatttgtaacacttgattgtttagtgt

SEQ ID NO: 273374 - DNA, 631 bp, Cannabis indica
agaaaccaaaattgaatcaccaagcaaaacttgtcattaatgaacaagctttgagttccaagtactcaagcttggttctacccttctatcagctgctatctaagcttttgaaacctcaaaaaaatttcatttaatcctagaaacacttcagtaactattttctgaatacaaagctctctctctcattcatttttacatcatttttatcactcaatactcaaggtttctagccataatatcgttgacgagttcttaccgtcagtcaatagctaatgtcattacacataaattatcagttcgtgcactcaaagtggataggagactagtttagataaatgatttttgatattttttcaatgtattaaattctaattattttcaatgaatgttcattattcaaaaataaaaataactggttacactagacatgtaaagtacctttaattctgtaaaacggtttaactaaatggtgttctctatattgcaactagacacattaattacctacaattacttaaaaattgtattattacctagttaaaccaacacattaaatctattaattaatggtaattacatcgaaatccaattatcgagtgagagcacctcagatatgtaatgaattgtaatt

SEQ ID NO: 273375 - DNA, 834 bp, Cannabis indica
caagtttcccacatacggcgccaaactattttagccaagaacagtcattattttttttgtgtgagttctctctttttcagttcctaagctcaccccttttttacgtgggttctttttttatttatatgatacgttctttgattgcatggatgacctgttgtttacttactcttctcttgacgcgtgtccttttcctctgttccttctaccttgctacgtgtccactttttagccaattgctatttttttttcttttgctctctcttggtccgggggcattgtatccttcttttgaattgtttatctcgccctttgtagactacatctctttttttcgtcggaattcctgttcttacctaaggcgaattgggagatcgtgattccgcacccttattttggtgtctcttccagacagaagtatttgccccttactaaggtgctatcttggtgtgttgccctattatgctcaggagacgagttttccgtcggcaagccgatcggaggactccctttgggtctcccttatctttaatatgtcttgtgcctagcccttcctccgtcggtaagctctggttctaaccttccatctctcttttctatagttttcgtcggcgtttatttctcttccttgtcttttgtgctttttgtttgtatctatcctctaggttttttgttgggctgcacagtgttgggcctttttaatgtactcggatcttgggttttgggtacccattctgtttgggctttttaacgcttttactctattttattgggcttttactttgtgcccatattttttcccccaaacaatagcttgactaaactaaaaaaaaa

SEQ ID NO: 273376 - DNA, 742 bp, Cannabis indica
ttggttgtctccgagcacgcgttagcgttgccctagtccgagaagaagagaaaactcaacatcccgtgtactatgttagcaagcgcatgaaaggagcagaaacgaggtaccccatcatcgagaaattggttttctgcctcctaatggactcaagaaaattaaggccatatttccaagcacatccgatcaaggtactgaccaaccacccgctccggcaagtcctccaaaaacctgaagcatccggaaggctcctcaagtgggcaatggagttaaatcagttcgacttacactacgttccccaaatctccataaaaggccaagccttggcagacttcattaccgaatgtaatgaagtcgaggcaaccgcaaatgcgccaacaccatcgatccccacatggagagtatttatagacagagcctccaacgaaaatggatccggagcagtggtggcaatgatatacccgaccggactgcgactccaggcagccctacggttcgacttctcagcttcaaacaatgaggcaggatacgaggcgttgatagctgggttgaggctagcaaaagccgtatggcccaaaagagtggaggtctacagtgactcctagctggtcgtaaatcaaatatcgggagagtaccaaacaagcggcgagcgaatggccgcgtatgtaacaatagtccgggagctgctccacgagttcacggactacaaagtagaaagaatcccccgggaaaagaacgctca

SEQ ID NO: 273377 - DNA, 764 bp, Cannabis indica
caggtacgcatacctaattattatatattattattgtattctatgttatatacaaattgatcttcgagtttatattaatttttttatcagtcataactttataaattaatttttaaaatttccaccattgcactttatagtaattaaataaaatagtaagtactcccattatctttttcttttttcttttttccattaaaagaatacaaataaagcacttgcattaattattgcaaaatatgtaatttttcctaagaatttagtaactaataagagttatccatatagtgatgcatgaacagaaaacccttttctcactgatatcttaaaaagcttgtaacctcaaaggacccgccagtttttctattcatctttttgtatagagaatccactttctcattcatcaattaaaaaaattcacatatatatgttatacatatagttattaatatatttattctaagtgatagaactacaatcattgttaaagctttttctccaaacgaaaaagtaccgcaccatgcaaaaaatattctaccaaccaattaatgtttatatgataatttctgaaccagttagggagcccactatccaatattataaagcacaaaataaagattaaaaaaagatatttttcatatttttggaggatattaatttggacgactactataattatagaataactcttagctatttagtactctaatcttggtactcgatgccaatgtactcgaacatttaaaagggttgaataaaagaag

SEQ ID NO: 273378 - DNA, 719 bp, Cannabis indica
aaaaaaatagtgtttacccgatattccagggaataaagaatatttggtggttgttattcatcaatgataactaagtagccaatcattttgtcgcattctcaaaagactgactcttctcttcatcgttgataccattcactgagagaagctctcggtcgtaaaacttaaaattttttctcaaatcttttatgctctcctagatgtgcctgcattaaattgttaagtattagtgtctttaataatttcactggaatttgatatataaggttaattagattaaagaagagtatacaacattccctagttgccgatgaagtcacacaatgtaacctgttgcaaatcctctccagataacgtgatctggagacgcggtgctatgaatcattggggcacaggaattgtgattatatcacgtttatctttgattcttagaaattcagcaaccatctattttagtgacttaggcattaaatccatgaccttttgtgagaataatttatcttcttcatcatcatcgccttgtggagaaggcatgggacctttccccttcgacacatcacgtcttgatggtggttgagcgagtggaccctatacaaaacacaccataatatatcaaattttaacctaattccatcgaattttcgatagcataatgactgtaattgaatgcccccaaaaattttaaacatgcctatataatgacaaataacacagatata

SEQ ID NO: 273379 - DNA, 908 bp, Cannabis indica
aagatcccttttcttgtagtgattgaaaaattgatgttaatgcttagggaaatgaggagcctatttcttattcaagctagcatcatcattatattcttgttcgtgagcaacgactttaaaggtgaaattataagaacaaagatccgtataagcaaattaatgaacttaagttaaaaattaattacttatcaagatctacttgttcagagaactagttacatcttaggaacttggaaaatagccataatgcttgtcttgctaaaaatgaaattttttgaaagtaaaggagttgagcccctaggctctaacatggagacgacaatgcttgccttttcaacaagccttcttctaaaagaaaaaaaagagacaaaataacaagatgaaaggcttttcttttttttttgtttacatgacaaaactaatgagttggttgtcatcgcctatgtttgtttagcaacttttacttcgatggttcaaaatagaggcctcaaactccaaattagcaatgtgtccctaataaattgagtttttttttgaataatgagcattgacttaagccttttactattatttgtaaggataaagcagtttctaaaattcatgttcttaaagcttcatggtgtgatgattttacttctttgttttatcatggttactgggtggtagtggaccttgatatcgtgaaagtgtgcttagaggtgttgaataataatgttggctgcacacggtttaccacactcttctgtacgcgctcatcaaaattaaacttcttaataaagttctagatttttaacctagttgttggtgtaaaatgtcttataagattattgttgtgtctttggcaaattgtattaaaggtagtttggatctggctatttctaagaatcaaagtactttagtttatttat

SEQ ID NO: 273380 - DNA, 586 bp, Cannabis indica
agttgtctccctaactccgtcaactcttaataatatatcatataagtacgacataatcatataataaacctcggaagtgaattaaattattagaaagaaaagaaacatatgtttttgttaatcacaataaaaagacctccaattttatggtaaatactgttaaaaatttatatagtagagtaaatttcttaaaaaattactctagtagattcttttctgttttggtatctaaagaaaaaaattgtctaattgattttatgattgcgtacgtagtattatttataattctttttagaaaattctaaattatttacaatgctatgaaaaaaatttataagatcaaaaaaaaaaagtttcaacagttacttattatggtagtaagagaaaatagttgtgcgcacaataaaaaatttacatgtaatcttaaataattatgatatacacgatcttaataaaaaattagactaatttttttttgaaatttttacatgaaaaatctattttacacaatttattacacaattactcatacacgcctatgtctacatttttacttacaaagttggttttattacacaaataccac

SEQ ID NO: 273381 - DNA, 1941 bp, Cannabis indica
tatacattatacatatttatatatgtcaccgaaacaaattaatatataattaattaagcacatttaattagcagtcaaatgggtaattggctccaacccatatagtttcattaattcaaaccatttcacgagagatgaatgggaggattaatctcatcatatctgaatgaatctaccttgttgtttgtttcgtttcagatattttttactattgaaaacctaactttggctcagagtttgaagatatatatcaaatttagggtagtatctctaaaattgtatacaccgagtttggttctattactttggtttcgttttaaagtataattctaatagaataaaatagtggaatgattatttatttcgaaatggaaagaaaaatcattccgatgcaagataagaaaaaacttaataatttttttatgttttttaaatttgatttcattccattcctattcatattcccattctcatttttatttctataatttctgatcaatacttttgcatttgattatttgttgtgtgtagaggcaccagtaccaatattagtgcaacaaggtgaaaattcatcagggaaagaagaagtgaatgattggctttatggattgctggcaattgggacattaggaaataatgacatcaataaagaagatctctataattctgatcctcatcatcatgagaccattaataaaccaccaccaccatcatcatcatctttattattaagagacccaaaatgtgaggctgatgatgatgatgaggaggaagatggaagcttggagctacaaattgatttgaagtcattaatattgatgcatgataaggaagcagcagcaggtgctactggtgatcatccctccttggaaagatttctaagtagacaatcacagtcaattttggaactctgtaagagtactagtaataatactagtggtacaaccttagctctcaacagaggaaaagatgttactacggacaacactacaaaaaatgcaattgttggcaagaaatccttttcttttcttcttaagaagatttttgtttgttcaagtggctttcctaactcacctcccactccaaaatctcccacttcagaacaaagaatggaaaaggtaaaccaaatacgatcaaatatttaattaatcaattacttatgtcatatttacatactatatatgctttttaaataattattgaatttgatcgaaaatgatgtagtttaataatttttttacttcacataattgatggttatttaatctgattaatctaattcagtttttagtatactttctacattaattattggtcattaaatttacgaagttgggtgtccatattagaagtgtatatatgcatatgtcagctagcattgttatttattagtttgtatctaaacattataattaatttaacttgttacagatactaagagcaatacttcacaagaagatatatccccaaggttcaagtaatccatcattgtctatgaaaaagtacatagagaatagacataatgaagacgacttaactgatgaacagaaaaatgcagtactcaatggaagcaaatgggtcaaaactgattctgaatgtaattaagcttttacaacattattaccatatacatgcctattttcttttatgcattttatctaatatatatgtgaaaatcgacttctttctaatatcactattattgagaaagcttccctcagattgtcgagcatagccattttgcaaaagattatcaaaaagagatttgtgcaaagtaacttaaaaataattatctcgccaaacacttgcttcttgtgtttgacaccttatttttacagtcactttgcacaatacattatttagaaaatttttttttttttattttgacaaatgactattctacaacattcttagtttaattaagaaacaaaaaaaaactat

SEQ ID NO: 273382 - DNA, 1090 bp, Cannabis indica
tctttatctcaaacctaatcgcaaatacaatggtggtacagactcgcaaaggcgtggttgatccagtgaatccacagacagtcggatcctgcactgcagaattcagggaacacaagggttccaccagccacgaatcctggacagccatcaactgtaggtcacggtgtgacgacgtcctgtaagtgaaatcacgcctggtgtgcaagagactaggaataccagttcagcagccaacgaggtattcataacacagccgttccgcccgctaccaatgttcaaacaactattggagatgacactgagatccacgaacctccgtgctgctcgttggagtcatgcagggtcataccaacaccctacataatgatcaagaggaactccgtgctgcagtaaatttcgcatttgaagagcagaggcgcatgttcgctgaatggagagataaggagatggaaacgttaagggctcagcaagcagtcattgatgaccgaactcgacatgcccctgtgttgacacgaaaagcctattaggataccggacaacagcctgtaactggcatccccctgggcaagacagacgaagatccagcgatgaacacctctcagactataaatggccagccgcccaatccccggtcacaagtttcacctgtgggccaagtggtaggcgggcagaccttgtctagaaattcatcaggagaagtcatacccaataattccaaccaagttaatggtgtcggccagcaaattggccaaagcaaccaatccctgaggtagccaagcgtatctatatttgatagattggggacaactcatgatctcagaaacgatctgaacaggaggagaggattggacgactaacatgacgcgccaatcgtatagcccagaacccgcgctcagaatcctgctcaaagagatgctgacgtgactcagtcggccaagaggccgaacaagttagtccagttttgcaggcatagttaaacgacctaaaaaatatgttccaaggcctggccgatcagaggaacaacgatcttgagttggatcgggcacgtggaacccctttctcccccgagattaatatcctagaattgccc

SEQ ID NO: 273383 - DNA, 1473 bp, Cannabis indica
tttactttaaaatatttctatttttgggtttttattttttttagtgaaactctatttagttataatctcccaattagaatataatttagatcaagtatattcttagatagaaattctaatgtatatatattaaataagagtgcagttaagaggactcgaaccacccaacccaccacaataaaaatgctaaacccaaggcaccaatacaaataatggtagcacactgcaaaatatattaataataagatatgtactataatacgtttgttttcaaaactaaatgtgtgctcaatagggaccgtgtaaaacaacagtcttcttgccatttataccaacgttgtgctgtacttctgcgtaaatttgttggctagtaatttatatatgttcatttacaaaaaattatatatggtcttgtttttgtctgctttacgtggatactggatagtatcatttattagtttgggcctttctgcgtaggggccgtcctattcttcggccggactattcagctaatgatgtttttagagaaatgtgaaagagaatgtaatagcaattttttcgaaacttacaaaaacactgacttttaactcaatttttatacaaataatgtcatagacagaaattacttttatactgtcttagttaaattttttttaaacactaaaaaaaaataaggcatccatcttttacacccacggacagaaccaccataggaacaccaaaacaatcgaaaaataatcattaattccggtgagatttaaaaaaaagacaaagtgaaatcggcgttaaataaatgatcatgacaaaataactgtaaaacaacactaaaacaaatcaaacaaaataaaaaaaaaacatgattaaaaaaattacaaaatgttctgcagcctcaatacccaatgcaatagcagttatatttgcaaacttaatctgaaaaaatcagaacaaaaaaattactaaacaacacaaaaataaatgtaaaacaataagcagatataaccacttaaaaaaacataaaaaaaccacacatctcaaaactttttttccaagtgagctcctcaaatgtattttgaggagaaccaaaataaaaaaaaataaatcacaaaataaccatagagaaggaagaagaaatgtattttataacctccatcttccacacacacacacggataaaaccaccacaataccacgagaacacctagaaaacaatcattaattccagcaagatagagcaagaacagtgaaatcgacgttaaaaaaaataaattatagaaaataaccataaaataacatgttgaccgaggttttcggcaactaataaaataataataatttagagagctgtaagaaattaagagagagatttttacgtggttggggcgttaatgagccttagtccacgagtctgtgtatttatgatagtatttaatacagagaatgttcttggtaagtttttactcttctagttcttat

SEQ ID NO: 273384 - DNA, 607 bp, Cannabis indica
gaatcaattatatattctaaaggaagtagctaactaaaaatctgcatttctcattttgtttttggtgatttctcaagtatcaggcgttaaacaattgaagttttccattacttaatcttacccacaaagaggtgggtgggtctttctacacaataccaaaaatcgtcatggatataatccaagaaaatagggttctaggtcttgctaaattaagtggagatggtaaaagcaccaatcagttggaagaatacccactcggttcaagtgctatagctccttaatattaatcatcaaatggatctcaagagtcaagagtaagcttactcttgtgcgatagagtaaggcttggaatatatgcttcatccttgttgtgtttgttattggtttcatcacatagatccaacaacgtcaattgtagacctaatgcgtattattttgttatgacttaaatatacccaattatattttactaaccaactatgataacacacatattactttaataaaacaaatcattcccatgatcatatatttagatacaatctaaataaaacaacaaagaactaaactctaaataaaactaatatttacgtgcctcggcacgtaa

SEQ ID NO: 273385 - DNA, 1095 bp, Cannabis indica
attcttaatattttatgtaatttaattttgagtttcacatattaattttaatttaataattattagaattatttttgtgataatttacattataaaataattattgtaaaagtttagaaataattaataagagaagaacattgaatttaatagttgaaggaagcattatttttttggccaaaaactagagacaaaatatctattcaaacttaatattttatgtaatttaattttgaatttcatatattaattttaattttgtaattaattattagaattattgtttgtgatgatttacattataaaataattattgtaagtttagaaataattaataagagaagaacattaaatcatgatgtggcattggaatactcttcaatgtagtgatatcattattattctatatatatagaatagggtgataatatagctatatcctatatgtatatgtagggttttgcattattaatcgacatgacataggaaaaaataaatatatattcaaataatttaacatgaataatatatatgaatttcaaaaagaaaaaaaaacaatgaaaaatatctctatagtgcatatcttatccaatacatacctagctaagtagataacatactaatatattctcaattttttaactaaataaagttaaaaaaaattaaaataaaaagttatttttattgttattaatctccaattattttccctaatttacttaatatttgattatttaaatttttcaagtataaattaattttataaaataataaaaaaataatagtgtttttgattaaaatactattaataaagtttaacaaaaaaataaataaggaggtccttacaatatatagtgagcttcttcatttttctattatagagctattttttctatggttgaagtttattttttcaaatctcgctccttattttagctaaggagtgtattttgagagcttcttataatagtgtttagtctatttttatttcatgtcaagtcgtgttgatccgtttttaatctacgtctaattgttacgaccctaacctgtaaaatttatgttctagttttgccacccataatcaatagcttcgat

SEQ ID NO: 273386 - DNA, 787 bp, Cannabis indica
aagatttcttctggcattttcttaccgcgtttttgttttcttcttttttggccctccctaaatatttgtgacaaataattaggtaaaatatgttgctgctggcttgctgcattctgcatgtatagatggtacgtttgggttttgttacggtgatcatttctgtaatgtatctttacgtctttccataataactttaggatactatctttgcatactagttaattttcctcatttttcagaaagtggctcagcttttgtatttggagaacgaccagcagatagattggtaaattttatttcttcatataaataaacaattagatccgattacttgacttggttcataaatttgccattaattactagaattcctttaatttatttaaatagggtttcagagagaacagcgaagctacaccctccttgattgctgaacttccttattctgaagaagttgcttgtggtggctatcacacgtgtgtcttatcaagtactcttctgtccatcatttattatttattacatacgcaatgtatctttatcttttctctatatacaaagtacggaaattatttattacttttttggagtggatttaatagaaattgttaatttaacggtttgttattttttgttaaaattaatggctagaactaacactgttacaaaaaaattaatttaaaaaaacaaaaaaaacaatgtaaatctaaaatttgaaaatatgataaaatccaaattagaaaaaaatacatgacagaatttatattaaaaaatgatacaaatctaa

SEQ ID NO: 273387 - DNA, 791 bp, Cannabis indica
caaactaaaaaaaaaaaaaaaaaaaaaaacatcaatttacacaataccataaaaaaaaaaatcatgctacaatatttttttcatgacgatattcgttaagcttacaatattattcctataaatttttcgaaaaatttacgaatagtttatagtaccgaaaatatatttaaagttttttgaacacgtgtagtaaactgaaatatcaagaactctatatattcagtattgtaaactattcgaaattttgcaaaaatttacaagaatgatatactgtaactttaacggatcttgctataaaacaaaatttaaaaaaaaaatattccaacatgtaatttcagacgtaaaaattaattaaaaaaattataataagatattgtaatcaccactcctcactatttatcaatccttttttattaatggaaaataatagtaatcttgatagctattaatatgtaataatttgaagtaatgagatgtttgcctaattcttatgaaaagaagtgcactaaaaactaaactaaaaataaattatcaattggttctctcttattgtagaattgtcaataacaaaaacaacaaatagcatattgtatatagatatttaaaaaagatgatcacataatattctattaaccccaaaacaaacaatgtagagtttgaattatttaattattagcaccaaaataattattgattaattatcatatctatctagaagtggtcattgtttaccaatgacgtatagataagcagattctcagccatataaatacttaataagattaattaat

SEQ ID NO: 273388 - DNA, 1350 bp, Cannabis indica
tagctaaaccatcaacaaagatagtaaaacttcgagtaatataaattagccgacaattagagtcaatgaatttctgaaatacggcacaccaggctagagaacataatgaatttcgtgttgagtgggggaaaacttagaaaacttcctttggactctgaccaagagacctccgatatcgtcaattttccctgtcaaacgacactggtttctcagaaactaaacctcagtgaaaatgcaggctgcaattttcaagacctccaatttatccttgccaaccaagccttcgatgagattccccagaaagctgtgcatattattacctgaaacctgaatcgaatgacaggggaaagaattggaaaccagatagcacgaaccagggggcactccttgaataagtgatttctggtttctaaatccatttccagatatctcgagcgtcgttgaagcgatgctcttgatctaacctataagcacttttgacagaaaaatgtccattgccgttgcttttccaaatgatgcaatcttgagaagacaagggaagtctaggaatcgcaattgttttccttcccaagtcttccccgaacacattaataacaagatcatcattccactaattccccaaatacacttctgaaacatcagatactttttcttgaattcgccaacttgcagccacggaatccaagacttattctgcaaatcaacagtaaagatcaaagtacaagatcccttctccataatattttgagtttccaagatacttttccagatgatagaatcactatgtttttgttgcactatccataagctctgatttcagcaatatttattgagaagatagacgacccaaggcttctcttcacgattagccaagctccaagcaagtttccctaataaaaatgtatgtttttttttttgttttacatagatttttattttatttgaaaaaggaaattataactcgcacatgtcaagaaccattggaaattaatatacacgcttaaagtcaatgcaacatatccacaatccaattatcaataagtttgcaatacttagccttatctactaatatcaacaacatgtgctttaaaattaaaaggacttaattgagttataacgttaggcttggtaagggtagatgaaaaatattatttaggctcacctataccataaacttctccttttaaatcaccctacaattttcacaaacaatttcaatatcccccttttccataaatacataagagaaccttttatttaataactttaaaacaactctttctttttttttttttttttttctaatttatgacacaacattgccaaatttttctttttttttttcttttc

SEQ ID NO: 273389 - DNA, 686 bp, Cannabis indica
ccagagtagggttttaaatcctggtacaattttgtgtttcccggatgcagtgaataaggtgtggtgtgagcttcatcaagtatctctttcttaagctcatcgacactaggaacactaactcaaactttgtacaataacattccattattcgagattgaaaagtctctaggttgactagccattacctcatctcgtaccttgattagctcaggatcttctagttgagattttctaattctctctaacaaatcagattgcagtgttaagttgtgaaatttccaaccacaaactcaatccctgcactaaccatttcagaagctagttgaggggctatcaaaatcgtggtgcaaacctgcccgagacctcttctactcaatgcatcagccacaacattggcttgcccagggtgatatagaatttcacagtcgtattctttaaccaattccagccacctcctctgcctcatgttcaaatttttataggtgaaaaagtatttgagactcttatgatcagtataaatctcgcacttttcaccataaagatagtgccgccatatctttaaagcaaaaaccacagcagcaagctctaggtcataagttgggtagcgttgctcataatccttcagttgactaaaggcataagctatgactctgtaggcttgcatcagaacacatcccagaccctgt

SEQ ID NO: 273390 - DNA, 655 bp, Cannabis indica
gttctgattcttctgaataccatatatggaatacttaaaagggtaggtcaattggttgaggtcctttgggataccccacatgagaattgctatactcaaaagggtatttcatgtttttattcatgtagagggtttcaaacaccaaaagtatgtggttgtgatacaacaggctggatagccatcagtagtacaccgaagaatctaaacttttatcattttctgactttgaagccatatctcttttgaacagggtcgaagacgctgttattcgttacttgaaccgcaaatctgctggcactgatgctcctggaagcacttgaaataggattgttgaattctcaacaactgatcacaagcttatagaataggattattatactgatgttaacatcttcattttattttttctttgttgctgaatatttgaatactcattagcttttttagtaaaaatttgaagtcccatctccttgattgagttgatgggggtattagttgggaaggaggaagagagtaaaatttgattagctgactgacttgactgttggattagctgtaattggatgcagttatatttgattgtaataagaagaaaaccttctaaacaaattatttttaaatgacttgattgttgagctgtgattgcatgcaaata

SEQ ID NO: 273391 - DNA, 184 bp, Cannabis indica
atatatatatatgtataaaaatacaattaaaaatttaataatttaacatacataataaatattaatttagtctaacttaattttcatgatttcatattaaaactaataaaaaataaaatttattcaatacgcattgacaattttattagcgtttaggaagatgagaattaatattttaattaat

SEQ ID NO: 273392 - DNA, 1478 bp, Cannabis indica
aaaatagtatttaccctaaataaaattcactcaatgaaaaaagaatattcaattttatattgatcaagaaatttcgaggaagcacacctcaaaacttatttttcccattttgaaataattaacataattataataattagagacaactggatacattttaatgcacatatatcagtaatgccaacacattatacagtcacaaaatattaatgcacatataacagtaatgacaactcattacacagtcacaaaatatggtaattttaattagttaacacctattttgttctcttaaatgtatttactaatgtatatttgtagattaactatgtgatatattatattttattaaatgaatttatgctatgattttgacttaagtattattatactttcttaatttcatcttattaaaaatagtccccgaattatattcatagtattgtaaattaattattttattaaattttgttacacgtgttaaacataatgataacaaaaatgtttaaataattaccacatacgccacacgtataattaatttaatttaaaaaaaaatttaatttagttttacgtaatttttttaacctgattttttttttaaagtattcattaattgatttttagttattgataatttacaaatgcatatttttattttttttaattttaaattatatatgtagtgttggtataacacttgtctaaacagtcacgttatcgttctgtttgtcacatgtgacaaaactttgacatcacacaaaaagactactttataacactgtgatatagttcagggaacatttttaatgtgttttagggatacaataatgcatagctcataatttttgaggtaaaaatcttaaataacctaaaaagtaagatcaatgtattatattattggaatattgtttacaccaaaagtacttctgatgatgtggaccccaatgtttgacacatgacaagaaagatgacatctcagagttgagtagtcccaagtcatagcaagtcgacctgggaagggtcccctagccctacgctcaggttaacttcgggaactccggaatggaagtttgaacttcgataactcgtttctaactcactatcttttagtattttgtaccatatgaagacatggagcaaccgcaaatccaagctttggtagctgaaaatacatgaatctacaccccggaagtcaacatgggcacttggggtttcatccagcacccaggttgacatccttaattagagtttcagtttttgggactgtcttagtacaaatgggtaaaactttatattgggacatgaactagaaataccacaagcatatttaaggcatcagaatcagattcggagagagttcatttttgagcacccggtgcccgggcacccagcactcaggttgacaatttatcaatttaggtgacttccaagtatcagattgacgatccaacttttgcataatcttagtcttcatc

SEQ ID NO: 273393 - DNA, 799 bp, Cannabis indica
tataattatttgttaaattaaattaaaaaaattgttaaattaaatgcatattctgtttccaaaaatataaataaataaatatacatcattatgtaaaaaaatgtgtacaatttacctaattcatatgcattacaatttggtcacattagttatgatagactaaacatactaattaagggtgatttattaaaagatatcacattagatgaattatttatctctgaatgatgtttaaaaagtagaatgactaaacgtattttctctttaaggagaaagcatcgaacccactcgaatgatacattcagatatttgtggttcattgagactaagtcaaagaataatgcaaaaaaaaaaaaaaaaaaattattgatggatgtgatttgagagaaaaaggatatgcataagttttttttgcattgtttttttgactttgttattattgaacttttgagtctcaattttaatttttattttaaaaagaaatatcaaaacccatagttttaattaaagttttgggtcctaatttaaggaacaacttttaattatagagagaaaaggggaagaaaaaaaaagagaagtgatgaatttttgacaaataattataaaaatataaataaataagaaaataaatattaaatatgaatataaaataaacaatgacacattaaaaaaaaataactctacatagcatcctttttaatacatctacttgaatattattttaaatttttaactctttaattttatgaactaattttttttttttaaaaaaattaagtcgtatttaattttatgtaac

SEQ ID NO: 273394 - DNA, 693 bp, Cannabis indica
ctctctctctctccctctccctctctctcttaagatatctcaatcttatatgaacagagttctccaactcctaatttctagtcctctttccaaaagttgagtcaagattgtatttatagccttaggatcaagatcctaaagtcggtggcggcaagaaacaaggttgttaagttagttagaaaaataactaacttaaccaactcctcatttagcgaagtttccacgttagcttaagtgtcagggcctccaggaacatgaatgagcttctgaactcacgaaccaaaggcacttattgaagatgcttccggataagatataagtctattgaagtcgactattcaaaactatcactcctttctagggaagggctatctattctgaagattgatcctggagagggcatgatagtcatctgggaacacccttccggactcgactatcattccacaagacacctttcgagatcgataatagtgagtgaatagtttcccaaaaatgacatttgtagagaccttttcatttggaggaactataccataaataattccaccaagttacttcaaattaaaagaatgacgattatgaagaaataatgcagaattggacatgtgcccttcaaatatctcaattaccatttgagggctttccaatgttccatgcccgaattggacatgaacctgcttaggatactta

SEQ ID NO: 273395 - DNA, 2189 bp, Cannabis indica
aaagtcactttatggtttcatttattagtggtttgcatttagaaaatttactatatatctcttttctataatgtgtttacttcttcagctgattcttagttctacatgtgtatgtgaatatctatttatcattgaaactgagtagagttcatggtcgttatttataattcagttaattatttaggaatcttctgtctcgcaattttttattaatatatctaaagctcaatgactgtatgaacttgacagacatgaggattgacaaatccatattcatcaaaccaaaaacttttcatttaactgttctcatgttaaaactgtggaacaaggaacgagtagctgcagctgcgaaagttttgcaggtaaatttgagtttgataatagctggtgcctggaagtcagtactaactgataagctattcttttcttttccttccagagtgtctcttctaaagtgatggaaaccttggagaatcggccggtctccattagacttcggggtctggtaaccattccttcttaagttctctactaatgacttaacattgaaagatggaacagaagccatttggcttaaaatgtcaataactttaaaaaattgttataagaagaaataatccttcgtatttctacaggactgtatgaggggttctttggctaaagcacgagttgtctatgcacctgtggaagaaattggcagtgaggacagacttctacgtgtttgccgtatccttaacataagagaatttaatttattacatttcattttatgattgctgtactcgacttatagcagttaaaaaataaatgaaaatagtgtcctggtttcagtatcttttatatttttaaagtaatagttgatacctttgtagttttcttaactgtcttctttcttagaggtcattatcgatgcatttgtcgatgctggacttgttcttgagaaagatgcgaagaacaaattgaaggtatgatgttcaatccaaatatgattttatattaactccttcagccactgccctgctaatgaatttgattagtgcatatttccactgtgttacagtcacaactcacactctgcacatatggattagtacagccttcattttgttacactttctctttatcttgaggtatgtattgttgcattaagtgtttattatcttttcaaatttcagctgcatgctactgtgatgaatacaagtcatagaaaaaggtacacaattaaacttttgactcttcttctgttgttaatgcttacaagatatgttgaatgaacagaatgttttataatgttaaaatttattattcttaagggtgagatggtcaagcaagagagagttcgattattttgatgcgcggtccatttttaagcagtttggatcggaggaatggggggagtatgttatacgtgaagctcacctgtctcagagattcgtctttgataacaatggatattatcactgttgtgcttccataccatttcctgaaaaaatgcaagtagactgattttattgtacttttttctgtactgttcttatcataaactagtaccgagacaatcttcaactatatcttctattctagctttccctttctttacattgtaatttcctgaaatgtgagcccctacaaagctaatttatctttgtaaaaccttaataaacagttttatgtatgttgacaccaatgatgcttttaaccaagtctttatcaaccaaattatgcgactgtgatggctatttgtattctaggggatatatgatgacattatgtgaaactaattaatgtacaagctgctttcaaaaaaaaaaaaaaaaaaaagtaaatgtacaagttgcattctattcttattgaaagaccatattatcaatatgctaagagagatttgcagatatccaaagtatatgaaagaaatattttactgtgtttttagtttttaatttttaaaattgtgtttttaaaaataaaaatagaaaacagttttttgtcattttaaaaatttgtggttcgtaaaattgtaaaaaaaaaatatattattaaaaaattgtttttaaaaataaaaaataaaaattcttaacaaaacgaagacagagtaccacttcctgtcttgatctcgtgtgctaggttgtatataattaatttcatatatttaattagtattgatgtgttttatttcactcacaataatt

SEQ ID NO: 273396 - DNA, 545 bp, Cannabis indica
aaagaaaaaaaaacaaacagaattttttttatattatatattattacataaaaaaaaaaaaaaacatttaatttcaatttttttttacctacccgacatttccccccaaccccaccttcttcctcctgcaacccagcaacccagaaacccaaaccctccctgtccgaccaaacctccgcccacctccgtcaccgtcgacctacattccgcccccagcaactcgcacccaccacagccgaacccagtaaccccattcgacctccttcacagaacaccaccattcgactccgcactccctttcttctccagacccgaccgcacctcccagtccgacgaaccccccgccccacctccgtccttcctttctccagccgaggcgaacccagccgccgctgttcgacccccagaaatccgaacccacctcaaaacaaaaaaaaaaaaaaaaaaaaaaaccagacccgacctccctctcttcgaccaccatccctcacccgtcggacacactcaccaccgcccttctccggctgctccagtagtccgaaacc

SEQ ID NO: 273397 - DNA, 1229 bp, Cannabis indica
aatttggagcagtggttacatggtgatgtggcctgtagccctttgacttgggatattcgaataaagatagctattgggacagctaaagggtataaaagaattttcatcttcgtgttctttgacgggaactttattcatctcactgcattccagattggtcaatgtgaattctactattgatattctctacttgcatatggctaattagtgaaaaactaaataaatttagactacaaataaaataatgttttgcattggttcccctaaattttgggtttatatttccctgggtctttcatgattttctttttaacttctggttacaggctggcctatttgcatgaaggattagagcccaaagtagtgcaccgtgatattaaatcaagtaatattcttctggacagaaagtggaatgctaaagtatcagattttggattggccaagctactagggcccgagtcaacctatgtgactacaagagttatgggaacatttgggttcgtccttacttcgtactgccgaagctagttttgataattctaagttattcaggtttgaagggagtttgactaggtatctactctactctgttgtctaattttatcgtggttctgcagatatgtctccccagagtatgcaagcactggtatgctaaatgagggaagtgatgtgtatagttttggagttctactcatggagataattacaggaagaagcccaattgattattccaaaccagctggggaggtgacatcaagtatcctcttcaatatttcaagcatctaggggatattcagttttatgatgactgtttaattcttgaatttcagatgaacttggttgattggtttaaaggaatggttgcaaatcgtcgtggtgaggaggttgttgatcctttgattgaagtacagcctcctccaaggattctgaaacgggctttgcttgtttgcctgcgctgtatagacttagatgtccaaaagcgaccgaaaatgggccaaattgttcatatgcttgaaggagatgacttcccttttcgctcggtaaccaatgttttactaaggagccattttttttttaaaaaaattatgccagtttgctttagataccatgtagaaatatttgatattattgcaagaatgcattttaatactatgattttttacgtattttcccttcctcactttaatacacacgttcagttatctaatttgatgaactgcttacaggaa

SEQ ID NO: 273398 - DNA, 508 bp, Cannabis indica
ttggattctcattttgatcgaataaaaggttgctaaaatggtttccattttagatgagctcgagtactctattcaactaatgttatctttaactctcgcctaaccgagacactgtattttattatgttggaaaccttggtaaaattaaaaatacgttagagttttagtatttttgcaaacatatctgattagatttttattttctaaacttgtgtatgaatttattgaaccaaaacttacttctgattactgatatttgtagtgccgaaatgtacaacccacatcgaaacactcatctagaaattacctttaggtaaatgaatttgtaaagtgtgaataagactcctaaggtcagagtaatacttcacactttctcgtgatgaacatgaaaatccaaaaagcaactaagctgggaattcttcactctgaagaaacaaaaagttcatgactccgagaatcctactacttcaagctcaatagagaaaattagagaaagtgattccacttc

SEQ ID NO: 273399 - DNA, 657 bp, Cannabis indica
aaaaattgaaacataagaatgaattgtatatctatataggcataaatttatgactttatgaaacataagaatgaattggatagtttttctttcacaattcgttttcatatgagtataaatttatgactttttcctctaatcttttatagacatataaccatccatgtccataatttgagattgcttactggacagatattgcacaccccacccaacaatctacatatacaatatatatatatatatatatatatataaatacaatcacaaatatatatatctcagacaaaatatatatatatttgtaagactaactagtaatgccaccctgttggattaaaaaaaatcctttgtgggcacatatgtataatgtatatgctattataaagtgtgatacgaaattaagtgaccaattatgttatgggtatcaaaagggtattaaagtgtcatggaattaatgtgtagataccataagttaatttataatttgttgaggggccaaattataaatacccaagagttattctaagatgactctataaataggtagtggtccccaagaaacactagggtttctgtattctcctccttcccccatcagagaaaatactctaagaaaatagtgtattcttggaagatcaaaaccttctctgcaat

SEQ ID NO: 273400 - DNA, 1917 bp, Cannabis indica
ttccgttattaactcataaacatagacacgtggacgggcccaaatgcattacatttatttattttattttaaaatttgatattacttaataataaaaaaataaatattacttagtttttttaaaaaaaaaataagagagatacaatactaaattaccatagctgagtgaagcggtgtagtatacagaacatgataaccgaattgaagtgtcaatatcatgtaaaaattgttaatgagaacacattttttttaaacaagtagcatttagtttatgatgttaagaatattaagttttaaaataaaataaaaataaatgtaatgcatctgaacccttcacgtgtccatatttataagttaacggaagtggtagtaacagtgtaagagaattgtaacattaggtatttttgccaccaaaaataaacattaagtatttaagtgtataaaattagaaacattaagtatttatgccacaatttacccttcttataataacctcaattattatcctacttttaaatagaaattattcttttttgaggaaaacaaaaatatagtttcattttactattttatttttattttaatattaagaaagggagatttgaacttggaagttcttttttaggaggagaagtttgaaattattatattatacctatgataactaattttaactcttatttaaataagatatatatatattttgaaatagtattagttacccattaatcttttctctctttctaaaatgagctcttaatctaccattagtgtaatgtgatgatttgatgataattaatttaggtattatatatatgtatggacaatttagagtttttttttttttattattatctcatctctagaaaacataattagagtttttttattactttttttcttttaaaaaaaagcatggacaattagcttttcttttctttcactaaatatataatcatttcgttgaacatgataataatgatccaagtgaccgttcttattctatgctcttttcatgaacacattatttgtctactttttatttatttatttattattttttttagaagacatgaacacattatttattttttgcagaaaaaaaaagaaaaacacacacaccaaattcaaaccctatccttttaacaaaaaaaatatatttaattaattaatagttccaatcctcaccgaccccatatgtcatacactcatacttattatagctaaaaaaaacattatagagccagccagtttggctgccctaatcacatgctcaactgtataatgacaataatacccccattgtgagcaaagagctaattatgggtaattatgtaatttcgtaaacaattaagttgattccacacaaaagtatggagcgctccgatcaaaatgccaactggacggtgaccgtagtacagagaaaaaaggttaattaaagaaaattaataaaaaaaaaattcattctatttctctctctctctatctcttttctctccgaaaaatttcagaccaaaacagattgaaaagaaaaaagcggaaagaagcttcaaaatctcataatccatagggatcgcagctctaatcgtaaggttttatttatttatttattgattttaatttaatttgcttttgctggttttttattaaccaaactattatatgtagattttttagataatatttgtccgaatttcgaatatcggtgtttagagtcatttattgctgtttggaaattatgagctgattagagctcgaaattagatcaattcttatgtatgagggtttttgctcttagtacggatgaatgattaattttctattttggagcaatgaatcgagttttatatgtgtgtgtgtgttttgtgtttttaatttggactttttttgtaagtttaaatgtggttatgttgattt

SEQ ID NO: 273401 - DNA, 778 bp, Cannabis indica
ctatttttaagtttatttaaattcacttatattccattcaattatatattgaagaagtaaggaggcgtttaattgggaggaatgaaaatatagaaatgggaatgagaatggaaatagaaataggaatggcaatggaattttttcttgttacattggaatgatcattcctctctttttaaaatggaatagtcaagccaccaaaatggtggaaagagcattccaattcaatactttaaaatgcaactaaacaaaagaatggaataaaaattgtttcctttccattccattccatttcattacctccaaccaaacgcaacctaagtggtaatgaaatagaatggaatggaaaagaaacaatcttccttccattcatttatttagttgcagattaaaatattagaatgatatgtcattttaatggaataatctttttatttccttttgaaatgaaaggaaaaataattccaatgcataaggagaaaaaaattaataattttttttatcaattttttatacattttaaatttcatttcattcaaatgatcattctcattgttatttttatgttttcattcctctcattcaaatgccacttaaatgttaaattatgggatagtttagtatttatttaatcggatctcattcatctaatattttaaatttagtatctgttatattaaattggatccatcccatctaaataaagaaataaaatttttaatattaatttttatatatacatatatatttttgggaaattactccatatactattttt

SEQ ID NO: 273402 - DNA, 1304 bp, Cannabis indica
ttatttctcacgagaattataagaaaactagctaagtgtagggctcgaatttctagagagagaaaataaagagagatgctttcatattatgggcacttagaagaatataaaaaaataaactacaggagctcttattttatagggaaggaggtctatttaaataataacaaaaaatatgaaaaaaattcctttgggctgatcttggtcattgatgattatataatgatgaaaattaactcttgataaaaatcgtcaatttttgaacttcgaatctcgtccatcaaatcgtttttgggtaatttgctagaaaaatcgcatctttgttgaagacaaattttggacttgaaatctttagaattgcgttgtgtgtgtgagacatgactggatagatccttgaaatagcttcaatacacaagtttaatcgcgtcaattagatcaatataaagtgatttatgactgttttactgaaggttgtttagcacccttcgcccaggttgacaacccatcgcccaagtggacgccgagtgagtgccaaaacgtcccagatttgtattttttgatgcctaagtgattgtcgacaccacttagttagattcaatgctctgctgaagttattcaccatttctccgagatgtcaccatttagtgacatcgggaagactcgaaactacttgattttatcgatattccacattgttgaaagaatgaaatatcaaagtgtgaatttgacctgtcacaagttgtacctattgtttactaccaaaaaaaatagttgaatgctcgaaacagaattgaattctgataagtagaacctagcacaccagcagtggcggagggaagggagggcatgtggggtcatttgccccccctcaactttttgttcatataaatttttagatattttatattttaaccctataaaaataatttttttcatttatatcctttcatatttttacatttgtccccacaaaatttatattttttacttttattctcacaaaatatgtatttttttcaataaaattatatttttcatttagtgcttcaaaaaattttttttttgcccccactaaaatgttgggttggctccgccactacacaccagaccaagtgtgaacatgggcgctggtgcttcctgggctccttcccgagctcgttttgatacttctatggaattcaagattgtgaatgaggtctccttccccatttttttttttttacaattttaagaagaatgctcatagcaaaattgtggggtcccttttttggctccatggaaatatcatttgctcccttagatca

SEQ ID NO: 273403 - DNA, 705 bp, Cannabis indica
gggggcagggacgaagtcatgaagatccgtcaggatttgactgctgaaaggcggtttttccaggaggacgccgagccccgggaggccctgccaaggccaggcggagggaggcaaaagcggaggcgatgatctgggaggaggcccttcagagggacaggctggaggccaggcactaggaggagctgagggcggagggcaaagctactgcgaaggccaggcgtgagcttcgggaggctaggaaagccttggatgaaatcgctgccaaggtgaagtccttagaggaagttcaccaggcagacttggagtctagggccaacctggccgtggagctgaaggagctcaaggacctcaaagaccaggccttgaagaaggcaaagaaagatgagcttctttctcccacttcctgcagccggtgcgtcaagcgtttcgacgatggcgtctacatggcctggtctacaaatgaccagaatatcaagcttaacttctatcccaaacccgcggagatgattgcaaaattccgggagaagaagaagaagcttgatgccatgctggaggggcacattggtcctcgccttcctcctcgcattgactaggccgctcggagttcaacccattacaaccaagatttcactctcttttttcttcttctttttttttattttacagctaattatcctgtatataagacaatttctatttacatag

SEQ ID NO: 273404 - DNA, 1005 bp, Cannabis indica
agcatcatgaggacacggaacatacttaaaactcaatatctgactgtgtaatttctaagaaacatcaataaaatgagctgttacagccatatatcccctcttctaatgatttccagtccacatgtcactagttatgactattctactataacttttttctaaaatttgcatgcacatttctttctcagttttatacattttcataatgtcagacctaaccgtattccttaacactatttgaaacatgggacacaaagtgcttgaatattctattagcctgctatgctcaaccatagacaaaagatattcatgctcaacaatcatttgagccaatttgatccttattaaatcaagatcaaaattgaaagtaactgaagggcttgcagttgcactaggattggcggcaagttgggcctttcttactggacacctctctaagtgagaatttaaatgcctagtccctttagatctttctcccaccagcttactctcgcaataattgcaaattgctttaatttttccatcaatattttgccgtgtgaaatgatcccatgcacgagaggttctttttccctgtgtccctgtagtatgagcttcttctactgtattactaacagattgtacttcatttgcagttgatggcacaaagtcaatatcatcctcaaaattagaatcaatttaactagaccttttattttaacctacattaacaccatattctcatatctatcaattaatccatgcaattgctttaaaaatattataaacatatctacggaaaatggacaacatttttcctattttattaatctaaccatctgtcaatttcaactataaataattagataactcaaaatttttcatccttatatcaccgcagcacacaaatttcgtaaaacctacttcgctatggatgaatataaaagatattcaagctcttctatgaattatatgtaatagaataaagcaattataaaaatttatatatatatatatacctcctat

SEQ ID NO: 273405 - DNA, 1177 bp, Cannabis indica
ggcatcacttctctctcatgaaagccaccttgaacataatcatgacatgtatgatctctctgtcaaaatgtaggcaaatcttgcctttagaattggtagatctggagtctctcgaccattccccaacaatcaaacatgtcaaacaaacaattctcaacagtatactggtcgttagaggattttttttcaatttaagaacaacagagttgtgtgcaagtctgtatgagaacagatcacacagctgcaatgtgtcactatagatttgataaaaactggatcactccaaaactaggtggttcacataatcatgcatatctcacagaattggagttcgattatgattcacatgcctactcctctactttggttcaagattttggtgatgatcattcttggtagtgctacaaatcgcatcacattgacaattcaaatcttgacacgtttgctccttacctaggtcaagaaacctttgttgttggggatggtaagaagctcttaatctctcacataggttctgctactatatcatcttctttacattcttgtcccttgcatattgaatcagttttacgagttccatcaatcactaaaaatcttaacaaaccaatgataataatattttcttgaaatttcataaacactggtgttttattaaggacgaggaaacatgagttgttttggtcaaggagaagcttaaggatagtctttacctacgtggtgatgaacctggtcagcccaagttgtctcttcagtgtcaccttgctactgctatagatgttaaaaatcaatattcttgtaattcttcatttacatctgaacataaaagtgaagatcataatgattcttatattgattcatcaatcaataaaacttattgtttcccttctgtttactatacaaaaaagtcttatgatgttaatacttggcattgcaaacttggtcatcattctcactgtacacttagaaaattgcttcccattctaccacactcaggttctctgaaaatactattattttacaatacttgtcaataagataaaagtcatagagtacccttttctgtatccatttatagagctaaccaacctcttaaacttattcatacacccctatggggtccttcacatgtccaatcgagagatggttacaagtattacactttattcatggatgatta

SEQ ID NO: 273406 - DNA, 654 bp, Cannabis indica
cataagccctcctccatgggattcccgaactaacaaatctcgtaaagaacaattaggcacacacaacctatgctccctaaacaagaaaccctcatgcctataaaacttaccttcaccagatttttcacatgcaccataaatctccccaaaatcatggtcatcaggataaagttccttaatatgttcaaaaccaagtaatttagcatcaagagtagagattaaggcatacctgcgagaaagggcatcgacaaccacattctccttaccttgtttataccgaatgacatatggaaatgtttcaatgtactcaacccatcgtgcatgtctcctgttgagcttgtgttgccccttcaaatgtttaagggattcatgatctgtgtgaatcacaaattctttgggccacaaatagtgttgccatgtttctaaagctcgcaccagggcatacaactctttatcataggtggggtaattaagtgcagccccacctagcttttcactaaagtatgcaaggggtctcccttcctgcataagaacagcgccaatacctataccagaagcatcacattcaatttcaaatgtgttagaaaaattaggtaaagcgagtactggggcgtgagtaagcttgtgtttaagcagttgaaatgcctcctcttg

SEQ ID NO: 273407 - DNA, 505 bp, Cannabis indica
ttgcaactcctcccaatcttcattagtcatactctcaagcttcttttcttgcagtgcctttaggagcccttgttgtaccaatacatctttcaccatgctttgccataaactgatattattcttcccatcgaaaagcttcatctaaaattttgtggaagacaccatctttgacatattcgatgtagatctgaaccttggctctgataccacttgtttggaaaaataataaacttcaagcgatatgaaataacaaagaaacgaagcaaagcaatttacttagtttggtaaaactaccaaacccacaaagagagatatagttcacttatcacttcaaaattacatatattatctatctcaatctcttcacccaaattctaatataccatttacttcttcctcactctcaccacacaacaaactcacacagttatcatttcacaattcactatttttctccacacacacctctctctcatacacagaacacatatttataaagttacaa

SEQ ID NO: 273408 - DNA, 859 bp, Cannabis indica
tagaatgaagttgagacaagtataggtgcttaaaatgattagtcaatccccacaaaaattgaaaacaaaataaatcaaagggcttttatttatactccataacattttaaattaataattaaaaaaattacattattttctcttaatatcaatatttacttttattttattcacaatattttttaaaaaaatcatgtatattctttttatttttttaataaaatttcatataaatatttatttttaattttttgtttgaatatttaaaaatatttattttattttataagtatatttttttaagaatttgtgaaggaaaaaaaattaaaaactagtataatttaaaaaatatatatattttataataaatattattcacacacagtgggtgtggttgtaagatgcaaataaaactctctgtaaatcagtttctgcaacagatttgtaaattacagaaaaatcgcatatacagaagagaatatttcggataaaatctcaattacagaatgtcaaacttccaatttttttcatgttaaaaaaggaaatgcaaccactcaactcaccttttgctttgaagacaaactgggttttgttagttcttccttatagcctctgaattcagtttcactacttacctctcttttcaacccccaaaaaaaaaattaataacaatggaaaagaaagaaaaagttagctgagagaatgacaacttatcactttagagaaaaaagagaacagttaaaagaaaaataggtaggaaggaatctgtgtcggattcaatggtctgcgaaatgataatgttgattcccttttatagaattccacatttgcacccataaaacaagttagttttccacct

SEQ ID NO: 273409 - DNA, 555 bp, Cannabis indica
agactaggaccagaacccagacgaagaaccaaacccgaacccaaacctagacctggaagccaaaattagagactgaacaagaatcgttgaaccaggaccctaaattaagactaggaccgtgaccaggtgccggacccagacctacaaccgaacacagacctagcctcaaaccgaaaatgagacttgagctcgtgctcggacacgattgtgtacccacacaaaaacgtagacccggacctggacctaaatctaggacccgatatggatcgagattcgaacctggacttggaccaagacccagactaggatcgaaatgttggacctagatctggaccgagatcttgacccagagccaaacttggacccgcacttgtgacccaaccttggacatggacccgaacctagacccagatcggggttgtgacctgtacacaaacccggatagagactcggacccaaactcaaacccacacctagaataagacacaaagctagacctggacccgaacccaaactcgaacccagaccaggatcagaaccaaggacttagaccca

SEQ ID NO: 273410 - DNA, 1108 bp, Cannabis indica
ggtcaggttgtctcatcagcaaggacaccattaggcgtcttccagcaagtcatgacatgttctacctgtggtggaactggggaaatgtccactccttgcaacacatgttctggggatggtcgagttaggcgaacaaagcggattagtctgaaagttccagctggtgtggattctggaagccgactgagagtccggaatgaaggaaatgctgggagacgaggtggatctcctggtgacttatttgttattattgaagttataccagaccctatccttagacgtgatgacaccaacattttatacacctgcaaggtgtcttacatcgatgcaatcttggggactacgatcaaggttccaacagttgatggcatggttgatttgaagatcccagctggtacccaaccaaacactacccttgtgatggcaaagaaaggtgtccctcttctaaataaaaacaacatgagaggtgatcagctggttcgggtgcaggtcgaaataccaaaaagattaagcagtgatgagaagaagctaattgaggaacttgcagacctaagcaagggtaaggctgcaagtagaagatagttttttgtgtcgttggtttatttatatcattagttcaaaattataccttgttggtgcatcttttttggatttcggatgcacattgagaattcagctgttcctcagccgttgggaaccaaagatgcttggatggttgtggtcgtaggtagaattatcttgtgatggttttgtcatcttaactaaaggagtgttaacgaggaaagtgaaactttaaggatatatagccttccaatctgtattagctataaaattctacatcataaaatattctttggcattagagtaaacttcttagatgtcttgtattttttttttggttctgtttggatacaaaacaaaagtacattcagttagcctgttcttttcgtcaatcaccagtgatttgggtcactattttttataatcaaaacaatttttcaaaagatttgaggggttacatgttgtcagtgcttgttctttgttacctgcagctgttatagaaaaattacggtgaaacaaaatgtaagtttatcactatgtatggctt

SEQ ID NO: 273411 - DNA, 1005 bp, Cannabis indica
gagaaaaagttggcaactctttttaacctctgattagaagtttgaacaaattgttctaaaaggaaggagggatgggttattagaagtttgaacaaattgttctaaaaggaagaagggaggtcgggagggagggattatatgggacctttaccaaaaattccttttgccttgttgaaaactgaagcatatctatgtgcacttatggtggagtttgaacaactattaaagtgttttaagaatccaagggagttttatatgggagttttacaaaaaattctttttgctttaatgaaatctgaagcacatctatgcgtttatggtggagtatctttagggattggaccaccttcaccattccaactaaatacttatcttcacttctgaaattctttcatctaaatgctctttactcattctctaattatctctaaatatgatgggtactatcatatcaagatttaggatcctaacacattgtgcttgcacatctgatccaatcatctactgatatttcttctatgatacttgtccaggatgcaagtgtgactaaattaggtacagttccaagcctagtgaaaacttggaagaatacacaatgtatgaaaggcctagattggacaaaaataaagtaatcttctttttgagtgtttactatgttttgtcacatgatacttgcaagagcagtaactaaagaatgagttaatttatgcagatccttcgcttccacaggagaaacatctaatgttgatgatgacctttggctgtcttcgcaagcatattataagcccgttattgaatgttgtggagggacagagcttgcatcgtcttacatacaaggaagtctactacaacctcaagcttttggtgcattcaatactgcaactatgacaacaagctttgtcataattgatgaacatgggaatccctatgtaagagcatacatttcaagattgtttatttttattattcatcttcagtgtatggtaaggcactacatgaactcgc

SEQ ID NO: 273412 - DNA, 575 bp, Cannabis indica
tctagaacctcgtggtctccttgtcgcgggatcaagttgattctaaggatttgttccttgtgtcgccctggctgctggagtctctctttccaactcagcattttgtcgattatattcagctaagcgttgtcggagttgtctattctctaactccactaatggtacatacctagttggatcataagtatcctcacttctaggcacgtatttggttgaattattgggatcttcactccatctttatggattttgatcattaccaccatcaatcctccttgaacgtgaaattccagtggtatggggtctttgggatcccattggctcctttccagggcgacgtgtggtttctttaggatgatttccatcgttttgattgttatcagccattgaatatggatagatttttgtttgtaaggagggagttttttgagttttatcactaaggctctcaatgaaagcaccaaactgttaacgcagattttcgttaacaaaaaataaatagcctttcagtaataaattttctacaaaaaattaataagtaaataaagatataattgttgggttttgtgccataa

SEQ ID NO: 273413 - DNA, 893 bp, Cannabis indica
agtatttaatataaacacttaattccactcattttcttgttctatttatctcaacgcttcatccttatctcttcttgcaaactcgtaagtctttcggttcatattttgtttagttatattgtaatggtataaatattatgttatttttgtaggggtactgagtcacttcggacattgaagatgccatggactgatttatcaaatgatcagacaatatttgaaagtgtagctacgaaactgtccaacttgacttacttggatataagtcactgcagtggaattggagttgaagctattcgggcaattggtcatcactgtaagaatcttgaaagatttgatatgaactctcttagattttattacaatggtgagagttgggctgttagagttggcattccatctgaagtggctttagctatagcctccactatgccaaagctaaagcaccttgagattttttctatgcaacttggtaatgaagatctgctcaaaatactcaatagctgtgctcaacttcaatatttggatatttctgagtgtagttttttgaaagatattgaaattttgttgaagaatttctctgctttgaaggttgtgcctccatttaacgatgatgatgattatgattatgattatggcttttatgatttcgaagagtcttatgactacctattcctatagtactatgctctcaaatttatctaatataatagtattatttattttttattgtctatgtttttgtaatgtagttcagcttagtttttaagtaagatattttgaaacggacgttgttgttttctctcatcttctgaactaatttattttgttctctgaatatatatttttaattaagctctaatgtaatgtttattttacattttggtatttgc

SEQ ID NO: 273414 - DNA, 1100 bp, Cannabis indica
ccattccatctagatatcctaaattttgaatttccccaaggatttgaacccacatgttttgcagtacgacaggaccacagacccagtcactcacttaaacaactttaacattattatgcgagccagcaatgtcacgaataatttgcatttattcccgacctctttaacaggagctgcgagcagttggttcgaaaaattttactcatcattccataacgtcctgggagcaattgtccagggacttcaaaaagcaatttcaagtcgcaagagaccgacgacctaaagtatcatccttaaccaataaaaacaacaaccaagcgagtcacttaaggcttatttaagtcactttagcatagccaccacaaaggtcagaaacctgaatggcagtatacaactcacgacacttcaggcaggcataacaactgacctatccattgttggaggcaaattatgggatgatctccagggtcaccctgtgagaaacattaatgagtttaacgaaagagcataagtatttgtgcgtaaagaggaagcgagaaatgagatgaagctattgaaaactagctccaaaagtaaacctaccacgagtacggcaaaaataagcacgatctcgactaaattagacaatcctaatgtttcaaacacgaaaagaaaggatgattcgattatctaagaataaaaaaaacagaaaaggcatgacaaataagtttcgatttattcagtatacacttagttgaatgaaactcgtgagaacatatttctcgctaataaacatagaattgcattttgcaaacctaagcccatgaggcatgcgagacataaacgtgattcaacaaaatattgccaattttacaaagacatatgaatgtcgaaaactaaaggacgagatagaaagcctgatctcgcggggatattttagacaatatgtaaggcatcaaggaatcgagcctaaccagccaaacaacccaaataacccgaataaccagagaatgcaacctcctcctattgagggcgaagatatcttggtcatttcaggagggccgcacctcgttggaaatagtaataatggccaaaagaggtatatcaatgaaataaaaaat

SEQ ID NO: 273415 - DNA, 431 bp, Cannabis indica
aatcaatcagttttgtcataacatctttagatcagatgattactaagttttattttgaagaaaaatcagttcaggatcctatttgtacaattttagaaaatgcaagatttattttgtcatttaacaaaacaaaggtctaattaataatttttgcaaaacaaaagatgtaaaatagtatttacccttaaataaaatcattatggtattgacaaacataattccaagcaatatgacttgaacaagaagttttagctgagcttttccacaaaaaggctcgacagatactatttattttcttcaagatgtactttggcaagattataatttgtgcttagtatatataaattgttgttggaggtgcaaccaacattttacattgactaaaaatgagaagaatcgtgagtatataatgatagatgatagacatattt

SEQ ID NO: 273416 - DNA, 4673 bp, Cannabis indica
tttggggtttcagttcactagattttttagattttagggcttagtttttcacattttatctatatttagggtttttccacactatctatcgatatgaaaacttttagttttgagtctaattccagaaaaattgatctggcgtatcacttaccaatttatgtatgttatgacttaggggactttaaagcagcagctttgactcaggttgactggcacacctgaatttggattggaggtaagattagtgtaataattgtatatctgcttccatgtttcgcatacaattttatgattgccaaatatataacatacccataagagcagtattagtgtacgtaaagttacaccgaatagcgatggatatatttttggaaaagtatagattgatgctatcacatcggtatgattacagtaccgagtataagctgatattatggtcagctatattgtcgtacgaacgttccagacctggtacacggtggacgtggcataggattgtgattatgtgtatgggtgtctggttataatctggtttatgttttacgttatgattatgcttttcttactcagtctacggactcacagatattgtttttatgtgtagggaaaggctaagcaaaggctgagcaatagtgagttctggctgaatgaagattgtacatatcgaggtggttaaacctaaagcttttagatctttgggacaattgagttttattttgatggtcgctaggcgacgaattttatagtgaaagtattttgtaaacttttgtaactttaaaaacgggatctcaaatattgtattaaatgtatttatataagtttcagtttattttgaaaattttaattattcacgtttttcagcaaaccccttaattagcaaaggagtacaaagtacttagaaaacacaataatgtgcctaatctagtagggcgtcacaattaagataaaaagtgataaaaaaatgagtaatttacaatagaacaattactattgcattcaatgtcatatactatttcttgtcagtaaacaattgtttataagctatttttatagattaaaatagttgtttagaactattaatacaaaatactcataacaaatacaaacattgcaagacatggaatctctgcaaattttggtatagagcaatgatcattgggatgtcaacaagcactatgttgattacgaatgaagttgagttaatatcaagagattgcacttttgttgaagtagtgtagatatttatggaggaactacaatgcaaccctaaaacaacccaaatacaactgaagaaaggatgccaaccactctaaagaaacttattttacatgataccccttgtgtgtgaacacattcagcaacgtagaaacacaatccttattgatagctacccaaacaattgtgtgtaacaatctaataatgatagaaaatgacaatcactcaatgtagtcagatgtgcagtaaccttacaacaacacaacaataacaaataagcaactacaatccaccacaagaagaagatcagttccaaaagatgttattttgattgacactggcacattagtagcagagtcaaccatacaacaacaacaagaaaacaaccaaaagaaaacctccaaagaagcttaatattttaacttccccgactatatatgccaagcctgttgttaaataaattgtacaacaacagaagaacaactagaaaaaagaagaagaagttaacaacacaaagaagttatcatcatagatcgatgtcacgaaacaatagaaaaaggatagatttacaaagacaaagatacatggataagtgtcctatgctactttttaaattaagaaaatatttcaatacaagatatttaaatcttgctttaaagaatacaatattatttgtttggactcaaatggcaaatggattttaaaggcttaaaaaaatgaaaagatgcaaacattcataattataagttatgaagaagaacacacatgtgcagtgcccataagatttaaggatcaatgacaagcaactgcaaagttgatagcatattttgtaaaaccaaagttcctcaaccttaaaatgaaagtgcattccgagagatgtaaaaggtgaaatggaagaaaatacggtataaagatgaacaacatggaggcatggcatagtaaggattatgcactaagtaagctacatggaaacacttataacatcttgccaaaatacttgtacatgctactaaaaacaaacttaggtacaataattaacatcgaaaaagtaagaaaatgatagtttcaaatatgcatttattgcattgaatgctgctctaaaaagtttgacaaattaaaagcctgacatgattatcaatgacacattgctaaaggttgtgtatggttgtaagttggttaatacaaatggataagatgcataattaaaaatattctctcttgcatattgtatagttgattctgaaatgataaagcatgggactggttattcataaaatcatacaatcattcaaacttcgagaagatcaatgtctaatctctaactaacatgaaagcataatcaaagcaatcagaaaggtgttccaagaaataactcatggctacagcatctacaacctcttgtcaaacctcaaaacaaaattaaaaaaaaatatcaaagcattacaaagttccattctttgtagtagcaaaagctcacactgaaattgagttcgaatttcatatgagggtgctagagagcttggatatgcgcctaaaactgtatcaacagaaaattggctacgagaaatggtcaatgtctacacaaaaattagccttaatgacatggagataaatgtttaaaatgttccaagaaagatgacatatcaaagttgagtagtctcgagtcatagcaagttgacctgggaggggtccctagccctgcgcaaagattgacttcgagaactctgagatggaagtttagccttcaataactcatttctaactcactatatttaaatattatttgccatgaagacatggagcaacataatccaggcctcgagaggtaaaattacatgaacttgcaccccataagttaacatgggcacttagggcttcacccaatgcccaagttgacatcctcaactagagtttcagttttcataaatgtcttagtgaaaatgggttaaaatttacattggaacatggactaggcatatcaaagatatatttgaggtatcaaaatcaaatttgaagaaagttcatttcttagcactcggagcaccatgtgcctgggcactaagagcctcggttgacaatttgtcaatctaggcaacttccaagtatcagaccaataatttgacatttttatcatcttcttctttatcaaaaataagaagataggtatttttggggaagaaatagcacttcatgggtgctagaagcaaggcccaacgactgggtcacattgtggaaacccaggttgtatctaattacactttttgagaattcttctgagcatggtctcaattttaaacaaagaataagattcaaatatttttgaggaccaaattgaacttctgaagggctataatggggacccagctcctaggttgacacctagcagtcttcccagcgccaaggtagacatattatcaacttgggcagtctccaatcatgttctcgaaaaaaaattcttggatctttttccatcatcaaaaataatgaagatttagaaaactctagaaaaccacaaacctaaggccctggaagcatagcctagtgtccaggttgacctggtgttgggcccagcgcccatgctctcaatcaacccagtgcgctggtttcgatcatcctaatgcacaattcgattgtaccattcaatctgggattgtcaaaatggggtaggagacctcatcctcaagtttaagaaccttaaaagtatcaaagccacaactcgagagcccagaaatgaagtatcgagttcttaggttaataaattgactggtgcactgggttctacttatttgattatgattctttttcgaccgtccaactagtttttcacattaactaagatacataaagtcagagaagtcaaattcaaaactttgtatttctcattttcaacatgggaagaacactcgaaaaagaagagttttgagtctctcatttctataggtttgcaacatcttcgagaattagtgactagcttcgctagaacatagaaatagactcagtgatgtaaaaatatcaattagtaataataaagtacatcccctagaacattttcacttaccaagtgtccaggttgacatttgatgtcaacttgggtgctggaatgtcaacctccacactcgatgtcaacctgggcgatgggttctgataaactttcaaaaaaacgaccataactcacttaatatttatctaattgatgcaattaaacttgagttacaaagataattcaacgatcgatcaagttatgtatcacatttcatttgcaattttgaagttatcaattccaaatttcaaccctaagggagttagaaaaaataagctctagcatacccgaggcaggtcccgccatcgagacccatgttccaaaaattgacgatcaagctccgaagttaattttcaccattagatcatcatctacggtcaaaaatagccaacttatatttttttcattattttatttc

SEQ ID NO: 273417 - DNA, 1195 bp, Cannabis indica
ttctttggatgttacttactttgtcatcttcctatgtgatgtacttttgccttttcacagagaaatgctattactttatattgttctgacatatataatatattagttttcatcacatattttaacttaattgaaaatatggcactggctaaattaaactggctgctaaattactccaaatcacagtatatcatcatattcggtgatgagcttatcctgtgtcttagtaatattgttcttttcacaacttaaagtccacacaagtagttgggttattggatcaactcattatcatcagttatatttattttgatattgtctcctcatctacagttcaccaactcatctcacccatcttatgtatattttacgttgataagagttcaacaaattagtcttattgtgttttgcctccctacgtgcagacaaactctgtacgttactcgtgcacaaagtgtatattatcacatataaaaattgtcctcccatatgataagaattaatacatatattatatgtttttgcatgctagcatcaaataaactgtttattttgaatgcttgatctttactgattggtctcttataatacttctatttttcttttaattatatacaatatgcaaagtgaaagtacaatttgcgttaaagataataccaacgtattcatatgcacgaattttaattattttataatattgatatatgtacaatatagtacacacaaaattacaaataatctactcatttaaactatatgaaatacgtacaaacttagcttagacaactcattttacgctaattaaacacacatgagctcatatcaccattaaaaagggacaataaagttttatatatatgggtttggataaaatatacaacgaaattataatggaagaataaataagatgaataaaagatcaaaacaattacaactttaagttaaatattataaggacaatatattaaataaagagttacaatcccaaagtataaaatacaaataaaagaaaaaaattacaactcaaaactcataaatacaaataaatataaactatataaaaataaatatataatagtgtatacataagtgatgtatagtagatatataaaaaatatatataaagagtgtatagtatgtatatataatataaaatactatataatagaaatatgatataacatatacatataca

SEQ ID NO: 273418 - DNA, 776 bp, Cannabis indica
ctatttttagtgtgctaaattttgcaagatatcctaaataactacaacgtagacgactatgaaaaaaattagactaaaaaattattctaaatatcgaacaaataaagagtgtattagtagaccccttttaagaggtgcattgtagaattttttcatatatataaaatagaataattttatagtgcactttcttaaaatgattctttcagtgtattttttatctatttaaatatttagaagagattttaagttgaaattttatttacatgatatagttatttaaaattatatataatttttttgtataaaaaatgaatagctataataaagttcaaatattttattacacgcgaatatttatttatactcgtagtaaataattgtttaaattttattttcagtaatgtaaactatttaaaattttttaaaaatttacaagtgatcatcttaaaaaactacaccgaaattaaaaaaaaactatatataaatttgactaaaaatttttctagatgtaccaaaacaatattttaagaggggtgtacgatagtatagatttccctgtaatatgtataattaaacaaagacttatagtgtaataaattatatataaattaattaattaattaatcttaattaaaatatagttttctcagggacaataattaaaatatgttaagaaaaccataaagtaaatcagaaaatgtcgagctctcaatttcatttgtttgaaagttaaaaaagaagtacttgacgttttgtataataataataataat

SEQ ID NO: 273419 - DNA, 1296 bp, Cannabis indica
atatgttccgcagttacttaataaggttcttgttggtatcatgggctttgcttgcattaatctgtattataatgtttagttggacgcacacatttacgtacagttgactaactgtaggtttggagtgctttgaaatctcatacagatgacccagaacagccaatgcatgaaatggatgtattggctggccacgagaatgatgtcaattacgtacaattcaggttagtctgtttgctgtgaaaaacatattcagttacataatctcgtgacaattctattactttcttgtgcagtggctgcattgtggcttcaaaaccttccactttcgaccctttaaaggaggagactattccaaaatttaagaattcctggtgtgtgaatgccttcctcatttagtcattatcatagtgacctgcttttgtctctgccatcaagcacaatacaatttttttaaggtttctcaacagagctatgtatcattctttcctgaatttgttgacaggttttgtcatgataatatagttacttgttctcgtgatggtagtgctataatttgggttccaagaactcgcagatcccatgtgagtacaataatacaaaaatataatttaatcgcacatggacataatatgttttgtagatgatgtaaaaatttattgtagttccaaaataccagctagcatgttaaatttattttgctatattggcgtatgattttcaggggaaagttggacgttggacacgtgcatatcatcttaaggttccacctccaccgctgccacctcaaccttctagagggggtccccgtcagcgatttcttccaacccctcgtggtgttaacatgattatgtggagcctggataatcgctttgtgcttgcagctatcatgggtaaagtatttattataattacatgtagccaaattgcttcatagcctagtttgatcctcatcatccatttgaagtagttcttttcggtttcctcatcctcttgaattggcataagattccctattgtacctccattgaatacactatctctaatggaatatacaccatctccagtattctgttttcagtggatttatactggttttattcatccttaattgtctatttagttatgactaccatcgtcttgtaattttgaacttaataagtggtgcttaattttgtagattgtagaatctgtgtttggaatgcagttgatggtagcttagtacattcattgactgggcacagcgcatctgtaagtggtttgtaattataagcttttgtcattatttgatgagtattt

SEQ ID NO: 273420 - DNA, 627 bp, Cannabis indica
ttaattttattatatttaaaaaaatcatgtcaaacgtgtcacattcgtattaagcgagtcgtgtcgtgattgacccgtttttatttcgtgtcaagtcgtgtcgacccgttttcgacccgcatataattttcccgatcctaacccgtaaaattcgtgtcgtgttcgtgtgccgtgtcgaaacccgttttgccacccctagtttttatcccactgacatatatctcaatttttattttagcaagaattgcgataaaatactcttaaaaatcgggataaaatgcttatttttgtagtagtacatgttgatatgatatgttgggctttatagagagttaagattggaaggatgtgggttggaatggtaaaaacccgattgctaaatttgttgtgtcgtctgcttcagcttattttaactaatagaaaagtgtgaattcttattcacttgaagattcctcatttgctgatgtggtgatcaaagtgcactggttgccaccttatgataatatgattaaaaacaatgtagacacgcctcaattttcaatgagaatagagcatttggggttggttggctcgcataggatcaccatgaaaccttattttctgctgctgcaatggctaagcaaggga

SEQ ID NO: 273421 - DNA, 7085 bp, Cannabis indica
tttagtacccgaaataattttttagtcaattttcttctcatggccgtacgttataattatttaaaacatcctacaaaattttaaaaaatttagaaaagtttaacactccgaaaactacgttcaaacagtatattacacgcgtgactattttattttacactcgtgtaaaatagactgtttgaacattattttctatattgtaaattattcggaatttcttaaaattttgtaagttatcttaaatagctataacgtacatgaatatgaaaaaaaattagactaaaaaatttttctagatgtcaaaacaagtcaagggtgtatcagtacatcccttttaaaggtgtgcattgtagaatcaccctaattttttaagtggggaatttttattttacgttttttttttttggcaagaaaaaatatggttatttttcaaaaaaaaattatcttgagggaaaatttatacattaaagaaaaagttacaaggaaaaatgtttagggtaaccactaaccagttacttctttagggtaactagatattttatacaatttttcccatatctttttgaatttttcccataaaataaaagccatattttttgtacaaattgtagaaaaactcataatgtgtactttttcactttttatgttgatgcctttcatttttaccatttttttaactactaccaattttgctcctatcaaatagtaaactaaactccacaccataaaaaataattctcacacctttaaaatttaaaatagtgatcttaaaaatataaacataatgttttgaaaagtaaactccacgcattaaacaataataaagtttgtaaaaaagggtaaaaattaactaaatttcttttggagtatttttggttttctcttgtaaaagagtattgaaacaaacattggcactaaagtgaagtgtgtagcccatgtaaggaaagttaggccttcttatctttgggcttttaatctttgatacttttatttttagggataatttcaaaaagaatagaaaaacaacataaaaatatggtatttatagaaattttaacattttttacagttttttagattttatttacataatctttttatgttgtactcttattattttattgttaattttttgttatttgtgtattattttttatgttgttttgttattatttagatgttatttttgggttacgttcatttatttttcttgtatttttataaaattccgtaaaaaaaaaatttaaaaaaaaaaatcaagcataaaaatttatgtttgatataattatcccattattttaacttctatcaattatgcgcaaaatcttcaatataacacaaatttgattaaataacatgttaaacgaattatttttgtaatgaaaattgtgagacaaataactaaaatttcattttatatatgtacaatctaataaatgtaattttacacactaatcattgacaattcagacccaaaggtggcatttttagagataggatgccaatttcttatctatgtcctctttgtaatgatgtactttggggctatgctaagttgaaacacaccatttgttcaatcccaaattaagtgaatgataaatttcattcctctacttatttttatgagtttattcttgtatatattaagagttagtcccacattgcaaatgtgtagaaataaattgtgatatataagaggaatgggctactcctcccattgcgaattgcttttgagatgaacctcattcatcttatttccaaattctaacaatatatgtaccatcactaaagaataaatagagaaacatctagtattgtctttggggaactagttaagtttaggtgcatgaaaatagttggatagaggatgagtttgtatcaattggtctcttgtgcttctcatagttataactgttgcgatgttggacaacgcttggttctttttttttttttttagaataaatatgattcaataataaaagggtctaaatcaactaaaatcaaacaaacaactgaatcgggataactcggccaccaaacatgctcagaaccagagaaaagaattaacttagcaagtctatgagctgcctcattggtctccctatgactaaataaaaactgaacattacacatccaaacaatgtcagaaactacaatgccaccaaatgaagttatgataaaatttaatgtcgatgcagcgattgatgccctaaacatagaagtgggaatggaggtttactcgtaaatgtgatgggatttgtttgaactcttcagactcctttctcttctacaacgaggccctatgctgcaggagcactagggtgcttcaaggtattcttctttgcttgtgtctgtggttgtggaaactgattgtttgcggatgtgttaatttatgtagaacttcccatactatctcattcactcattgtaacaaagttgcccacacaccattgcacattttcttagccaacctttgacaatgaaacaagcaaaagtctagtggcatgagtaattgctcatattttgtacctttttgactattgcctatcaatgaagatcagttattttttagcaaaaggagtactatttttgtaaatcgttaaaaaatttcaaataatttacagtgtcgaaaacaaatttaaattcttttaaacacatttagtaaattaaaatatcagcaacttaatttttttaaaaaaaatatatatttcatgttttggaaatgaattaaataacaaattatattaaagcatattgagaaaaagaaaaattgagaaaagagtaaagaatagttgaatttccacaaattacattattaaggcatttctaccaggaatatacctccaaaaagtccataacgtttttggcagttcccatttatctctaaagacattttcataaactaaattgaagattatttattaatttatttaattaaaagaaagatagtgactagtgagatggaaagcaagagtaaagacaaagaaaaaatcatgcagcatagcataccttgaagatgttatttgaaatttatcttttactatcatcaatttcaaaaacaaaaatacattaagtgcatctatattctatacacaaacttcataatgaccatttatgtagtaacactcatttaagatatgacatgcccttttaaccatttatatgatcatatgctaaatatcttcaattaggacagcaatgaacttcatataagaataaatggacctacacatctagattgttcatatcaataaaggacccaaaaaaaaataataataaaataaatttcttgatactgtgtaagggtcagagtcagcatcaactaagctcaagtcaaatttattcacaaagtccagctaggtaaaacactattctatggtctatgattgaaactgtaccttcatttattaaggcatgcagcttttttctactgccacaatttggctcccacccaacaaaaagaaaaacaaagaaacacactataaattgttgcaccatgacccccatcagatcaaaccccatctccttcaattcataactcctaaaacaaaacttgaaaaaacattaaaaaaattacaaccccccaagtgggaaccactcttgttaggatctatttacagccatatatgtttctcatgtcatatgtggtacaaaattcacatacgtggcaaactctcagctgtccaagtacaactgctgcaatttttggaccattgttcatcatctcactcattcatttttccctttttattttgtacatctctctctctctgactaggctagaaattcagtgtcttgttgttggtagtggtgggggagagcaccttatcaagctgagctggtcttcatcaataaagtctcaacatgtagctaaaggcctaaaactcttcttttacttattttatatatttaatctttcctagacaaaattgttgccaaacaagaccataaacttgattgaatgataccaactaggactgtcctttttatcaggaatttaatcatgatgtaaagttctgccatggcataatgaatctgagttgcctaaatgaggtgggatgtttgagatgccttgccttgagagctcatatagtacactatcagttgaaggaggtttgagccccaaaggaagaggtagccatggcttgcttattgcttccttcacaaccttgtcaattacctcttctgcctgaaataacagaagaatacatgctaagaggaaaataaaaattatgggactatcacatctttgggattatcttatgatcaagtcaaactttcatttctacattatcaggaaagtggggcaatgacactaaacatttccacgcgcatgatgtgtgagtcaagtcactaatgtcaaacatggatctttcaaagagtagttttcagaattagatgttaatttattggatgtaacataaaacagctttagtgcggcttagttgtggccatgctgcaaaattctcatgtgtaattcctaccattgttgccaattcatgtctagattttacattcttgtggaatgaaaatagtgtatcgagtgctttaatatccaatagcaaccgaaaaaaaaagacttttcttttcatgaacaatgaggataaagctctaatgttaccggttgaacgtcgaaagtgttctgtggcatgctgcatacattattgactgcacccgtgttgtggaaacctgatacattctgcgaatttaaaaagatggcgaaagaaatgttagtagaatgatgcatgaatgccattaagaaatgacacagcaaatatattagcaatatttgattggtataccacttgaggagcatatgaggcatatggactgtgaggatgtggtggcattaccgggcaaccccatgcatcagcatgcatctgaatttcacattatacaaattaacactttagattccctgttactatctttcataagcttttaacactatggtcaaataagcatgttcgaaaggagaccatatgcacaacagttctaataaggtagaaaattaaaattcttaccccagggaaagatttccactgccaactttctgcagattgccatggagtatgataagcaggagatccccacatatggacactggcaggatggtttcctggttgcccccacatagaatagactggtgctactggcacggcatggttagaatgatatgaaggataggccatgataggttgatgcggataataattcttttgcaccggatctcttggtcttggccatcttcggtcttcttccttgggtaaaatgtgcctcttatgcattcgatatttctacatgaagaataaagcatattgttaagtctacatgaagaatagatccctaagtctcatgggttgcatagataatggtgttttgtttgtttaatgtcaaaaaataattttggcatagcttcaacaagtttctcattggcagacaactaccaaataccaaaggctaattgttaatgtacataatcttatgagtacaattctctaacttagatattaatcattgggaataaagggaaacaaacaccaacctggaggtggctagctacgttgtgcctcgtcaagccttcaactttcatcagttcgagtattcgagaaggaatggcttgatccacacctagctgctccactgcatgaacaaatttcttgtggagctcgggtgtccagtctacctgaaaccgaaaattagattcacaaaatgaaataaaactatgatgagttaccctttttttcggtactaaatccaatacaacctacaacttcttacaattttatcttaccttcatcttcttcctatttgattttgacatagaggaattagtcaaagcagaagctttgcttggttggttagcaccaccaatcacagtgttgggactatcatcattatgtagttgagggaacataacattgttggaattatcatcattatgtagatgaggagatataacattgttgggacaatcatcattatgtaagtgaggagatatagcattgttgggactatcatcattatgtaagtgaggagacatgtgactctcactctcattcttggaaccatcaacagaatcctcctcctccttgacaatagacttagcctgcatctcaggctcgccaattaagagagtatcttcttcagcaactgagtcgccatatgtagtttcgacagatttagattcaccatcctgctccccgttctctttctcagttgagcaattagtttgatcttggcagtctccatcatcaagtaaccgtgctccttgttttagctgtggggttgaaggagccggatacttatcacttcctgctgattgctcgtgattattttccttattcccagacaaattctctacttcgattgagattgtagtatttggttcttccttttcaagcttaagctgcagcattgatgctatcgattctttgacgggcttgagcggctcagggggagtaccacctcctgcattaaatgcctgctcatatcattaacagaatcagaaatatgaagtttgcaggatttaacaacacttccaaaaaagaaatatataaatgaaaaagggcacataatgttagcaatccacagaccttatgaacaacatgctgccagatattcctaagcttgtcctcagagagcggttttggcaagaattcaactgcaccaagctgaaaatgaattatcagatatgaatgaactgttacaacactggaaagtacagtatatatattcttttttcatgtgatatcatgacaaacttaagcaatttaaaccagaaaattatacgctataagatcgaattctggctaagattaattcaaaattaactaaacatcaatataaacatcaatagttttatgtacaacattagtagggagccaaatcagataacttactgctatgcacttcatcatggtgctcaagcaatgaacagtcgaagtcactgtaaaagaaaacaactttttcgttagaaactaaattgcttcatgagatgatttctttccccttacatgacttccatattcattcaatcaacaaattgaaagtatgaagaactatagcaaatatataaaaaaaaa

SEQ ID NO: 273422 - DNA, 845 bp, Cannabis indica
cctcgccctccgccctcagctcctcctggtgcttggcctccagcttgtccctccgaagggcctcctcccggatcatcacctccgcttgggcttccgtccgcctagccttttcctcgaacttggccttggcaagggcctcccgtcgctcagcatcctcttggtacgtctgcctttcagcagacagatcctgcagggtcttcatgacttcgtctatgcccccaaattcggacaagacgaagccatggttgattaggttcttggaaaggcggccgacctctgcagcaagctggaaaaggatgcaagagtgagtaaagtccttaagaaacataatgaggaaaaaagtaaactacgaaatacttaccacagtcaaggagtgactgagatcctggacttgaaagatggagttcaaggatgcacaagcagcgaaccgcttgggcgcgcaccgggttagctgagacacaaactcgccggtcatctccgcggcaaaaggagccaaggtcggcccgagaaaacaattgaaccaatccgatagggggtccaagtttagatcccacgggttctggtagttctgatcattaagggtattttgcatttcatctcgcaaaaccctcctcaaagcctccacatcggcatgccccgggagtactcgtccatggcatagttatgtttggctatccggagctcctgcctcgcctcatctccaggaaccggagtcagcactatgttgggaggcactgtgtattcctccacctcggaaggaatcccggaatcagggccaggggtcggagtgtccactctccgctgtcgtttgggcacctcctcggctaccatcttgcccttgcgct

SEQ ID NO: 273423 - DNA, 999 bp, Cannabis indica
tttattccatgattgactacgtagaaaaaaccacaatccaaacatgcctaaacccaaacaaaaaaataaataaaataataaattacagattacaaataaatcaaagcttttttttatgaaacataaactaagcttaaacctgtttaagcaaagagacggagtgttcgatatctgggtttgagagatcgatacaattgagagcagagaaacttgagccatgagaagaaccattcacgatttggttttccatttcttgagaaactgtgaatcccaacacgtaaaaaaccaaacttaattgagaggagaaattttcttttgttttctcgtggtttctttgaaatacggaaaactttttaaattatgattggaattttcttttggagcttttacacttttccaatcaacgagaccaaaccaccaagccagcagtaaccagctacgtcgttttcagtgtttattaaattatttatttatctttatttttcttggctgccataagatttgatttggttcaatttttaatttttatcctccatttttttttctcactgatttttggagttttgtgaaaactatgtggactatattaaaattagacgtgtggcattttaagaaaatattcgacacccttgatttaatttcataggagaattcgaagattaacaaggtgacagataaacaaaatagtatagtaagtacataatgtaaaacaaataaaagctttcgtaaaagggtgtaatggttgaagttgattttggtctcctttttctggtcaaacgtcaatattgggtgttatctttaaattttgcatgatgaaaaagatcttgtgctgttttcttcgaataaaatattttgttctttttctttcctttctcgtttcttaggtgaagatgttgtttaaaaacttatatttgtaatataatccaatgatcttgactctagcttattattaattgtaagaatacttggatttgccatctacatatacatttttttttt

SEQ ID NO: 273424 - DNA, 748 bp, Cannabis indica
aagaagaacaaagaaaaaatgcccatggccccccagcctaccataaagaaagattccatcaaatgtttcttttgtaaacaaaagggacaagcgaaaaaagagtgagacaagttcaagaaatggatggacaacaaaagtaatccaatttccttagtatgttatgaatataatatggctatgttaatcttaatatatgttggattgaatgcggttcaacattaattcacataagaaatttcttgttggatattcaaaatctaagaatgtcagtggcaagtgagcaaagcaacttatctgaaaacaagatgagctcacgagtggaagctattggaacatggaattttaatttaagtagtgattttataaaaaagacgttctatgtaccaagtttctctaaaaacttgatttcagtttcaagaattatacccttaggctttttctttacattttcagacaaagattttaatttatataataaatctgaatgtaacgccctaatgctaaagcatgctacagtgctttttcaattacagtgcaatctttctaatcaaaaatttttcttgaaaaacgagtcaaattaaaacttttataataaatataaaactttatattatatcaaaatatttacaagtgtcgggatctcattttcaaacttctaaaacacaatataccaaaatacatattaatcaggtcgcacagcgactacaaaatacaactcccagatgtcccgagaccgaacactccaggt

SEQ ID NO: 273425 - DNA, 1714 bp, Cannabis indica
tagtgccttatgtaattatccctagaagttattaaacttaaaaaagcccaagtcagcccaaaacaaaccctgaaaacacaaattaaacccaattggtgaggtgtgcgcctcatacacctcaacacgaaccgcctcagaggcgtacgcatcaagatgcctcatcagggtgaggcgtacatctcaagtccagcagctgaggcattgcttcagaatcgttttttcaccgcctcgccttgaggcacgcctcaattgatttttaaaacaatggtaggtgtaatcttcatgtggcttgctttgtgacatgacatgaagtttgaccttgtaggttcattctctcttgtgggaaggactccactgtgaagctatgggaagttagcactggaagattggtcaaacaatacctaggcgccattcatacacagttgcgatgccaggtgtgcaaggacttgcctacctttgattattaatgcgtgaagtgcctattgactttcatttctattatctcaattattttcaagttgctatataacttatgtttatgttttggccctatcatacaaaaaggaatattaagttgtctgttggttggcattttggaagaagtgaatatggttaagaaaaaggaatgttacaaatggcaccacttgctctctttcaatttttttttggaaccaaatatgttgtttaaacctttcttggttgcaggctattttcaatgataccgaagaatttatactatccatagatgaacctaacaacgaggtttgtgcagattcttgtgctgttttgttggcttatttcttttattcctcaaattcatttggaatctgtgttggttgcagattgtggtatgggatgcggtgacgacagaaaaggtggcaaggtggccttccaaccatattggggctcctcgttggcttgagcactcaccagtagaggctgcatttgtttcatgcggtactgacaagtcaatccgttattggaaagaaaatctctagtcagagttccagaccaactccttttatttatttattttatatgcaattttatggaaaaaaaaaagtagctaataatttttattccacttgatttctcatgttagattaaatgtttatttatataggcatatgatgtctccacagtgcgaaaatagcaataaccaacaacccaatccaattgttcaaaagtaaataaataaaataaaataaaacaacctatccaagaataagtcaatttctatgttagattactttgacatcttatgttttatatctgttaatctaaaagataaatcttaatatcttttgtataaaaaacaaacgaactaatctactgtattaaacgtttatagatgagtttcacaccaagatcttcttgactcaacacgttcaataataacattctattctttaaaagtgtagcaagtaagctaggcgaacataataaggtcattacatgatagcatcaactgaaattaagaaatactcaatagattcagtaacagccacgttcaaagctaatgcccacttggtaatatgctacatcatcctaagaagagagggagaaagtttacactcctggataaaattagaggtaccccacggtatgcttaccaatgaaagcattaacaatatttaaacagtcacactcaattacaacaaaaaaaaaactaagtctaatagcaatatgctgaagagtaaactccacgctgcag

SEQ ID NO: 273426 - DNA, 603 bp, Cannabis indica
gcctttaagaacataaaaaggcacttgtcgataccttcaattttggggaaactagtaaatggagagacactactcctctacttggatgtctcggaaaattcgattactgcaggaatagtgcaagaaggggtaaggcaccaacaacctgtttactatgttagtaaaaggctactggtggcagaatcgaggtatcgccctcttgaaaaacttgccttatgcctaatccacgcctctcgcaagttacgtctttacttccaggcacatccgattaaggtgttaactgagcaaaccctgagacaagttttacaaaaccagatgcttctggatgattgataaaatggtcaattgaacggggcggtttgacataacttatcacccatgaacatccatcaagggccaaccttggcagatttcttgatagaaggaataaatccagagaaaaatctgcttgttcagcgagacgcggatacttggaaattatacatggatggtgcatccaatgagcatggctcgggtgcaagggtgatgttaattttgccagaaggctttaggtttcactaggccttaagatttcaattcaacgcgtcaaacaatgaggctgag

SEQ ID NO: 273427 - DNA, 1202 bp, Cannabis indica
  modified_base (1169)..(1169): a, c, t, g, unknown or other
gctgactggcgtcccttcggttttggctaataaatgctctgacaattaatattttgaaatccaattttctctctccacggctgacggctgcacttgattacttttgatttcccatattcgtttttaaggcgggaagctgaggcgtctgaggttcctctgagacaattacctcttttcgtgacttgcctataaataccaatagcattggcacataaactcagtttcatcacccttctttgctaagtaagctttagagcaaaaaagagaaattcttggcttcaaagttgccgaagtgccttcatacaaactgctttttggatagacgttgctcgaacccagacatttgaatcttgagtaagtttctgatttcctttatgcttatctttgcatgtttacattttgaatgcgccttctactgtgctgtagaaaaatgtttaggaaaccctacgtttagaaacctctgcgattcttctttatcatgtcttcatgcggttttacagccataatgcttgtttctgaacttcataatgtccgtctttcatcttgcttattctaagcttcatgaaattttttgccctaactcaacaaaatttttgacttttctttgaacatagtcgttctttaatctattgagtactcctgctcggcatatttgcttatttattgttcgattttttgaccaaacactcatctcgtgtgttgtcttttgtagatgaactcagtgagtcttgggaaatcagacatcggatcgaccaggatctgcttcaacttttgcacgaggatcatcctcgtctttgttctagcccgccttcctctagcgaagggcattctccaacccttgtacccagccataggatgatggctcgtacaaagaaaaccacgcgtctggcttacgcatctgatcctcaagtggcttggtacgccactttgcccagcgacgaacaggatccggccgtccagatagaggaggatcatgaaggggacgctgaggtccaggagatcgaggagctggatgatgtaggtcctggaagtcccgtccgagggcagaggaagagacagaggttgaaccccccgaaaattcggggaagtcaaacgaggctggggatgctgacggagatgtccctggttgagggcgtgggactatgtcagtgagggagcttgttgcggcngttcctcatagaacgcagggtgccttgggcgcc

SEQ ID NO: 273428 - DNA, 1506 bp, Cannabis indica
ttttctaacccaaaacataagttaagttgacccatttataatactgttgagactccttttcttcaattaatattgatacaaattctaggtcaaaaaaaaatatattatataattttttttagaattcacaagtaattattgaatgacaaataaaaaacatgtcatcagccaaatgaaatttaattagtcaagtaaacgttgagaccaaattggatcaaaatgccaagattctaaatttgaattcatcttttttaaaggaaaaaattaaaaattgaacattatttataataatatttgtcctcgtattgttgttatacaattaaagataatattaaacatcgtgtaaaaaatatacaatacctcttcataaatttacaatgaataatacagaatattattgctggatatatataattatctgaaaactaatgtctcatatacagttaaatgcaatggccaataatgatttagttagtataaaaagtatgtacttatcaattaataaaatatatgaccctaaaaaaagttctcatttcttaaaaaattagtagaaactaattaacaaaaacaatgggacacaatatgagtgaaagtaagaatcacaatataagaactaagatgattccaaaggtgattggtaagctcaactcactcaaaggcctcaatttttctcataacaagcttgttggtaaatctaaatggttagatctctcctcaaatgagcttaacggaatgattccatggcaattggctgcaaatctaaatcagcttgaatttttaaacctttcagtgaacaaatgggtggggccaatacctcacggcccacaattcaatacattcaatgaagattcatataatgaaaattcgggcttatgtggatttccactaatctctaaatcatgcaacgaagtcaaaacatcatcatcaactacttttcaccaagaagagaagggattatttaattggaaaattgtgttgatgggatatggaagcggaatggttatcggtatttcagtgggatacatggtgattacagatacaatcattgatgggttaattgaaacggtgaaaggagaacagtactggttttgtttggcaaaaagatcaaagcggaatgctcgtcaaaatggtagaattcgaagaagacattagtttacattttttgtatcattatgttgaaatgtctgtaataagttttgtgtgtattctaaataaatcatgtttttgtttgcaagctgtttattgtagtttattactatgtatgtttttttttcaaaataaattataatcaactttattatgtagttcagtaaatatagctagcattaatttcgtatttatactttcaacattactttaacttaaatgaaaaataaaactaaaattaaagaaatgttgtgctttaaaatgaaaagagaattagactgctataaaatgcaataataattgcttgatacaaatatttggaatttgtgttcttgtcgttatattatttgatataatata

SEQ ID NO: 273429 - DNA, 910 bp, Cannabis indica
gagtgatccaccatgaaatgacggtacgaaattcttgcaatagtggactaagcagaccgtgatctgactgaaccactatactcctttgtcttcttgatatttccagtttttactaagtacttacgttcctagtttgagtacttgctgttctaggttgaatactcgcagttgttcttcacgtaatttcttcttatcattaatattattattcatttttggtgttgcgaattttgctcgagaacatttggcaccgtctgtgggaactgagaagtacattcttactgaatacaagaaggagaatcatcatggctggaaaccaagctaacagaggtattaacaacgaatccatcaacatcggaatgatgaacgttccattgtctggggttaggacaccccctgtagatgtcatcagtggcggagttggtcgaggtaatgtcaggcccctcaatctattccctaaaactgctggcccacaagtcggagaaacatccacgccagcaacaacaatggggcactttccacccatcacttcggcggcagtgtccgagggtatcgtccagctaaccaccgaccagtatatcgcgatccaagaccagctgcgcgccctgcaggccaaggtggatggacagaacagggcccgacgccctcctcgagcccccactactcgcacagaaaaccctcaggtaacccactctagacgtcgtaataaccgtgttcgcagggaacgaaggaccaaccccaaaggacttgacctgaatcaaccaacctcgagagaccaatctgcgaggtatcccaactacgagacacagatcgacaaagatcccgaacgacataaccctcgcagcagaccttcgcaagacaacgacgtagaattcgcctcctcgtcctcgcatggtcgcacacctagcag

SEQ ID NO: 273430 - DNA, 1417 bp, Cannabis indica
gaggaattgaagccaatccagagaagattcaagccctcctggatatgaagtcgccaactaaaaccaaagaagtgcaaagtttgactggtcggattgccgcactcagcaggtttgtttcaaaatcaatagataagtgtgtcctatttttcaatatcctgcaaggaaacaagcagttcgaatggatggagaagaacttggaatatacttagctgtcacggaacatgccgtaagttccgtgctaatcagagaagaaaacaacatacaacacccagtctattacatcagtaaaagcctcattgaggccgagggttgatacccattaatagaaaagctcgcgtactgccttattctagcaacaagaaaattaaggccttattttcaagctcatcctgtttgggtgtacactgaccaaccattacgccagatactgcataagccagatgcctctcgacggctattcaagtgggcgatggagttgggccatacgaaattactttccaacccgacagcaatcaaaggccaagccctagcagactttgtggtggaatgcacaggtaagaaagaaagcataccagaaagcaacctcgagctggtacaaacacctcagccaagtaacaatgaagataagctcacctggaaactacatgtagatgggtcagctacagatcagctatctggtgcaggaatttcccttgtcacacctggggggcaacatctgcacgctgcagtcaagtttggattcaaagcatctaataacgaggccgagtatgaagccctaattgctagattaaaactagcacgggagaataaagccgaacacattgaaatctgtagtaattcacagctggtggtaaatcacgtatccaaggaatacgaggctcggggagaaaatatgacaacatatatgagcaagaatacatgatctgctcgcacaattcaaaagctacggtctcagtcaaattccaagggaagaaaacacaattgcggacgtgttagctcgattggcaagcaacaatatatgtgacaaggcgaatttgattcctattcagttcctcgaagagcctagcatcactggcacggaagagatcgaaatgattgatacttccccaaactggattacaccaatagtagcctacctcaacttttggaaactcccagataattgaaatgaagctcgaaaaatgagaaggaaagctacacggtatatcatagtagagggaattatgtacagaagaggattctcaatgccgttgctcagatgtgttactcaagaagaagctggacgactcctatctgaagtacacgacaaattttgtggaaatcatgccgccgagcaaagcttatctaagaaaattctaaggcaaggttacttctggccaatgatgattgaagattcaaaagcctatgttaagaagtg

SEQ ID NO: 273431 - DNA, 1645 bp, Cannabis indica
attataacgtatatgaccataaaaatattggactaattttttttagataccgaaacaaataaggatgcatcggtgtacctatttcaagagagtgtattgtagaattttcttattgttttttcgtattttttttaactttttctgaattttttttctataaaataacttttaaactatttttgcacaaattgtataaaactcacaaaatgtgtaatttttacaaaataaaatagtatttttcaaaggacttttctgcaaaggagaaaaaaaaaccatttttataaaatgtagggttaactttgcagttagaccaaccaattaaaactgaagaccttttttttctttcttaatgatctcaatttaacaatgtgacatcttataaattttcttaggaaaatatatacttaaattaataatggattatatttgttgatgatgttttgtagagaacaagtttggaaaacgaccaaacatgattgtgattggtgatgactcagaggttgaagaattgaatgctttaagagacaatgatcatctttatcttatcttttgagcaaacatttatttttttttacaaatttttttgcacatttgtacaaaagtttacaagtcgcaaattttagtgtgtgtgtgtatgtagtagtacttctaaactacatgttttgacagagaattagtaaagagtacaaatggtgcttaatattagctagaatgagatatatattattatttgtgtaatttttttttaagtagtaaataaatttatttattttttttattattttttttgttgggataactgataaatgttaaaataacaaaggtaacaaaagttacacagtaggtggggagatttctttaatccaagaaattattgtctatcctaaaagcatgcttagccaatttatgaccctcaacattaaagatgccccaagaaaactagacaatagaactttaatatcagaaaagataacccgtagttcattgaaatacactgtttgaccctgctgagaccaaaaaaagtgaatcagaaaaaaccctctacacgagaagtcccacatctcatagcgtctatagtagatctataagtactaattcaacaatcgataacaacaaaagttgtataacattataactccaataatcaataactcacacaagaaccaaactatagttcaccaaaactataatcacaaaaacaaaagctattgttaatatcataatcatcaataattatttcactatttcccttaaccattaacaaaacaactaaaaatttataaacactgccgtctatttcaaaaacaaaagcctcttagtgcctctagacagtagagtgggggacgagtggacgacctaacagcagctggggtcgggtaaaggccagcaaagcaacaaagaaggccgagtaggaacataaaaaatattagctaaagacatgtataatataatttatcatgaacgggtaaaaagaatataatttttttatgagactaatcatataaaaataatagaaataagtaattcgaaaacttatttgtgatttgcaactcctttgtgtaaataaattcttctagttccaaattttaattaatttataaatactcaaatgacctaacataacacaacaacaaaacagagaaaa

SEQ ID NO: 273432 - DNA, 626 bp, Cannabis indica
ggccttgtgtgagagatgggggccaatagaagtgggtacgacatactgaacccagctccctctcacataaactaccccaactgtgaagacccatttttctgattttgataactatactaggttaattaacattttcccccaagtcagagtgcaaaaattgggataacattttcccccaagtctgtatgggacttctgaagttttgtgtagacttcatccaagctgcttctgcctttggatggggacacgtgtcgggcgcgtctgtccaagactcgatgtgaggctaactggatgtccctttggttttcggctagttaatgttctgacaattaatattttgaaatctgatttctctcaccacggttgacagctgcacttgattatttttgatttcccatattcgctttttagagggacacgaggcgtccgaggtcttttgaaatgattacctcttcttgtgacttacctataaataccaaagagcattgccacataaactcattttcaccatctttctttgctagtgagttcagagccaaaagagaggtttttcttgtttcaagtttgctgaagtgccttcatcgaaactggccgttggtttgtcgttgcttgaatccagacatctg

SEQ ID NO: 273433 - DNA, 1285 bp, Cannabis indica
taattaatcaaataaattctcatatattgaactatgtaataatataattccttaattattcataattatgtaattaggattttgctaatccacttctcaattctagggtattacaatcatactctgcgacagaaaggatcaagaattagaaatccaaacgaaatgagtcatttaattccgctacaaccaatgtaaggttttctataaacttttatgtttttattttattattttagggaattcatatttaagatgtttaattatagtgttataatcaaatatgcatgttagtaaatctagatcgtggtaaaataacattcaacaactggcctcagagtcagagctatagtaatgatttattttcatgaaatatggatttaaaatgatgtttggttgatttggatgtgttcatgttagtttatgtgattatttgatgattgatgtgatattacaaaattttttatgaaaaataattttatttttcgttttgaaattattttatttggaaagttggtaaaacattcaacaaattttctttttacagaacttaatttggattaaaattgacaaagttattatattttgaagttttggaaaaaccgggctagggtttaccctttatgcgcgggcggatggagtgtctcactcgagcgagacacagttttagacaatgcttgtccaagatttctcggatgtgggcctgtcttaacggcctcctgcgccctaatgaggctgcaatgcagcctttcactcggccaaggccccctgttacgctcgcggtgcatactcccctgatttttccaattttcaattttttcaacttaaaaattattttttaattaactttagatcaatttaatcaagtagttttcattaatgattaattaaaataagtagactaaaatatattatattttaattaaaaaatcaacagttagtttatgaaattttaaataagaaattatattttagtttatttcattcaagatacttaaatattaaatattttttttatgaaatttaattaaatagaaaaattatatttatgttcaaaattaatttattaattttagaccaacataaattagaataagtttttaagatttattttattatattttaataaattcgaaaatgtattttttatacattggatttcgaattcaatacagttatagaaaatcagatttaagttgaaaaataattttttaattaattttggtccaacttaatttaagtaattttcataatatttattaaaaattaatactaatgatggaaaata

SEQ ID NO: 273434 - DNA, 550 bp, Cannabis indica
tcagatgcaaatgtaaaagttaagaaaagacatgtttcgaacttttctttgatcttgatattccattcgacatccttcaatctccatatccctcccaacactttcttgagaaatcccctactgtgttctgagttagtatagaggcggcctctcaaattgaattttgaaacagtgattgacaagcttttatccacttcccattcttcatcttcatccgtgacctgaagattgtgggttttcttcagtatttcgtccatggcagaggcgatcacctcaatcccagaaaacgggaacccttcgaaagcgagggaagaagacagggacaaggcagagcccccataactgcatttcgtttttcctcttttgttttgttttctttcctataaatgaccaccactaggacgggttccaagtccccttcacctgctaaaaaaatttcaaaaagtcctaagaaacctccttcgaagtcctctaaaggtgatcctaaaatgggtttgaaagacattgcgaaaaagggaatggttgaagttgctaagccttctggttctaa

SEQ ID NO: 273435 - DNA, 661 bp, Cannabis indica
tataaacttctaactcctcatctcccttccatgtagcagacctaccttttttgaaatcggtgaacaactctaggcgagctttacacatagctttaaatgcaatgtcatctagctgagcatacaaaccagctgatttctcctttttcgtttacaagctctttatcagtctcttcaatcttcttctgtaaagtgttaagcttttcaatgaccttcttgttttcctcctgaagcactttgttagacttcttaaggacggtgttctccttgtcaagttgtttgcgatctcgacgaataaaaattgcatcggaaagagcctttcaagaacaaacaaacatcagaacaaataaaaatctcaataagaaagaagctttgaaaagatacttactcgatatattgaagagaccaagtcatcagaagatgcagcgcatccaagctcatgtaaacgcctctcatctagaggactcaagagagcctcaacatgtctttcaatcgtagaaggattcgagtgcacacaaatatttcttggaataatagtgccctcttcgtcgtcactccccaagtcaactctacatctcttatttggatcttccctggcataagttttcgaagtaacaacaccctttggagatgcaaaagcacttgaaggtcccgtaattgatga

SEQ ID NO: 273436 - DNA, 1816 bp, Cannabis indica
ttaaattaatagactaaagtgtctgagcagacttagttataccttacgtttttttttttagaataaagttatacctaccttttttgatctattcatgctatatatttaattatattaaaagacagtctcaattaacgtaataaacaaaaagtatcagcgggtaactttgtcaaataattaattcaaaatagtatttagccaatttacttttatttatggccccgtacatttaaacctacctctcttactatctcacatttatggtactggtgcatatttctcgtgtactgatatggcaaatcacacatatagatctgtagaaaagttaagatttctaattttttacagaaaattttcttaaaaaaattaaataatttagtgtatttttttaaaaacgaaataatttagagtattgaaagtataatcttcgacttctaatatcaccaaacgtacggcaaacgtacacaaaaattttatctagatcttttttttttatctaaaatgcattgttttttttctaaaaaaaatatcatagagaaagaaatttatgatatcgatctacaaaaactactgtcttgtaaaaaaagaaaataggcattactatgtatcaactggaatacatgtatgtatacatatatatactcactaatcatatagatatagatatatatagctgtatgcacgacaatactttaggaaatgttctaagtatatataatgtttggcagatatgatactgctctcaatatcaattcaatgggagttatgaatgttctgaaatttgccatgaaatgtgtcaagctaaagatgcttctccacgtatcaaccggtcagttttgccttattattttatgagttttcaaattaaatgcaatgaattcacccatctatttatatgaataatattataaatttacagcttatgtttgcggggaaggagagggagtgataatggagaaagaagtataccaaggagaaacattaaaatcaacttcatctaaattagattttgaaattgagatgaaactggctgctcaaaaattggatgccttgaggtcacagggtatttcagaacaacttattgcatcagacatgagagattttggacttcaaaggttaattttttttttaccacaaataaaagttccataactaattaagttttaactaatatatataatatcgaactttgaacagggcaaagaaatttggttggcctaatacttatgtattcactaaggccctgggagaaatgtgtattgggcagtacaaagaagcttgccaactgttattatacgtcctacaatgattaccagcacttacaaagaaccttttcctggttggattgaaggtttgaggtaatttacagctacagtaattagttattatatatttacatttacattatcatatagtaaaattaatattgtatgtttgttcataaatgcaggactgttgatagtgtagttgttggccacggtaaagggaagataacatgttttcttgccgatccaggttgtatcatggacatggtaagtgtagtacttaatactccatcaccatatccatgtacgtatattaattattttaaaaacacatcacaaataattctcacagtaattctcgatcgttactttactcgcaagtaaagtaattcgcaagtatattgatcaactaacattttctttatttactaaaacaatgtacgtcatcatttagttgactgagtggtagggtcaaactataaaataatctacatttaattagactccttaagtccttaactaagtaaaaataaaaataaattgtaatataa

SEQ ID NO: 273437 - DNA, 549 bp, Cannabis indica
ttaaataaattattttttaattaaagtatttaataaaacctttttagaaattaatatttataatttttttattttaaagaaataaatcaaattaagttagtatcaagttgcaggtattttattagttatttttagtatttttttaaattaatcataaccgtctaataatgatccaacgactaaaaataaatataaccatcatgattacatatttaatgtaaccattgaaaccttctccataaattattaatcattttaaaaattaattaaaagatcactcaaaggatttaagaaatctctcgatctcacaaaccatcttatatcatgtatttcaaagtctactataaagttatcattcttgaccataaactttagatttcaattcatatcatggtgatcaaacactaatatgataaaagtaataataggaatacttgaacaaatgagaagaatatcatcggaatgattaattaaattttagggtgtctacatatttggtaccctgtgttttatctaaatacaagtttggtaccatgtatttttaataat

SEQ ID NO: 273438 - DNA, 876 bp, Cannabis indica
ttttttatcacaattcatatttaataaattaatgatacaaataacatcaaattaaaagtaaacataaacaatattatatatatacaagaaagttcatgttctatgacatacctcttttttttttttctttaaactcaaaagattactgaaattgtgagataagacttcccaatgtccatatatgtagccactcctttaaacaaaaaagcaaaaaaaattgatttgttgctatagaagaataggatgaatagtaatgtttagtgtttaaaaaataaactggttatagaatataaaaagtcttgtataaaaatggatgaatataaaaaattgatgaaaatttaaaaaatatatattaaaaaggatatttttttttctcataggtataataaataatgagtcccattagtatttgaaaaggtctcatttattattattattattattattattattattatagggaataacaaactaacggaataaaaataatgataagtaagtgtctgttaagttattaatgacatggattgttttgattggttagacagaggaatggacaccatattttgacaaagaatttgcttccaaatttaactagtttgttactttttcttcattcaattatttcaaacaattttgatcccttattgatcatttacagaaaaagaaagctatgatgttctcttgatgttgcattgaaatgaaagtcaataataaaatttcgagcttatagacaaaattggagaatgtttttaattacttatccaaatagtttttaaccgacatgttacttttattcagttaatcatatctagtgatccaaatagttttgatagttaagatttgattattaaaacacaaaatagacacgttaag

SEQ ID NO: 273439 - DNA, 622 bp, Cannabis indica
attaaaaaaactaaccatcttctgcacagcctcaacaccatatacaatattggctatatttacaagcccaatcatgaaaaatcagaataaaaaattactaaaataacgcaaaacaaatgtaaaacaatgaagcagatataaccatttaaaaaaatataaaagagtcacacccctcaaaacctttttaccaatgggctcgtcaaatgtatttaatgtatttataggagaatcataataaaaaagaaatacaaaaacaaccatagattagaagaagaaatgtacttatagcctttatcttccacacccacagacaaaactaccacaacaacacgagaacacttggaaaacaatcattaattctggcaagatggagcaagaacataaaatcgacgtcaaataaataaatcatgccaaaataactgtaaaataacactaaaacaaataaaaaacaaaaggaaaaaggaaaaaggactaaaaaaactaaccatcttctgcacaacctcaacaccagatacagtagcgactatatttgcaagaccagttctaaaaaatcagaataaaaaaatcacactcttatctttcctaaaagcgtgactgaaaattaaaaaaactaaagaaaaaa

SEQ ID NO: 273440 - DNA, 3613 bp, Cannabis indica
aaaaaagcattctaacatgtaattttagacgtaaaaattgactaaaaaactgtaattaagattcatctttttacttttttatgagaaaatattatacttttataattttgaaatttacaaatttattttataaaataaaacatagaatattattttttaaattccaataacataaatgtgcatcccaattgacaataaatagaaataaataaaaatttatataaaaaaagaagaaattgtgtcccatattttgggagaagaaagagtgtgaaagtacaaaagtgtccgtacaacaactactcggatttttccctcaaaaaaaaaaaaacaactactcggatttgggcggatcccccaatgctgatttgatccccttcaaagctcattcttttatatgcaaacaaacatgaacaacactcttattctcactccgaatttgaatcagattcatctcaagctacattttcttttgctgatttcactttagttgttaactatggaagttccatctcagatccgcattaacagcagctgccgattgtctatatcggattctagtctttctgggcataggtatttgttttctgggtacaatttctctgtctccagaaggaaatggaagaaccctttcgttcagattaggtgttcctcggcgatggaacaggggttgaagccacgccccaaattgaatcaagtgaaattcgatgtgaaagaaactgttttggaggaaacccagatcaaaaaatcgagtgttgggatctgtaatcaaattgagacgtttgttttgtataaaagatatagggaagcacttgaattgtttgaaattttggagcttgatggtggatgttgtgatgtgggtagtagtacgtatgatgctttggtgagtgcttgtattggattaagatccattagaggagtgaagagggtgtgtaatttgatgaataagaatgggtttgaattggatttgtatatgaggaacagggtattgctgatgcacttgagatgtggtatgatgattgacgctcataaactgttcgatgaaatgcctgagaagaactcggtttcttggaacacaatgatatccgggcttgttgattctggagagtttatgaaagcgtgtaagttgtttctaatgatgtgggaggagttttctgaaggggggtctcgcctgttcgccatgatgattcgggcatcggcggggttgggactcatctttgctggaagacagtttcattcgtgtgctttgaagatgggtgtagaccaagatatttttgtgtcttgtgcattgattgacatgtatagtaagtgtggaaacctagaagatgctcaatttgtttttgatgagttgcctaaaaagacaacagtgggatggaatactattatagcaggttatgcacttcatggttatactgaagaagctttgagcttgtattatgagatgagtgaatctaatgtcaccatggaccatttcacattttctatactcgtaagaatatgtacaagattagcttcactagaacatgctaagcaagctcatgcaggtttagttcgtcatggtttcgggtcagatatagtggccaacactgcacttgtggacttctatagcaaatggggaagaatagaagacgctcgccatgttttcgacaagatgccctgcaaaaaccttatttcttggaatgccttgattgctggatatggtaatcacggtaggggtgaagaagccatcgaattgttcgagaagatgctcgaagaagggctgatgcccaaccatgtaacgtttcttgctgtattatcagcttgcagctattcgggattatcagaacgtggatgggagttttttgattcaatgagtaaagatcacaagattaaacctcgtgcaatgcattatgcatgtatgattgaattgctaggacgagaggggcttttggatgaagcctatgcactattaagcaaggcaccatttaagccaacggctaacatgtgggctgctttgctgacagcttgtagaatccatgaggatttagagcttggtaaacttgcagctgaaaaactctatggaatggagcctgagaagctaagtaactatattgtactcttgaatatatacaacagttctggcaagttaagggaagctgctggtgttgttcagactttaaaaagaaaaggattgagaatgcttccggcttgtagttggatcgaagtgaaaaaacagtctcatgttttctattccggagataaaactcattccgaaattgagaaaatataccaaaaggtgaaagaattgatggcagaaatttcaaaacatggttacattggtaaggagaagactctgcttcctgatgtggatgaacatgaagaacgaatactgctataccacagtgagaaattggctatagcatatggtatgctcagtactctagatggaacatcactacagattgtgcagagccaccgagtctgcagcgattgccattccgccataaagttaatggctttgatcaccggacgggaaattgttctaagagatggcagcagatttcaccatttcaaagatggtaactgttcttgtggggattattggtgatggagcttttactttaggactagaatataatagcttgtttgctaattgatttatttgtattatgctctctttataggtccttgagagattaataataatggaagaagcattagttttgatcaatcaatcttacatagcaatatccaaaaacacaatctactattaacaataatacttatgataaatttcatataaaacagtctatttatttaagttacaaaactaattgttgtaatctaagtttattttttcatatctaggtaggggactctattctgagtgaggatataatgtaattaaagtggtggactatgatggcaatttgattaaaatatataaaaatgggtaaatgtcattttcaacatgtgttttgtaaaaattattaattggactttctattttgttaaatgataaaatagactttatattttctaaaatagtaaaaataagactctgagcttaattttcaacaattttattttttaatataatcaattaagtaaccaattttgttataacatctttatattaaagtattattaagttttattttgacaaaaaaatcaattcatagttttatttatacaattttgaaaaatacatgatccattttgcttaaataaaataaaaacacaaatataaaattgaactttacaaaacacacttatacattttatttttaaattgaaaaataaaagtggatatacaatatatttttgtttttgaaaaacaaatgaggcgtttggtaacacttttacttttaaattttttttacttttaaattttttaatcacaaaaatataagtaaaatttttgtttttaaaaaacaaaaatatgttttataactacttttgtttttcaattttataaacaaaaaataggtgtattctgtaaattttatttttattttgatttgttgattttatttaagtcgggtccgaggtcgagtccgagatcgggactgggtgccggtccaagtttggggccgggttcggattcggtttccaaggtctaagttggggtcagagt

SEQ ID NO: 273441 - DNA, 1377 bp, Cannabis indica
tagtctttatcaccatcatatatatcattgttagtatttcttttcttgataagtgtaatgtgggtctgaattggtattatatatatttgtatgtagagccccaagagtaatgatatgaagaagaagaacaagctagctagctgtatgtgaagataaatgaccatttagagtctggcttcttgtctttctgcctaccaaattaaaatgaaattcaaatcattaagagggcacatacagtttcctaataattgttcttagtattatacattatatgtatacatgggcttcaattattatttttaaattacaattgattttagatactatatcttgtttaggaaattttcagatacacctgtatccagaccacatctaatcatcccttgctatggagaaagccataatcagtcattgcctcctaacaagacacatgaagaattaaaatctcataattgtcattatatgatgtaatttatttttaaatttttaaaaccaagaaaatattttagaacatgggatgtctctaacttgtgcccctaccaccatgtgattatagttcatgaaaaatcgacaatgtcatgttatatattgttcttgctaaccaaaaattgaatctcaattagatatttatgtaaaaatttaatctcggagcacatagaaataaaatctaataatttgacttctgaatcaatttggaagaaaaactagagctcaaacgatctgattatgttgtgacccaatattatgacaggttagatcccttttaagtgtgtgggaatactaaatttataatgttaaaagatattatcacgtggaagatgcacaaaaatagttggggaaagaggagacttttacaatttcgaacgtattgaattaatataatcttcgaataaaagagagagagagagaggaattataatttgtggatatattaaagtgaaaatatgttcatatacatgcagagagttgttattaaaaaaaagaccagagagtacatcgatccgtacaattgtgaagaggggtagacatataaaggagtcctcatcagagagagttgtttcggtctctattcaaggtgagtcaatggagacaaaaggcacactttttggattaataatgttcacaattgaagattttcttttttaaaaaagaaaaaaattcattcaagattctcttcttacttctttaatatttataataataatagatttttgttcaataataatagatgtttttcggagaaaaataaacaacaccaaaatatggtattcaattttaagcgaagtaagaatactcacaataaaagcaacaattatttacttagaacagcgattattcaaatatattataatgaaaactaaacgtaaacaacgacta

SEQ ID NO: 273442 - DNA, 596 bp, Cannabis indica
cttaacaataccatataccctatgagcatgcaaatcataattcctttccttctcgatagatgcttgctgggcacgagtacgagtggaaggacctgttggagttaaagcagcaactcccttccctgttgcagcaggaggcaatacagtagcaggtggaggagatccctttgaagatgaagacgatgaagtccaacatttgtagggtcgcacagattttcgaaccacttgtttaggaattcttttcggtttgggcttcttaggctgagattcacgttgaggaagcgatgaatctcctgggttcaaagcagttgcagcagcaggcaggaagattggagcagcaggaggagcgttcgaggggtcttgttcggagtccaccattgttcttggatgccctaggttcttagtcttagccatggatttctgaaagagaaatgaaaaaacaaagagaaagaatacaaggaaataggaatcgagtaggtggtgagaaaaataacacaaagaaatcggtttaaataaaaactgggaaagttaagcaaaaggaaaccaatttcaaaattttgagtaaaccaccagcccacaaacacaaaaaggaaacc

SEQ ID NO: 273443 - DNA, 4113 bp, Cannabis indica
cagccccagcaacctagttttcacaattaaaggatacagaatccataagtaatatatgtcactgaaaatttagcaaaggacattaataattgaactacagtattatggcataatcaaatcaggatttacatgcatcataaatatttcaactctttacaatctagtcctatatttgcacatgcataacgcaaaaaagagcgagaaaaaaccttgtgaacaagaatcgtgccagccaaaccccttcgaccggctatgcctctaggtggaggtagtgcacaatcatctccaacaatcacaatctgcaaggtttaaaatgtgattccataagagtgttaaaccttttcataaatatgatagtacagttaattatttaactaaaccaacccagagattagaagaattagataggaaaaggaaatccaaatgaaaatgtacctcaatgttataaccttcagattttgcttgttcagcagccaaaccaaaatttaagcggtcaccagtataattctataaacacccagatcgtaaaaccatgtatcaaaaaatgagtttcatggctctttgaaatttaaaacactacacttcttgttgtaaaatacatgtgtggatctatcgaatgatgtattgtcatgctgactgatgccataatgacaaaaagaaatataccttgactattagaagacagcccattggacccgttacagctcgaatgccctaaagttcaacgacatcagattatcctctaattttatataactgatagggtgaacatcctctttaattacacgaataaattggaagagatcatacagctagaattgaatcgaccggtggagaggcaaaaacatccccacaaattgctgctgtcagcatcccttcccccacaaatccagcatgtgcaggctcatgcccacttccacctcctgcatcatttaatccagagtacaacaaaaggatcatttcatacttccaactcaattcaaattatgcatttcacttagttttggaacattaaaaaaactaaaaattttctctagtcttgactctgaagattaaaaaaaaaaagaaaagcgcaatgcacccagaacaggcatagagattaaccactatggatattttatttacaaccatataattaggtgggtgagtttgggtcagtcagtccatacactatgcttaacaaataacaacaataacaataactagaaacaaatgctaagaaaatataataaaatacctgatataatagcaactttactatatgttgcagcagaaacatcagcacgtaatacaaccttcacctgcatttcccacaatgagcaaagaaatgatgatgatgatgataaatccatagctttagaatatacaaaataaaaacaaaagaattttaagtaaagaccaagaataggacctgaggaaagccatctaagtattgcaaaccagggtatgtttccacaagaccctcaatgaactcagtcaccacatctacacccaccaccacaaaaacaccataacattacataatttaaacatgcatcagccgaccctttcaaaaactttaatcaatcaacgagaaatgatcaatctttaaaatcaacaaaaaccagcaataacacataacatcaacaaaattattctagtttcgtttcgggtttcccagaattcaaaataaaaacaataatgattaaaaatccagaaaaaaaatttcttattacacaagatgggaaattggtgcatgtatattagaatcaaaatttagttgaggaagggagaaagagcgttgaagtggtaccaaccattggggtcgttcatgagcttcttgccctgaaaagccatggcgaaggaaggaatcagagtcagaaaagagagagaggttggtgagtgaagcaataaagtcaaaaaggcctcctcctctgtcttctctcccctggcggaatactggttgtttccgtcgtcagagagccagaatattaaattaatttataattttatttggatgaatattcatatatatatatataaatatatataaattaatacaataattatggaaatatattttttaaatggataaccctcattaattaccattatagaaatatatttggtgaactttgtttactactgctatatatgtatatatatttattttttttgaaaaaaaaagtctcttcacatcaaaagaaaaaaaattccatttatcatatttaattgtatgactgacattaattatatatgtaatttaagcatgtaaattttttttaagcatatttatcatatttatcatatattttttcttaagcatgtaaattaaaagagtctatatacatctactttgtatcctatttggaaaaaatcactaaacaaataaataaaatatttaggataatatttcaagtatttttggtaaaatagtcattttatttttgtaaatattaattaatttgtttaatgattttattttataatttcctgcaaattaatgacatccagtaattatttgacaagttgccaaaattttatatattctagtaaataaagtgtaagatttgtttgtgaataaagtgcataagtctttgattattttttaagtatctatactttagtcaattttatattagactctgttggcagaaatgtcacttactatcatagtttttttcataaggaatattactattttattttatggtatacttgtaaaatatactttttgtaagaaaaaatattgatacaattttttttttttttgagtattaaaataaaactgtctaattgatacattttttttttgatggaacaattgatacatttaataagtagaataatacacaatttttttttctgtcatatacataacctaattaataataatgataggaatatgtaacaaatgaaaaataaaaaatttttattttatttagctgtgtttcatgttttcttttagactgatgaataaaaggtaacaaattgcttttggaaagttttggatattattattattattattattattattagtgtattattagaaaaagcgtattcttatcctaattgcttttacaaatcaaatacagcttacacaattccaaacaaagcaatgggaatttaatattatatatgataatattgtttattgtattattaaaataataagtagagaaggaaagattaactaaatgatgatagagtggcatccgaattttagggaagcttcttattgaataaatttaaaacaacattttctagagattttttaggaaacttcgtcagccaaaatagaaaacgaacaagaaattgcaatttaaaaagaaagagaaatgtggtgtgtattacaacatttttttgtgatagcatataagacaaaacgtctttattgaatgtttcttgttatattgtgttatttcttttttacaaaagattcgattacgaacaatcttaatatttttatattcaatttcattaagaatacaaagaaaaggagaaataaatgtttgacttttgaggaaaaaagataaaatgttgggataataacaaaaagtacatcttatcccaccttattctaacaaattattataattttgcaaataaataacatttatacgtatttttttactaaaaaaatatatacattttggttcgactaatctaggaaaatttgccagaatataaattcagcattataaacattatcctttcttttataatactttaaaaaaattgtaaaactgtttcaaaaaaaaaaatacaaatatctctagaactctcttgagtaggctttgaaatagatcactcatttttcttgtaatttatgtcaaaaatatctattgcatgcttttctctttggatagatgagtccatgctctatgaccagacactgcatattatgacagatggcaaaaaagtccacctccaagtttttttttctccatgtcaaatctttataaatattgaatataattgactattgagtatttgtacatttgaaaccatgggtaaatacatacatacaaaatggcagttatacacataactataatacattttaaaaaaaaaaaaaaaaaaaaaaaaaaaaaaaaaaacgaaaaagacaccaaacgaaagacttacact

SEQ ID NO: 273444 - DNA, 968 bp, Cannabis indica
cgataaaccctacgaataccacctattttcattgatttcacagctgcttcaatccctagaaataacctacaaaaagattttgagatatatagagaagattgagtatttactttcataattccaacaacacaatgaattgtataccattcaaccatgactatatttgttatcttactagccttattcaatcttttttctcaagtaaacaatcaccattatcataagtgtgagtgaatgtgtgtagtgaaatcactttgcttcaatatcagaactgagaaataaacaatcaaaaatacacaatgacacaacaaaatctgttggtgataatttcttcagaaagcttgggattccttatacaagaaatcaacatcccactttcttattaatcgaaaagggaaagatgtacaggattatttggactacaagatcaaataagattatagaacacgatttactaactaatagtaaataaactgaaattcataccaaacgccaccttagttggtttgatagacgcaactgtctatattgaactcataattgattaaagctagactttttatgaactcattgcctaaacacaccattgaagaagatattcttacaaaatcaacatcccacttttgtatagtcaccaaaatcaattttggataaacatggttcccatcaaattaataattaatgtacaagaattgcatacaatattgggtggcaatgtacattaatgaaattaaataattcaagaacttacttttccagacccaaggatgaatacaaaaggacttggttcaccattttgatctttatgttcatatgttgaatcaaaacgccatccttgtttagctgccaatcttccatagtaatgaattgcaacctttcaaaatcaaagtccacattctaaattcagatgggaaacttccatataatcaccaaaaacaaaagaataattaagaattttgtttcccgaa

SEQ ID NO: 273445 - DNA, 655 bp, Cannabis indica
tgtaaggtttcctaatctttatatgtgtttatttcattattttagtaattcatattaggatgttaatgaaaacatacatggtagtaaatctagatcctggtaaaatatttccaacatatataccctctatacttagaacatttatacaaataaattgactaagtataaatacattgcaagtactattgataataaaaattaaaaactttcaccattccaagctcttcgcatcgcagtaccatcgagttctgcaagccgatatgttgcatggccaatttattcagcaataaggtatggtccttcccagttgtccccgaaaaccccatgtgctgggtttttcgtgtttggcatgactttttgaagaaccaaatcacctactcccaaaattctttccttgaccttagaattaaaaatatcgagtagtacgctgctgataggtcgcattttttaggttgagcctgatcgcgcttttcttctaaaaggtcaaggtggagcgattgcttttccgcattttaggtaatgtttaaaacatctcctcgtagtgaccccaccctgacttcgactggtaccgtggcttcgcatccgtaggaaagcgagaaaagagtttcgccagtcgtggatcggggggttggtgttatacgaccataaaacttgc

SEQ ID NO: 273446 - DNA, 595 bp, Cannabis indica
tattacattcacacatgctatataaatctctgtaattaaaaaattacgattatttactcacttatagcaaaatttaaattttatactaatatagattagtaagatcataatcccactaattacctgattaacccattaaataaatataaactctaattatttaccattaggcttatcgagatattacaaacacggagtcattaaaagcttttcagcggttgcatggccgcaaacaaatggacaagcagaagccgtcaataaaatactaaaagtgtaacgccctgatgcttaggcgcgctacagtgatttttcaaataacatactaccttgctaatcaagggttttctttaaaaatcatgtcaaatcaaaacttgaataaaattaataaactttatgaacttacaaatgtatatatattatataaccgggatcccgtgctaaaacttctataaatattttgaaaatatttttacaaacttgtcgcatagcgactacaaaatatatcctaagaagtcccgccaccccaaaagtagaacgtaaaaggggtcgatcgatcattaaggaattgaagggagtaagaagagagagagagaga

SEQ ID NO: 273447 - DNA, 2620 bp, Cannabis indica
tttttcccatcatgcattggaatgctctttccttctctttcaaaatggaatagtcaaaatagtggaaaggtcattccattagaatgaaatttcaatattttaatatacatccaaacaaaggaatgaaaagcaaattgtttcctttccattccattccattttattagctccagccaaatgttaactaatttccgccattccttcttaatttctgcacttaattgaagaacttactaggggaattccaagcttgtaaaaaggatacattattagtgagctctcgttatagttactttttattattcccctttccatggggaagttcttatatgaataattgaataaaaataccattatgcaaggaaacatcagagaattcaaatttggtttgtaaggcttgaaagaagattctcctttaaattattaaccaaactaaagagattggatattgatttccgtttgaacaaatacaattttgttttttcttccaatatgtgtagttttgtagattatttttctctgtacgtgataacatgaggcactggttcacttagtcttataacataatgcttcacttagtcttgtaagaaataacttgatctaatgtgcttaattattagacgagagtgtagttgtttctcatttaaatatttaaattgacagaaaaaacgatcatcaaagcagaagggagatgtatcgcgtggtgcctcagtgtccaattctcgtaataacaggtaagaaattaagatacattgctgagaagaacctatggcacaacagttattttttggcttcaaatttttgtagctgaacatatagggcatgtttggtgcatgggataattattcaatgaaattggacaatttaaaatcacttaattagtaattgaacattaatatgttcagtgcatgggataattagtccataaccatcattgacacatttttaaatttttgaggtactgaaattttttttctcaaactttaattaatcccgggattattttatgtccgttattgatctttggtttctgaccatgcagcatgcgatttattcctcctgttaatgggcgaagctctccctcccaagccacttctaaagtggacacgacactaaaatatgataagggaaaccatttaaattcttttgattctagagctgactctggatatatcgaatgtgttttccatccaagttcatcggtgcaagctggagaacaagaattcaaggattcacccccatttagagtgactcagcatagtggtactcgtaattctgcctatgctgatgaacatattggcttcatggatgttcacgtttcccaaagttcattacaggaaccaattacttctggttcatcatgtgttacctgggatgagaaggcagagattatggatcgtcagagtcaagagagtaatttggatgaaacactacatctgcatgagaattcacctactatagatgcaaatgcatgtgaagctcggaacattacagttgttgatcaaatggaaatgtttggtgacaaaagcacacatgaacaaatttcagatcaaatggaaatgcttggcaagaaaatcatccacgaaagaactgttgatgaaatggaaatgcttgctgacgaaaatatccacaatagaacggttaatcagtcagttatgcttggtgagcaaaacatccatggaagaactgttgatcaaatggaaatgcacggtgacaaaatcatccacagaactgttgatcaatcagaaatgcttggtgaacaaaacatccatggaagaatttttggtgaagaaaacatacatgaaagatctgttgatcaaatgaaaattctagatgaaataaacatacaagaaagatcagtcagccaaatgggaatgcttggtggcgataatatacatgaatctgtctccatctcgaatgagattgatgaaaatgaaagcgaaactgacaatttcatggatgcccttaacaccattgaatcagaatctgaaaatgatcttgattatcagaccaaaagggaggtagaacaatttcccaccattttcaacaatgaaggggaagacagaatccatgaagatgaactgattatgcattggtcagatcatcatggcgatcctccaacatctacatttgacaatgtatccgtcacttccacgaacaaagaagtggcgacagatctccgcgactcagtctctttagagagttgtgtgcatgaacagctgtgtacacctgacatttccccaaacaaacaagagccctgtgatcttcccaattcatttccattagacagtcttgatgtccaaatttctcagaaaactactgaatcatctacagatcatgatgttgttgttactagaagtggtgataattatgctggttcaaaattagaatcaattatttctaacccatcatcctctgtaaccaagactgcagatgtgcaggatccactggaaaaagaagactatgagtgtagtctgtgattctgaagaatctcaggtccctacccagaaatctattcaatgaggttctggactaatggtggcttgttaggacttgaaccatctaagcctcctgatttttccatgtcaagtctgtaactcaggattctgtgaatggcagt

SEQ ID NO: 273448 - DNA, 694 bp, Cannabis indica
gttagttttataaagaaaacaaacttcattaatgtaggtgattattttaaaagctgtgtaaaacgaagaaaagtttcactcatacgttaatctcattttgcttaggtttaatttatagcatatgattgcattttgaaaattactgtcaatggtaaattaatttttaaaaataaaaactatattatatatatctcacctgtggggtattatgaaccacgtctaattattatgggcaaacaccaataaaagttaaatcataacaaaaggatatatattaagaaaataaaattatatttaatggggaataattggggtagaggtgaatgggacctagtgagaaattatagaataacccaatcaaacattgattgattagctcacttaataagttaatccatggggtcacttttaaaatagaaaataaaaagagtaggagagggtgtgtcgacatctccacacttcaaatttagggattaatttcttctttttttttttaattaaaaaaaaaaaaaaaatatatgtataataatactatataataaagggaggtgtacttatatatataatttattatatgtacaataataaagagactaaaatatatgtatatatataatttgggtatagatgacacatacatatacatcaaattaaaaatattctacatgtttgttatatttcattttacattata

SEQ ID NO: 273449 - DNA, 519 bp, Cannabis indica
taaacttacatataccttataacaaaacaaaaatgatgtgttaacttataattgaccacaaattaaatcaccactaatccgaatccgataaccaagatgatatatttttttttaactttaagccaatatattcgtagaaaggtccggagataagtcaaggtaaggaattttagtacaaagacattcagactgaattaagataaaaaggggtcatgtatatatcttgtatatatatacatgtcttgccagcaaacttgtactgatcaaacacgtctcttaattaatttaaatgatatatatttataaataaaaactgtaataacaggatttgttggtttcccaggtttcagacaaaatgataggcaaatggcaaacctaacttccccatttaatattatgtataataatgctaaatttgtgtgacctctcacctcacctcatcacatggttcgactttgtcaatctatcattaattttgctcatcactagtttatggtttcggcttcataatatatatac

SEQ ID NO: 273450 - DNA, 2083 bp, Cannabis indica
cccctccccccccacccccccccccccccttcgttacaattaataataaatgtggattgaaattgaattactattgctactgaggcgctgattgtcacaggtttattgtgaacctcattgcttaattctatagattgctcaatagggacgactcttagtcttacctgtaatgttggtgacgaataaacgtagtttcacttcaatttcaaaacaaacaaatgagcgcgtagttttcgtagatgtaatttctaactttccaaataaaatgtcgttttttgaactaactttagccctagtatctttaaagatgatttagatacacaatacaagtgctaaaacatgatataataatgatgacggcgtgttgaccaccaaataagataatactacaatatatacaaatagggtcagaattagtattaagcgcagtctcatatgttaggttatagagttgggttggctgattaacaaatatgaacgaaagccaaacatggctgctgccatttatattcacaaaacacaatattcttctaatattttctttctttacaacaaaaaataagaataattaataattataataatcatcaccatcatcaatcagatcaatttctgaagctgagtttgctacagaggtggctttggtttaggaaggcatatgagtagcagtagacctgcatacaagtttaggttgttgttggttttggcaacatctggccttatctctcagctcctggaaagccctcattgtctccacatcaaaccctcccgcaaactggaccaccaatccccccaacaacaataaaatatcaatcaatcacctctacttaagtaggtcaaaattttataatttacccatttctttttaaaactgtaattttttgcatatcatacttttttattagtcactttcaacaataaatcactttaatatatttttttgaatatttaaatatatatattaaataaagttgatctagatcctatcaaaccgggtccttttgtaaaatgaataatttgtttttgttacctggtgaacacgaaaggcaaatctaactccttggactataagctgctcttcctcttccgggccaccaccaatttcaccaaccaattcaagctcagccgatactctcttcatgtacttcattgccaagtttactgatgccagcttgatctatatatgtgacaaaaatgtacaccattaatactgatctgtataatcatacagctcactccctaacttcatttgttgctatagtagtaaaaacacattcaattctccaccttgattttggttcttaagtaaaagttaaccaagaccagctttgtactctattagagtcttcaatatcataaaataaagttcatcattttgaaaataatattaaatagcgtaatatcccatatggggtcccagtagtcaagaaaaaatattatagcattgtatatatttatcattctttctttctctctcaccacctttttctttattgttaaattcttctttaaagaagtttagttggattgaggagctttctggtgtttcttcaaccaactaaatttaaaaataatgtgcggtttaagacacatgggaactcataaaaagtcaacaaaagagaaaccgaatctaactttactcataaatccaaatgacaaaatatataaagagaaagagagagaagaacaaacatacatatactaaacagagagatccacatgtacccatacaagcgggcgtgcgtggagaaaataaggcaaaatgaaaatccctaacgcatttgttttgtcattatacaaatattaaggcacaggtttatgtgacaatgtggggatcacctcaaaccaaggtcactttttgtccattaaaatctacacttgtgattcactaaaaatttataagtattaagaacaatttgtcctactttaggacacatgagtataaatccctcctaacaggaataattaaaaaagataaagtagtaggccgttccctccaaatatcttcgaacgaataaatgtgattgtggggatgtctaaatcagagaactagaagaaggaaaaacaagggaacaaaaaaaaa

SEQ ID NO: 273451 - DNA, 1049 bp, Cannabis indica
gccagacttagggaagctgtaggtcgtgcatgcctcaatttgaagaaccacgcgctgctgattgcgatgttttttcacaacataagtaaattcttgagatgaatggatgaccaggagtacattcttcaatctcgccaagcatagttagatcgcttcaacctagatgtcagtgatctaatacgacagttcaatcagagaactgatagacgaggccatgatctccttagggatcaacttcaaagaagactgccgccaagtttctcaggaactaggatagatcttcctctgccaaaggaaggagagacctttcctcaaaggtcaaatagtaagaatagccagatctcgagaaccagcagcatggggggttggctagggatcactggctcaatagcatccccattgtgcaatcattggccggctagccaccaataggagtatccatggacggcaagagtacatcacttcctcctcaagtggcgcgagatgcacaaaagtcaatctttgaccgatgaggatcaagggtggaaacaccaaaaatggtgattcgagaagtgaaaccgatcactccaggcatctagatccaccaaactccaacaatttatgtgatctaccccagtcaacacacatccaccatcagtcgaccgtggagtcaggggcagcccgaccgtgcccaatgcacgcctggccagccaaagaggcatcacgggtggccaaaccctaccctttgtaggtctggccggccatggaggagtactaggtgttgggttttgtaccctaaataaaactcatttcaatataatcagatttactaattaataaagattaaaattcattttatgttgcatggttcacatgatttatttcatgattatacttaatgtataaattctatcaagtttaaaacatatgtaaatatgtatatatatttgttcatggatattgtgtcgtcagcatagtggaatatattcatgattatatgttcaacagtttaattcccatgatttgtcaattcactggatttacactggcatgataatcagcgataaggt

SEQ ID NO: 273452 - DNA, 815 bp, Cannabis indica
aagcttctccgcagttgcaaggccaaaaataaatggacaggcaaaggtcgtcaacaaaatactaaaggtcaccctaaagaaaaagttgctggcctgcaaaaacaactgacttgaagaactgccacgagtattatgggcctaccggaccactccaagaaccacaactggacacttcccattctcaatggtgtacagatgtgaagctatggtaccagtagaaaccttgctcccatcccacagaagggcaacgtacgatccggcaacgaacaaagccttattacaagaagcgctggatcaaatagacgagctctgggatgagtcccagatacagatggcagcttaccaaaggtgactaaatacatcaacgccaaggttaaagatagaaaattcaccgttggcgaactagtcctacgaagtgtcttctcagccacccaagagcaaggagtgggggtacttgggccaaattgggaagggccatacgaaatcgaggataaaataggctccaacacctacaagctaaaaagaattgacagatccacagtgcctagggcctggaaagccgaccacctccgcaaatactatcaatagttaaagaaaaagtttatattctgtaaaataacctgtgtcggacaaatatatgtgatatcctatgcaagttccaagctaagtgacctaaagtggttagattcttaggcccttctttgaagattttgctctggttgaagatgggggagacatggcctggactcggtgaagttctaagatttcttggtcgaagccgaagaaaccgtggtcgtgaaggtcgtggagaactt

SEQ ID NO: 273453 - DNA, 769 bp, Cannabis indica
aaaataagttccaagtatctcgcagcgggactgccagacactaaaaataactatctttaccagaagctatttaacaccgttcgataatcatcaatggtgggaagcactttatttgtaatttatctcctattttgtgggcctccttcacctataaaaagaagagataagttgaaaaatacatcttttttgtattcattaataaaaaataatcctcatattatattttattaaaatatacaaacttttttgagtgggttaccccatatacccttactctctacttaaggctagcatataatttaaattaacctaaggggtctaattgggacatcatctataaaagtgagtataatttaaagaatataaaaatagaagtaaaaattaaaacaaataaagtaaagtgggtagataatataattttctctaaaaagagagctctcttagcttattttgaagattcagaaaactacccataaggtcagattctctctctagaatttctctctagaattcgaaacttttgattcttaaataagaactcaaagtagacgtagcctcattactatcacgacataagagtgaactactataaattattgtgtctctcattaattactttacaactctttgtattctctctaatctagcgagcgagtgtgccttagaagtttagtctaaatttttaagtcaacagtaaaaataaaccaataatatatttatttttatgagggcaactccaatagtagatattaaatttagtgttaaatca

SEQ ID NO: 273454 - DNA, 585 bp, Cannabis indica
aaaatagtttctcttctcttagtgtaaaagtctttcaaatcatattgtgcctttgttggtgaataaatatgtgatttcctttttttagattatttagtgtttactttgtattttaagaaaatacttaatatttattttattcattcttatctgatttcttagttaagaaactgtgtacaagttatatggataatatttatcatgtttccttatttatataatgtaagttaattcctataattctttctaggttcaatgcatacggttcaatgcatacgtttaaacggactgactgtctgtttaaatagaatctgactttcctttttggaaatatttttcattcattatttgattgttttcttattggtaaagcatgacctgtgatgtattaattgaaaatatattgttactcaggttgtgattttatatggaaaaaataaactattttattatgcaataaatactatatttatatatggtatttctttgtaactgatttattttattcattttctcatatgatcttattaatcactcaagctaggttgtgtaatgtccatggaaatttcatggggatgaacttgg

SEQ ID NO: 273455 - DNA, 2257 bp, Cannabis indica
atgctggagttggtgaaactaaaaaccatatatattgtacatgaatttctttttcgcttggttttattattgttggttgtcaaaatatgctttatatattattagcaaaattagaaactttggaaaatgtgtacaaaaaagcaaaattggatagttatattgactccatgtatgaataagaacacaaaacacgtgttagctttacaaacaaaagaataaaattgtgatactttgtagcgatgagttaggtaggaaacaataattctagacaattgattcaaggtaccactattatagtttaatttatgatcagaatctcaattatatattatgacttgttatgttattgatgttggttatcaaaatttagttgacaaagaaggcataattgcacaataattgtattcatattgcaactaatatttgccttttaaatttaaacgtctatatatattatttttgtcatctaacgtttcaaacaagaaaaagaaatcaacgaaatgagagtggctttttaaaacaaaaatatccattaagtagacctacttttcttttaaaaaaaataaaataaatcccattaatgctaaacttttcaaaatcattctctctttctatataaggaagagacatacatacacaataattttgatttgggaataatgaggcaaaaaagagttactcatgtaagtcaaaagtgtcaccataggtttaaaaagacaaatcgaaaaaaatttcttatgatcggttatgaactgaaagggttacttatgatcaagctgtcaaatgttggtgagtaaaaattaaccaccatcttaaggggatgttagagttccacattgttaatgcgtgaaaatataacatcatatataattgcatgagctagcgctctcattgtcacaaggccatctctagccatttggaggccttggcaacaatataaatacttttattttttgttgaaacttatatttattcaattagagcattctaaatactcaatttttagattttgtattaaaattataaaatcatgcataagataaccagtcaaatacacataatacgcacaaatatggataaatcatatatcaatagaaaaaagaaatcagaataacattaatccatagaaagtttcaaacaatctctattaatattcctaaattagagtttagctaacaatatccatgaacatactgataatcaaatccatgaaaaacaatcaataaaaccaaaaatttaaaaaagaagagaagaaattagatttgaagttgtcacgattgctccaatgtcctttttttcatattattctaagttctaaaaggttttcttggccttttttgaaatcccaagagattaaaaagtgtatatctcttaattttttctaaaaaaacaaaattgcccttgaaaattattgactcgtacgaatagcagcgctatggtgcctaacaccaatagaaaattggcattcttcttttttagtggcgcgccacgacaccaatatcctgtgttgcgatgctaattacgccacgacgccatcagtagcgccacaaccctaattatgtcacatttgtaaaacaactccctaatacaatttcaacacttgtaatttgattttggtttaacagtttctctccacattctgcttcaaatgtcccaaaacgtatacttaaacctaaaatcaaataaaacaaacataaatatgctctaaaaatacgtaaaaatattaagaaattatagattaagacacttaaaaaataggataaaattggccaaacaatctttttgataaatttttctaaaaatcttaattcttaaaataattataatccatctaaatttgcattataaattagaaaatcttcaagattcaaataatattgtttaatagtattttcacccatattaagctaattattaaaatatttaacattattaataatatatattaaaaaatcacaagaaaaataagaaagaagagttagaatgtacctttgtgtttctatttgtcttttttcaataaaaaaccaataataccataaaagtagttgaatgagaacattatttaattaaaaaataaaaatctcaaacacctaagtccactctaacaaaaactaatcaagataaaataccgatttcaaacttcagcttgttgtatgatctaaagaggtgaagcacaaccaaatacttttaagaatgtgtaatctcatttttgaccaaacaatatttcaaaaggtgatatatactttttttttttttt

SEQ ID NO: 273456 - DNA, 3532 bp, Cannabis indica
ggtaaaaggtgttaaaatacaacatagaatgacgaaatgagttagttcgcctcgcccttgtttgtgctgtccttgtcatagactttccaattcttgtgtaatcttttcttcttttttccatatatagatatatataaatgcatatatatttacaaatatgcatatagtttcgaccctaaatatacatatataaatgacaaattaaaatttttaaaaaatagttttaaattagatcgatgtcacactttgatgatcaactgatataatatatcaattttcagagctaaaattctcgaaccgtaaaaaacgtactatacataaatatataacatgcatgtcttgacattcattttattaattatatataatatgtaggatattgccatgcatatatataatatatatgtatatatgatggagaccttatatagattactacactctgcatcatgttaactcctgtatcgaacgaaaataaaagaaggaaaacctaagtaattaataatgttatatattaaataaatatatatacatatacataagcatttcaaagaaaccgcgcataacccgccatgcatttacataatatacttttatttggatgggacagaatcataaacttgaccttttataattgcaactattttatttagattggacaactccaaataaaaccattaatttgcacaccgatttatgtttcttcaaataaagtacacagaagaagagatcatgtcgagatcaaatcagaaggcttgatgttaagaacacgaaaagaagaggatcgagccatggagatgaagaagaaaaaataggaaagaaaaattacaaattaagaaagagagattatttatatcgatcatgtatattcatgaaccttcaccaaaatttccaatacacaacgtacgcgggattaaatattttaagcaaattaaacatttggcagttaacagttatatacatatatataaatataaatatatatatatatatatatacataaatagaggtcagcttatgaacaatttatgggtgtagacatagatcgatatacggtcagcttaaaatatatatattagatgcactatttggtgtacacgtggaaaacttataaatttcaaaacatttgcaaaagttgttggtgttaagtaatcaatatttgcatatatttacgtggcgtataatccttgtactttttttctttgtagatatatcaaccactagacagtatacatatatgcacacacaaatataatatatatattaaataaaaaaaattgaaccaaaataaaactatataaacaggtagttgttaggttgtaaactgataaactgcctgtttccctttattcaaaactttctaacccataaaacccttgttctcccttctctcttctctccaaacaaaccaaacacattgcatatattcctacaaacctaaaaacccacatagacaaaaactaaaccctaataatggattcatctccatcatcagttgtttctgagctagaaggagctcttcttaaagacccggatccctttgcttacttcatgttagtagcgtttgaagcctcaggtttggttaggttcgccttgttgctgctactatggccgttgattcggttgatggaggtgatggggatgggcgaagcgggacttaagctaatgatattcgtggcggttgctggagttagggagtcggagattgagtcggttgctagagccgttttgcccaagttttacatggatgacttggacatggaggcttggaaagtgttcagctcttacgacaagagggttgttgtgaccaagacgccgaggatttttgtagaacggtttgtgaaggaacatctaagagcggatgaggtcgttggcactgagttggccgtcaaccgattcgggctcgccactggtttcgtcgaatctcaaaacatcaccacccatatacatgaacgagtttctaacatgtttgaggatgaacctccttctgctggactaggaagcccatcttctgtttttgcatcggttctatctttatgcacggttagtcgtcaccatattacaatcttttacttattaagagagtcgtccacatccctggtttagaataactattagtaatctatatagaattttttttaggggctttttctaatttttattcaatttcataacatgtccaagactctcttatatatatattatactattacgagtcttactaaatcaactatatctagtagcaatatattattattagtgtaatatgatattaaatataataatcaattttactaaccattttgtgaacgtacacgaaacacaggaacaaatttatccaccattcattacaaaccaaaggcaagacaactccgtcgtcctccgcccacttcccgtgatcttccacgatggacgactcgtaaagcttccaactccgtcgacagctctcctaatcatcctatggatgcccttaggcatcctcctcgctgttattcgcatttccatcggcttaatactaccaatgtgggccattccctacgtctcccggcttttcggaggaaaagtcttggtcaaaggcaagccaccacgccctgccgccccaggaaacgccggcgtgctttttgtatgcactcaccgaacactgatggaccccgtcgtcctctccactgtcctcggccgtcgcatcccagccgttacctactccatctcacgcctctccgaaatcctctctccaatccctaccgtccgtttaaccagaatccgccacgttgacgccgagaaaatcaagagagagttgtcccacggtgacttagtcgtttgccccgaaggaacgacatgtcgtgagccttttttgctgagattcagcggtctttttgccgagttgacagaccgaatcgtccctgtggcgatgaattaccgggtcgggttcttccatgccacaaccgctcggggttggaaaggcctcgacccgatcttcttcttcatgaatcctaggcccgtttacgaagtcacgtttttgaaccagttaccgaccgaggccacgtgttcgtcgggaaagagcccgcatgatgtggcaaactacgttcagagaattttggccgccacgctagggtttgaatgcacaaactttacgaggaaagacaaatacagagttcttgctggtaatgacggcactgtttcgtacacttctttggttgatcagctcaagatggtggtcagtacctttaagccattttttcattagtagattggccacaaataaatatggacccctatttattatgttctttgattttttttcttttttttgtttttgttatgtatatttttgggtttgattttttgtttttggtttgatttcaattatttattttgtggaactgttaaataacttatgtaccaaaggtgtacttattgttgatgttacttatcattagtgttaatattttgttatcctttggacttatattaatttataggttaattagcaatttttttccctgaactttgacatgtactaaatcatgccccc

SEQ ID NO: 273457 - DNA, 1057 bp, Cannabis indica
gaaattattctatgttgcatggttcacatgatttatttcatattatgcttaatgtataaattctattaagtccagaacatatataaatatatatttgttcataattatagtgtcgtcaatcagtggaatataatcatgattatatgttcaaaagtttaattcccatgatttgtcagttcagtggatttagactgacatgataatcggcaataaggtatacttacaccctggataagtgttatgtcctttccagtagggctgagcataaaatccagaaaaccgaaaaatcggttcaaaccaacctaccgaacactcttggaaccgaaatcgacggaaccgaaaataaaaaaagttgttaacgattaaaactgccattgaacggtcggttttttttttgtaataaaccgaccgaaaaaactaaaactgactgtgatacatatatactaatttattaagttatgttttgctttatgtagtataaatactaataatatattattattttattaatattaaagttaaaagaataagataattaatttttgaacaattaatttgtatgtttgtagttgtaaaatgtagaataataaatttatagaataaattgcatcattttttttttttaaaaaaaagttcagtttgggcagtttaaactgaccaaaccgaggttcaaaacggtcggtttaaagataggttctgtattggtcggtcggtttttggattgtaccaagccagatcgaaaactaaattctggatttttatatagaaaaaaacccacctaaccgaccgatgctcagccctactatccaagacattggcaaagtataccagtatcggatgtatgaagtatacattggaagggaccgatattgatcttggataagatatcataaacttaatgttatatctttctaagtcaatatcagtggttgatcttaggtctatagattttaatcctgatatggttagattcagcttaattgtattatttatgcttttcaagttgttcgtggaaggtctaacttatggttctggcggatatttacatcttgggaac

SEQ ID NO: 273458 - DNA, 608 bp, Cannabis indica
tttgccctcctcaaaaactggaaaatatatatatattattgcattatcttcatggccacgttgagcaacattattaggcaaaaaagaattaattcctcaaaaatatattaatatagcttaaaactttacatgtacattgtgagtgaacaatgtgcaatcatcaaaaagcttttattaaactaattaattttactatttatatttttctcaaatcccttctgaatgattggtcttgtttgtacgatttaaagggtacataattatattgtttggacatcctaaaaatcttagctttactcagctcaattataaaagagtagagatatataggacccaatagaggtgagatgagcacacacacattctataccatagcttttagataagacgtatttttataataatggaataagggatagggagggaatatatattaataatattgttatgagatatgattttgtcccgttattgtacttttacggattgtaatccgtgatgtacggcagctgtcagataagagaattatttgatctgacggctgagattgatctaggggtaattagggttaaaaaatagaaacgtaccctgacactcatttaatgtac

SEQ ID NO: 273459 - DNA, 4238 bp, Cannabis indica
cttgctattttaataagatttatacatatatataatattgtgtattttcgagttaataatgtttagattcaagattaccttggattatatatgcactactgttgttgtttgttgttacttgtttgtgatacagctgttgatggtggatgtgactgtggttatggtgaaaagttgttatgttctgagtcttaatgttttttgtctccaaaagcttgtgcaaaaaaataggggtaagctctttcttcctttgacatcgtccttgttcaacggtatatatttatttcatgtgatgtggggatatatataggatttttttttaacattttttgtttctttcttttatatccatatgcacatacatatactcatactcatacttatattcctatgattctttctatagatcttattttattaattttgctaaagctaagataaaaatatatgaaccctaaagtgatcgacgtacaaagttgttatgactgaaagagaaactagatttcttacactgatctttaataagctgtttcgctagtactaaatatgtatgtatatatatacacacacatagtggtcttaatatcaatttttgttccttgaaaaaacttgataaatgataatatgaagcgattaacttgggtcgtactatactactttcttcttattctttccgggaacagaaaatgttattttatggagattaaacgtactgtgttcttttctatttaatttttttttttttatgtgtggtgtttttattgggatcatgtgttttgtccagatgaaaccctagctattggaaacagaattttctagcaaaaagaaaaagaagaagaagacaaaatagtgtacatgttttttgaaatttactttatgggaactttctttttactctggtattgggactttttttaaaatggggtcagatacaactttttagttgcagggtgtgtctgaaacaaaccctaaatatctcgttcagaataaaaaattgttagcagttgagaaaggtgagttagggtttttatgccttgactgaaacttttgcaggcttttcaataatgtggatgttgaccactttttcaaactttgatcagatcatggactcctcgctttttctcttgtgtacaaagaacccatatacctaataaaatctctccttccctccataatttcctgtcctgtttctgacccatacgaattaaatggccacgtgtcctctgcaataaactgtgtttccaaatttaatttaaagagctaaaaaaagcaaaaatatgtagtatacctattatttttttttaaaaaaaaatatcactccaataagttatttcaggatgtattttttttacttgtttctgtattcaggtaattatttttttaatcaaggttcttaattttacaacaattccttaaaatgcattgacttattttaggatcaagaaaaaaaatttatttaatttttttttcatatatctcctataaaattttagaaaatatagaataatctacaatatagaaaataatgttcaaacaatctattttacacgcatataaaataaaataattacgctcgtacaatacactgtttgaacgtaattttcggcgtgttaaattatttcgaatttcttaaaattttgcaggatgttttaaataattataatttccatgccaaaaaaagaaatatactaaaaaattaatttcagtactgaaatggataaagatgtattgacttattttaaaaatttgactaaaattttcctaattttttttttaaaaaataaatagttttttttattggtattacactacgcttgtaatgaaagaataattgctagtataaattaatatttgaattatatttttagtaatatattatttaaaaaaattgaaaaatttacaagtatttctaacatacaccattattaaagaagaaaatatttgttagatgggaaatagagtgtacccgtaaaaagtacctagcaaacacttcgcagtctgaatccaattaatcctatggatattttctttattctttcgtattatttaattcaaaaactgaaaatacaagaaacaagatgtaaatattctattggatgttcaatcttctttttgttaaatgaaaaaaccaacacaatttcaaaatatatacgaaatttttcggaaccacaaataagtatgtgaaaataaaatgtaactgatgataaatactatatataatatcttttttaattctataaatgtttttgtttttgaaaagtctaaaagtaactagcaatactgcaatcgacgttgattttttaacaatctagaatacacaataatacaaatgatactgtatatgaattaaaattgactttctcaacctagccatataacaagaatatcagtacgtaccaattttttttttaattctaatcctatctttaatagagtactataatatatataagtactatattaccatatatatatgcattaaattattatataattataaattaattttttttttgtaactatattataaattaaatttaataatatatatctcagctttcgatttttattctcactatgtcatgaatattacataaattatttgatcattcatttggttgatgatgaaaaagttgactagatttctttatttatttattttcgtttttttggctcacacagctttatatatatagttttgttgttgtgattttatccattcgctgtttgtaatggtagtatgtatcatctggttggccactaactgccacgtgtacggaggggatgaaaagtctttgttgcactgagaagattgatccaactttagggcacaaggtgtggtcttactgtatggggacaaagaaaccagttctcctgtataacatattatatatatacatatatatgaatatgaatatgatctcccaaccatctaatgttagtgaaactttcgattaaaatcatatcactggagaagatgtacagtgatgtatcatgtggttgaacagaaacccccaccttctattcctcattctctaggcattttttatgctataatatatatatatatatatgtacggttatggggatattaatattctatcttgatttcgcttcacttctaagaatatccaccaagtcatgactcatgactcatataaagtacatatatatatttatatgctttcaaaatacatatgttattttgtatatatatatatatatacacactttaaataatcgtagggtttttattattattttttgaaatggaatatataataatggagggtttatttctatatatacttttttgtatacatctttttggtatgttatttgtatatatgtataaacaaatgtgcgtattccgtggttacagtatatgtatattaagttgatctcagcttcaataatattgtctgttctttgtgaaccatagaaaagttttgtttcttcaatgtagtgattatggcagaccaaagtgcttgggagtaatgcaaacatttgaggtcttggatggaaaatgtaattatatatatgtacataaattaatagtctcattgttgggctgtttgcctagagctattagcctattaataattgttttttatttgttaattttattaagagtatttatggaactaagtgggggagtgagtggtaataaataataataaattacctctttcggtttaataattcgttttataggcaaaaaaaagttgatatattaggtaaagagtacgtgaaaggaaaaaagggaactaactataatgatatatagatggaaggagtagtcataagtgataatcaacaattttttgtatccagctttagactctaatgatgttgctcccttgagtaaaatggtaataatatggttctaaaagtactgctcaattttgtgatttgggttaattaaaatattattgaaagagtagtacttaattacttttcacatgatatatggcattcttaattaagtaaaggtcacgacgttgaagatcatcaaaattaaaattgatgaaattgatgaggggccgggcgttgaaagttgaagtagtattttccattgcttaaaaggtctagttgaagattcaaaagtagaaaatctgaacaacctatagtacattcttgaagaaatcaataaccttatttatatatttattttatataaattgtggttatataacataatttttaatttaataattgtttattttaggctaattagtaat

SEQ ID NO: 273460 - DNA, 1117 bp, Cannabis indica
cctccgtccaaaaatcacagttaagtgccacggtagactgtccacgtgtacacacttgtacacgtggcaaatttttaatggtccacgtaattttaattttaaacatactaaaaataatttaaaaattaaaaaaatctgtttttttttctttttttttctttctctttcttctcgatcccctaaccctccttcttcttcttcttcttctagccatggccggcatcaatagagaattagcaaattttttcttgccattacagaatcccttatttaacatcatcaatcaaaatggagaaccacaccctaaaatttatctcaccaaagatttctgggtaaaaaagaaaaacatttaccaaagaaaattcagctgtaaatatatgaaatgactgaattgattgatatttcaaatacattcaaatataaaggccaaaactttcttggcttaatcaatcaaaccaatcaattaagacgaaaatcaacacaaaaaagttgaattacggacttaattttcttcccattcttgcagaaattgttaaattcatgtacaataaaacccagcatatttcgaagattaaatccctaaaaagttacagaatttaatcccaaactaaaacaattcacaatacattaacaaaaaagtaatacacatcacaattacaaaccccaaaagagagaagacatgggggaaccgttcaatgtcttcggaggaagaggaagccgatgacgaaagtaagatgaaaattctctatttacctgttgttgttgaggttgactaaagagttgtagattcgagaacagcctaggcgtatgcgaggataagctctgagcgtgtagaccgtggtttggcggagaaaatcctccatgatttccacgaacagattcaagcttcggattggaggaacgtaaagggttaagggcaccgcagagaacgccaccgcgaaaaacagctgcaacattttggtttttctttttttttttctttgtttggtgtaaaaacgaagaatgaaagctcaccacgaaaatcagaggaattgaaaagaaaaatctggtattttctgtctggttctcgagaaaatgagagagatcgaagataagaaaaaacgacaagaaaaagagc

SEQ ID NO: 273461 - DNA, 610 bp, Cannabis indica
agtccaccacaatcactttttttcacacatctgttatcaacactcagagttccttcacagtataaccctaacatattatatagatatattgaacaagcatattattcatgtgaaagtaccaggtgggaatcagatcaccaaaattggattaagaaactgcaaatatcccattaacaaacaagtgtgaaaaatcagaaagttaatttgtatgtaattcaaacaagtgtgaatagaattagtagtgaagttagtttaaggttttcccattaacatgtataaggaaaataattacatcacatagtaatttttgttaactaagcaagatcttctataccatgttttctcctcttacaaatttaagttttgagtatataacacatatccataatatgtaatacggttacactacaaaaaacagctaattttagtaataactttttagtcacaacataaattttttgtgactaaatgtgactttaagtcacaacaaaatgtaattgtgactaaaaatacatttacttgcaacaaattgtaatttttatgactaatacctttagtcacggaacttttagttataatacataaaaatgatattttataattagtcaca

SEQ ID NO: 273462 - DNA, 1417 bp, Cannabis indica
atttctcaataccagagaatggctagtacaaaggtctgcttgtgcaagcttgggtcttgggcttgttgggttactttagtggaatccaagaccacgccaactaggactacctttttactggattccttgtcaacccgaggaggacctcaaaactctctctcaaaaatctatgtccgttcctgtggagacagagataaaagatcaatggaagcaacacaaaaaaataaaataaaatataataatccagatcaaaccaccattcgggagggaagataattactctcaaaaaactcttgtgaggatctcctgtaacgattaactatatcttcttggtttgtattgatcgaaagctcctcagtcttggaatccttggtttccaatttaaattgagaattgaggttcttgggagcgtgcagagaaggaaaatggttagtgtatttggtgttacgaatttggacgggtaagtttctgaacttggatggaacatcttagcaagagaatgacaatccaatctcaagatgaaactcaccaaataactagaagtttgtggaatatgccaagcttaagccaccattttatactcaaagtccagtaacaagaaggccaaaggttgggaaatctaatggttgggagtaagctagaagatgaaaagatggtccataatgacccccgaaaccatacaaccaccagaatcaaaaaaggcatttttctgaaagggattatgatgaaaatgccctttgtaattattaaaaagcactttttattaaaaagaaatttttaaggggcaattgctatactggaaattttgttgccatttcagtggaggacacgtgtcaagaaaatatggatcgatgaaaccacttttaatggaacaactcattaattgcgtaagtaatagagtatacttgcaactcgcggactataaggtcttatgcgagatagagatatacaaactattgtctcgtatattaacgaggaaccatacgtcattggatgcataaagcaagacatcaacttcgttacacctgggaagacgaaagcgatgcgtatcgattgagaagacacttagcgtataatatgcgaactaagtttatcaattgggagaactaaagacctaataggcgaggcgcttatatcgttgcaggaaggcacactcctgtgactttccccaattagtttcagacatctttcagtaagacgtatagtcttgacaagtcaaaagctaacattcaaatgattgctgagatattcttggtagataagaattgtgattatcaaaatgaagcgttaagcgatgaggcatacattgtcgacctcaaaaagatagggggaaaagctccatctcgctattaaagtcattggaaccgaattcctgtcgagacatccccaaacattatgatttaagatgtgtttaaac

SEQ ID NO: 273463 - DNA, 625 bp, Cannabis indica
ttgggatccagattctgacccaggggttggaataaacctgtagtcggagtttgcatttgggacccaaccctggacccgaaccctgacaaggacccgaaccctcactcagacctgaaccaagtccaacacccaaaagtggacctgaacccgtaccatgtgacccaaaattggaaccaaaactggaagttgaccgggactggaactaagagttggacttggaatcataactgaaattggacctagatcccgaactgtaaccaggccaagacccgaactccaaattagacatagacccaaattgggagccggacccgaatcccaacacaaacttggactcggtacccgaacctcaacctgaactcagacccaaacatggaatcagactagggacacagaaccaaggcctagacctagaaccgcgccccaatctcgatcccgaacacaaactcagaaattggaccttggacctgaaccagaacaagaccgagactcgggacagtgatcctaatcatgactcgggattcgggtaacagggcctggaacagactagtggtcggtatctagaagtgggactcagactaggaccagtacccagataaagaaccaaacccgaacccagacctag

SEQ ID NO: 273464 - DNA, 1014 bp, Cannabis indica
caaagttaaaagagaaaagattgacaaattactcactatttgaagcataaacaaagtccagacgaagctgctcgggtggctctgatagaaatctcatgataatcttggagaaaattccttcttattgctctgcgtatgtttagtagagaaaatggtgaaagtaaaattctcaaggacttcctgccttatttataggccaattggtgaaaagaggtaatcattttgaaatacctcagacgcttcgatttccccccaaatattgggaaattaaaaataatcaagtgtaaccgccaaagcatgcaaaagaaaccgggtttcgaggcactaattaattcagagccttaattagccaaaaaccgaagagacacctggttagactcagatcgaatcacgaatagatgcgcgcaccatgtgtcactcattcaaatgtaaaagcagctcggataaagtctccacgcaacttctgaagccccatgcagactttgggggcaaatgctatcccaattttggcactctgacatggcatcacacgttggtgacacgtggaaccgattctccatatctgcccaaaaaggtgttccgagtagagcaccacatataccttcacgggggaggtcctagccgagcagtgaacaattcgaacagcatatcatcacttcgcatcttcatcatttacaccgtgaaggataaaaacaatccctataagtctgggattgtatcccaaagatatggcaagcagcccaaatccctcaatcagtgtattctatacatttaatgtgtaatcttaccatttatagacattgtaaacacaaggtaaacaatcgctcaagcacaaagcactataaatggtgatctattctcactaggcaaggggtcgaaaaagttatctaagaaagcatactcatagatatcattgtaaaagctctaagaggagaatcattgtattctttgttcttaagtcaatacaaatcaagaggagtaggctattaccgaactactcggggccgaacctct

SEQ ID NO: 273465 - DNA, 547 bp, Cannabis indica
agaagcttttgatgactccgtgttggttgcagaagtcggtgaattctttgcagccaaactacttcccattgtatgagtctatcttgtgaggcaagccatatcgacacactatgtttttgataacaaagtctagtgcttttttagcagttatagtcttcattggctcagcctccgtccactttgtgaagtagtctactgctactatggcatactttacccctccctttcctgttggcagggactcaataagatatattccccataccgcaaagggtcaaggactagtcatcagagtgatctcgttgggaggggctctgggtatgttcgcgaatctttggcacgaatcacattttcggacgtagtctatacaatcttttttcatagttggctagaaatacccttatctcagtattttctttgagagacttaggccttctgtatgatctccgcagaacccctcatggacctctagcataattttcttagcttcagggtccgatatacaccttaggtactgttgggttttatgccctaaataaaactcttt

SEQ ID NO: 273466 - DNA, 907 bp, Cannabis indica
gtgcaaaaggcttacgataagggaacccaatttcacctctgatctttattctggtgatggaatatataacttcgactctaaaatggaagactggaggtaagagttttgcttttcatcccttatgcaagagtttgaatttaattaacctatgctttaatgatgatcttattgtattctgcaaaggaaatgctaactcagtcaagagcatagctgatgctttctctcattttagcaactgctcggggctcaaagcaaaccagcataagcctaacatttattttgcaggaggtaatgaagcaactagacaagagattcaacatttgataccctttagcacagggaatctcccattgaaattagagcaaccaaatagagacaagaggattgtgagaccatcatcaagaagctcaaaatgaaactagacacttgggctagtcattatctctcatttacatgtagagctctcctcattaacactatcttgattggaattcgttgctagtggatgacaatttttcaactccctcaaaaggttacaaagagatagatcggatatgcaggaattttctatggggagaaaaagacaatacaagtaaaatgcacatggcatcttgggaacttatttgtaatctgaaacaacttggaggattggaatttagagagggtcctaaatggaacaaggtattattagttaaatacctttgggcaattgattctaaataagatgtgttgtgggtcaaataagtgaattgcatttcctaaagagcaaagacatttggtctctagagctaaaaaaatgatgtgagtcggtattggagaaaagctcttgagacataggaaatgtctttcaccaaggaggacattgttcaagcagaggtcaatgaaaaatttaagattgggataatct

SEQ ID NO: 273467 - DNA, 688 bp, Cannabis indica
taggtatcagattaatccaggagaagaacattggaagacaatcaagtaaatcataagattaagaagaggaactatatgttagtctataacgcgatcccggcacttcttaaaattcgcaaagattgcacaataattgaaaaagcactgtaccgtgccttagcattagggcgttacaatcctaaaacccaaattagccctaatcctcctcttcgtgcttgctaatgtgttcacatttcagaacctttcctcttcgtgcgaaacaaacaacccaaagaccaccaaaacttatagattttttctctccaccatcaacattgaagccaaagattcctagcttttgcagattgaccacgaggaaggccaccaaagaaagccaaaacatcttcgattctgaatagcaccgtcgccgttggtggtgagttgagaggtagggaaagaccttcaaaggtgaagccaccgccctattcgaaactatccaactccaccgttctcttcaaagacaggcctccaccgttatctttcaaaagagtaaggaggtacgtgaaatttggattaatgggtctttgtagtaggttatgctaaatattttggattggcattaatgttctcttaattagcccttaatgggcgatcatcaaattaaatagtcaattgttatcagtagtggcataatgagattggatgctcg

SEQ ID NO: 273468 - DNA, 4710 bp, Cannabis indica
actatattaatttagtcttgtagagagtttttctttcttctgatcttttttttaatgaaaggaagtttgagtgagctagattgttgttatttctatctaattatgtcttgtagtttagttatgccatcattatccataagaaaaaggatgaaacatttacttgtacagaagccagaaccctcttggtcttggtttatcaagcacacattcctcatttctcatatccattcttttcaataaagttttcattagaaatataaattgcaattttaactttcattctcagtgtctgctctttactagtacattaaaatacattaaaaaataatatgagaaaatgcctgatttcaaaggagatggggggagggaaataaatagtttatgcacaagtgctctctgatactgtaaaatctaaatttctacaccagaaaatgaaggagtaaaaaaaattgtgacgatgtcttcatcaaaagggaagagactccagttatgtaagcaaattgtagtcttgtctgtgctatggaagcacatactgctgtaaatgtttggtcctcttcttgttcttcagtttccgaaatgcgcatgattcaatttgccttattctctccctactcactcccatcagctcaccaatttcttgcaatgtcttcatccttccatcctccattccaaatctccatcttataacctgtttttccctaggattgagactatccagtaccttttccaagtcctgtttcatgaactgcctattcagcacatcctctgaagtttctgcatcaggatctgatattatttcctggacaacagaatacagaacccaatagagattaatactgaaccccaaaaacttcactataaattaattagaattaagacgaggccccaccgaaggtttaaggttctggttgatcccaattttttgctccaaggatctaggagcttttggagtcaataacacagcagcaagccgcttcattgacagcccagttgcctctgcaacctcttcatcattagggtgtcttccatgttcactatacagttgctttcttgcctccttaactctataagtcgcctccaccatgtggaactgttgcatcaaataacatgaaagaatcaataaaagaaccaaacatttgtgcttttatatataaacaaaatagcaatggatttagcattaaactttctccttcatgctaatacaaatgaaaatcccatagtttggaatagaagaactgctatcaagaacaccggccaagatgaccattgcaataaataacatccctacaaaattagacagcattggaaagaaaactgactggtaagcggatagttctggactgatcagaaagagacttgcggactgcctgtttaatccaccagtgtgcataagtggagaacttaaaacccttcgacgcatcaaacttttctgcaccccttactaggcctctacatccttcctacaaattaaagagtaaattttatatttaagagaaaatgtaataaaaagtgacaagcatttaatttaaaaattcacttgtcccctactttcacattattacatacctgaacaagatcttgaagattcatcccagctccctgataatttttcgcaattgatatgacaagacgtatgttacttttaatcattttgtctttgcataaaatgccatagtttatgcgccttctcaaggtcttttgatcaattccagctgctgcagcccattgtgcaaacgttggctgactgccacatcgttcagcaagctcttcctggagcttctccagtttcaggagcacctagattagttttttaaagagacaattaatacacgcattagaaactaattctaaagaggtcaacaattctaaggtttctaacttgcaaaaatattatagaagtattccccatcactaataacaacaggactaagttcacaaaaactaacaatatttccagaatttactcacatattccaagaattcagaagaagcctagtaggatttaatgaataacttaaaggcttcctaaaaaatgtacattactaactaccaacccaaagcttcgttctagtgctcaaaggaaatcaaagaattggtctacaaactaccacaaatacctttctctcgttaaacaattctagaagaaggtcaaaattatgtttttactcgcatcgtgaacacatacctgatggctactattttaattggccaaaaataatgaatcacaacatccaaatactattatcctttgaaaaatatggaacaaaaaacttccctgtaggataacagtgatgcttgcttcgccagctaatagctggaaaaacattatttgtgagctcacaaagaatcacaaatttaccattagcattctggtgctttagattacctcatatttcatgtttatcacaaaaaacatacacaactacaagatcaagccccttgcactacaataattgcttttttaaaaacaaaaaaagctacacaaaataatttcattaataagtatatttttggagaaccaaaggaaaacaagaaaatgattatgattccaataccctcaaatagataaaaactgataaatagtcacacctgtattccttctgatagctcaatctcctcagttccagtcagaagcctagaagagctggtagttgatctcaagtaacgcaatggatcagaatgatctacatcttgtacagaagaacgttttttcctgctattagagccagatttcacagacacaacatttgcagcagccttctctgcagctctgtctcttctggccttcctttcagtttggcgatttgatcttacagcggtgctactagagagttgttcctgcagtgcttgaagttcttcacatgttggtccctcaaagtcggactcgcatttcaggggctgatcttgcatcagagcaatctcacttcccacagaatctcctaatacagcagcttgtgtagttttcatattatgaacacccttaaaatccgaataactagcttctaaagtaactacagaagtactttgatgtttttcagaagttttcactagcagagcagcatcctttgcaaccctcacagctgcttttgcaagagtaacagcttcagcagcagcagcagctattacagcctcctcgctggtaagaagagtttctgtggctaaagttgcctgaaagtttgtctgcagaaacaaaagttactcaaacattacaacattaacctatgcaataaaaatgtgaagactaaagagaaatggaagagcaatttagtgaacataaatacatggcaatacagaaaacaagaatttttacctcagtataggtccagggtctatttgcagtggattcagagttagcttccaaggaaggtaacctgagtttgtccatgctaagaacagtagaggttgaggaagagggagtggataaaacacattgtggccaggaagagcccggatctctagcttttgctgcataatgcaaccatggcaagattaattagttaacacgatgaaaattgcaaaaggagtaatctttacagtcttaaatgccagtaatgatgagaataagtcgtattgcatttgcaggtaagaggtaactaagataaaaagagaaatacccagaaaggaatggatattattagccaaaatcaaaatcaaaattagataaatataaatatatttatgtgggttgaattaaagcttatctcttgaggtatgaaagtgagtactacaaagatatcatacaataatgaagaaaaataaacaaacaaaaaaaacacttacgagggagatgagaattgggagtagcggggaaagagtgggttctgaaggcatgcttttgggcggtaaatgtatccggtttgcaattgaactgtggcaataaacaagacatgcttcgtcttcttcttcttcttcttaatgctatttagcaaacccaccaccaaagttctaatggtaatgtttatgcatagaaatggaaagaggaagaataagaagatgatggtgatggtgatgaagataaattatcagtctccagactctggtctccaccgttatcttgtctaacggataagaagaagaggaagaagaagaagaagaaaagggaagtagtcagtgtggtctcatctcatttctctcaatagaacccctcaggcctcaactctcaatttggaccagtcagtctcccacacgcacatatatccaattgtacccaacacacgacgtcgttttacattctataataaaaaattaaataaccttaagctaggccttttataatagggaaccttttttttttcttttttgaaaaagaatggaaattttattaacaagaatcaaccattacattaaataaaaattcagcagggatatcatctatactgaaactgtaatttaggtataaacaagaattacgagcaacacaataaacaactttattcacagaacacttaacaaaagataaattgacaaagttcagagaaactaaaaggagcgtacaatgttggaccacaacaccaaaaggggaaggcaaattcaaagaactaaagaaaacttgcactgaaactaaagaatcagtttcaagttgtacaacttcccaacctttcaaatcaatccaactcagcgcttctttgatccctaagtctccacaaaggctggctttgcccacccatcatgacacaacgaatgagcttcaatcaacatgccagaactatc

SEQ ID NO: 273469 - DNA, 957 bp, Cannabis indica
gggaacgaaaactatatttccatcatcttattttcacatttttgttgaaaataataaaatgtgtgactatgaaagatgagggtacctagatttagctcggcagtacttaatcttttttacataaatatatggttctaataccagggtatagcagcagcagcaaagtactttacattttggccaaaaatataccctgttattttcttcaaattttaaagaatatcattgtaggccccttattagaatcaatgaattattcaatctcacctcaccaccacacacatctactcaatcccaaagtcaatctaatctcataacgggcatagttcttcttcatttattttgggggaccagacttgctgctactttttctttttctatacttttgctaattttgctctttttggcaataattttatcattttcataagcattaaaatacatgttaatgcgtttatagcctttgaaggatgtgattgaatccaaaattgaatccaaagctcccccagttgttgaacattattttcaggctatcctcagaattggggagaattcagttctgtcaccttaaataaatttggtacgagaaagatgcccgagaaattaaaaggactaataacataactagttgaaacatcagattctaatctggtttgaaagacaaatctcaaagtagtactaaacaacagtcagcatcaaattaccctatccaaatagcttagatactaaaagttcaaagacaaacctgaaaaccaaacgaaaaaataagggggcgaaatataacaagaaattcctcatagttttaaccatactggagttatagtaatatgatcagtccgcaggttgatcaacctcggcataggcagtatcaagttgggcttgctcggcttcctgcacctccttctcggtcttcctacccttctttgacttgtagtacacactcatgaaggttccaac

SEQ ID NO: 273470 - DNA, 605 bp, Cannabis indica
catagtgagtaagacggtggtaaccaaacccaaaggagagaaagagatccaagcttagatcttgataatactcttagacagaaagtgcaacaccctactagtttaggcgtgttaacgtgatttttaacttaactgtgcagctcgttgctaatcaacaagtttattaaaaatcgtgagtaattaaaactttaataaactaatgaaaaatactaaaataacatacttggattaaaccgggatcccgtttacaaaaatatttacaaaagttttactatgcttattacaaaagtttgttgcccagcgactatacaaaatgagcccagctgccccaaagaccgtacgctcaggcctaaccgctccgacatgtacgatccccatctgcttgctctaattgctgctcaaccttagccttgcccttacctacacatgcaaacaatatctgtgagtcgacagactcagtaagaaaagcataaataataatatagcaataacccggattataatctggtgcccatacacacaaacataatcctatccccgtgtgctgagtctagaaaatttgtacgacaatactatcgaccataatatctgttggaaattatttt

SEQ ID NO: 273471 - DNA, 1009 bp, Cannabis indica
gcccaacaagaaagcaataaaactagtcctaccctgactctctaattcagccctagcaaagtctcgaatcacgaggttggcttcatcatccccgagaaagctgtccgaggggagaaaccagctggaagataaatgggctgaatggtcctggggaataggcgccggaggtccagagcccatccgggatcgacccaaaaaatggcctaagtgggaaaaataatactctttggcgtgattcccccacatggtagaaggctttctaaacctacgaaggcgctcatcgaaccctataggtctaaggtgggtatactctcggacgggaggaacataatgtactattaaaagagacttaccaaaacctgaagtgctggcatcgggagcaccagcattggggaccgggaccacaggcttgggcctgggggttctccgctccggcggagcttccagacgaagggtcctcccggctgccgcctgggccttgatataagccagctcctgttccctcttaaaaagatacttctggtaccggtcctccgccgaggcgataatgtctacccggagtgcccttttcgctgccggagtgctcgcgtttgggcagatgaccttggaaagattgaagtcctccaccgactgattctcagaaatcagcttggcctttcgacagttctccgtcgtaaccaagtccccgacgttgagggccttcttgtcatacgtggagaaagtcttggcccgctggaggaatacttgggtaggcgcggtccgcatgtaatgagggatcctaacccactccgtgagaagctccgggcggtccatggccaagaagccggaggagaagaagaagcggtggcgatactccttcacatgtttttgatagttgaaagggactgggccctcgttcgaaggatgggcccggaggccataaaatccgtctttaaatttgtcccccttcttggggacagaaataagttcgtaaaaatacaaaattttcaccggactgggcgaaccccag

SEQ ID NO: 273472 - DNA, 1501 bp, Cannabis indica
atcttacccgaatagagatctgaccggacaattagtacaggttgatgcatttaggaagacagcagcctctgatttgcttgaatgagaggcattttgagttgttaatcttggcatggaatggactatatataatgttatgtagaactattaatttttaggttttgataaacgaggtataataacgtttgcttttctatacttctaattttattattgttcagaaaaagggcctcatcttaagcttagttagttctattctatttgatttgttagctttttgttctatgttttactttgaaagtgtggttcttttgttttgtgcataacttcattttagttttccaaattagcatagcatgcagtcaatgtaggtccttggttacataccaatgtctacatcaaatgtgtaacattaaatattaacggaattattttatatatcatttttaatttttttttcttttaaatttacagttgggttgttttggtaatttttatgtgagttgatatgtaattttagttgtgatttaagttgttttgttagttgctatgtgagtttttatgtgaatttttataaaaaaaacaaaaaaaaaaaaattagttttgaagtgtaaaaataaaaaaattcttaaatattataacttccttaattattttacacaagtattaaaatgcaaaaaatcaaattctataagtattggtactgcaaattttcttaaaaagacaatagtggtaattgaaaattcatgtttttgtgccattcatgtttttagcttagggtattgatcaatgatttttttctcacctccccctttctttggagctattgctctcaaaggtagttttattggaacttttcttcttaaaaaaatacatatattttatttttctatatttgtagaaattataattaaaatgtcatattttttgtaaaaattttcaataaaaaatgatgctcgacatatattagaaaaaaaaaaaagattataataatatctaggctttattgacattataatagtgattttagcccctaattacaaattggaagatgagttgaaaataaaatttgaaaagttattggctatttgagaatgagttgcctaaaatgattatatctatatcatgtataataatttgttttagctagcttttcaagttgtgataattttttttagctattctaatgtatgatgaaagaactcaactattgtactacctacccatgttcccatttcctccactactcattaaaaacatactctataaaaatagggataatatatatgttaagtctatatgtgatcctaaccctccatcatgacttatggaaggctattattgctttctagtgttatagcattttcaagtgatccatgtgatgatgcatttggccaagttaatgattttttttttgttctagaataaaattttaagataaatatattaaattatttgtaaacaaaagcacaaaaatgttttgcccttctaggaagttccc

SEQ ID NO: 273473 - DNA, 1105 bp, Cannabis indica
aaattgctaaaagatcattatttaataataaattgcaaaaaattaatttataagtatacttaatttaattttaaaatataattaatcttaattaaagttttaaaaggaaataaattaacaggttaatatcaagttacatgtattttttatttatttttatttaatttctaaattaatcacaatggctaaaaaaatgcaaccatgatgattacaataaaaatgtaaccattggaacctcctccttatatataaatatatatatatatgtaattagtgagctaaataaggttttttttttttgaggaaaaaactgttattataaatcaaaacatagagtcctttacaataacagagtttataggcggaggaatacaatccgaccaaaaacaatcttcatccacccctagtgtaaattttgccaaaccatgagcggccgtattagcgtacgtttgacatgagaaacacttacattagggaaaaaggataaaagacttgaaacatccataataatatcattaaaagtggaacatgctgcagttggattacatagagcatttttgacctgtagagcatctgtctctatttggagttgacggaattggaaatgtaaagcataatgcacaccatgaaagagagctagtgcctccatttcgtgaggatcaaaactgcccagtaattttttggagaaagcagcaacaaccatcccagtagagtctcgaaaaacagcccctaaaccagtagttttggtcgaccggtcgactgctgcatcgacattaagcttaaaaacaccagatggtgggggcttccaggggacattctgacagcttgaggcagtgtgtggagtaggattagttgccagaggtgcacctgagctttgagaagagtgctgatatttcaattgagctgatctgaaattcagcatgtaattggtggcaaaaagagacagctcctttgcagactttgccttgtgaccatgaaccactctatttcgctccatccaaattgatcatagattgcatataatttgttctatttcagcttgagagtgaagatttaataagtgaatcaaataatcccctttgtgcattgaggaagctttagacca

SEQ ID NO: 273474 - DNA, 1831 bp, Cannabis indica
actcagtggagcaaaatcagtgtttaagccactatgtcaacctaggcgcccatgatttgggatgtcgtcaatagaaaatgatgtccaggcattgttccttgtcaaatttcaagaattttgggccagagaaattcccaaaaacctaaaccctaatcattgtgtttcccaggttgactgaatgttaacatgaactcctagtctacacatggtgtctctaggtggggttttgtctagacttatctccaagatctaaaacttggttagggcatgtctttcatgtattccagtgtaatggctaatcagattccatataattaagaagttattaggaacaaaaattgatgcgagctagggcacatattgtcaacctaggtgcccagcacttgtactgggcccatgatgagctttgggatgtccatgtaacatattcaacttcacgattcatcattctaaggtcattttaacatgctcgttgaagaatatcactcagagatgactttcctagaacttggtgcttaaatgggtgcctccagtgcgttggtaactctaacctatcctaggatgtggggccctggggttgtttccatcatgctaaatgtcgaaaacaatgtccacatcatcaatccaactttttggataaacaagatcgatgggctagaggatcatcctaacaaaaagaatatagttagccaaaaaagggagaaaggaaattcaaagccacaaaagtaaaagagaagaaaccttgccctagttattcgatgtcggatggattgagtcaggaagacaaggtcctcatttaagaccatcatatatctctttaggcgaagctgggacatggatgtcccaagctattgaagaagatcagccacaaatggagcaatgtcacctcccaatagcgagatgaatccatttctagcaacaaaaatatccaccacttgttttggtagatccaccgacgggtcccaggagataaactttgcattttgccttactcaaagatggaatgaaagtagatcccttgagtcttggcctttggtccagttttggaatatcagttgatattttttatccaccacattagcttcaccctcatccacgagcttatgtctaattggaagaatggacgccattgggtttaccttttaaacatcttcaatgctccctataggagtgttggcggaagagttctcacaagtcatgatcttttttgactaggttgttgggatttatgccttcaaaataagtaactaatggataatatattacaaaatatataaaatacaataataagataaatgaatacattaattatagaagtataattaataaatatcagcaaattctttattcatatggagaaggtattatctagtaaggatgtacaaaagaattaagattatacgatataaataaaacaagtcagtagtgcattaaagttaaagaatctttaatatggaactgccaagtacggtttactatacactatacttctagtgtgtgtgatttttatacagattacatatgtggatagacatgtagtaaaggtattgtgtataaattgattatgcatgtctggatcgatatgaaataatatctttcattaacatgtcatttaccatgaaagaattattcatatcataatgatgatcattggtcgatatgtctgaatctcgagtattcatgaactcctgattgtgttcattatgttctttgattcattcgttaaagtttctcaaagaaggtgattaatacaacttctggtttggaaatctactaacatgagtggctgggaacatgacatacaatattggaatccaaactttcctaacag

SEQ ID NO: 273475 - DNA, 630 bp, Cannabis indica
ctagtgtcatatgagttgtgaagagcagcatttttgccttgagagatcttgatcttttttgggaagtctccaaatttagctctatgccaagattgcaagttggtggcacaatctgcaagattttgcagcagttgtgaagtcgggtttgccaaggaattatgccagttatttgcaataatggtagaacaatcatcttcatggagccatagcctttcaaatctaaatctagatttgtatttttgtgcaggaatagatgaaaggggctgagcagtaaccatgagggccctatgatctgactgaaaaaagtcaagatgagaaacaactagaaccttaaattcatgaatccaagaagagttaatgaatccataatccaatcgttcctttacattggagccacaagtattgttgttgtgccaagtaaatctctcaccctcaaagatcaattcttgtagtccactagcatcaatggtgtttcgaaaatcatcaatttgagaatcatttttaatggggcctcctaacttatctgtgtgggaaataatctcattaaaatctctcatgacaagccaaggtaatagaggggccgagtctttaagcttctttagaagttcccaagtgaatttcctttgtgca

SEQ ID NO: 273476 - DNA, 5658 bp, Cannabis indica
acacaacagttttgtatgaagcgggcttagttcacatcatcaagtcaacctcacacaagtgtaaagttgacttgggggggaaaacgtttgctcaaaaatcgaccctgatgatgtgggcatcaatgtttgacacatggcaagaagaaaaatattaacagagttgagtagtcccgagtcataacaagtcgacttgggaggggtccctaaccctgcgcccaagctccataatgggtgtttggatctcgccaaattgtttccatttcagtattcttcaatattctgaatgaaaaagacaaaaagaatcaaagtctgaggtttgggtattgaaaagagacgaaaaaatcccaaaactgaactcgggtgcctagggttttcacctagcacccaggttgacatggtgctaggtcccagcgcccaggttgacatgttgtcaacctgggccacttacaacagtatcttaggcgaagtcttacaatcatattctctattttagtcaacaattaagatataggtgctttcgaaaacaaaaagagtcatctgagagtcaaaactgggacctaacgcccaggttgacctggtgccaggtcccaacacccaggttgacatattgtcatcctgggccatttccaaacattactcctgaaaattctttcgagagtattccctatttttgttagcaattaagatacgagttttttgggagtcaagcggaatcatcttatggtcaacacaggaaccttatgtttaggttaacctagttcttggtcctagcgcccaggttgacgttttgtcaacctggacaatgtccaagtgttttctccaaaaactgtttcaaacatcttttctattttcagaaataatgaagatacaactgatctcaaaaagcagacgatatcattagagagccaaaactgggcccaaacgcccaagttgacatgggtgctaggccttgtgcctaggttgacatacaacctggtttgcatattttcactcctcaaacacaaattttgttctgggcattcttcttattttcgtcaaaaacaaggtaggatacctcgttcgcaatctcgaatgccaaagaagtatcaaaacgagccccaagaaactcctcgtggagcacccagcgcccaagttgacatatagcctagtgcgttgggctctgcctatcctcttacggttccatctcgagcatctgactatttttcatagtaaacgaaagctatgaattgtcacaagttaaattcacactttgatatttcaccttttcgacaaaatagaatatcggcaaattagctgcaaatgagatgttttgagtctatcccatttttcagaaaagcaacatctccaagaactggagaacaacttcgtcagaactaagaaattgactaagcactacatcaaaattagactttcccatcaatttaaaactatcttttataatatttctgtcagttcttaaaactgttggctacgtgggtgtcataaaagtacgatactttaaatgacagtttataattgttggaaaagatcactttaaatgaccatttacaactgtaaaaaaaaatcactttaaatgaatgtttataactattggaaaaggctaccattaaacgggtaacttatgggaaaagtcactttaaatgatagttataaccaacgagaaaacaactttaaaaaccatggtttataacctatgtgataagtcttttctacacataaaaaaaaaattatgtatattaatttacaaaaatcaaaatacataaaaaaatatttgttttcaatttttcccaattttcatattacagaatgaaaatcatcaaatacagatcttggctagaaaaattgtaaaataaagaacatatccaaaagtttaaggcacagctactatctcacttgcaagccataacaagatgtttaacaaaaattaagaattgcattgtctcaattgcagaaatctttaagagccaatcatataatatcctttcaatcttgtaataagtataagactttagaaatagagaaacaatcacaaaactctcatcaaaataccaacaatatattcacaaaactaaacaaagcctactttgatatatgatatctacctagaatgctctttctgcctaggtgggtcgcaatgtacaataccatgcttgaatatcattttagcaaaattaagcttgtaatagttttgtaaactccaactatattcaagcatttttatttctgaagacaatgaagtataaaaaatatatatatatacataacttgcaattgaaaagataaattttaaaaggtaaccttaccgagcgcgccatacaactcttattcttgcatatccttatctttaaattcagcttgtgctttgtggtacatggtaacttgtgctggaaaatttcccagctccaataactgataacataagcaaaatgggaaaacaaaagttgtgcctttgtactcacctgtgcttcaagttctcaacataatttaactatgattttcaccacatgctcgagactgaaatcatgacatcataggaagactaataataaaattacaggactacttgtttattatttaaaatttgaatctttcacatcaatttcactaaaactacaataaaatatttaagttttccttctcagatgttaattcactagttataatcaatagtcattgccaaagaaaaaatacacaatgaatcatgcccagtatacaaatcaaggtccttaaaaaatctgtcttctctccataaatttatattgaataatctacaattagaatatataataaactttctttgttctggagcaatacagaagtacacaaagaacaaataaataagaaaactaaaacaagttgttaacaacctaactttcaagttattagcataccacacaatgtttccacgatgcatttctttcaaaagagaaatttctctaatagttgtgcttggcacttccacatcttcttgctccaattcagatcttcttcaaagcaattacaatgcaagaataagtacatctcaacgtcacaaatcacatagtagtcaattaaaaaggtgtttacttaaatactccatggagccaacaaatcaaaataaatcaatagtacaaaggtgcaaccagttcaccttagccttacattcaccccatttaagatattattaactattgctatgatgataaataatacaagagtaatttgcagcatcaatacctaagtttaacttccggttgcaaataaatacctaagtttaatttttagctgtaataacactcaagtcattattcacatgtcatttttttattgatatatttaaattaattttttttttaaaaaaaagtagaaattcataacctggaccaatcaggaattatccaatggcaatttactcaacacttaacaatcaaatacctacatagttctataaatataacttgctgtcaaaaattaaacttaagtatttatgccgcaaattacacataatacaagttcaaaatcatgataaataagattttatagagaaattatagttgaaaattgcagcattgcagatgtaaaaactatcaagagatgatagcaaaaggcaaaaagcatactcaccgaaggaagtagagtcatagaagtttcctctgtcaaagtacatctctccaaagtaaagcacaattaattaataaagttatcttcaaaattatataagaaaaaaactaagaccaatctatcttacaattatggaattaataattcaatgcagaaaactaagaccaaaaactactactacgaatactattttttttttttttgtatttaagcgtttatatattacacaatgtataacctgggactcgaacctaagacctccaacacacacgcacccttctatggccacttgagctagcctcaagtggttctacgaatactatttaatgttcttgaaacaactctgaaaccaaataagaccttatgaccccattttcttccatcaaatgttgaagcaaattccttaataaactcaaacactaaacgatgacctttatcaaaacccaaaacgacattattcaatctactgtatttacccgtttccaaatcattagtttgagctcgaataaagtttttcaatttagaataaatcttcacaaaaatcatatctgtatctatataaacacaaccatatttgtaaagaagagttaatctaagcaaattagagagattttgacccaaagctccaatttttagaaaaatcttttctccatctataaatattaactctctctcttactcaatctcttctatagataccttgaataaatatgcagctgattttgtgtactgatggtgtatgtgtgtatatatgttattatgatttgaaatcagatgggagcctagcaatggcatgtaagaaacacaatatactccgcagctcagcatgaccagacacctcctcaatctccatgtagaggtttgtcttcctttccatattcccttgcacaacatcaaagattatgtatatatatatagagagagagaccacactaaaatattccagaaacttgtgtcgtatatataggaaaaattaaatcttatatatatgtgtacaggtactctactcttgttatcacaaaccaaataacattattcaatctactccatttacccatttccaaatcaataatttgatgtccaaaaatatttatcaattcagaaaaaatcacaaaaatcatataatgtatctatataaacaccaccatatttgtttggaagagctaacataagtaaattagagagattttgacccaattgaatcacacccaaattcactttacccgttttaaacaaactaaatcaactctcagttggaatctaggcaacaataatttcaaaatctcttacacatgccatctaaacatcctaaaagaaattgaaattgcatgatgaaaaaaagctttcccggcaaccataaaacagagagaaaaaaacatattgattcaaatatataatttttacaaatttacaatgagatgccgaatgaattgagtgagtgagtgagtgtattaagcttcaaggaatcaaactaaaaaaagttatatcaatatatacttcaaaaagaaattaggaaatttcagttacagagtgtggtcgaggtgagaccagtccgacagtccaacatttaagctcccagctgtactcgaaatgatagccacagaaggtgccggcgccgagcggtggttaaccgctagagagagaggttcgatggagatgggtttgtaggatttctctctgaagttttagattgatcgggatgagataaaatggagtggaaggaaggtttggcgaggtatggtataaaatcactgttttccaacagtgtataattcttggatatagtttttgcgtgtgttaatcccacatggaaatagtattctccacagttttacattgctgagtcccactgttttaaagaaaaactgtattgtttggtccacattttttcaacgttagaaataggtctcctaacattttctttctatcaatcatctacttaattatttcaacagttttcataattaatcctctaattaactgttgggagtaatccattttatagtagttaagtgatgtgaacatatcagtatttatccaatccaatccgtactattt

SEQ ID NO: 273477 - DNA, 710 bp, Cannabis indica
ttccaaaaaccagagttgtcttgtgaattccatttcctgttaagcacttgcaacgcacggtaggcacttttaactgaatagcttccataatcttcaaacgcccaataccatgagtccatattcggagttaaaggcaaaggtatgttgcgaatgtgatcaatttctctcagttcaaacagatcttccaatacttcttcatcccaagacatatttccatcttgtaaaaggttgaaaacagaacaataacgaagagcctcatgagaagtaatcacatactgattgtcctttgaaggaagccacggttaattaagaactgaaatggaagtgcccgatcctatcctccatctagctcccatttttacaacttcctgagcctcaaaaacacttcgccaggcatagctcggatttgaacccaactcaacatcaaaaaacgacccttgaggataatatcttgtcttgaaacacacgagcaacaagatacgatggaattgttaataacctccaaccttgctttcgaagcattgccaaattgaaatccctcaaagtttcgaaagcccatgccacctttatgcttatggtaggcataacttatcccaacttttccaatgaataccaccaccttgggaagatttagaatgccaccagaatctacccataagacgatcagtatccttacaaatctcaaccgggatcaaaaaaacactcatagt

SEQ ID NO: 273478 - DNA, 734 bp, Cannabis indica
tgtaataaaacataaaagaaaagcctttttgaaatttatcttaaaaagttatatctttataaaaaaaaataaaataaaaatccatattcgtaattttctattttaaatggttctcatctgttaaaaaggacttccaacacataagtatgtttcaatattttatataattattgagatgatgttaaatattccaatcaaatataacgacttacatttgttttacaataacttgaaatttcattcaattgtaattctgtaaaaatgtttctttagaaaatcagtaaaaatataaaaactgaaggtgggcttgtctttttacattatgggtacccatttcacatccatttttttccagaatgggccagctagcacttatttaaccaagcgtcccggttcacttatttaactgcctcttttcaaaagagttttttagtatccaattccaaaccagagcaaagacatgtctcacctatttctggtctcactatatcccataactttgagggaaaattacatggtatacccactttaacttacttgtttttaatttttaccttcatttttatatcctttaagatatatccacttttatagatgatgtccctattaaaccccttaagttaatgtaaattatatggtagacttaagtaaagagcaagggtataatgggcaatccactcaaaaaagtgagtagatttaataaaatataacatgaggatatttttgattaatag

SEQ ID NO: 273479 - DNA, 680 bp, Cannabis indica
gtcttcagaaagtttaaaaaccttagtgctctaatactgaattataatgtcctactcagaggaaccacaaatgtcgtgattataacatactaatcttctaaatcagggtctaaaagccaagtgatttaaaacaaatgataaactcaatcaaataaataacatataataaatacacagttttaatttaaaccaaaataattcaaattaaaaatctattatcccgtaaaattcgtttacataatattataagttatttagtacaagctgacctaagcagcaaaatagaatttctaagtaatttcctattagacccaccccttatggtcttgcttggccggaacatgtacatatcatcctcaaagtcctcgatctcatggctgactcgacactgctttaccctttccggcacaacagagcacccgtcagccaagggccaacactatagaaaataatacaatattataattataataataataattacacctcatacagtatgccactgcatatatactgtaccaccgcactagattatattattccatataataatgccactataataaatgtctatgtagcatagacctacatgttacgctcacacgaattttttacatttaaagccttactaggatttgtctcaattataatcaccgagtccaacttggttatgccttaca

SEQ ID NO: 273480 - DNA, 1286 bp, Cannabis indica
atttggaaaagattagagcaactatacatggaaaagtcaacagctaccaagattttcttaaagggaaaattctatggattcaagataaatgccactgttccattagagcagaacttggatgatctcaataggattgttttgtcactaaccaatatgggagaaacaatcaaggaggaagatcaagctgtgatcatattgaatgctttgccaaatcagttcaaagaaatgggaactattataatgtatagcagagacactctcacccttgaagatgtaatgtgtactctcagatcaagagatgcagaactcgattggcaaaaggctgcaaagcaagaaatcagaaatgatgaagccttgatgattcgaggaagacaagcaaagagaggaaattcaagattcagggatcagtctaagttcaggaacaattcaaggccaaggggaacacaagatcgaaatcaaaaccaaagggaacaaagaaatgccatcattgtggcaagataggtcacttaatcaaaatcggttaggagcttagggacaagaagaagcaaaataaagatgaagaggagaaaggaaatgattcaaatgctgcagttgatgatcactatagttcagatggtgatgtttttataataatcaaggcacaagatgaagcttcaagctctagagatgcatgtaccagctcagatcacagggacaatgatgaatggattcttgacagtgattgcacctaccacatgagtccaaacagggattggtttattgactactccaagattgatggtgaaaaagtcatgatggggaatgatcacaaatgccaagctgtgatggtattgtcacaattaccatcagaagctatgatggcactatcaaaactctcaaaaatgttagacacattccaaatttgaagagaaatctaatttctcttggaactcttgatgatgaaggatatgagtacaaaactggtaaatggactatgagaatcactaaaggttcattacttgtcataagagatattaagaaacatggcttgtacttcctggatggaaaaacaatgacccctgcataagctgcaggtcaccaaaggcaagatcgattctaagctttggcataccagattgggccatatcagtgagcaaggattggtggagttgtctaaacaaggttttctcttgaactatactcatgtaaatttacccttttgtgagagttgtgtgtagggaaaacaacacaagatcacatttttaaggagcaattacagagctaaataggtgcttgagtatctacat

SEQ ID NO: 273481 - DNA, 312 bp, Cannabis indica
gaaagttatctatatataaattcaatttataatatatttaaacatatctatatagtaccaaacttaattggatttttattctaaaaaaaaaaaaaaaaaacttaattggcttttcaaaaatactattattgggtttgctttttctcttataaaccttttatcactgagtggatgtgcttgatgaaaaaattgtatatattttggattttgtgccttttcaatttcaaactgatatctgtcatatattgtcttcttctctattttacatattttttgtcaaaatcatgaatatatataatatacataaatata

SEQ ID NO: 273482 - DNA, 5068 bp, Cannabis indica
tttaagaaattcaaaaaaatttaacacgctgaaaattgcgttctagaattatgttgcacgcgtgactattttattttatacgcttgtaaaatagactgtttgaatattattttttatattgtaaattatttcgaatttttccaaattttgtagcatatcttaaataactacaacgtacatataaaaaagaattagactaattttttttttaaatgcgaaaataagtagagagtccaacaataaataggaggtgtagaatttttttttaggttagagagtttgagaggggtctcatctaagaaatgactagtcggagacgggttaacccaaacaacgaacgaggggaggtaggtagggaagaaacacgtttcgttgctctgactctgattcagtccgccattggtgtccatcgaagaagttcaaactagaatcctcactctcactcctctcagcgtttactctttaatcttcctacactacgctactactagtaacaaggttctcatgacccaacctcctcctccgttttctcatccacctttcacttctttaccctctaacccaaaccctagctctcaattccaacacccacacccccaaaacctcactcctcatactccggacctctccgccactctctcaactctcaattctcttattcaccaatctgagcagactcttctatccctttctactcttctgccactccaacaccctagtcagaccaacctcaatggctttgtatcttgctcattcaacccccatcacctcttgccacccgactccctctttgctcattttctcagctgcccctcctctccttcccctattcaacctgaccttcttccacctcttaattacacccaaactctgaaacccaccgcttcttcgcagcctgaaaatggttttcctcagtcggttcaaggctctgattctgagctctgcttctctttggatgatttctttgcggagtttgggtgcaattcattctaccatgattgccctggtgtggttagtttgtctgctataaatggtgtcagtagaacatttactcttccgtcaattttgtccgctcaatgcgataattttgtgagcaaaggggatatagagacgaagagctttaggagagattgtagaaagattcttccttcagagttgtgggctactagcgctgaggttgaaatgtggaatgagtatcctactgtatactcgtacagagttctttgtgccattttggggttggattcaactggagttaatggcttggcgagatgggtcattgctagttcgcccagatatggagttgtgattgatacggctatgagggatcacatatttgtgctctgcaggctttgttttaaggcaattctcaaagaagctttaactttggtggaaaatggtgactctgagatgattccaggcaatacgagctttaattgtccagttcttgttcaagttttaacgtggctggcatctcagctttccattctttatggtcaaataaatgggaagctttttgccataaatatagtcaagcaatgcatattagaagctgcgtcatctgtattaattttctcaattgagcataaggtgaaagagtctcctactgaggagtttcatcatagtttggatatgaattcaaatgatagtgctgagaatgtcatagtggaagaaccacttgaaagaggtactgaagaaaaacataatagcatagtagatgaaagtgttacggctggggtgatttttgtttctcaggtagtggcagcagttgcagcactgcatgaaaggtccttgtttgaagataaagttaaggcactacggtcttaccaaccacttactaactatcaacggtatccttctatacatgcacttttcattcattagctattatttcaatttctgttggctaactatgttagtttctccctctgaaaattttgctaattattttgttgtgaacaattgccatgtctattgactattgagatctcaccaagtaattgaagtgcttggcgttgtatacttctttagactgtgtgataaggtgttctggtaatctgacatagcatttttattgtaggatggcagagcataattatgtgtcacaaagggctgatgaagagcgaaaaaaacgtcctatgtacagacccataattgagcatgatggcctacctcgggtgaaaatatctaatgaggtactaattgatagacatttttggttcttaatgaagtactatgacttgaatagttaaccagcttaatcttaatttacacataccaaatctttagttggaatagataatgtaatgtccaatatgaataaagggctttcacttgaaatattattaggtaaactattgcccgggccggctccttccgattgaaacttggtaagaagtgagaatcgtatattcatgcaaataaaaaatgatagaacaaagttcagccaactttctgtctagaaatttcaaccatatcaagcattatgaacttgctcctagtaattttgtatttgggacagtagcacaacatatttgttataaatatcaggcaagttgttctattctataatctcaagagcacctgtattttttattgggcattatacaaggatacaaacaagaacaggactagagaggaattattagccgaagaaagagattacaaaaggcgaagaatgtcataccgtggcaagaaggtgaagcgatcgcacttggaggtaaacaaaagtttatactaaatatgtgttatcctctttctattagcttgttgtgctcttatatactatgttacaagcccataaacatatatgtttctgacacgaaggtgaagcaatcacactaggaggtgaacataagtttttatactgaatatgggttatcctctttctattagctttttgtgggcctatttgttgatgtcacaaacccatttacgttcaaatgaataatataataagtagttttggttctggcgtaggtagttaatctgtagttttgtggtgactgaaattagttttgaaaatctgttaatctaagagttaaaagtcatgtttcagagttttatatagttttgacatttgtgagaaatgatgtcgatctgcttccgttccttctctgtataaatatgttttttttaatccttaaacttaaggttatgagagatattatagaagactacatggatgaaatcaaacaagctggaggcattgggtgctttgagaaggaatctttagtaaaggatacaattccatttaaactgccttatgcatccgactcaaccacgtatgctgacatgcctaagaaaagttaccatgactcatcaaccgctggagatagttcaaaatatcaccagtatcaattacactctgattatacgactcatgctacaacttctaagggtcctttggtgaaagaatatcagcaaccaagaagaggccatcatgataaccatgaactctctgaggagggtgtcaatagggataaacacgatagagagtactattccaaaagtagtccaagacatgtccggtcaagtgagtggcctcgtagaccaagggaacaagatgaaatcgatgttaccagaatcaagcatcatgacagtaaacactcatcttctagactatctaaacatcatgataacagatcatccggctcctcgaaacattctgattacagatcaaaatctaaagatcggcggcacagggaaagatatgagaatacttttgaggatagatacaatcctgcagagtgtcatgacacacataaaggtggtaactcttctaccagcaaatattacagagcagataacattcataatgatgagaattgaaccaggggccacaaactacaatgggacggttcctactttgccgttcttggtaagttaacttagtccccctctttcttttttctccagtgtgttttcttctgttgaacttgacagtggccttttgtttgtaactttgtttattggcatcactttgcagtacgaagtcttcatccttcaacagttttgtttacatccgtatcctccttttgtatccttgtagtttttttttcttgtttaattttctatcaagcaatatctttcattttttattcacataattattggttatgatcatatttcactaaacacgaaggctaagtgtacagtttactgcattttatttagactaaatcagcatcatcatttatagtgttatgactcgtatggttagctcactactgttttctcaggcaagttaacttttctagtgtcaaccctcatttgatggactcaatttcatgagcgcccactataaattttgaagtagttacaatatgggggctggtttttctatctcgtaaaaacaatagtttttgtaccgtttatatctttcagctgctagataatagatatactttttgagaaatctaattgataaagttgtgtaatatttaaaattaaacgtgctagttgttataagttcaaaatacatcttagatgcattgggcttttggtgtaagagggggactagtactattatgatattatgatatgattagcaattatttataaattttattaaagtaaaataagtagaaaattggaatctgatattgaattgtaccaatggtaatattttacctcacaaagatattaggcatcatgggtggtttttagtaattctctatatttattacatggtagttaaagttagaataaattaatagagaaatgtaacaaaataaatgttgaataatatttgtaatatgttgtttgtttgaaaatagaatagttatgatatattttgtttacaagaactataattataatatttaaatgaagaattaccttatatactattttttaactttttttaaggtaaattgcgacataaatatttaatgtttcactttttatatacttaaatacttaatgtttatttttggaagcaaaaatattaaatgttacaattctcgtacattgttactaccacttctgtaaatatagacacgtggagggcacaaatgtattacatttatttattttattttaaaatttaatattcttaatatcaaaa

SEQ ID NO: 273483 - DNA, 1221 bp, Cannabis indica
atctagaggcatctcaagtggtggtcctgctaaggatgtgtcgaatcgagattgaactgaatacactagaatcagaatcaataatttattatatactatattgattattaaatcatcaaaataaagagtgaagaattagccattcatttcaagttttagtgccttttgttttcttatagtttatagtttttgtgcttttctttttttacactttagtttaactatgatgtccttggtggtgcttagtttaggtagtttaagaaaaataatactaaactacacataccaaaaccaatcaaattttatgagagtgactcgtaattgccttgtctcttattctaatctcaacttttttaagttttattttgaaaataataattagaagttagtagaatggaactttttgaatacataatatagtattgagcatgattaaaggttgcttctggttgaaagtaatgaaataaaggaatgaaaatgaattaatttctttttattgctttgattggttgcatttaggttatctatcaactacacctattcggtcatactatgataataatttttctcataagattacccataactcagttcattatagtacaacgaaaccggttgagattgattattttttcatcaaagagaaattggaggagaaaagtcttcaactaccaaaaatttaattagaagaccaagtagcagatatactcaccaaagcagtctcatttcacatttatttttaaatttgtggacatgtaaggtatgatagctactagctaggcatctagattgtagttttttaatattatattaaatgttggagttttttctattttgtgttaggattactttaaataaacattacattactacaagcaaaaataaatatttacattgtttattaatttcaaaaatactatttttaaaatttcttatttacaaaaataggatagaaaaaactctcccagatgtgcaaggagaagtgtaacacacatgtgactatgtgagcgagtgagactcacatgcgagtaagcgtcagaacgcagcagtagttgctgttggattttgtaccctaaataaaacctgatgtgatcaatgcatgatcaaacacctcgcaaataacacaacacaaagaacttgatcaagaacagagttaaacaattgaaaattaaacaactcaactatgactgaaacaataaaaaccagtaatgcataaaccag

SEQ ID NO: 273484 - DNA, 513 bp, Cannabis indica
aaaattttctgacttcttgagttctgacttttctttaaacatagctgttctttaatatgttgagtactcctagtcggcatatttgcttgcttattgttcgatattgcgacaaacactcatctcatgtgttgtcttttgtagatgaacacaggtgagtcttcggaactcggacatcggatcgaccaggatttacttcaacttctgcatgaggatcaccctcgtcctcgttccagtcgtccttcttctagtgaaggacattcttctggccctatacccagccattggataatggctcgtacaaagaaaaccacgcgtctcgctgacgcaactgatcctcaagtgactcagcttgccactttgcccagcgccgaaaaggattcagccgtccatatggaggaggatagtgacggggacactgaggtccaagaggctgaggagctggataatgcgcgtcccagcagtccctccgaggcagagggagaggaagtgttggaatttattttaccaggatct

SEQ ID NO: 273485 - DNA, 1216 bp, Cannabis indica
ttgtatttttttataaatattttatttcacatgcttagcgcgtgttattttcactagtgaaataaaaaggtagaatctaaaatttatcatcatcacaatgtaatggtgcactacgaaataatattttatagtggaaagagtttggattttcacacgcactcgttaagaggaagatgtgtcaacgacgatgtgtctaacaaaactaaagttggaattttgaattaattaataagaattattaaaatgaattattggtgttttaagcatattagaataattatgtaacggatgttatataatttttaaaaagaaattaaaaaatataactaataaataatgaagtgccactttaaaaaaaatactgaccattgcaagagaaaaaaaaaagaaaaaagtaatttaatgatttagtaatacaaaagctgacatcataatgatgattgctttacctaacacgctaagctagtagagtgtttccactaaaaaagcaacacgtgttctttcaagcatttctgtcacgagaggggagaagtaggtccactcaaatctttatttctaatctttgtttaagccataattattatatatattccacgattcggctttcggttatggatatgtgttgttacttacttcagccatagtgccatagtgctccagtgggtcttgcttgcttaattcgaaaatgaggaggaactcagatgagaatatttctaatgattcaaacaaacacataccatttcttaagctcattgattcttctcttagaatcactgtcattcctctcagtattgtaacgatatggctaaccgtgacagaccaccaagataacactctttacggaaatcttaagttcaccaatcttactggtctcaagtaagagctccagctcttttatttttattttcttctactacttcttctagtcgtttttggagtaaagggctgaattgtatcacaggtacatggtttttatcagcttcgtttcagcagtgtatgctgttgttgctgctgtgtcttcatgggtcagatccttagcttccaaagcttggttattctttgtctctgaccaggtttgtatttgcactctcaacatagcttcatcattattgtaccaaatattggtatggttagtaaagttaggtgactattatcactatattaattgttcctgcagagatgggtataatgggaaatatattttttatattttttt

SEQ ID NO: 273486 - DNA, 894 bp, Cannabis indica
gttattttattaattgactattaattagttttattttatgagataaagtcaatctttaatattagtatttttttgaaattatttcacaaaaacataaaaataataaaaaaattacaaaatacggttacagaattttaaatatttccacgatttttttttattttatttacaaaaaattaaggctttttatgttgtaatcttgttaatttgttgttgattttttgttatctgtatgttattttttgttgttattttcatgttacttttatgtagttttcttgttgattttatgttgttttcgtgttattttttagaaaactgtaaaaatgtaaaaaataattttttgaacgtaaaaatgtaaatattttacaaaaaatggtgccttatgtaattattcttctttttttttttttgagtaagtaatgtaatttgttttccttttataattttttattttttattttggttagcattataaattattattatcaattttttcacttttttattttttaagattgattattaacttttttcaatgaattattggttttttgttttttgtttctatccgtagtaccatagtacttttttcttttgtttttaacgtttttcttttgaattatgatttactaataggttttttgactttttagttttaatgatataaatataatttaagaattcaaaaaacgccttcttccccttatttttctctgtagcagttattctttacgattgttaactatgtttgtgtccggcttcgtctggttctttcgtccggtagaatatcggtgggcgtccaccccatttcctgtgcccggtggtggttctttcttcttctccaacctcattgttctcttctatgtatttttttactggtgtgggaaatgg

SEQ ID NO: 273487 - DNA, 479 bp, Cannabis indica
tctgggggttctcaatagcaacaataaccctggcagcgagctgaagtttaccagtagtatgccttcttatagcgagatggatgtctcgctattcgttatccatgtccttcaagctattacacttagttagtataatgtatattatacgttaagtgttctgacagccaattcgccttttcagagcctctctacacctaacgaggtaggtgcctcgctatgtattatagatgtcattcctgcgattatgtcctctaacgcgaaatgatttctagtcaataagtgaatcaatagtttgtacatcttcgtctcgcttaaggctatacagtcagtgagttatagatatggtctagtaactctacattaaatgagttattccatttgatgatttttaatataattgtcattatatttgttgattcgtattctccaaagttgacatgtgtcatcctctgaagtaccagccgaattttgggtataac

SEQ ID NO: 273488 - DNA, 931 bp, Cannabis indica
ttctcccttatttaatcaacttctccctttcctaattttaataatgcaagtaaacaaatataagggaatgattaccttactattgattcccattacttattagtaaacatgccattaatgaggatcatttttgtcaaggatgttttttttccttattatttattttgtgtatctttcgagtatattagtagtttttgttgtataattttaagttgtatttctattgtatttgaataatgaataatatgtagtattttaatttacatgtaattttttctatatgtaggaatgaactcctcgctgctaattctttgccccgtgtactttctatttacacatataattttttctaaaaaaaaaatgcgcttacaattgactattttaaaatttagtttcgaataataaattattcaaaattttattgtaatatctagtgtaaaatttaaatcaatatatgtaaacaattaattataatttttctaaattttgaaaaattgaaatgtctttaccaataaagataaaaatcacacatctttagctatgtgttaaagagtgtaaagaagacattgaaatttggagcattatgatatgatgtgtttgtttgtctatttttcttttttgaatattctcaaatttgttgtagtcataaatgtatgacaaaattcagaaagaagaacagcctttgctcccacaatcatacacattcatgcatgcctttgtccctcaaaatctaaataaataaataattatataaaaaacctttaaaattttctcattccatttttattttccataataataataataatatttcttggtttttatttcacttttcaaatcatggccagcctattttacttggctttactcatatgggtttccacatgtcaccatttttcttctattggctccattatgatagatatttttt

SEQ ID NO: 273489 - DNA, 1851 bp, Cannabis indica
ggtggtatttatagtgtttttgtggggtgatcccttgaattgaggtacatggattttagtaattctcaataaacgcacacattccaaatggatacgtcataggaaatgcatggtctaatccctaggttttgtaggggttttatggacgtagtcctttatcctttttgactgatgttattcctcacaaagtagccgtcactaggctcattaatcatagcatagtagctgcagagagggggttacgccgtcagactttaagacatatggcagtttcaatacgccttctcccatgcggcattaaatgcgagatgactgttcagataggatatgacacctccaggagatgctttgttgtagctttgctatccgggagtatgtgcaactcacgtgccttctccgggaggcacgtttgaggctgatccctgtggctaatgggacttagctgaattatgtaaacattaagccctttcagtctacgtgtcatcatccggttggtccacgtattttgggcaaaatcaggggcaacaaatgtagtatatgaaacatgattatcgattagttgaagtgtcaatcccacatgaaaattgctatgagaagtgttttttttaaaacaagtagcatttagtttctgatattaagaatattaagttgaaaaataaaaaaaaaaaatgtaatgcatctggaccctccacttgtcaatatttatgaattaacggaagtggtagtaatgagtgtaagagaattgtaatattgagtattttttcctctaaaaataaaaataaagtatttacgtatataaaatctaaaatattaaatatttatgctacaatttacccattaccaatatagactttcaacctaacttaagtatgatttaaggtgagggaacatggtcatttgcagttcccttagagcatctctaatggagatgttatgaaggatgcttgatgacatggattaatttttaacattttttaattgatgcttaccattaaaataaaaaagaatgctacaaaaggatgtctatcaaagtatcctttacatcttctctttctttttttttttttgttattttattataaagtaaaaaaaaattgtttaatatatattacataataatataatattattttaataattttaagagatatttattattggatcattttagaacaaaaagtgtcaaaaataatgtgcaagagataaaataaaataatatatttttaagtgatatgaatgtttttgatactcgtaaataatgctactattggagatacatggcagccaaggggagaccgttcaattaattttttaaattatttactagggaattaagccgcgctttgcgcgggtttgattatatttttgtattttttattgattgctatataatttaaaatataatattttgaggtacgaattattaataaagtaaaattagtaaaagaaattaaagaaaacaaaataaaaaacattaaaaaacattaaaaaaaaatcctagagacgtgaaggctaattttctaacaatctcccattcaatctctttatttgcccatattacaatggcatatcttaataaaataaaattaaactacattatacttttacattcaaatatttaattaacaaaagaatccaacaaaaaaaaaaaacataaataataagcagagtcttgatactaaagtaggaaaccaaatgtttggttaatgtaggaaaccaaatttttggacttgtaaattgtaacgaagatgcaagcatgcttttctaaaccatgaagatcatcatcaccaccaagtctagatctcaatagtgtaaaatatcttcagcatttgttggttctagagtatcttt

SEQ ID NO: 273490 - DNA, 451 bp, Cannabis indica
aactgctctccatatgaaatttttgactttcggggggatcttaagttgccaaagtttgcgccaaaacctagaattgtcaacaccaggctgatgttgtgttgattactgcagtaggttgtatgcgcttttgactgagaaaatacaaatgctctcccttatccaagactaacaaccatcaccagctgaaaaacataagggtagcccgagaatcaaacatgcgtcacgcgaattgaacatgtcatggacaatctgatgatcctacgatatattattatgagtaaaaagagagttaaccattttgtgatgaagtctaggatgagtagtggtgacatacagattggagtggtcaggtaaccaaggatgagatagtatacttgtagtggtccccgtgttggaatatgttttaccagcatctagatttactaacaagtatatttcattaacatcctaa

SEQ ID NO: 273491 - DNA, 686 bp, Cannabis indica
attattattatattattattattattattattattattattattattattattattattattattattattattattattattatcgttgttgctgttgttgttttgcatatacgatgaagtgtatatacgcacggttgagaggatcgaaattgtgaatagaatcgttggtcaaagcgatctttttgcttgggtttaaacacgatagaaattaggtttttgtgttctgatttcgtacaccaaaatagagaacgaatgagatagagaacgtatacggtgtatacgatataccaaaaaactgtcgttattcaagttgattgtgacctgggtgaaagtggcggtttgagagcacttatgtacgacctaaggaagctttctaacgtggtataagggtcggaggtccctgtttcgagtttcgccattgttgaagcttcgaaggtgcggcttgaaacggacacgaattcgaacgtgtttaagcttgttcttgggtcaagggaggttatgtatgagtgcataggatcctaaggattgtttttgacgtaagaaaacaaagctttaacgtccaaaacaaaggaccaatattttgactccattagagacggtacaccgccaacgaaggagacgactcggatctgccaacttggacctcttttcttgtgttgatcttgatcgttttgaggtcctgag

SEQ ID NO: 273492 - DNA, 3185 bp, Cannabis indica
atacaaccacaaaaaaaaaaaaaatacctctaccaaataaaattggtgcccaatataaaaatcctcaattatattttttcctaatatttttttaaaattttatttttttcatgaaatttttagaaatattattattatttatttattatgttgaaatattattttaaaaattaaatttaacaaatttcttgataattaatttaacattataaaattaccacactataattttagctaggccccccttttctattttgccttataggtgagaacaaaaatatttgagccagccgtgctctcaaatttgaaactcattaattaaggaagaaaaccaactctttctaacaaaagattatatacatgtattataggtacggttgctataaaataatgatatcaaatcttacaaaaaaacaaaaacaaaatacaactgttaaagatttcataatcctatattttcagatagaagggtcttcaaacaatccaaagaaaatagttttactcataaataaatatgtgtttacatcttattacatatgtattagcctatttatggaatctgttatcaatcgatgcttatatagactcattatacatttacaatactactaatttctcactcattcttacatatatatacacaactctagggcccctcaaagaaggacctggtttccactaaaatcaataaataacattacatgcatgcatatagtttgtatataaatatataataatataaataaaaaaaaaacaacaactaatcaaacaaacatagttatgtactcttcctctctttacaacatggttcatgagatcccagtagtattactagtggctatgctggttatagcagcacagccaattgttactactacaacgagatatcatgaacatgatcgcgatgatcatgttcatgataatcttaataagtcatcagtgacacaacaagcatctcctcaaacacaagagacgatagacaaaatttgctatcgagttgaggaatacgggttttgcaatcaagccttcaacgagaaccttccatcgccggacacagaccttgtgggtctgacccgaataaccatagacctatccaccctcaatgccactaacacactcgatttcgtgcagcgtctgctggcgaacaccaccgattcggggcaaaagagtgcgcttgaagcgtgtgaggaggggtacaacgttgtgttgagatgttttgaagatgcaaaggttgatttcaatatgaaggattatagaagcgtggcattggatgaatatgtggcgcctagagctgtgggaaactgtgtggttaacattcctccttttaatgaagaattgtatgagaggaatcgagagatgaggattcttatagccatgtctttggttactgcctatacactcgtcgatatacagccctaattataatatatatcattatgtactgatgaatattattaatttattactactactacgtgcactgtcgtcgttgttctgataataatgtctattaatattaatataaagacaacatttttacgtaaccacacttatgaaagaataacatatcaagtattcatcatttttgttttatttcaatttcaaattatctcaaagttaacttcacttgataaggacttaccacaccaacgaccaaattataaaattattaagagaattattaaaaagtattattagcgtctaatactctcttcgctaactaaccagggtcggtcctaaggtatatggggcctaaggcgaaatcaaattttggggctctacacatatagtttaactattatgaaaattatagcctagtacttagtttaatggtaaagtttttaaaaactagctccaaggttcaatcctttataactacacattaactatatattttttaaaaaaattaaaatgtagaggttgggaattaatcccatgacctcttagagagaagttaaaccttttaccactacactaaataatttttactatatttttttcttatttaaaattttatctatatattaatatttttttttcggggcctgagtgttcggaggcccgaggcgcacgcctatcctgcctaccctcagggtcggccctgctaatagtgtacatcacttataaaagataatgaacattactattactcaataacaatgctctataaatctcgcacaagagtgtgttcatgtcatctggcctcgacaaaaaatctccactaattttatacaacggaaaatcgtcaacaacttcattaattcgaagtttatatttataaacatgtatatttatcaaaactttaggcatctcatcactcttgccattattctatcgacattttctatttttgataactcaatttgtttgttttatatatgactcatatgctataatcatgaacattgttattataaaccttaaaatatctaatatgatactgatgtgtgcattgtattatatttattcctatcagaagtatctttaattttggcatttgttgaaattaaaacttatttttttatttttacgatggttcacaatcacattatatagttatagtaagtattttttctcgttttttttttcatttcactaatttacgatacaaagtatttaaaatagtcatttgcaaaaattaaacacgtgtgttgctaaacattttttttcagcactataaatattctaaattttcgaagaaaaaaaaagttgaaatattatctactttaagtacaatatacactatataaaaaattgagttataaaatagaaacgtttcctaccagtaaagacaaaaatagtgtccatacataagaattttcctataattataatagtcatcttactatttttttttcttaataatttatggtgctaaggtttaaactcagatattcatatcacatattatatacagttcttacctgttttccgaattcaagtgtgctgacagacctgaacggaaatgctcgggctagatggatgcccaaatcacattaattgtaacacagatgagtgactcgctaaatcacttccagggacttaaatttgaaactaaaagtttccctatcgataaacaacatggcaatactctaaatatctcaaaattgggcaaaactagggctccaaaaattcccccaaccggcagaccaattaccaaccggaagtccggttatgggtcacca

SEQ ID NO: 273493 - DNA, 737 bp, Cannabis indica
ttttacggttttttaccttttttacgttacgttactttttatactgtagttctttagttttttgttttttagttttttatttttaagttttttttaattagttttgagagatattgttatgttaatgtaatgtatgttcttatttaattatttatttcttgtgactttttttcttcacttttataactttaaagtgaattattttagtatttgacgaaagtaatcatttagctagtttctaatataatttaataaaaaaaattgaactttccactacaaaataaaaaaagtacaaactaaaattttatataccaataaacattttataagtttattactacaaataaaggtaacgtcaaagtatcttaaacaataaaataatataatgttacctaaaataaataaaaagtaacaaaaatgtagcttaatcaatataaacacttactttaacatattaaaactataattttagcagtaactaattgaataagtaaccaaaatttggttaatacataattttgtgtttagttgaaagtttatttattttatctcttaataaaatattaaagtacctaaaatgtagcttttgattatggtaatcttcattggtgaagataatgttgcttttgattctcaaatagattttgaaggtaatttaaatgttattaaaaataaaacttaaaattatcttaaacaacaatctaacttaatatatacttaaattgaaacttttttta

SEQ ID NO: 273494 - DNA, 508 bp, Cannabis indica
gaatggctttctaatgatgtaagtttcttaactttctattgtgccccttgccaccacactttctacaagttagttttaccacaaccctttctccattacaaatagtttggtttgacttaattcttccaacattttgcttttttggttgccctactagttgcttctcaacaggcactccaactgtcatgttctttatgtcatcaggcaatttccaatcattctcatcacaaactagcataattgtgccttcatatgtactcctctaatattctattgtgtaatatagtgagcatagtgcgtacatgatttagaacaagccccaagtgcaagcctgttcttgcaagtccactacagctccagtcttaactaatcctccagaatggacattaaccgtgtaaagaccacatgtgtctattgggaatattttaccaggatctggatttactaacaagtatgttgaattaacattctaaatatgaattctataaaataatgaaattaaacacat

SEQ ID NO: 273495 - DNA, 2823 bp, Cannabis indica
atgacgtaaatcaaaatggagtaaaaaattaatacaatatttcttatactattgaaataatagaattttaaaactaattattaacaaaagtaatgtatataaatattaatttatttttaaaatatttaatttaaaagctttacaaaatagaaaataattatatagtaagattatataaaataaattcatcccattgtagtatcttttattctaactaaaacatcaaaagttacataaaaaaaattatcccttattatatttgttgtctataatttttctcaaaatatacgacaattcaagagcgaaccagatggcagtaggacccacctaacaagacacatcaccttaattactttcagagcctatttttttttttaaaggaataacgacaaacagtcatctctaaaagggtcttactggacatagagtatctcttgttttttcctctctgcgagtgaagtctacttaaagaaggtatgggaggactgatgaaacataacacgccactcgaagattaagacattgtacatgcatttaatgcaatatagagaagatcatccaacatcttactctgatagacgtgcttaagggtttaaaccccatcatttcctgatttcacgagaccatatacatcaatcaactactgaataaatgagtcgccaagtcatgaataagaaataagtcgaatctcaccaaacacctatagacaacccaaaatccatcataaaagtaggtaattatgctctaaaattagatttgagaatttgtgcaaagtatggtgcaaacaaacacgataatagtgacattttaccagcattataggcctataaataccccaataatatacagaaaggggatcagttagaaaaactctctaataaatactggcatcaatacagtgactcgtagactaaggcttattaatgccccaaccacgtaaaaatcttctcttttaatattcattaattatttcatacaactctaattattggttgtcaaaaacttcaatcaatattttagtgctttaattgatagttgtaagaagcttaccaaaagaaaaagttgtaaatagcctcatagtataacggtagaaaacaagaaatgcttcacgtccacaacaaccagatgacctaaaggatctagatggggaaaaggcagcttctagggtggatgctaaaggaaggagacactaatgatgcagaatactcgaaccaagaagaatatgaagattatgatgaagaaaactatacaaaattagttgagctaaggcaaaaggttgttgaccataaggcaagaaatattgactgccatgaaaagggcaatggaagatgtaggtatccaagtggatccagctatagtcccatcagtgcaagagaaaactgaggaggagccctctcagcccgaggaagtctaaaaataaaagaatagggaacctagtccaatcaagtatcctctaaaaaggcctgctccagagggaaaccccaaggctacacctggaaagagcaagaaggctcatgatccaccaaaagttcgttctgatctcccaaaagcgaagggtccacaaggggatagatttcctaaagggaaaattagccttcaggattgttaagatcgaaagagcatatatgtgcatcaagagccaggaaaacagaaggggtctgccaagaaagatctccctatcgatttacgacacaagctcaatgccaaacatggagacttaagggcacgccttgaccaaaggaagaaagttgcaccagtctttgaggatatcctgaatgaaggagtcctggctgaatttgctatcttccgaaacggcatagcaaggatctccaagaggcaaaaaggagatgactcgaaattagactgtgaggatcgtgagctctgtacgagaaacatactggaggctgaattcccaaagaatttaaaaatttcttaaatgactatgtacacgggtgacacaaatccaagtgatcacttatctagattcaacagagtcacaacagtcatgaggttcagctatgatgccaaatgcttttgtttcctactgactttgggagaatctgtagaggaatggttcaaaaagttacaaccagaatctatggattgtttgagtaaattacaaactaattatagaaggcaatttgttgcgattgctgtgatgttgttctgcgtgttgacacataatggatgtggtgaaatcagtttctttgatcttcagttgcaagtaaaaaaaataggctcgggtcgttgaatatttttatcggaggtattccttcttttacttggtactgaatttgcatggtttttgttgttgggtcgcattacaatgaagagagtagaatatgtacgcgttgttcatatttgtaatcctttggtaagaattctccactagcctcataattaacatatttttccttcttcccattgcccatcgctctttaagagaacgggtataaattccataacctaattttttttgacaatatttcaacaattcaacattttcacaaacagacaataatcataagacaacgataaaacaattattgacgttgtattttttgtttcagtgttccaactatcatttgagtgtccagattttatctatttccatatttcccaataaaaattacatgtaattaaacaagaacgactctagaacagctttagattatttaaaattatattttaattcctaatcggcattgttttcttcagaaattatgtatattaaaatgcatttacttcaatcatgcatttacaaaaataatttcagaagctacagtccatttttattattgatttccagatctttgtttcatc

SEQ ID NO: 273496 - DNA, 803 bp, Cannabis indica
agttaattttgggtatggtatgagtgaggttcgaatttatgaaaaaattggcatgtttaggccttaaaatggagtttttgggtgttctgaacccagccgttgcgacgggatttttggccgtcgcgactgggtttggcagtgagaaagtctgtttttcccgattttgttttggccataacttttgactcgggactccgtttgggacattctttatatcgttggaaagctcgttccgagctctatttgattatctgtgttttgaatgctatttttatattacgtgaaagtaaaattagagattaaccttatttgggaaatcccgagttgtgtgactagaattaccgtcacttgatcaggagcacccaagggtttggaatctctgttattacaggtaagacagtacttttcacgtagagtatgcgcggtggcacttatgttgaatatgatatatgtgagtaattgtaaccgggattagggttattaccctaatatgagcggataatagccgagggttattaccctagtgatataagttgagtaaatgctatgccatgctaagtatataattatattgagatttaagggttatgcgtttaaggcataattaggttggactcggtaaccataaccgagatgaaccattctaaggccttatcgtatttagacgtgtgagagcaacacgtaggtctatgccacgtagacttaaatagacgtgtgagagtaacatgtaggtttacatcacgtaaacataaacaagcatgtgagcccacatgtaggtctgtgacacacagacagatttaaat

SEQ ID NO: 273497 - DNA, 1018 bp, Cannabis indica
ccttagatagacagatactaggtttagaaggcatcactgcccctctggtgttagtcatcgagaatcgctctaccaccttatcaatgtaagctgcttgtgagagagcaagtgatctgttcttccaatttctaatgattatactgagaacataagtagtttcacccaaatctttcatttcaaattgagtgttgagtcattccttaatgtcagcaattttcttgatattgttaccaataatcaaaatgtcatcaacataaaagagcaggaatactcaggaatactaccacttgattgtccttgagttggtaaacactaaggttcatcatcattttggtgaaagctgtatgttttgattatttcatcaaaccttttgttccaagagtgagaagatttcttaagtccataaatggacctattgagcttgcaaactttctcttcttgtcttggaagcttataaccttctagttactccatgtagatggtttcttcaagaattttgttaaggaaagactatcttgacatccattttgctaaattttcataattgaaaagcgggcaactatagaaagtaagaagtatgatggatggatttgagcatggtgaccgaacttaaagtatcctcatagtccacaccttctctttaggtataaccctttgcgacaagtctagctttacaagttttgacttctccactagcacctcttttcttcttgtagacccacttacatcaaattgcatgataatcattaggtgcatctacatattcccagactttgttctttttcatggaatccatttctaaatccatgtcggctgaccattgtttttgttctggactttccattgcctatttataggttaatggatcgtcatcaataccgtcaccaatgacaatattcaccatgcaagccataacaagctagttttgttgaaaccctcccactacgacgaggatccgtgaccttttgaataagaacatcagtggtaaatttctcggttgtatcaacttgcattggtt

SEQ ID NO: 273498 - DNA, 943 bp, Cannabis indica
aaaatatttaaataaataaaaaaaaaacataattattataacatatatagttgttatgttatgttatgtcttctctctttctttctttttttatttgatatttattgaaattaagtttacaatctttagtaaggtagctctcaaatgatttgcaaataacatagaaaaatgacatgtacacatgtatgtacatgtacaattgtacatccctaataacagatatttatttcattaattattttaattaaaataaattaaattaatttataaatgaaaaccataaataactagttatcttcattaaataataataatatttcagagttactaattcttatatatgtattactaatttatataaatatatatctaataaaaaaattgaaacaataatttttcaaaattttctattttctaactttattttttaaaagtattctttgaatcaatactataaaacacatttttcttgagagaacaatcttttctagttttgtccttattaaataattatacattataatataatttcaaccacacaatataattagtttaattagtgagagtgtgaaatataaattggtggtggttgttattttgtactaaaatgtttgtctgtatataaatacactaagaattaatatatattacacatgaacttgagaaaaaatttagctaaaaaattattttcaatgctaaaataaatagtgcatcaatacatttatttaaaaggggtacattgtaaaattttcctatattttttactcgtgaaaattttaactatacttgacattatgcaaccaatgcattacctaataattatatataaaaaaaaatattatttaattatatatatgaacctttttaattattttatgaaaataaaaataaagagttttttcatgtttacacttaaaagtagttttttttttttttgcatttt

SEQ ID NO: 273499 - DNA, 1104 bp, Cannabis indica
tagaaccgaacacagacctagcctcagacccaaactgagactagaactctggcccggacacggtcgtgtacccagaccagaactgagacccagacctggacctaaatcttggacccaatcccaaacacagacttggatctagatagggatccgaatacgaacctggactcagaccaagacccagattgggatcgaaatgttggacctagatctggactgagatcttgacccagacccaaacttggacccgcactcagtacccaaacttggacctggaacagaacctagacctagattggggtacggacctagacacataccccgacacgaacccgaacccaaactcaaacgcacacctagaatcagacccgaacccggacccaaactcgaagctagaccaggatcagaatcaaggacttagatccagaactgaatctagactcacatcgggattgaaacttggcagtcagactcaacctagagaaggaccgaggacgcgaacccacacccgaagcctgatctggacctagactgaaatttggacccgaacccaaactcaaaacaagactcgaacttcgacccgaactcaaaccccaactcgaactcaaaatcacaaatggaaatagaaccgaactaggattaggaacaggaccaagacctaaacctaataccgaacccagatcaaaacccaaaaagagacctaaacccgaaccttgatgaggactcgaacccaaacaaagaccgggacccaaacccacacaataaccgggacaaggacccagaatcaagatagggacttgggaaacagaactaggaccgggacatagtacccgaccaagatgggaacttgaacctaggacccagctcgtgacccagcacaaaaaaggaaccagactgggacccaagattgggattcggatctggacctagggcttggacaaaacttgtagacggtgcttggatttaggacctagccctggacccaaaccctgacaaagacccgaacccacacccagacctgaacccagtcccaaagcaaaaagtcgacacgaacctgtaccctgtgacccaaaattggaatcaaaacctgaagttgaccgggac

SEQ ID NO: 273500 - DNA, 2450 bp, Cannabis indica
aataataataattattatattatcaaaactaaacattttataaaaatcctactatggattatgttcgaatatatgtacctacctcaaagccaaaaacagaaaaacaagatttaagttcaaactatcacaagatcacactcaaaaacagcaaatacataataaattaaaccagatattgaaagttaaaaatactatctgattatgaatttcagtgcatgataccaaaaaaagcagtactgaaacacaacgatcgctaaactatataaaaacactaaagagagattaatatttatatatatatatgtattaaaattaagaagattataataagaatttacattcgaatataagccatatcaaaccagatttgctcaaacgccttgacgattatatcatgatattccttggagttgagagaaagataacaagctaaaagttcttctaaatccttagtccctctgatgttgttttccacgatcatctccgccattgattctctaaaatcgctctgaggatcaactgaggatttaacaacagcaaagctttccgaaaggtgtttgttgtaatttcttgttgttgatgatgatgatgatgagatgctctttcttgcataggcttggattttcttgctggcgagtttaggtgagttgactctgctgagcttaatgccactcgaagattttcgacccaaaacattgttgttgttgttattagtgctttttgactctcttcgagtttttgttctaaagctttcttctttgactttcggtctgtacttagtggctttaaagatggtgtcgtcgaaatttatgggctttgttaagattggaggaagctctagctccgtaacgacgtcgtaaaactcgtcttctaacttctctgttttcttgacagagccatcgtcttcgccattattgccattgttgttcaagtcgatgatgatgtcagcagtggaagaactgagcctacagttacaggagcttgaccaagaggctaagcccacaaaagggtctgacctaacatagtcatcgcagtcaaattctgtctcggaacaactctctgttccggaaacagagtagtctggagattgaaccgggttcgggttgagacaaaccggttcgggtctcgggtggttgtggggtatggagattgctttccttctagctattttcttggatgattttctaggaggatctgggaaatggggtgttgagttggagggagagaatgatgtgttgttggtaaagaaggggtgtgttgttgttgggtgagaaagttggggtttttgctgggttttagaattgaattgagtgagctttttctttgtggtgggacgagaattgttttgctttctggttttgctcatgtctttgagcttgtaaaaccatgcatttggtatcatatctgacaatctgaacttgttgttacccatcaaggaagaacttctcttctctcttctctttctttgtcactaatagttatacttaactctctttctctctctctttctctttttctttcttttggactctttggatgtgagagtgtggtttcgtttctttctaaagttgataacagaaaataaaaaaaataaaaaataaatgataataataataatatatggagttggctgtgggggtgtaaagataaataaaccaagaaatggaagagctataaagtctcgtttataaaattctagaggataaagattggagtacattcagctatgaaaatagaagagaacaaagaatagtataataaatgacttttcttccatcattagtaccaaccagccaaacagcaccaagaaagaacttctcattgcatttttataaatactatataataatatatacagaattgtttaatcaattgacatttaattagttttttttttctaatgaagttggggattgctgctttttagtactaatagaatgttttatgttttgagaggcttatctttgacatgcatgatgttgtcacttaagagactatcacaaattttccttcttaatgtgaacttggttttttttttctcccaaagcaagaaaataaataatgatgattttagtaacaaggatgacccatttgtctagcaagtgctggattttatcataattctcactttcaatgccttctctctctttttttggttattaatgatgatagtctctctttcccttttcaaatggttttgatatataatttaagaccccacatgcttttttttttcttttctttttggtccctgaaaaaagctcttgctagaagaacaaagctggcacagcgtggaagccaaccatctctgagagtatcaccaggtcttttctatagtttctatagttgtctttagttgcaaataaattttaaaactaaaaggagtaaacacaaggtagttagttagttctatttcaagttctacccaaaaaaaagagaagtaattgtta

SEQ ID NO: 273501 - DNA, 1826 bp, Cannabis indica
tattggatttgcaaaaatagttttttaattggtatcagagcggttcactaaactcttagtgagatcttgtgattattttctttttaatttgttttgtgtgcaatgtccttctttgcaaaaagtggccctatatcttattcttcaaaggttggcaacaagaaaagtatgtctaagtccttgagaggtagtatttaaaccttttacatccaacaataaaaaagaggtacaatgtagaaaatatcatggttttggacacatacaatcgatgtgtaaatactttaaaaagaactaaaaaggttatgaatattacttactttgaaagtagtgatgaagagaaatcaaataatattgaactaacatctgtgttttctagtgttccatgtcatttgcagaaaaataagagctttatttgtcttgacaacaatgttttggtaataaagatgttgatgatgctttagggactgattttgatgaatcagatttggatgaggattccttaaaagaagcatatagaagtaggtatggtgagtggttgaaattgtattcgaagtatcgtttattgacaaaagatattaaatcactttgtcaaagaaatgaagaacttaaactaaatgttaaaaattttgaaaatgagattgttgagaacaataatgaagtcaaacgattgtccaataaacttgagcatattgagaagaatgcaaaaatgctaaatccaagttcttcaatttttgaagaggttcaagatataggtcaaataaaccatgttgggttgggatgtgttaaatatcaatctaaattgaacactaaatttgttaatttgaaaatatacctcctagtttttgtgatctaacaatgcaggaatctgtttctacaactaaaccttctgttattaaagaaagggagcagtcaggcaagaaatacaattttcataaaagaaggaaaaagttcacttccacgtgtcatttccgtggtgttaaaggtcaaatttgaccttagtattttaccatgataatctcttcaaaaataaaactttcaatcattatggaaaataatctgttaggaaaaagagatcaaaattcaagaagatttaggaaagaaaaatgaatctaaatatcttgctaattttacttgtcataatgcatgtgataataccagtgctatatatatattttcaaaaataatgttcaaaatttttgtacaaaatacattgatatgagaaattattttattagggaatttgttaataatcaaactttgcaattgtagtatgtggacattgaaaagcaattaaaagaattttcagtaaagacctagattcaagtcattttgactccctcaaaaaatgtttgggggtttacattacttaattttttttcgtatggttctctattttgtacaaaattttgagttgtacttttcttacatatctttatttcacacttagttgactaaatatgtttgtaaagaccgcttagctttaatttggaaattagcatataattagggttttaattatgaaaattatttataagtattgaattaattatttatgataatttatttgaactcagaatgcatttttatgtcacatatagaaatttcataattttgcatgttttggtgcccggcaacattggaacgcggtgtatggctatttgaatcacatcttagtatatcgagataatagtttagatattgggaatgtcgggactagtcgggattttagaatttcccaaaataaccccttagtgccattttatgacttttagtgtgggagggcaaaatggtcattttgccccatttgtcttttgtcttttgtgagtttg

SEQ ID NO: 273502 - DNA, 1954 bp, Cannabis indica
gatggtgtagtgggagccattggaagagaaagaggagttggttttgatggtgtagtgggaggtgactcaggagtctttggctgacttggactcttaggcgaggatgggatatttgttggtggtggttctgacttgggtgtttcaggtgctggcacttgtgtacgcgagggtgattctgttggagtagattttggtggtgacgaggatggtgactttggtgtagatggcgaagaaggcttgggcaacggtggcttgtgcgatgggtcaccaccaccacaattcttgctgcagtcgactggttttgttacaacagggaagcaagttctagttgacttctggttaggccgtccaggcaaacaattatattcatcctccaaaacaacggttgttttaccagacgacggtacacaagaaggagcctcaccattaaaaaagttattagagaaagtgaagttaagcaatttgggcagcttacaaacgtaatctggtacaaacccggtgagcttattgttcgcaatgtctaattcttccaagctttctagtccggaaaagctttggggcaagctcccaacaaagccattatcactaccatcaaacaccgtcaagttacgaagcaacccaatctctggagggaaacagccgttgagctcgttgttcaagaatataatttcgttcacgttcggcatgttgccaatcgatcgaggaatacatccattaaacatgttattggcaaaagttacaaccgaaacagtagagttccccaatgtttcggggattatatacttgaatcgattattatttaagaaaattgcgtcaaatttctttacgaagagttccggaggcaactggccttcgaaatcattgtatcggatatcaagatatttgacatcaggccattctaggacgacatcagggaatcctccaacaaacctgttgttgctgatgtcaaattcatgcattagtgtaagccttttaaagctctttggtataatgccgcaaaatcgattggagttgatgtggaaaagagcaacatcagtcaataggccaagctcaaccggaaggtggccagcaatgtcagcgtggttaagatcaacaccggcaacaacactgagttttggatcgtctaaggcaggtgcgcaaaatactcctgtgtaggcgcaaacattggctccaacccaattgcctgtgaagttataggggtcagaataaatggcatcctttagagcttgaagcccaacgtaggcttttctcaatctttcattggcgaatgtaatgacgagatcaaactcgtactcaaagtcgttgggaaggtcgccattttctgggaaagttaagagttggcgttgagctatgaaggaggcttcagcatcggttaatgacaaggacaaagttgttagagaaaggaaagagatgatgaataagaacaatatggtagtaaggtttgagaaagggtaatgatgattatttgccatggctggctgagaccataattgagaagagcctctttgcttatagttgatataatggttggaacatagacattttggattgatgggtattgagaaagtttagaaacatgtttgatgttttttcctattttagcatcagaaaaaatgggattgttatacacccacgagttttgaatctaattgttgaattttgggtaaataaaactaggttcatttttgcatgttccgtatttaaagatgggaaaaacaataaaaattgataattgaccgagtccttattctgctatctgtaattaggattggttatttcttatattaatttggcctattaaattctgttaaatccaactaatatgctattgaaaactatagtgttcgtcatcaaaagaaatttgatcatatatggaatttctcttattagacaactcacgtgattataacaattaacaagtgttatttatctaatcagctatatattacaataa

SEQ ID NO: 273503 - DNA, 2471 bp, Cannabis indica
agggcataaaacccaacacagaccccatggaacaattacatagtataccaaagcttgtgacactattacaaaaatttgtttgtgcattagtttggagctaagataaactacttatttgcgtttgtagtagatctgatgtaaaattccatgactcaaatctcaggagaatttgcattaattgggtgctacgttagtagcgagctgaaacaaatctcgagaatatttgcatcaactcccaattgatgcagacgagtagtttgtgttagttaaaaagtgggaattaacacagaccccagcatcaaacgctccatcaagcatttgaatcaatgtgaacttacgaaaacggaagaactaaaatagattttaagtagcgtttgattggaatgaataaaaatataagaataaaaatggaatagtcattccagcaaaattatagaaaagtcgttccattggactgacatttcaaaactttaaaatgaaatcaaacaaaaaaaataaaataaaaattatttccttttcattttattacctttaatcaaatttcaccttacttcatacaattgactctaacctttaggtatgatttcaaattttaaacattgtattttgattagaacattgtatagatgtccaattaaaaattgatgaattatggggtttatagattggcctctaattcaaataagagtgaaaatcctataaacaagtcattagctgttggagaaggtagttagttagtcagttagtaggttagttaattctgttacatgttagttactgtctgtatacagagttagttatattctttctctgcttttcttaacagaatcctgtacttgtaactttctctctatatataaatacaatagccaagagtgtgtgaacatcatcacaactcattctctcatcaatctcaatttggtatcagtgctactggttttttttttctttgttgcatctggttcttgaagcagtctctcatggcgtcttcctcaactgctggtcttaggcctgaaggttcatcgtcctccgctgctacacaaacaaatcaactcccggtcatgcaaatcattaccaatcatattgtccctctcaatcttcgtcttgaccgtaacaatttcttttattggcgatcacaggtgttatccactgttcgtgctcatcagctcgaaggattcatcaatggaaatcgtccaagacctccggccataattacagatcctacagatcctaccaaatcctgaattagcagactggttgcgccttgaccagtttcttttgagctggctcttcaattcgatctccgaaaacatgcttggtcatgttgcaagatgtgaatcttcagctgaactatgggaagttcttagacaacttttctcaaacacatctcgtgcacgtattctgcaattgcgaggactgcttcaatcaacaaagaaaggctccacacctatcgatgaatacatcctcaagatgagtgtttaggtgatgctctaatggcggctggccatgctctctccgatgataaattgatcttgtatattcttggaggtttaggcagtgagtatgactcggctattgtcacactcacatccaaagaatcaattacacttcaagaagttcagtttctgcttcaaacacaggagcttcggatcgaacaaacgacatccgttgctacattggatcgcgcaaaatcccacagcaaattatgctgctacaaacaagaaaggccctcctccacctaactccaccaacaatggtcgtggacgtggatccactcgaggaagaggtggacgaaatcaacccggtcgtggaaacaatcgtccaatctgccaggtgtgtggccgatctggtcatacggccataaaatgataccatcgttttgatctgagttatcaaggagaaggacactccaatactcaagaatctcccactgaagagcctcaagcaatgttggctactgcctcctcggtcacagatccccaatggtactttgatagtggtgcttcgcatcatgttactgcccatgcctctaccttgacacacaaatctgattaaagaggcaaaggaacacttactgtaggtaatggtgcctcccttcccatattagccattggcaattgtcttcttttctcttctccaaatctacttcttaaaaatgttttgttagtccctgctattcataaaaatcttataagtatctcttaactttgtactgacaacaatattgtcattcaatttgatactgaccaatgttttgtcattgataagatgaagaagcaggtccttcttcaaggaattcttactgaaggcctttacaagctgtctctaccatctctccagcccactgtcaatctcctttctcataacaattcagtttgcactctgttaatgctactactatgtcttctaataaatctgcttgtattgcttctagtcttgtaaaaattctaattgtatctctaatctttggc

SEQ ID NO: 273504 - DNA, 550 bp, Cannabis indica
cacagtacgtttaaaaatcacgttaacacgcatatgctagttaggatgttacagtaggatagagtctatctttgtcggatcatcaatgataccatcttgagaaattacatttgccaagaattttacttcagacatccagaagccacagttctctttcttagcataaaaattaatgatccctcaaggtctgtaacaccattgacaagtgttcatcatgatcatcacgtgtcttagaatacacaaagataacatcaatgaatacaaccataaatttatccaagtatggtctgaaaactctgttcatgagatacataaatgcagcaggtgccttctttaagccaaataatataaccaaaaactcaaagtgtccataacgtgtcctgaaagcaatcttagggatattttcttactctaatcctcaattgatgatagtctgttctcaagtcaatctttgaaacaaccaagtgttgggttttgtgccctaaataaacccatttcaacataatcagatttattagttaataaagatcagaaataacatttttatgtt

SEQ ID NO: 273505 - DNA, 860 bp, Cannabis indica
tttttattgttctaaatttttggagcaccatcttttttttgtttatgttagtcgtaatttaaatattacaactcattgattggctataagcatatatataatatagttgctacagaaaataaaagcaacgaagttactgaattaaaatctaagttgagtcgcggactaggtcgctctttttaagacgttcgtgatactgctcagaattgtgcaagcacaatatcagcctcgtcgttccaagtataaaacaatcgagtcgaaccattgtatcggagctctattacacaatagagaaccgtcaaaataccacacctaataattgtactactgcttggaacacatttgtaatataatcgtatataactgtatatattttttctgtgagaaaagtatgtatttctccaattctgatgcattaaatagggaatgcacagaagatagtaactgaaagaaagatacttctaatcatgggaacgttagaaagaacgagtgatcatgagaacaatgctgaaaatcaggatgagaaaatgtctctatttactaattaattaaatacgtttgaaaactatttttaattaattaaataaaaataataatttaataaaaaaaaattttctaaaaaataaagtgacatctcactcactcgccagctcaagtcggtcacacagtgcgcgtgtggtggtccggtgtgtgagtcatcacccatgcatggtaagggtgggcatcatccaaattcaatccaattgaaccgaaccgatccaatccaatccaaattaaaaaaagttggatatccaaattacaattggattggattggatgctaaaagttggattcgtaattggattggatcggttattgga

SEQ ID NO: 273506 - DNA, 1381 bp, Cannabis indica
tttgttataacttcatattttcaactccttttataataaaaataataaaattttataatttcaaaatgtaatatacattataaggggtaatatatcattaaataataaaaaaattaactaaataacaatataattttaatatgttaatatctactagggcacattgtgacattaaaaaaaattactactaaaaatttgggctttagagatgattttttaggacatacaatgtcagttttaacgaaattcgcgacggatattattctagggaatgctaaagggtatgaaattaccatagtcatagagtccctatggcatcggttacttataaaagtaggttaaaaaatgtaactcataccaaaaagcatatccttgacttttgatagagtcaattaacgtcacatattgtacaccttcctcagttatgataatgtgtgtcgagacgtcatagaggaacattgcatgaaattgcatgaaattttagtaaaaaaaacaagttatatggaatgaaataatggacaatagaaaaatataaatctaatataatgaaagttgaatattgtcatttgattacctttttggataatttcagctagataagctccatgagaaagtgaacatttttggtgtaaagctcagctgataaactttaactgcatgatggagatcttggattaatgggtttgactctttttaccaacggagaacttttgagacttaatcctttctatatggtgcttagatatttttgtattaatcgagtgaccaatggacataactttaaattcttaattagagtaagattattaaattaaatatttttgttaaaacataaaaaccgaaattactaattagtaaccaactttagtatactaaatataatttgtaaataactagtaattaatctttctctaaattactaactatgtaataatcatcgctcatcgtggatatatgacttatccattacaaaaattaacaaaaaatcctaacaaccaagtttaagagacatgtaaattaaataattttatcctaactctaccgaaattttagcaatataacagctataattgaacatccccaaataatttaaagttcttaataacaacaaaaaataatccaaaataagataaaacaatcataccaacatttaacaatattaaattttaaaacataaaaacaaaataccaaaattaatttacaaactagttactaattatataatttataattaactagtaaatatttagtactaaattactaactacttactcaatctcaatgtgccataaatctcaaacaagatacaatattttaagagataatcactaatttcaaactctagatatttttttatgtctttattgattgagatgcataa

SEQ ID NO: 273507 - DNA, 851 bp, Cannabis indica
gaagcttagaagcaccatatttcgcttttaatcagacaagtgagatagatccccccatctctaaaggcgccaataatcgtcacagctcaaagtgcaccagccgggaatcgaacccgggtctgtaccgtggcagggtactattctaccactagaccactggtgcttcttggttatcttctgctcttttcaatatatatacttatacacatataatcaatgactctgacttcattaggaaaatacaacttgaaaagtaattaagagtggtccaataatttggaactcttttgactcgggtttaatttaagtatagtgttagttttatctatgccaaaatcaatttttatctataaatttcagtatgtacttcttactcaacaaagagctcttttaagagaatcaaaaaccaatatcctattagatggttggggttaataataaggtcaagtattaacctttaaggctagcaaaacactttttcagctcattctgagaaactctttgcttaatagtgaaatcaccattatcatgttgaaacaatattggtacttctagagtcattttcctaatcaatttttctgaattaatccaaatatttatgcagaacattattatgtgaagatcttagaaaaattaacagcagtataaataagacaacatctcataatatgttcaaggctaatgaaaaaccattgaatttcttatatttctcatcatagaaaaggggaagtcatatcacataattagatcaaaataacatcttctatatcgaaaacaaagtatgaattaacactcttttctttggggggaaaaaagtatgaatactactttttgatggattcagcaactat

SEQ ID NO: 273508 - DNA, 753 bp, Cannabis indica
aatggtttgcccctggtagcactttttttgtaaagacagatatgcaaagttggatggccaactttgcttcttaatgcctcatacttttaagtttaaactttaatatgtggatgtttgcttgcatttcattcacaatttaaacaatcacatgcataaagtttattaggggtttctattgctcgtattttcctctgacactaagtagttaataagctactttatgcgcgagcagcttatctgcccggtcctcaatttgggaacaatcattgattctgcctcgctatcatcaaaaatgatgttatttcaagcaaactcaaatatattgttaatgagcttgccattttatttatatctttattgcttacatgagtagttaaattttctacccacatgttaggtttaagtattttttcaagacactttgatgtctcgtttaatacttttcctttagcgcgagccattagtattccgctttatgtgctagtagtaacttttgattttcctttctcgtcagaaatggtttcaaccaaaaattacagttgtttgatccctttctcgtcagaaaggtttgatcaaagcattataacaattcgactcctctctcgtgaaaaaggtttggtcagggagttataacagttcgacccctctttcgtcaaaaaggtttggtcgaggtaccttttttttttttataaaaagttttcaaaaaaaactttttatttttgaagtagtaggtttgcattgtactatgtattt

SEQ ID NO: 273509 - DNA, 985 bp, Cannabis indica
tattaattggaccctgtgttttgtaaacgataaaaaggatcttatatttttcaaaattatacaaataggaccctgaattaattttttgtcaaaataaacttaataataatttgatttagatgtaattatgacaaaactgattatattttctatatgtgttcgtattagaaattgtcttaaagttgattatattaaaaaaaaaattgttgaaaatcgagcttagggtcttatttttaccattttagaaaatacaggatctattttgtcatttaacaaaacagagagtccaatttgtaacttttgcaaaacaaatggtccaaaatagtatttattcagaaaaaaaaatcataaaatacaatatttttatattaattactttctttcttaataacaagccacattattttgataatatattaaaaataaatataaaagctctattttcaaattttgcttcacattatgagattatgtttccaccaattattcgacttgtgacatttataacgttagaaataataaatgtgactaatcaaactattgatggaatagttggttgttggcggttgggacaggttagattataaatttacatataatatacataataaatatatgagaaatgaggtacaagtagtgtttagcacccttctatgtgttattattgctattgatctaattaagtatcgaattccataatagtttaacgtaacaacttttagaataccacataactaacaaaaaaataaattattgttcttttatgcttccaaaaataaattaaaataaataaattaacaaattcaaaaaaaaaattataagtataaaaaaaaattaattttgttttaaattatatttttcccatataataataggatataaattaaatttattaaattttaaaatatatttatatcatatattagattcttaaattactatttttttgtattaaaatattaattgcatatatatataatttttt

SEQ ID NO: 273510 - DNA, 1484 bp, Cannabis indica
ataaatatatatattttttgtaattactaaccgctactaattataatatatattacttaattagtatagcatatatgataaatacttattgtatcatttctatatataatatatatagctgtttaataattttattcagtcattcaatatttcttcttcttcttttgtataggtttcattcattcattgattgctttcaattgatgtaacacactagatatatagaattttgtatatatagttaacaaaatagtttaaagagagagagatgaggatgaattgagttgggtgggaatacaactgtaaaaaaaatcaaaacaatgttgtctcattctcacatttacatattattttttttacaaaaaaaatatatattaagcattgttattagataaataggtaccttcaaaatcacactgttgtaaatgattaaagccataatttataataattattaaattaaattatattaaacttgatatttaattgttctaataatgatataacactttaagtggtgttagatatattggtatctagacctgactttagatctagattaggacctgatctaagacctagattcaggcccagacccgaacttagactatggaccctaaacacggactcagaccttggtctcgaactcggccacaatcatagaccctaaacttggacccaaacccgtatctaaaccgtggacccgaacttggccatggactcggcccgaactcgaacctggtcctaaactgccccaacccgaccctaggcctaagccccaaatccgaacccaaactcgatccagaaccatggaccgtacctcgaacttggatcttggatcttggacccagactctgaccctagacctcggctcctggacttgaatcttggacctttaccctaattcgcaatccagggtcggggtctggggatggggtttggtccagggccgaagatggaatctaggtccaggtccaaggccaggatctgagttaaggtcgagtttttggtgaagatagtataaatattttacacaacctattaatacaagtcaatatcaaatattattatattaaataatatcaatacaatataattaaagacaattatagacaatataatacaacacaacatagtgtaccataccagttctaaaaatatttatttaatttataagtaattattataactaaaagaaatggatcaatggagtcttactaattaaatattatatatatagtactgatgataaaaatatcttatatattaattaagcaatggagttttggtaattataattaattaatggaatgaaaaagtgatggagatgggagtgagagagtgacaacaatatcacttttagaagatctctaattccatttcctctctgcgtgtcgtcttccaatctcatcattattacccaatttattattattattattattattatttattaattatttaaactatatataaatatatat

SEQ ID NO: 273511 - DNA, 654 bp, Cannabis indica
ctaatggatgttatcctagtgactagtaaaaaggtgtacaagaaatctacattctctctgtctaaaacccttggctactaaacaagccttgtatttgtcaacagttccatcggatttcaatttctttttcataatctacttacaacctataggcttgcagtcaggtggtaagtttacaacgtgccaggttttgttggtcacaagagagtccatctcttcatctatggcctcttgccaaaggtccgcatctaaaaaagacaaagcttcttggaggttagtaggatcctcctttaaggtataagcacagaaatttgaaccaaagtctttagctaccctcgctctcttacttcttctaggttcagtttctaaatccttagtactttcatcactcctaatcactagaatgttgctagttgatgcgcctccacgatttctcaatttaaatggaaatttatcttcaaaaaaatcaaagtcattagattccattatcacatgcacattaagatcgtagaacctataggctttgttattaacatcataccctaaaaatacacattcatgggctctacttgcaagcttaattctcataggatcaagaatacgaacatagttaaacaaccccaagtttagtaataggaaatgtttggttgttta

SEQ ID NO: 273512 - DNA, 579 bp, Cannabis indica
tatcaatatcaatatgcatatatcatacacatattcttatcataatcatcactatactacttttcccaacatactttataatagtctaggcaggtaatctaatagcaaacaatataaatacttactataccatgagttgacttttcttcacaacaaatgtacatattcgaccagtcttaacgacctttaaaaccatggctgctctgatacaaagttgtaatgccctatagggatgccacgtgtgtgattttataaaccagtttaatactaatatattcattaattataaaaaacagtgataatattaaaaatttaactaaaataaaatactaaaaacatatattacaacggcataaaaagcatgttccggggatccctgttataaatttttttcacaaaagaactaaatacaacgatgcctcaaaagcataaaaccaaaatatacagtagatacaacccaaaacaactcttcacaacccggcacgtaagctgatgaggtcaatatgtacattgttggagaagactgtcacctcatgattgatcctgtttttctttgcctttacctacaccatatagcac

SEQ ID NO: 273513 - DNA, 2789 bp, Cannabis indica
tataccaattataatgtcaagatgtgtaacacaagtacatagaaaatgaatttccttacctgatctctgcaatgttagttaacttttaaatcatactcaaacagaagataaaaagttcttcaacttacttgcaccatttataatgagcaaaagcaataagcagaccgaggtgagcaatcagcaaagagactgcaaatgattttgaaacaaatattggctctggaacaaacttaaaattaactgacctgaaaaaaatagagtggatattagtttttatctctgcatcgtccaaattattaaattagctgaactaaaaattcatatgacaaaatcttgaaagatttcatgaaccagcccaatgtaccaaaaatggatgaagacacgcccaagattgaaggcccttgatatgtacgaaaatggatatgatatgataaaaggcagtgccaaaagtatctgcacaaccattcatcaatgaggggaaagaaactgaacatcacaatcaggaaatgctctcgaagtccaactcacctagtcatgttgaaagaagatcaataaaatttatcatccaacttctgcatttaaaaactcgagtactctgtaaatattaacaataataacagtatacacatgcaaaatttagagccctcaaaaccaaataatcagaaaacttaaatccttagaaagcaaaagggggcatgataagcacctgcacaagtgcagcaccagctaaagcagatatcactccagtaatatccatagcctgtaaaagacattttaaaacaaattaatattaaatataaactataaagaaaatgcctgctcctgtaaaacgttcaattagataactttttgcatgtagatataattctaaatggaatgtacctttagcattaggattaataaaggtggagcataaagtagtacattcatctttattgaaactgccccactacagaagccagaaacaaactttaatcaacgtcatctaccttatgaaaaaggaatgaagatgcaaaagacatacctgaaaatgatcaaccccagatgccacctttggtaaataatggaagccagtgaagcatgaaggagcaacatagtgaaacagtcgttaaaaagacgaagaacaaaaatagaatgaactcgttttgaaagaagaagcaggcttagagcccaccaaggaagctgcaagacaattaagagtccaagcaaaaataaaaaacaaggccttttcaagtagaagaagcaaataattgagcagattgcatttaaatcaaaagatgtaaaatatcagaatttccttaattatgcaagtcccaaaaacaagagcttcaaacaactcaataaggttaaaaataaattaagcaatacaacaaataatgcagttttacatggttgttcaaggaaaaatactactagtgtcagacactagaaaaatgtacaaactgttttcataccacatcagtcttcaaatagacggccaaaatgattcccagatttataatgtacagaattccaaacaaaatctgtaacaaagagattaagagccaattaatatatttaaatgcaattagtatattacataaataaaatgatgagaactgaaaaagagaaaaagaaagaaatcaagggaatttttaagctttgaaagataaatagataagttagcaaagttataatcacaatatcctgtcatcccttttattcttaaatccaaatcatcaatttaattcttcatttatcttcacagcaataatccaccgaatctcaggcaaatcatcccattctctttctcctcatatagcgtagtttctatggttcttcctagttcaagccaagtatctcccaccaatataatatttttacaacaacaaaaaatcaaacattgttgatcaggaacacagattttgatttaaaagatagaataaatcaactacctgagccgggtaaacttctccaccagtaacatatctgatagcagcataaacatatagaaacccagctggataaaccaatggccctgtgtcacctttcaagttcttataatctctttccccgccaagaaaaccaatgacctgttcttcataatcataccccaataaataaataaaacaaaaaatcaatccaaatcaacgaaaaattatctagctatccactgagaagctaagaaagtcaatttgaaccttttaaaaaaaaatagaattcaattaaaaatcttcaatctcagctttcctttttcaatagttctgaaagttttagaaacacaagattgagaaaaattgttacctgagacatgtaagcgtcccaatcgatctttgtatctgataatggtgggggagaattatgacattacaattacaaaatttgttaaagagatagagcaagagaaattgatcttacaaggaacgtaagcgataattagagatatgagcagcgcatcagcggagatcaaagcgaaagggaaaattagatttgggtttctaaaaattttggaagccattctctccgatgtgtgccgtcgcgtcgccgatttgtcagccatggttgaatcgaccttgaaaggcttgcttggaacgacccggtttaatattgaggattcggagccaacttaattttgttctaagtttaggaataccacttttattaatcaattaatcaaatttatctctaattttatatttaattgaaacatacctctttttatatgtattatacctaaaatacctgacgtaaaagaatcacatggagagtatcttgaaatgatagggataaaattggtacaatgtttaaaa

SEQ ID NO: 273514 - DNA, 1681 bp, Cannabis indica
tcaacaagttacaaatatactctgtcactcccgcatttaatgagttatttcattaaatataattactgttacacgcatcaatccatattctccttaacttgacacgtgtcctccattgacatggtagctgaattttgggtatattaattgccccttaaaaagttctttttaataaaaagtactttttaaatgcttacagagggtatattcatcataaccccttttttcaagactacgcatgccctcaattataacggctccacggtttcgagggtcatcattagtatccatgaactgccttttcaccttctacctcattcccaacctttggcctttctgttaccgggttttgagtataaaatggtggcttagtttagcaatgttccatacgctcctggttttttgatgagttgcatccaaaagttggattgtcattctcttgctaagatgtcccatccaagcccagaaacttatccctcaaaactcgtaacaccagaatacaccaactgcttttcctctctgtatgttcccagaaactttaaaccttagtttaaattaaaaacaaaggattccaagaccaaagatcttctgattaatccaaactaagtagatacagttgatcattacgggcgatcttcataagagatttccgagggtaagcatcatccttcgcgaatggtggattgacctggattattttttttatttttttactgttgcttcactgatcttttatctttgtctctaccaaaatgcacgtagattatgagagtgagttcagaggttcccctcaggtagacaaggaatccaggaagaaggtaatcctagttggcgaggtcatagattctactaatgaacccaaatggcacaagacccaagcttgcacaaggaaatcttcgaaccagccaaccactggcgtttataaatttcccgagattgggaatgaggtcttgcccgtagggaatgaggtcctgctgtaggaaatgggatcttctgctgcagagaatgaggtctatgcaaaggtcgagttcttattcgtgtagacagtctttcttgagttcactagccccccatgaacaaccttgtattttttgtttaggaaaatggcttaatggtttgtccctagtggtatttttgtaaagacaagtttgtaaaccaacttggattttttcttatcttaaatgccttgtactttttagttcgaacttaatatatttgtgtttgcttgcattttctttcacaatgtaaacaactatagtttgatcaaatgcaaagtacttttgggtatttccattgctcgtaattttcctatttaagtagttagtaatctactagacttttaatttacgagcagttatcaattctgcctcgcaatgacagttatagtctgtcttaagcaaacttgaatatacttttaatgattttatcactttgtatatttttgattgctcgtatgaatagttatattatctatccattcactaggttatcaagacatcttgatgtctcgtttaatactttcctatcttgtgcgaaccattaatattcagctttgtacgcaagtaatgagttatatctcatttataacttttgattttcctttcttgtcagataggtttaaactaaaaattatgatggtttgatcctttctcgtcagaaaaggtttgaccaaaaactttaa

SEQ ID NO: 273515 - DNA, 2292 bp, Cannabis indica
ctacttcacaatagaacacctttcgagttattatttgacactgcaccagattattccaatctaagaaattttggatgccttgcttttgcttgtactctcactgctaatcgcaccaagtttgccccaagagcaagaccttgtgtttttatagaatatccacaaggcgtcaaaggttacaaactttatgacttaaatgacaaacaaatttttgtctcaagaaatgtcattttccatgaacattttttcccttttcacactcttaacacctctgatattggtgatgaccctttctctcatcttgttttaccttcttctcatatatctaacacatatgtaagtgatttttctgcagaaacacctactaacagcactcaagatactgttgtaactaagaatattgctgctgccataaaaccccaatatgcagacaccaacatctcaacatcacagcgtttcacaagattctatctctacacctgacattgctcctgctactatcaacagaacaaaaactccagataactcaagtcataatcaaccacgaaaatccacaagaactatcagaccacatgccgacttaagagactatgagtgcaactctaccatacaagatcaatcttctacaccacaccctcttcataaattcctttcctatgataagctatcaaagtctcacaaaaattttattcttgcagttactaccctctttgaaccaaggaattacaaccaagctcgacaatacaaggtgtggaatgatgctatggacaatgaaatctatgcacttctccgaaataaaacatggattgtggtcaaacttcctcccaacaagagagctattgggtgtcgatgggtctacaagatcaaatacaacagtgatggttctgttgagaggtgcaaggcaaggctagtggctcaaggttttagtcaacaagaaggattagacttctttgataccttttcacctgttgccaaaatggttactttcaaattattactggccatctcatccatcaagcaatggcccactttgcaaatcgacataaacaacgcctttctcaatggagatctccaagaagaagtttacatgactttacccctgggattcacacctcccaacacagaatacggttccactctagtgtgtcatctacataagtctatctatggcctaaaacaatcatcaagacaatggtataagaagctctctgatgctcttcttgcagaaggcttctctcaatctcaagccgactacactttgttcacacggggatttaatgaccatttcattgccctactcgtctatgttgacgatatcatcatcacaggccccaacattcaacttcttcaccagctgcaagagtctcttaatgcacaatttcaactcaaagccataggaccactcaaatactttttaggctttgaaattgcaagatcaacagaaggtgtgtttctgtctcaaagaaaatacactcttcagctccttgaagacacgggttacacaggcagcaaacctggcaagaccccaatagatccacgaacaaggcttgatgaccaacaaggacatcttttagatgattcgtctttctacagacagatcataggaagacttctttatcttactctttccaggcccgacatcacgttcgctgtcaatactttgagccaatttatgtcatctccaagaaccccaaatatgcaagccgtgaaccacctcctcagatatttgaaaggcagtcctggacaaggccttctctacagctccaattcatccttgcacctcagaggtttttcggactctaactaggctgcttgccccacaaccaggcgatctgtgactggtttttgcatttatatatgtgactgtctaatttcttggaagacaaagaaacaaactacggtttctaaaagttttgccgaggctgaatatagagcccttgccagcaccaacagtgaaatcacttggattcaacacctcttgaacgatttccaaatcactcaaacagcctctgccttcatctactgtgataaccagtctgccatacatatagcaaacagccccacacttcacaaacgcaccaaacacatcgaccttgactgccatttcatccgagaaaagatcaaggcctctactatttgactgataccagtgaacacaacacttcaattggcagatgcttttacaaagccttttccttctactacacttacaacacatattcgcaagatggctgtgtatgatatctacagtccatcttgagggggggatattagattactcatttctactctttc

SEQ ID NO: 273516 - DNA, 4683 bp, Cannabis indica
aataactaatttgaaaatttttaaaaaaaatataaatgatcctatttaattataaaagccaatatcaataaaagaaattaaaaaataaaactaacaaattttaactaaatgctaaatcagataaaatttactaaagatctatttaaatatatactataattatccctaatttgagattgagtgaatcatatgcaaataattcattgaatataatttttaatttaatattttacttaattttgtaaaatgtcacatgcatgtggcttgttgtactttattatctatagcttaaaatatctaaggtgaaaacaaacaaatatacataaaagaatcttacaataagacatacactttactgtaccaaaaacaaataatataataataacaaaaacattattatattgtatttttttttttttaattttgaacgaacattaattatttaataattggcctattgggtgtccacataaacatataatattactatttataacaaccctatttaggttttttttttatttatgcatgattgtgctttttaaatttttcagcaattagttcattttgttacatatttaccaaataaaatgatcacatataatttaaattattagtcaacgtcaattaatttaaaaaataatttaatttttttaaaaaatcattaattaattttttgttcttaagaatttctaaaaaatacacatttttttctcttaattttaaattagacatagtgttaatcattttacaatattgtaaataattaagaaactaatttttttatagggttaaaaaaattcaaaaaataataatataataatattaaaaaaaaaaccaaacataacagaaatttcctattacttattctcctctttcctctcctttatgctttcctttcttaaccaaatatataaatcaatgtcttcttcttcttcttcttcctcttcctcagccaacccaaatggactcagtctccacgcctcaatcaatctcaccataaccattccaattcccattcccaaaagggtcctcagaatcaaactctgtatccccaatggcttcatttgctttgctcttgtcagatttcttggtctcattcatgtgggtctggtcaggggttctcattaagatctttgtttacacttttttggatttaggacatgaacccattggagaggtcatcaaatgttctctttccattatcaatatgttcttttttgcttatttggctaagctcaccaatggtggggcttataatcctcttactgtattgtcttctgcaatttctggagattttggtcgttttctcttcactgttggggctagaatccctactcaggtattttcagttatgggttttgtttgatttatggtttttgaaatgagatttgggaattaattgtttgggtttcattgattactcaaagtttcaatcttttttgtttccaatatttaaagttgattgctttattatgtggaatatgattatctgaaatttatgtttaattatggaagtaatttggtctaaagattacttatttattgtggtttccattaagcttttatccacttcttgtagagctgtattagaatttttaatctcatttgctaattttagttgctaacattgattaccccatttttgtggatatatttgctacaacagattgaaagttagtacatttaatgcatatttatagatgagttaaggatttagatggatttattatctacaagatatggattactcataacaaaaccaataatttgttttgaaatggcaatcttgttttataactcttcattagtgcttatgcttaggcaagttcttttcataacatgggcaagtctgtaaggtcatcttatgcttaatcatcactaggaactagatgaaagaaagtcataggatcatttgatgagtctaagatacatatgccctattggtttcaacgtgtaagccatgccaaagggtatggctgtggatctgtgctaggatcccgcattgaccaagtatgagattggttagtagtatataactacttgggcactccctcctctcttagtctaacttttgggaatgaattctacccctagtgtttatgtcaaatggcatcagagcggaaggggtgacctgtggattaggcccaaagttagtcaccgtagagtcagggccagggccgaccctgacatttaatggacctaagaaatggctttgggtaatgtggtgggtttatgcattattcagcctattttacaatattcataattaccatttttttttctttctacatattcatatatctttataataattttgggccctgagtttgggtgggtcctaggcacggacctagcctgcctgagcctatgatagggcctgcgtagagtaggtcactatggatgtcccctcctttaggggtgtattgttaggatcctacagtaactaaatataagattggttagtagtatataactacttgggcactcctccgtcttttaggctagcttttgagagtaagttctattcatgtagttgtatcaatatgccaaatattcaaatctatttcgatggtcatagtaggacaaaatttcatttgtgctctctttggaaagatagatgaggggctggattgttaaccataggaccaaaatgaacacatataagcttgtgtttataaggaagtgactggctgtttgctagagatcttttgtttttgttttgtttatgtacttttccccaaaatgcaacttataattgttttaaaagaaaatcatggacactgaattatagttggagttgatattttgatgcatatatgtttgaatttcttatccattctctgaaacttaacagagttgctaataatatgtttgagttctattctttgtttatgttgttagtttctaacaagcaccaatgattttgtggttccatacttttcatgaatgtctttccatttatatttttgttccttttcccatgcagattcttggatccattactggggtgaggttcataattgcaacatttcccgaaataggtcttgggccacgtttgaacgttgatatccatcgaggcgcattaacagaaggccttctcacttttgcaatagtaactatctctctaggacttgcaagaaaaatcccaggtagtttcttcatgaagacatggatctcaagtgtctccaagttagctcttcatatactcggctctgatctgaccggcggttgcatgaatccagcttctgtaagtacctaacactcttcttatctttgttgcttagaaacatatttattgatagatatattgaatgagtttacttgactttacataggtactcggttgggcttatgctcgcggtgatcatattaccaaggaacatattcttgtctactggcttgccccaatagaggcgactctactcgcagtatggacattcaagttagtgtttccacaaaaagaagagaaagttgttagtagcagcaagactaaatcagaatgaacaaattaagattctcccacttagacttagtagatagatttggtcatctaatctcctcactttcaattcaaatgtatataagcttgttgtactttcctacttgcaacttatttgttatttttgcatattgtacaaatctcaatctatgtgtgtgcaattggttttaaggccatgaatttgtgccttttgtattttatggtaaattttcttagtaaattgttttgtttgttaatcttgcatatcatacaatggtttttgtcatattgtcacatttatttaatggcatatgacaatatgacaaacatacactttgttttgtatgggagaatttgttaaggatagattggtaaatctcttcatcaatttgataggaagaaaatgacatgacagaataaaatagttttgtaatgtggattaatttgggtttggaattaaaaaataaaaaattaagagcaagttgggggatctttgtgtataacgtctcgcttcaagtttctattgggtcttccctcacaaattgattgttcttatatatgggtgtgttattctggttgctttctggaatgatgacaggttttacaaaccaacatgagtattttcatcgtactttgttcttactggcacgcttcttaaaaaaaaacttctcaagagattacctattctaaaattactctaagtcaaccacgattaactttagagtttttaagtgatgcgttactagaaaacaagatgtaccttgttgacatagatagtacttatcaatccatttaagtcttctttaactgtgcaattctaaacctatacagtcttagaatcatcacacttaaccttacacaggcaacatgagattgcatagcttatgcggtaattctacttacggatcacgggactacggacaatcacactttaccttttgtgtgtgtttaccttatgattccctaatcgatcgtgtgtgtgtggaatttttaaggtatttatattctattctgatagcactcattaatcttactatagagttttatgatatgaattaattgtgattgataaaaaaaataaagaaatttacgctgaaagaccaaaattttaaataaatgtcataactaacgctaattatttaatttgtgaaatatacccttgtttttttttattttatttggacaagtatatacgcacgctg

SEQ ID NO: 273517 - DNA, 1014 bp, Cannabis indica
gaatttatacattaagcatataatcataaaataaatcatgtgaaccatgcaacataaaatgatttctgatcttttattaatcaataaatttaattatattgaaatgagttttatttagggctcaaaacccaacatcaagatggttcgaccagtagagttcggtcttgggacgacttggtctttattttgtagttgttatgtgacatgtttataaaatatattatgaacatgaaaataaattttagaagtcggatcttgactttttgtacgaatatatgtatatatttataaaagtttaaaattaaatcaaaagtttaaatttgtcacaatttttgagaaatccttttatttgcaaaggtgtgtacaataattaaaaagttactgtagcgtgcctaaaaaatagagtgttacagtacaaacccctaaggattactttagagaaataaaacaaacttaattaatagctttagtaaaattatttgctatttgttttgcttatttcactataatctaagactatagttttattttccacgagctctctagtgtaaattttacaagcgtgtgataatatgtaacaattattaacagatctataaccttttaacgcataattctttcccttcccaaacacataacaatcatcatgaaaaaattcacaaacaagtattgctcacaaagttgacttatactatttaaattagtcttaagtccatcaaccaaaagaatatttttcaacattggtagtccttcacaatttagagtaccactaccaagtaccttattagagatgccatttctaaatgtgaaaacaccatttttcaagggattgaagtcagtgagcttgtgatcatcacctgtcatgtgtctagaacacccactatcaaaataccaactgttagaaatacaagtgtttttacaagtaaaattagcaagacatttagattcatttttcttaacccaattctgcttgaattttgatctctttttactaacagattattttccataatg

SEQ ID NO: 273518 - DNA, 1118 bp, Cannabis indica
gggcacaccgaggaactctgtatcaatgaaacttgggcaatcgatcacaatatcaaaggctgagactttcgcagcggtgcggttgatccggtaccggagaaaaacaactacatgttataataagcagtagtaatctagtgttaaggggtttgaaaaccaaacgtgtccgaacaaagaaagtgggacacgtggagcaatcccatgactggaacctttcagattaagccacttatatataaaagagtggtagagtgtagcagaatctcaacgacgtcggttgttcatgaatcactgacgagaaagcctgacaataaaaatgggctgcgctacctccatctcaatctcaatctcagcctcaccccaaatctcttacattatttgccctactgagtacccaatgttgcctccttttcttgcaatcccaaagtctagagacaaattcacttgttagctctcctgcttcgaaagccccatcatcgtatgtatgactactgactacaccttcttttccttattattctgtttatttagaggatttctctgttttcattctttatcttattatttggtttttattttgtgtaggtgtttgcatcattggattctacctgcgtggtcaaattgatttcgcttttcaaggttggagttttgttcttctttatatagtttgcaattttgtgtggcttaaaaaaaaaaaaaattaataatttcattgtgtacatatgcgttttgatttgtgtttccttaaaaaacctggtgtttgaatatttgtatcattaacttgttttcttgttggtcttaagttatggttatatacacgagttgattcttttatcttaataattaggtataaacaaaaatattgttttaagataagtttttgattaattgtatgcttattgatttgatgaatgttgtcgatctacgatatttcattgtaaatttagtttgtattatgtctatttttatagtcagtaattggttataggaagcaaagatggttaaaaattggatgtatccacaagataggaagagtaaagaatttattgatggtgtcaaatcctttcttgagctggccaaagaaagcactctagggaggcttgatgaagtacgttgtc

SEQ ID NO: 273519 - DNA, 917 bp, Cannabis indica
gaatcttcaatcatcgtttgccagagtacattgcccttagagatttcttggataagctctgtccggtggcgtgatttccacagaatccatcgtgaacatcagataggagtcatgcaactttgtcttgagtgactccctctactatgatataccgtgctgccttccttctcattttccaagcttcatttcggttatctgggagttccccagaattgaggtaggctcctattggggtcatccagtttggggatgtatcaatcatttcgatttcttccgtgccagtgatgctaggctcttcgaggaactggacaggaaccaggttttccttgtcacttacattgctgtttgccaatcgagctaacgcttctgtagttgtattttcttctcttggaatttgtctgagaccgtagcttttgaatcgtgcgagcaaatcgtgtcttttgctcagataagctatcaacttttctgcccgagccttgtattcttcggatacatgatttaccaccagttgtgaatcactgcagatttccatgtgttcggccttcatctcccgggctagttttagtccagcgattagagcttcgtactcggccttgttattagatgctttgaatccaaacttgactgcagcgtgcaggtctttcccataggcgtgacgagggcaatccctgcaccagatagttgatccgtgcccgacccatccacatgtagtttccaggtcggtttgtctccattgtgacttggctgaggtattggcttggggttgctttctggtatgctttcttttttgcctgtgcattctaccataaagtcgaccaaggcttggcctttgattgctgttcggggttggaaagtgatttcgtaaagacccaactctaccgcccacttgagtaaccgtccagaagcatttggctttt

SEQ ID NO: 273520 - DNA, 532 bp, Cannabis indica
aaaactaaggatcccaaaactgcgcaaccagtaggccggttccccaacaagaattccagttctgtggggtttcctggggaccaactggtcgaccgattctataggtccccctgaaacggtcgaccggttcagtgcaggtaagtttcaaaaattcataactcactcaaatcaacccaaaactcaaccaaaccggttcagtaaagctgctagtccttgagggttcgaacaagagagggtgaaaaagatggtttttttctcaaattttccttttctttctaattccttttattttctaaaaaatctaataatccttaacataattaaaccatttgtggccaactgctactctaaaaatctcaccactcccaaggtgaaatgacaaaaatacccctccccaaaagcttaactaacaaaatgctgtaggagtaaaatggtcatttccaaccctcaggtaaaacttgacatttccaatatctaactataattccccgctatactaaaaaatactaaaatatgattctaatggccaaac

SEQ ID NO: 273521 - DNA, 540 bp, Cannabis indica
gtggctggctaactctttgataagtgtggatcgaaagcccgctagggatatggctctgataccatgttgagaatcatggggttcatctcaaaactaattggtaataagtggagtagcccttcttatctgtggctcaatatttttacatttgatccatgtgggacaatattgtccaatgatatctatgctatgtttatgctaaattatttactatatggatccaaccttaaataaggaatggtcatccagtagctactggggttgcatcatattcgtgttggtgttatacaagttgatatgtgtaattgttggtcctgttcactatcacttttgttgggccgccacccactttatttgaagccctcacaattttatttttatgcatctttccaaaaagtctcatactaatgagtttggtaaaacacttatattcaaaacaactattgcataatttgtggccttccctccacattgttgagccctactcttccactttgttaggccgccacctcactttaactcccacattagtgatattgt

SEQ ID NO: 273522 - DNA, 1829 bp, Cannabis indica
tttatactaaaatgaaagagaatattgatagctggcattactctattatctgggatcccttaggtgtgcctaaacacaagttcatttctcggttggctttgaaaaatagattaacaacaagagattatttatttcgttttggtatgatttctgatcttcattttcttatctgtgatcaacagtataaatctactgagcacttatttttttcaatgctcttttattagtttgaggtgtttaacgcaggtacttctttggctcaagattgagatttattgttgtaccttaataagtataagtaattaaatttgaagatgcaagcacaacagaaatagaaaaaaagatttatacttgtgttcatcatatttggaaggtttgaaatgatgctttttgaaatcttaaactccctttgatttctgcaattattggaaatattaagtttaatgtttgcaataaggtcaagtttttgaatacaaaaaagataggtaaaaataatatagattggttgttagagaattatttttgtaagtattttttggaggggtataccgttaggagagcactaccacaaaatattataaataaaaagttaaatattataaaacaaaatccaaatacatttgtgtcttgtttttctttttttttttcgcttaagttgagccttgttatttattgtactatagtgaattgatttatagttacaattaaaaataaaatactattaatttataaatatatatatataatttactgaaaaaaaaaaccaaaaattataataatatataactaattcaatacagaaattgatttcacatcttaaattcttacatagtcattattttacaatactatttttctttattaatgggaacaatattataaataatttataatacaggttatagtactaaagtttacataaataatattggatatttatatatttttacttagacgattatagatagtagataattaaacattattaataaatactatatatattttctctatatatatatttcaaaagagaaggtctaagttcgaatctatagtattaaacaccgaacaaggcggagagagttttgagagcattgagcttagcttgaagtagaaagatatggtttgcagtattttgatacaaagatccaaggttgttataattggtttcttcttgatcatcataacttggattagtgatcttttggagttgcctaagcttcttcatagttgaacttcttgacttattcttcttcaaatgagacacctttagctttctcattgatcctttcttcatttttttattattggataagaagaagatgatgatgtattactacaattagtacatatataaagagaattatatatatacaacactataatgaattactcaagtatatataaatgcctagattgaagtgtttttataggcatataatggccctacaataataatttcagtacgtaatattctcagcccactttagaccatatattattgatttgaacaatgaaaaatataaatatatatatatatatttataaatcacctgatgtatcaataataggggttcaaattattgttatgggttttagttaattagtctacctctttgtgtagattgtctatcatatatctatgatattataatgttagtctttttgtcacaattgatttatatcactaactaattactaatttagtagtttattcatgtgacaaaggttgaatatgagaaattgaagatagtgcatgtatgtgtttgatcttttgggtaatgaggttttacctcttcatcactaataaatttctaaaaaaaaaaaaa

SEQ ID NO: 273523 - DNA, 1168 bp, Cannabis indica
atgttaagcttggacacccaaaagtgttaaatcatgggagagagaatggtcatctaccactctctctttgctaagtcttttcctttcgtttctttcttttcttccttcttctacccgtgtttagtggctgtgtaagtctctgtttttccttcttgatagagtggggttgggtttgtttcttttttcttttctttgggtttagtcttctgtgctcctgctcgtggggttggtagtttggagttttgtgtgggttggtaaggttgggttgtttttgtttgtgtttggtagctggtcactttttgtttgcttgctttcaatggctctagttaatgccaccaactcctccactaatggaaaatgtatttcttatgaggaagcttctgtcaaaattagtccttgtgcctcttctcaacaggcattagccaccttttgtctccttgggaaagttgtggccccaatgaaagttaatgaggccactattattgactttgtgaacaaagtgtggaagtttaatgtgactgtggttgcattgaatgaaggtgctaacaactttaactgttttgagttgggttttttaagtactgagaatcgctcttgggcccttgagcaaggtccttggtctgtacgtggctactcctttttcctgaaagtgtgggcgcctaggaaagatctgcttggagtttttgatcacgtgaaagtttgggttcacatttttaacctccccagagactatttctccattgttaatggtaatactttgggagcaaaagctggtatagtgcttaaggttgatttggatgagtgcaatccggccctgtggaagaaatctctaaatgtgctcattagtctcaatgtcaaccggcccctgttttcgggttgttatttacctctggattcgggtgtccaaaggtgggtacaattcaaatatggaaaactggggattttctgctataattgtggtaaattgggtcatcaaagaagaggatgttctcttacctctccagtcacggtttcaagtgaaaatggggtcctttccctgtttggccttggtgtcaatggattcctcatacaaagatgtattctcgggtgcccattccttctctgcaacttcatctctggcggctccggcgagtactggtccgaagcgtggtggaagtcgaccgttggc

SEQ ID NO: 273524 - DNA, 674 bp, Cannabis indica
attacactaacagtaaaaaaaaccaagcatctttcatattccgaatccaacaactgaacaacccacaataaaaaaacacaaacagtaagaataagaactaactaaaaacatgttattattatccaaaaaaaaaaaaatacatgttccaaatctatttcaaaaagaaaaatgttccaaatccaaatccaatacccgatgtttcaaatccaatgcttcatagattttctcaaattaggattacacgccctttttgcctatattaacacatataacaacaaagttgacacaaaacttctaacaatctagtttccagaacaatcaaggtacgggttgagaagggagattaaagttagataagcattgaatggggaatatagtcaatataccattaataataataaaaaacccacatctctaatgcacataacaaatactatgaaactgcaatgtaaaattcaatttctgctatgactctaaacaaccggctaccaaaaggttctctaaaatatgtcttttgaatacaaatttttctctaaagaacaacttcatatataattaaataaaacaaaaaaatccataaattactaaataaataaataatataagtaaacacaaaactgataacgaaatcaaaactctcgttttgatggaagaactaaactaataagtaatga

SEQ ID NO: 273525 - DNA, 1047 bp, Cannabis indica
aactagtaaatgagagcctcctttttagtaatttcaaattcctctcattgttcttcatcaatttctaagcctttagtgatagagtaccatgcccactcatgtcaagtcaagtactcaatcatagtgtgaaagactgtggttaaccaaactgaaggagaaaagatccaggttcaaatcttgataatgctccactatataaattactatggtattttgaatccccacaacctttctactgactcactttatcataaccaaaaaccagcatgaacttacttaaataagttgaatgataattttttcacgaaagggggaaataaacatgtatcaaatttgttatttaagcgattctatcttattattgtttattttcaacttcctagtttgtttagtcatccacttgtatctcttatgtctaaaattttgtaggacatcacactagatgtcaaaaaaaagtatattgtaaaaagtggtccctacctttgtcatccaaatttctaatacgtgcttaagttaaaatctatggtctcttaaaatcaggtaatgttggtgaaacaaacctaacacatccatactcaatctcaatctcaatccttgttagcttagctctttaaagctcgatacttcctatactcaaatttaatgcaaataaagaaggggtattgactttcacttatttggaataatatcctataggggaaatccctaatgaccagtggcttaatttgaaaagttgaaaatagcaagtgcatctcttttcaatatgatcattcgataattgggttttgatatacctttctcttacctaaatttaccaactctcccactttggtcacaaatctcatcattcttgaaagattatgggagtaggtcaaaatctttgagcatttctcttgaggatgcagggcacataatctacactcttattcattttcaaacatctcatatctagatgttctcatcttaactcattcaacttttggtgattctttactaaagttagaatatcacgtgattcatctgttaaacaatcacatagattatgaa

SEQ ID NO: 273526 - DNA, 751 bp, Cannabis indica
taattactaacctaaacctagagttcctaaaaatagaaagtgagggctcagtcaaataacaagttttcaacctttttctcagaaaacaaaaattactttttcagaaaactgagccttccctctctctctatagccgaacttaaccctctctcttttcctcttcataattttgaaacccttagtgatagagtagtacccacacacatcaagtggtacctcaatcatagatcggaagacatctaagatccttgtaaaataaattccaacaataagtaagtgatagatgatcaccttgtctaatacccctctcaggaacaatcggacccagctcatgaccaccatgaattattttatacctcacagagctaactgtagcaataacaagatcaatgaaacacaagtcaaaacccattttcgcatcatagctcgaagaaagccccactccacacgatcataagctttactaagatctaatttgagcgcaatatagccttccttgccttcacgctttattttgagatagtgcataacctcaaaagctatcataatattatcaataataaggcatcccttgatgaaagcagattgattcgaggaaatgatctgaggcagcacttctttgaaacgattcgcgagcaccttagatattatcttatacaagacgttgcacaagaatttaggccgcagatcccccatcgaagtaggttgcttctctttggaatcaaaacaatattcatatcattcagtccat

SEQ ID NO: 273527 - DNA, 1176 bp, Cannabis indica
cgctccaacggagccccaatacgaagaggtacttctggtacttccggcggtcgcttgggccttattgtaagccaactcctgttccctcttgaagaggtacttctggtacttatcctccgtcatggcgatgatgtcattccggaataccttctctgtggccggagccctcacatttgggcagatgactttcgaaagattgtagtcatccaccgactgatgtcccaggataaacttggctttccaacagtgctccatcgtgaccaactccccgacgccaagggccttcttgtcgtacgtggcgaaggtcttggcccgttggagaaaaatttgagtaggttcggtctgcatgtaaggtgggatcctaacccactctgtgagaagctctggatgatccacggcctggaaaccagaggtgaagaagaagcggtgacggtattccttcacgtgtttctgataattgaaagggaccaggccctcattcaaaggatgggcccggagaccgtaaaaaaccgtccttaagtttatctccctttttagggatggaaatgagttcataaaactataaaatttctgccagatttggcgagccccagctccgagcagagtaaaaaataaacaagcctgaaagtaggcggtaagcttgaggaataagttggtatggcgcaaggctgacaaatacaaggaagttaataaaataaccttgaaggggaagcatggccccggccatcaggtgtgtctgggtccaggctccgaagcccctgtagttatggttgggcgtatcctcgtctcggggcggccggtggtaggtcttggaggttgtaggcttgatgcctgccaccaccacgatctgttccaactggtgagggcaggtcagggtggagcgaagctcagccgcttcccaaccgttggcaagagacttgtgcccttcttgggccacaggacccttcatgacctcctccagggtggccaaacgcttctctcccttcttcgaagacttagacccagacgcagaaccacaagcggttagggtggccaaacgcttctctcccttcttcttcaaaaagggaatgtgggtcccctaaccgcttgaaagaggccccctccagacacttgcaaaaaaaagaaggcctcaaagggttttccttgacaagagtcgggtgtaagaatcccacagat

SEQ ID NO: 273528 - DNA, 958 bp, Cannabis indica
agaaactgtttgtgttttttcatattgtactatgaggcctatttatgattcttgttttatttttaattcgaattaattattggattaaaatggacaaataataattgtcagtaaatagttgaataactcgagatgttattacacttaacttatttatgttttatgaattttggaccatcttacattttcttttaaaacatgtttaaagtacttttgctcaatattcttagaaggaaaattgtgattcttttttagtgtagtccattgctttttgtttttaagaaagaatcaattgattctatgtttttcttttcttttgttagttcctttaatattgctatagttgctctcatcttttgaaaagctttcatttttctttaaacccttaatattacttctcacttaatattgtcactttctaattacgtatcccagaaaattagaattggacttaaactacgtggcttgaatggtatgaaaaacataaaaaaaaaaatcaaaccagtcacaataaatacgagtcgtgttagtctagctcatatttattttattttttttttgggctttttaaaatttgggttactttgttggtcataagaaaatatggattccgtgaacctacaaatttggtaattttgtgtactttattggaggcaacttgtttttcttaaatatattaattttttttatataatgacttaaattcatgctttttatttttatattttttattacaattgattaattaaatactaaaatacatatgtattttatacttttattctttttttcaataattgttacacaatcaaataataacaattataattattataatttgaatattattatcattttaattgataaataaatatttattattgttattattattaaattattgacttttgtaatgtgatatcgagctaatatttgtattaacgtgtcatgcttttga

SEQ ID NO: 273529 - DNA, 629 bp, Cannabis indica
tagcatttatatatatatatatatttaataagtatctattctatataaagtgttcctattgatttaatgatacttttcgaatttttatgttaactttaacagaataacttattaattaacaaaatattctttattaattttataatattattatatatatttaaatataaaagttatataaaatttcacactcagtctagagaaactatatcctatttcttatccaacagtactcgtacaacgatacacatgtttatcaaattaatatcttttttctttttaacaaaaaattaataatattattattaaaaacagattaaacatcgaagaatgagttgtaccactattattccgaagcccatctttagcataacttgagctacaaagtgccactctactctatcaaacgccttgctcatatccaatttgagtgctgcatagcctttggaacctcgtttcctactttggaggaaatgtagaagttcaaaagccataagggcgttgtcagttatgagtctctgagataaaaaggcagtctgatattcaaaaatgacctttggaagaaaaggcttagtcataaaactatggcctttgacaccaatttgtagagaacgttgttgggttttatg

SEQ ID NO: 273530 - DNA, 539 bp, Cannabis indica
atttcaagaaatagtttcaggcagctagggatagattacccgaagcggcctcgctaaccaatataaagcagtagcctaataacacttaaggcatacttaagtcatgttagcacgactgtggctagggttatgaatttggatgacaacacacaacttacagcctttcaggcggggatctctactgattcattgaccgtagggggtcagttatgggatgagttacaaggtcgtctagtaagaagcatcaccgagttcaatgaaaggtctcatgtattcgttcggaaggaagaagcccgaaaagaaatgatattgctaaaaataagcttgggaagcaaacccagcaatatttcaataagtatcgtttccacgagaattgataactcagaggcttctagttcgaagagaaaggacagtaccatggaaccgtcgaaggataaaaaagaaacagaagaatcatgataattacgtgcagtgtatactatttataatgagcttaatgaaactcgagagaatatttacctcgcacatgagcagaaggt

SEQ ID NO: 273531 - DNA, 2082 bp, Cannabis indica
tttgtttccactttcacactactacatcacatgataattcttgattaggctctaagcatgtactgctgagcaacatttatattgatttgaaattttgatttcatgtatttttattctcgtaatctttttatttatgacttttcttgaaagtttcgatatggaatttacaggagtcgtctgcacaggcgcaaatctgcaggtcatccaccttttccctcaccttttcttttcattttttgaaggcaacttgtatacttatctgtcaattttttctttcgttatttatttccttaaattattttggattgaatttatttgaatcaatttagatgcgtagaattgcctgccccaaacttaaagttggttcaattaggtttttgtttatgtttatggtcttatttgtactcaggacgttgtagtagtatagtatgccaatttccagcaaattgctgaaaaaagtgatacggtaaggctcaattctatccattttgagaaactgataatctagagttatttggctcaataaaattaaaggtgcatgcaaggtcaattgattctgaacgttcaattgaattggctgccttttattacatttttacctagccctgttgaaactggcatgctaaatatggttagcttttttaatgccaatttgtcttatttatttacattttccttaaatatatattgaagagctggggtcttacttgcctctctcttcactcttgtcttctatgcccttcttcttttggttttctctagggcacaattctgcttgtatgttgtgtgtaatcaatggttgtacaaagggatattttaaccaggcaacctgagctaattaattaggcattaatgaatggaccttatctattccaaattctaaggtaatgcttatgttgtctctgaccgtctgctatttatcgctgcatatctttatttaaattagtgaggataaatgcttactgaaatgagagagcatacagtttgtattactttcgcattaaaatttaaaatataaacaagacaaaatgccgcagatcgatctgatcgaaccaacaatgtttatggaaatgatgtagacaagaatcaagtttctggctctagaaatgttcctgtcattgatcatggggatgcagggggtagcagtctcctaaatgagaaacctcgcgcaaggttgattgctttagaggggtgttccagtagtgaggcttctcagctactgaatgaacgtaagattctatgattttattgtaaaggttattatatgatgttgaaagaaaaggagaaagtgaccattttaagacaagtacaatttccttatatgacctacaaattaactaataaagatttcataagtacttaaatatgtactgactggtattaattcaaacaactcaattttgaaataagagatgtcatcatgtatatataaatatttgctatatgtatgtacataaaatagtttctttaggcatgggactggtacaagtgatttgttagtatcatttattataatttcaatggctcatttttatggtgttctagaggtaaaatgatttcaagattctttgtattcaaattttttactgataaaacttatttgctttatgtaatctaatgcaggctgggcagccactatgcagttctacaatgattcaacagttgagcaaccaggttagcgaagatgagaaagaattaaggtttctgtatatgtatatctattatctatctaaattctaaagtacaatttgagattttggttttattttactttttaaaaaccaagcctagttctggacctcctgatttatcacttcatatcaaaacaagcatttcattgcaaatttggcaaacttaattggcttcagtatcaacagtattctgtacaaatctacaaaatttagagaaaaggtttgggtactattcatgaatgaaaaaagtatgcaaatcattcaaaaaaaaaaaagaagaatatcataaataggaggataataccagaaaacaaagaggcataacaagattacaacattctccaaatttattagtaaatctgaaaacttaagacttgaaatcttttctgta

SEQ ID NO: 273532 - DNA, 2668 bp, Cannabis indica
tataaataatattttattaaataaaaatagaaagtcacccataaatttctcataaactaagaattttagttatataggcacactttatatagaatagatatatatatttggggaaaattatttatttagttacaatttttaatcgcaatataaatttaaaaaaatacggaccggccaagtactacacgccacgtatgtgatcttcaaactttatggatgaaaatagttgcatataatttgctgattatttttaattttatcgtgcatttcttaaagtgattctaatcacttcttaaaacaaaaacaaaaattgcttaattttaatgaatacatattttatggaattgcaatttttctagggttagcatatattatataattgttgattggtctttattaaattcatcttgtgactaaataccaaataatcaattttaatttgacgtaagtcatttttacaaatattttactttgtcaccgttgaaaaataaagaaatgtaattgtcacttttatttaagtggtggtcaaagcatgtgaaaataatgaaaagaaatcgttccgttaacctttcaaccactacactgagtccactccaccacataacatagttaattaaccaaagaaaatgagaaaggtcaaagaagacaaaaatattttaagaccaggcattcttgtgtgacacggttcttttagtttgctccacacgcaaaccaatcactaaacaaaaaaatagcaactcaataccacaaatattaatattgatgttgtatttcatatcttatttatatatatatattctcgtacctcgtctatagcttcatatagctgtaattaagctagctcatattctcaaaaaaaaaaaaaagaaaaaaaaattaaggtagctcattgaaaataaaaatgtctattttcaactgctttcggccttcgtacgtgcctcgggtgtcagaccaggataagagcttaaagaagaaagtagattcatcatcttcgtcgatggagaaaagcaagagtagtactgttaagtctaaaaacaaatcatctaataatactaaacctcctgttgtcgtttcttacttccccgtcaattcttatgcctctcgattgtagagtactactcttatttatatattagaatttgagagtttgataaaaatataaaatcagtggaaaaagtgggatgaaacgacatcaatttctggctgatagctttcggagtactttataatatctatttatattgtttgtatcataaataaaacatttttatttgtataatcagttattgaattcagatttttatttagttatttatttatttatttgaggaagaatgagataacttcattaacataaacatacaatctgaccataaacaaccatcacgaattcagatttgattacacttcttttaaaattttatttttttgtaaaggccgaaagggagggatttttttaagtgaatatgcttagtttgataacctatacaataaatttgagcaattttatctatacgatgagaatgtcacaattttaatatttatggatcaaatttcattgtaagtttaaggtatgtaaattcttacactaaatatgattttttgaaacattatttgaaaaatatgatagctattagtttgtccatcacaaaccaattcatcttcttctacttctcttttctgtccctttcatccaatctctgagttgttgtaatttacattgaaatttttctattagcaactatgaatttggtgttgttcttctcactcttacagcagacaaggcatattgtatatatgcagtagtgggtaaactctccaaggacacatcatattcaacatctgtagtgtagtgtagatacgacattatttatatatatagaataattttatgggagtgattatgtttttgtctttatattatacatacaagtttctaaccattcatatccatatgatttttaaaagttaacattgtgagaaaatgaattttattaaattattttctttcaccaaataataaccttccacgtgtttaaaagtattatttcatgtaaactttttaataattttttttgggagattttattacaaatcttcttctaaacatattttctcccatttaaattatttttttttaccaaaacaattaagaaaattattatttattttgttgaaataattaattagtgaaaactcatcttatttcaaaaattaaaaaaaaaaaagaataattagaaatgggattttcatcaaacctcaccaattacattttaattaattaaataataaaaaaaagtaaacagttaaaagacttataaattaaaatcataattttaattttgattaagctttaacttttaattatttcgttttctaacttgttggttaaaaaaaaaaaataaaaacatcaacacaaaatcaaatttgttaatttcttttgtggttagaaagaagttttatgtgaatgaagaagaataaatgaaatgtaattttatttttttttaaaaaaaagtcatggtataggtaataaatattttttatttaccattttactataattcctcttctgtaatatataactcaaatttagatttggttcttataagaagaaacaaaaatgctttttcaagagataaaagaataataaagtacataagattgaaga

SEQ ID NO: 273533 - DNA, 654 bp, Cannabis indica
aacaattatgtttcaaattctcaattgttcagacagtgaacaagtgaatcaaatcaggtggatttgactcaattgttccctgccacatcagcaatcatctatcctaagtggcatgcaggtagttaattcggttggagcctacaagctacaacaacagataaaaggcagtcacttccactagtctaagttgaggctttcctagatttgtttgtacatagacttcatacagaaaaaggagattcaattgtgagagattggagggttgtaaaagtctttctcatgtatttgattgagtagactcaagtgagattaagttttgtaatgtgttgttttctgtattgaattctttcctggtacctatgatttatgaatcattctacatgtacattcaatgttcatttgaggaataaagtggctatatgtttcattgttttctttcaagtgttcatcaagttcttgagttggtttgtccattaattctcttgtttttatctctgtttctggtttttatgtttcttgtccaagatattgttgtttgagtttgatcttgccactgttgttaagcaacagtgaaagagaaaggtgagtttgattcaccacaaaaatgtattcatacttattttacttataaatctacatttaaaattgtatgta

SEQ ID NO: 273534 - DNA, 549 bp, Cannabis indica
gacgctgagactcgctacccgcagatggaaaaactagtatttgttgtggtagtagcatcgagaaaattgcgaccttatttccaggctcatagcattgaaattttaacaaactaccctttgaggcaagttttggcgaaaccagaggcatcaggaagattgttaaaatggtaggtagagttgagccagtttgacattaggtataaacctaaatctacgattaaggggcaaacccttgcagactttatacttgagttcccgagcaccaaggtggcacttatagaagaaaaaattgatcccaatgtaccaaaggaagaaggatggactttgtatgttgacagagcctccaacagcgaagggtccggcggtggtataatactcataagccccagtaattttaaggtacatggtgcacttagatttgaattttctacatctaacaatgaagcccagtacgaggctttgattgcaggattgaaactcgctcttgagatgaggatcgagtatttacaagcctttagtgactcctagatcgttgtatgccaagtgaac

SEQ ID NO: 273535 - DNA, 1919 bp, Cannabis indica
tttcgagcacaaaaattaattaagaaattgtaataggaggttgacggtaacacttctcgttaatttataattcttaacaattatttatacaaaactaaattaatcttgaaacaatattaatttttgaacaaattatcttaatagggtttcttggacttgaaaatgaagaaatggttgagaaatttattgactaggtgcattgccattactccaagtctcatcgtctccattattggtggctcatctggagctggtcgacttattattattgcttcggtttgtttcatatattattactcttttttttttttaattataatgataagaaaaattaattcttatattttaaatgaaaatatataataattaattcttcattattgtattttttgtttgcagatgattctttcctttgaacttccttttgccctaatcccacttcttaaattcagtagtagtgccaccaaaatgggaccttacaagaactcaataattgtaagtttttagatgtttaatagtatcgtgactgataccattttatatcgatattttatattactttttaaaaaatatatatttaccaaatatactacatcaattaatgtaacaacattatttaaaggaataatttcaaaaaaaaaatatataaaaatcacaaaaaaaaattaaaaatattatctttttatgtatttttatgttatactcttgttattattattttaatttttttgttatttttttgtatttttatagaatactgtaaaaatataaagaaaaaaaaaaaaaactttagaacataaaaagtaaatttatataaaattaatattttatgtaattatcctttatttaaacttgtggacttatcctatctagcagtgatgatcctgatatatattaggccttaaaattatagggccactgaaaattactgtcacttcactaagctaatatttcgatacatatgtacacatattcattaacatatcattaatcttcttcttatgtcttcaaaaagataaatgaatatatcctttaaacatagtttgagatttgatgtaatttttgtttggttaccaatccaaagtacattaaattgggacaaaatcgtaaccctatatatatcaaaatataattactgatctacttaactaaatttgtgtactttgacaacatttttacagataatcgtggtgtcatggattctagggtttggaataattggaataaacatatattacctaaccacagcctttgtgggttggctaattcatagtactttaccaaaagtggcaaatgtgttcattggaatcttggtttttccattaatggcaatttatatcattgctgtgatttacctaactttaagaaaagatgttgttgagacttatatccaaccagtaaaaaatgatccaattgcccaaacccaaatggaaaatggtcaaagctttgacccaaatacaatgattcactatagagaggatttggctgatatccctctacctcaatagatttctctcaacaaaaatgatgatgagaactgtttttgtattattattttttgtcaagtcatatgttaatgtggaaaagtgtttgtaataagggtatgtaatctaatgtggtatgtaatataaaggttaaagggctcatctttatattattagcctgttatcatttttgttaactaattcaatgttatttacagttaaattatgtgatcgaaatttacttgctacacatatttatggggaaattctcttggatattcaatataaaatctcctattttaaaagggataattacataattatatttttacatttaaagaattttttttacatttttaagctttttcataaaaacaacatgaaaactacataaaaataacatgaaaataacatttaaataacaacaaaaaataa

SEQ ID NO: 273536 - DNA, 2697 bp, Cannabis indica
gacaaaaaggaacaagggttagagatctgagtggaaggagtcatttagttctgctgcaaccaatgtaaggtttctaatactttatatgtgtttaagtttcattattttagaaattcatatttaggatgttaaaaacatacttgttagtaaatctaggtcctattaaaatatattccaacacaaggtgcgcgagcagacccgcaaaaagtagtagccatggttaattggccgcaaccccgaaatctcaagcagctgcgaggattccttggactcacagggtataatagacgatttgtccttcattatgcttccattgcagcctctttaacaaacttgttgaagaaagacaaatacagctggaacactcaaactgcttcagcatttgatgccctcaaaatagccatgacactcacccatgtacttgctctacctgacttttccaaagactttgttgttgaaactgacgcttctaatgtaggtatcggtggtgtgcttatgcaatcaggccatccaattgcttatttcaacaaaaaattgggaccacagtttgtggcaacctctgcctacatgcgagaattaagagccattgttgaagttgtgaccaaatggcgccaatacctcatcggtcaccactttgtgatatgcactgatcataagagtttgaaggagcttcgcactcaagtgattcaaacactcgacgaacaacaattccttcaaaaattactaggttttcagtttaccattgaatataaggcatgcaaggaaaacaaggcagctgatgcctcatcaagccaacatgaagagtccaaatcttggctacaagcagtaatgtcttctagttgttttgaattttgagagaactgcaacaagaaaatttgactagcctgaacttgagacacattcacattcagctacaaaaaaaatgaagaattttcatcatacttggtacgtgatgatctcctttattttaagaacaagattgtgcttagcaaacgctctaacttgaaataggccctcatacgagaatttcatgattctcccattggtggtcacgctagaattcagcgaactcttctcctgttaagtgcaaaaattttctgggtagggatgcgacaagatgtgaggaattatgtccaagcttgtttgacctggcagacattgaaatactctccaatagccccttacggcttgctgcaaccactccaaattccagaacgagtttgggaggaccttgccatgtattttatagtgggcttgccgagttcccaaggtctcacaaacatcttggtggtcattgatagattcacaaaatatgctcattttggtgccttacctgaccattattcagccacaagagttgctgagttgttttaaaatatggtgatacgcctacatggcatgcctcactctattgtatctgactgcgaccctatctttactagcgctttttggacaaaattttttgagcttatgggcacaaaactacagatgagttctgcttaccacccctaattggatggacaaacggaagtcactaatcgctatgttgaacaatacatttgtgtttttactgctaatcaccccaaacaatggagtaaatttctttcttgggcggaataccattacaataccagccatcactctgccataggaatggcacccttccaggccgtgtatggtcggctgcctccttccattccagcttattccaggggcacaacttcaatacaagtggtggaagaagacatattgacctgagatgaaatactttagcaactccaacataacctccaacaaagtcaaaatagaatgcagcaacaagctaatgaaaagagacaggacattgaattttatgtgggcgataaggttttagtcaaccttcaaccatatctccaatcaaaggcggcaaaatgtctcaatacgaaactttgccatcgatattttggaccattttcggtgatagctcggtgaggaatcgcagcttacacagtggcacttcctccaggtagcagaattcattcgactttccgtgtttctcttctcaaaccattctatggcaacaaatctcccacaagttattagctgccagaatttagcatcgctaacaaaccactaatagtacacttggctatcttggctactcgtactattctactcaactctaaaccagttcgtcaagtgctggttcaatggtccttaagctcaccggaagatgctatatgggaggattttacaacctttagataactgtatgatgcttcacaccttaaggacaaggtggtttttgaggaggggagtaatgttagtaaagcccatgatcaaggcccaatagcaattaatcaagacctggtggatcaaagggtgaaaagttggtttgaaaaggcagcccaaaagcaagagggagaagcatcaactgcaatgaagaactccatgaacgagaatgagggagaagcagcaatgatcaaccaagagcttccagcgcgtgggaatcaagtgcgtgtgagacccaagtagctcaacgacttcgtgatgatagagatgttggaaattattttaccaggatcttagatctactcacaagtatgttgattaacaccctaaataagaacttctaaaacgattataaaataaacacatataaagtatgagaaaccttacattgggtgcagcagaataaaatgtctccttccattcaga

SEQ ID NO: 273537 - DNA, 504 bp, Cannabis indica
tattaaataagatcttttagcaatttttttttacacttaaattatttaaatttttataacagaactctttataatttaaaattatatacataatttcataattaaaattttattatacttataattttaatttaaaattattgtacttaattatttaattttttttatttaaatatttaaaaagtaaaaaataaaataggttaaaggaaagcatctaaaatcttcaaatgcatctaactcatataaggaaagcaaaattgtgcgtgaaattactagtatacttttctatctgtttttgtagtttcaaacctcaaagggtaattccttgaatctatcaagagtcacataaatcatctctatcctgaccacaaatctcaaatggtatagtattagtgaacatatactacttagactagtttgaggcatcatcatttaattgtaaaaaattaattaattatttaaaaatttattataaggagagaattttaatttatataaaaataa

SEQ ID NO: 273538 - DNA, 1127 bp, Cannabis indica
ccattgggtttggccccaaaccccatcaacacattgaaagatgaagttgataatggtgaaggagctgacaatatcaacatgattagtgggtaaagaatgaaactcatcatcataatggaaatatagccatataatgataagatggtatactagctacttatatttgaaggcaatataatatatgggatatgattttgtcttgttattgtactttcacggattgtaattcgtgatgtacgacaatcgtcagatgagggagttatttgatctgacggctgagattgatgtaggggcaattagggttaaaaagtagaaatgtacccttacacttatttaatgtaccctcaagcccatttaatgtatcacggaatacattccgtaaaattatatcacaggacaaaatcacatccctataatatattgtagttactacttgttaatcatgaataattaatatatatatggtttatagattgatgtagatatatataaagtttggtgtgtgatatagaatggtatatatgtgtgtatttatattattatatagtaccattgttgtttaattagggttgaaggaattgtagtagctattatatgtataatatatatatatgtatataattataccatctaattatcataatctccaaaaatgaagaaagcttcgccgtgtaaatataaatatatatatttatataattgatgacttggtaatatgccatacatggctgcgttatatgtaccacgtacatttaatcttttcttcttcagttaatattgtattaatatgtttaatttcaactgagaaaatttatatatattatcaaactttttatctcaaccagattgctttactctaaattatattcatgactaatgcatttaaatattatatatatggtggtgaatttatatatatatatatattgaattaattatattgtgggaaatatatccaccttccaatttctaaaacatacagatgaaaagctttataataactctttttatttatttatttttatttttattggtatttattgacctataataatattgtattaatctaagcgtatgtttgaagataatactttttaattaatttttaattttttaattgagaaagt

SEQ ID NO: 273539 - DNA, 947 bp, Cannabis indica
tgaatgggttaatcataaagattgtttaattttttggtttaattattgagtttattttttgaaatttgaatgaagcagtgtaaaaaaatttcaaaaaattgtagtttgttagagagatatgtaagttaatcgtaaaattgccgttagataaacacttttaatatataaagataaatatatatatatatttatattataaggatgtatattatgattacttaataaaaaaaactctgaatgatttaataagattcaaataattttttctacatggtgtataaaaaatacagatataagtataacaaattatttaaattttattgtcagtaagtaattttttataattttttaactgttttattttcgagttttttttatataattgatattataataaataaggtaaataaggtttttaaaaaaaatctattattataaatttaaagggtcatttataatttataagaacagataaaataaaagagaattttctccaactaagtacaaacattaagccaaaccaatataaataaaggttcgaactagttaattatacatgtattaaaaaaaaagtacacatacaactaaatgtcaaaatcttattgttgacatgacatacattttcagactataatagaattcatgttatataactactaagttcatatttacaaaaatatggatctataatttttttttaacatttttcttaaaaaaaatgaacgattgtttttcaattattctcacattgttgctatatgaaatcaatgtaaaaatagtattatttttctaaataaaaaatacaactaaaaatttattaaaattaaaatcgtaaaaacataaaaataattgatatatatataattttttcttttaagtattttgtgtaaaactatccttttctttttgtcattgtcattaataaatgagcaatattattggccact

SEQ ID NO: 273540 - DNA, 547 bp, Cannabis indica
acatattttgatcactgattagagaagattatgtatatcaataaccaacatataaaataaataatacaaattttgaataaacaatagtaaaatatatattcgataagtttaacattcacaatagtctcatatcactaaaagtatatatgaaaaatatatagttaaggagtcttgttattcttaattattattattattttttttaaaagagaagccttattattttaataaaatatgataagaaatttgaattcaatttaaaatatatatatatatatatatatatatatatatataactaattgggtaagatcaagttcatcaatcactcatatagaaaataaattacactaactttgtgacaaaccaaaaataaaaaaaaataattgatatatttaatgtaaaagtatatcacccacaataatcactaaacatgtgggacttttgtgaagtgactctcatattattaaaaacatacaaaaatatgaaaaaaatgagaaaataaagatatattcgacaaaaattaataatataaaataaaaattct

SEQ ID NO: 273541 - DNA, 719 bp, Cannabis indica
gacttgtgattttagagaataggacatgtaagggtttgattgggttgtggttcagtttttaagtttaatttaagtttgaaatagcttcttgtagctagtttggttcatccatggcatgttttgattttgtgcacttttctggattttgttgattggattatattatgggaagtcaatataggtgttctggaaagtttggtgggatttggacatattttgagcaggtttggaattgtttgggaaaacctggtgcaaactggttaacaggtttgctaggatttgtaatacctgttaatcggttttggcaggttccccgaacacttcattttcctctatttgtgtttataatagtacattggttgggtgattccctatttcctagggtattgtaactccagttagtaatagcagaaccttaagttggaggtttgggtttcccagattagggtttttacgtgttatttacccatttttattatgtgactagggcatccatccagcacgagactttccgttaaggtcggccaactcacttgaattcagaagcaagttaagaatagtgtagaacatgtgatatatgcgaatgtatgtatgtgtgaaatatatgtgcatgcttataatgattagtacactaccaacacctgtacgaaaatggtacaaagtgcattggtatagtgtatacttcttaaagagtatattacggtgttaccagcacaagt

SEQ ID NO: 273542 - DNA, 618 bp, Cannabis indica
acacttctccagatcgaagggccaagagcagaagtgattgatcttaacataggcatgtcattaagatctctgctatgagtgtccagcctatcgacatagagaacaatatcaggtgggcatttctttgtgacattcttcactgaagacaaaatatttcgattagcactctgttccattgcagctgatttgagacccggagtatcaaaaaccctgatcttgactccatccactgttccaacaatttccttcacactggttgtggagggtccaaatgcatgaattgggatcttctcttctccgaaaatagagtttatggtggcactcttgccaacacctgttttcccaataacaagtatgttcaaggaaaagtccaaatcatcattcccctctgattcaagctggagagccttggcctttgcactttccaggctgaatgcttggctagcttgccttcccgaaacaagtgccaaccggtatagaacctgtcttgcaattgaatcctcaattgagccacctactctcttaacaagtcttaagtacttcacccttaactgttgaaacttctccaatctctgtttctcttcctcactcaagcttttctctgagtctccaccagca

SEQ ID NO: 273543 - DNA, 1042 bp, Cannabis indica
aaaaaatttcttataataagttaatcaatatttagtattttttccacacaatatatatactattttaaattttaagatattgtactttcacggattgtaatccgtgatgtacggcagccgtcagatgagagagttatttgatatgatgactgagattgatctagggtaattagggttagaaagtataaacgtaccctgacactcatttaatataccctgagatccatctaatgtaccacgaaatacattccgtgaaaatatatcacaggacaaaatcatatcccattttaaactttatcattatcatcacgtcctttcataattattaaagttgagtcaaatccaagatataaattatattcaaagtaatttaaaattgaaaagaaaacacacacaaattatatgtggctagaaatagaaaacaagctatagttgaaaatatatttcaattaattggcataataactccaagttacattatatcaaaaatcaagagtctatggattctcattggtggatcaaatggccaaatgtttatagtttatatcatcaagagtattaataagtgtacaaatggaaaattgtgacgcaaaccaagttgattttctgtttggatgccgagaaaagccacatacatggattaaattgtataaattattctcttggtcagaaaataccattctgtattgttccaactccaacatgcatatgtttatgaatattgttcgaaagagacactattctataatgatatctcttgcatgcgcatcttatttaatatataaatatttttaggttaattaaaattttgcccaactttaatatgtacgaaatttcattatgatctgtgaacttttctgtccgttaagaatttctctcgaattattgagattgttgaatttaaagacttttatccaattttattcaattttactaattcggtgattgtccatgtactaaaccatacttcccaaattttaatatctaccaaatcatacccctcaaattttcacatgtgccaaatcatgtccctgaactttca

SEQ ID NO: 273544 - DNA, 715 bp, Cannabis indica
tgctgggttccccgaaaaatttgtattatcgattcgtgctagtttcagagctttggttggttaattccctgttagtttagggtattgtcatgttaagtttcagtagatagggttttggtttaaaacctaagtcccctgttgtgatttagcgtgtcacttattcgtgttgttatcaatgtgatttagaacctgtaattcgccgaacagttattccactcaggttggccgacacacttgaatacagaattgaggtaagattagtataatatcatgaatatgttattacatgtttagcatacatgttattattacctgttagactacattgatagcagtaatagtatacttagagttgtactgattactgataaatgtatgttggctgaaatactgattgatgttgtcacatcaatatggctagagtatgactatcatattgagtataggttggcattatggtcaatagtattttcttatgagcgttctagactcagtaccgtgtgggacacggggatagggttatggtcgggtgtataggcgcctggttgtaacccgggatattattatgttttatgttatgcttttcttactgagtttgtcgactcacaatgctatttccatgtgtaggtaagagcaaggctaaagctaaggagctgtgagagcgagcacgtgaagattgtacatgtcggggcggttaggcatagagcgtacgatc

SEQ ID NO: 273545 - DNA, 3562 bp, Cannabis indica
ttttaattttttttttaatttagggtttgggtttctaaagtggttgcagataggaatttctaagtagaattctgtaaaaatgcaaaaaaaaaatcgtcataaagtgtaaaaataaaaaagaccctaaattttattaattattttttttattaagaaaaaatatttgtatcaaggaaaattattttatatatatattttttaaattttcgatgtgtgttgctatctgaattttagttacgatttagattgttccgtttattcttatgtggattgctatataaatttttataaaaatacataaaatcaactacaataaaacataaaaatgaaaaaatcccttttattaatcatcaatagcttgagaggcagaagaacaaactccaattacaaattaattctcaaaaactaaatccatcgtgagtgaactttattctccagtgttttgtacatctatctttcatgatagtgtgttacaatgtcattaaatatgatattttttaacaaaacaaactaaaagtatgaatataaccttaaaaaatattaaaaaacacaattaatctttttaaattagaatcacacacaattttttctctctcttgacgtttggttggaagtaatgaaatggaaagaaaataatttttattccattattttgtttagttgcattttaaagtattggaatgacattcgaatggaatgttctttccactattttagtggaatgactattccattttaaaaaggaaggagagatcatttcaatgtaacaaaatgattttttatcaattttttatgcattttaaattttattccattcctattcttatattttcattcttcccaaccaaacgacacctaaattcattcgatgtcctgcgatttccttaattgatctctttttatctctctcatgaaattccattggattgttatctttctctctcatactatgattatgatttctctccttttcttgcgatatagatttcttcaaccactgtaaacttcggcaagtccgatcctctacctccgacaacctttacttggggatgaattttggacttgaaatcatcaaaattgcaatataaatgttagacatgacttgaaagatctttgaaatagatttaaaaatcaagttgaattgcgtaaatcagataaatattgagggagaaatgactgttttactgaacactgttcagctctgggcgctcaggttgacacacggcgcctaggttgacatactgactttaatatggacgttgtgtgagtgaaaaacgttccaggcttgtattttttgatgcctaagtgatatgttgacattacttagtcaattttttagttttggtgaagttgttcactagttctcggagatgtcacttttctgtaaaattggatagacttgaaactttcaatttgcagctaatttactgatattctactttgccaaaaaggtgaaatatcaaagtgtgaatttgaattgtcacaagttttaactctcgttgactatgataaagtagtcaaatgctcgagacggactcagaatcagataaacagaaccgagcacaccaagctatatgtcaacctgggcgctaagtgctctttggggaacttcccggggctcatttcaatacttctaaggcatttgagattgtgaatgaggtctcctatcctgtttttgaccaaaataagaagaatatccaaagcaaaattaacgtttgaggagcaaaaacatgtgaaccaagttgtacgtcaatcgggcgcagtgcccagcacccatgtcaacatgggcactggggccctattttggctctccaagaatctcgttttctccctaagattacttgtattactatgaatatgtacatatactaacttaatagaattaatatagttattaagttcaatctaataagaatgggattatgttagcatgttattatacgaaaatttagagggttaacaaatattttaaataatgaattattgtttaaaataatttgagataaatatttattttatcttaaatttttagttagacaacataatttacatatgtatatatttatattttataattttgtgataattattatgttcaaacaattttctttcatcgtacgtagagtttatgtttattaattattaccactaattccaagttgagatttaaatatttatgattatatattccaatatgaaataagggaaattttacttgaaataaaaataccttaaaacaccaagcactaccttaataaaattatataacatttattaatgtataattcacaattagctcattcattttttattaatgggtaatttaataattaataagtagcataattgtaatggagtaaaagtcaaaattgaaagagactaaaatgataaacgatagaaacgtgccaaaataggaaagcaaggaatcatcatgtattccaaattcacctttggttttacccaatggagagaattatttcgtagtaaccaaacaaatgttattatctatataatataactaccaaacaaattaaaaaaaataaataaaattcgattttaaaggaacggtcctaaatctccaattttagttgcaagttgtttacgtagtaaatattattttggaatctgtgttttgtaaaaattgtatactataaaataaacttatattttttaaaatggtaaaaatatgatccgagctcaatttttaacaattttatttttttttaatataactaactttaagacaatttctaccacgaatagatacaaaaaaaatataactaattttatcacaatatctctaaattagattattattaagttttatttttacaaaaaatcagtttagagtcttatttgtacaattttaaaaaataaaggatctattttatcatttaataaaatagagggtctacttggtaattttcacaaaacacagagtccaaaatagtatttacccttctttgtaccttagcaaaaaaaaaaatctcaaagcttgtagagaataaaaataaacatcaatattgtgaaaagtattattaaagaagaaggaaaaaaaagctagagcatatgcaatgacattggtcttaattttcttagtctttgcattaatattaatatattattaatttgtattatcggttctaattatatagtttgaagggggattatgacttggataaatacaaatattaattcattaattaatttttttcttctcttgtgttttgatcatatatattttgttgggaactctaatggatagatgattggataacaagtatataaatattgtgattgggtgattggggttggggtccttggggatagtggggtcaatggagttttgtattttagctgagcaatgattagtgggtattgaaccaaatagaaatttaggggaatgcatgtggttgttttcatatattatataacactttccatcatatgtgcctttattttgttttctttatcactttgccttggactcactcaccctcctcctttgtgaaatgtggccaagtttcatccacattgccctatgattctctctctctctctc

SEQ ID NO: 273546 - DNA, 908 bp, Cannabis indica
agacaaaagttgaatttatttaggtaaatagcaacataagtaccactgtaattttttctaatttcgttagtataaatttattattttaaacaagacacatataaaactcagattgtagattattgagtttagacaaaagtatatagtatcagttactttcaaatgtttttttaataaattcaaaacgaaatctaccgacaaaactgaaagaaaattacaattttataaacattgagtacttatactgttatttagcagatttatttatatatctcatagaattctcacctgaggttcaatatttggctcccctgttccatcacattctgcaacaatacgagaaagctagttctaagtttttatccccataacattgatatatactgatattaatataagttgataaaggttttataaagacaaagggaaaacaagaaatatgtacctaaacacaataaacgaccttccccacggcaagtgagacacttggttgttgttgttgttgttgcttcctttgtcttgctctcatcaccctttttattaatgccaacaagtctagaagaatcttcccaacggttttctccaagaagaaaaactcggtgtttggataagcctgctttgctaatgccttcttctttcactactgtttgctgaatgtttgaaacttctgttacagatgaaactggagctccattttcaccttcctagaatgtgtatgaaaaaaaaaatccagttaggagtttaatagaattctattgctccccttgaaactaataatgaaggctgacactatagtgttgttaaagcaaggcttatattaggcattaaggcaaacaacgataagggtatatttaaaacttcaaaaacaatgatggaactagtctattcttatcaatatcaggttggaa

SEQ ID NO: 273547 - DNA, 1211 bp, Cannabis indica
tatgacattcaggtacacctttaggttttctttcctattcatttttcagaaacatcttatgattaaatttcaagaaaatataaaatggttttcttttcatttggataggttaatatccatacagataccttgaatgaatctggatttgtggaacacacaattgctgccttcaaagggagaacaattcacacatatcataggtatatatgtattgcattctcccttgttgtttttcctggttaattatctttgatattacggttagttgtgggtataattgagtgttcactctttgcatcacaggggcctaagggctctcatagctcgtaactactgtttggctactgctctattgctattgagattaattgtgctcaggaggatagtcgggtcttatcaaattttctttgtattttttcggtttcaagctatattttcttactggatctattctttttttccagtgaaggtgcaggtggaggtcatgctcctgacatcattaaagtatgtggagtgaaaaatgtgttgccatcatcaacgaaccctactcgaccattcacctctaataccatagatgaacatcttgacatgctggtataataaaaacgtaggaatcactaatattgtaggtgcactatggctgttcaatattctcacttttgtcttgctacatacagatggtctgccatcaccttgacaagaacatcccggaagatgtagcttttgccgaatcaagaataagggcagaaacaattgctgcagaagatattttgcatgatatgggcgcaatcagcattatatcttctgattcacaggcaatgggtcgcattggggaggttttccattctatcctcccttttttcccaactttaatatttctttagaataccattctatttattcataatttataatcttaattaaggtaaattatgacttatttacatggaaatttatgaggtaaagaaggcatgacatatcttttatgcagttggcatttcagtttgtctaagctgaagaaaattcacctgaaaatttgacattagaatcaaggaaacatctgatattgtaacactgccaaaaacaatctttgaacatacttcagtactttttcttttttaatatattgacagcaatgtgaaccccgaaccattcttaacctcactcacccaaccccttgagctagcttcagatggcacttctatacattt

SEQ ID NO: 273548 - DNA, 1889 bp, Cannabis indica
aaattttatttttcagaagaacaatatagtaagaaaaaaaaaatctgtaaaaatatgaaaataatactcaaaattctataaaaacataattttttaaataaaataatactcaaaattctataaaaacataattttttaaaatatttatgaaataatcccttttatttttcggtagggataactgtagaatttgaaaagtgccgacatgcacctcaaaactttataaaatacctctcatgttatttatttattttgataaatctctcctcacataaaaaaaaataaaattatatatttactaaaattatgctataacgtttctttctttcttccctttttctttgttaattttcatataatatcatatatcttttgaccaagaaaataaaaatatattataacatctattttaaatctttaagaggaatatatatataaatatatatatatatatataaaaaaaaaacgaagtaaacatcaaatatatcaaacagctaattaaattaaaaaaaataacttttaaaaattttttaaaccagtttttttattaatattttaaactcccaccataatttagatcttggaacacagacccgaactccgacctaaactcgttccgctcttggatttgacttatatgaaacaaataaaaataaaaataaaatttacagaatacacttttatcttttagtttttaaaattaaaaaaaaattataaaacacatttttttttcaaaattaaatttttaaaaataaaaaatttacttttatttttgtaattaaaaatttgaaaaacaaaaatattacaaacctcacttttatttcttgaaatgatttgaattaaataatttcagaaaataaaacatcagaaatacaattaataaaatctaaagccctgttatatatatcataattagaaaccaagtaatcaactcgatcaataattaagttttccaatagcatatatagactggtatattcataatcgtaagtcaaggaatatgtcggtatataccacctcaccaatggtggatgtgttgtcctcaacaagaattccagcactatatcaccagaaaaagccaagtgaatccccgacatcaaaaccaaacataaatcttgtaacgcctagtggaaccacaaaaggaccaacttaatttttttatttctattttattttttaacaatatatactactatatcatttaacatgtaatataatataaaaagataaatatgcaacctatataaaacaatatatacatagtacacaaaataagttatccatctaatattaaatttgggttggcctttttctctcttctattttatttcttattgtaatatttttcttttgaaacaaaaaaaataattaaattatatgtaataagaaaaaatctaaaattagagagtggccaccccacaataccaaacagttccgcccctatgtaagaataactcatttttaggatgtaataatttgttaaaggttcctagctagactctttattgttgttgctcacaaatatttagctaactagggaactaagtcgcgcttcgcgcggtgttgtccaacttttataatttttatgtatatatattatattaaatgatataatttaaaatataacattttcacgtgtatattataaacaaattaatagtgttaaaactaaaaatataatttgctattttaaaatatataaaaaaaagtgaagattttgtgacaaatattatcgttataattattaaaaaaaaaaaaaatttattttatgattattttttcgtattttttatttcataaatttatattctaataaatagttgtaaatatttttactaaataagtaaaaatattaaaaattatgatcatttgttattttctaattattt

SEQ ID NO: 273549 - DNA, 791 bp, Cannabis indica
aaaaaaatatatatttatagaaaaaataaataaataattaaatatacttcatatttcatattaagcatttaatttttgtaaattattattatgtttaacttctcagattttatgttaagtttagtttatttttttttaaattatatttagttttcttttaaataatattatttatatttattttcaaaaaaaataatattatttatttaattaaattatatataatattgtgaatatttattataacaaacaaaaattataatattatttaataatattaaacataaaactaattgtacgtgattttaatctaatatatatatatatatatatatttatagggtactccttaagtgagggcactacttttgttttcacatgtgagagcattttttaagcccttcatttttattcaagtgatggtagttacattgactaagatagatcatctcacatgggaatataattgttgatttaatatattttatttttaaaaaaacgtggcatgcagttattaaacttatataactatattggttatttttggagctttattctagcacccatttttttttttatgcttgatgaatttcaagctttcatttgtgtagaggtctatagccactgtgtgatttttggctttttatttcaattaaacaaaatattaaaactatgtatgtttatcaaagttacatattagtaatatacatcataataatccactttcaaatatacaatactaaaaataagagtaatcaaatgaagtcaaatataatctagagataaattta

SEQ ID NO: 273550 - DNA, 1014 bp, Cannabis indica
aaaaaaaaaaaaaaaaagtacgtagtttattaattataaacaaaatttcgaggtttgcctaattaattattaaaccatatgaaaagtcaaaaatattcaccccaataaatactagatacaacataccttaatttcttcgattttctgtgttttacttgaggagagattatatatttaggtttcaatggcggaggaggtgattctgctggatgtaagggtcagcatgttctgcctaagggtgaaaatagctttggccgaaaagggtattaagtgcgagtacatagaacaagatcttcagaacaaggaccctttgcttctgaagatgaacccatttcacaacaaggttcctgttctcattcacaatggaaaatctatatgcgattctctcattattttgcaatacatcgaagaggtttggcctgagaaacctcctaatttacttccctctgatacttatcaaagagctcaagcaaggttgttggcagacttcactaacaaggtatatataattaataatatttaattattaatttctcaatacaataatgtaatcgaaaagctaaatgcatgcagatccatggttgtggttggaagatatgtctttgggatggtgaaaagcttgaagtagccaaaaaggaattagttgaaatgttgaaggtgattgaaggagagcttggagataagccatactttggatttggaggagagaggtttgggtttgtagatgttgccttaataggattctacagttggtttattgtgtatgagatgtttgggaagttcagtatggagattgagtttcccaagctcagtgcctgggccaagaggtgtctgcagaaggaaagcgtctccaaatctattactgatatagatgggaacaagacttaccaatacgttgtccaatccaggaagaggttgttggccaggccatgagtaccaaatatcgtatacatatatacagatacatatatatatatgtatgcatgtgttgcaataaaagtatagtagttatgc

SEQ ID NO: 273551 - DNA, 627 bp, Cannabis indica
ccgaccgattttcacccctatctaaaatgatagagcttgctccagctttttaatgttaaatcatctcatttggagtcttaatgcaaaaattatgcatgatttactaagcaaggttaaagtagtaaaaaaatgacgaaaaatggcctctggcgctgtagcgccataagtgaggcgctacagctccgattatgggaaaaaatggtttttgaacgaaaataaaatcttggggaatattgcatggcgctatagcgcatgtctttggggctatagtgtcgcccgtacaaattgatatctatcttatttttaaaacgtcatctttttcattttttcaagcctataaaaagaacattataacttcagcttttgggatgactagagagagacagaaagtaactttgagattaaagaacacattgatgagaaagagagaagaggttccaagcttaagcatcatcaacatttattggtctttttctttttcttctttattcttttgtttagttatttaattataaacatgattattgttgtgattatatttgtcattatgaactaaacactctttctagagtgttgatgaaactattttaaaacatgaattaaagtttttagattattctcatattt

SEQ ID NO: 273552 - DNA, 1387 bp, Cannabis indica
ccaaattgaatatcatcttaacatcaaaatgaagagaaaaacttggcgaaatacgtaatggattgagattgatatgtttccctgagttttaaggtcagccaaacaataaaataattgtaattaaattagtgtttgggagtagagaaaaacaagaaaataccttctcctgctttatctttctggtgcttaattgatcccttggaagtgagaaaggtgaagaaggaaaggggtaaggaatttctgaaattgaaaatttcacattctctcaccaacgaaacgaaaaatataaataaaattataactatttttatcttcaagcttaatacgaaacacaaacccatataaataaaagactgacagaaattaaagctcttttttttcaaatccaatctgaaaacgagaacagatgggagcttcgttgtggaggttcgcccagatcaaagttccttggatctgttaacccagatttgcaaagaagaagaaaagaaatgaggttgaagaagaacaagaagacgacgacgacggcgagaagattcgcagagaagaagaaactttagtgggctgtttgttttttagctagggattcattttactatgggctcaacattgaggtaattgataacacaagagtttcatttcatttctcaggaaagcttacccacccaagatagacaggaagaacaatcgtgaagcctagccgcctctgctcttcatctccttccttcttccatcaaccaattcttgctaaatcaggtatctctctctctctctctcattttctggttgtgtgagttaattgggaagtgaaagattctagatgagatgcttttgttgattgtttcattaaattgtgatggtatgtttgtttattgaattgaatctgagatttgtttttgttgaatatatttgtgtttgtatgaatttcatgaaaagtttgttgctcatggtcaattgggctaggaagtgtggtgcttcctgtgctggtttgcttggggacgtaggtagaccctcttaaattgtagtttttaaaaaattttgtcgaagctctgttagtttttaaaaactgttttcaaatttttaagttaggaagccaaacaactcctaaaaaaaatgtttttttaataattttattttatttttaaatgtttatttacatttgcgaataatattatagctcatgtgtgtattatcattttgacagttttatcttttggggatttttttttgcaaagtagatctttttttcacacaagaaacaccgatttaaggatttttgaggatttttctttttccgaaagaattttcaaggagtcctattctttgaaaatttatacttgaagctttttctcttctcggcattttgttttgagcatgagcatgtgtcttt

SEQ ID NO: 273553 - DNA, 640 bp, Cannabis indica
aatgttcctccaaaggtcaataacttcttatggagagatgcatcgggtgtccttccaacgtgttttcagcttcaaaaactgtccctgttaatgctgcctgtcctttgtgcaatgttgctgcagaaactgtgcatcacgccttgatggaatatgagttttgctacagctgcctggaatcacagcttggtggatgttgggggcgggtctgcaacatttagcatctggctactgctgttattcggcaggggacgtgctaatgagagggaggaagcggctgtggtgagttgggtatttggcatgcagaaaatgattttgtttggcaacaaaagagttgggttgcttcaaatattgttgcatcagcgaaaaatatgcttgatcagtataaatgtgctcaaggtagaaaaggtctttctttgtctccgttcaatgaaggggcgcgacattctgagtattggaatgcagctatgttacataatttcaaagttaatattgatggggctttgtttgatcaggagggtcggtttggtgtggggtgcgtagctcgagatcatcatggtaatatgctagaagcttttactaaggggaagattggccctgttcgacctgaaattgcagaaataataggcatcaaagaagtttt

SEQ ID NO: 273554 - DNA, 549 bp, Cannabis indica
tgctgaagaccgagaagctcgaccaaaaagcacactatcatcagcaaacaataaatgtgtaataggaggggctgaccgagagacttttggaccttgcaaagcaccagtagattcctcaaattgtagcagccttgagaaaccttcagagcagataagaaacaaataaggcgatagaggatctccttgcctgataccacgatgaggagtaactgagccttgtacggatccattcaacaagaaagagtatgaaaatgatctcagacatcgaagaatcaactcaaccattgaaaaaccaaaccccattgttaacattacttgctccaaaaaatgccattcaacccgatcaaaagccttgctcatatcaagtttcatagttgcataaccttgactacctcgtttccttatttttagtgaatgaagaacctcaaatgccacaaggatattatctgtaataagccgttgagagagaaaagtgttgggttttgtgccctaaataaaatcctttacaatctgattagtaatcaatataagaaatttgaagtgatttat

SEQ ID NO: 273555 - DNA, 567 bp, Cannabis indica
taggttaggaattattaggcattaaaataatgaaaatattaggtggaaaatccttttaagtggccggccatagtaagtgggccccacttgggtatttttccaattttgtcaattatcccttattttctcaaaaatgccacttttctaattttttcaatttttccaactttcccttagattgaaatgggttttatttagggcataaaatcccaacactacatcctccattggttcaatcattctttcactccccagaaaggggtctagttcatcttcaatgtccttccagacggctttagcttccacatgaatctccattctgggagtaataggtgtctcttccagaaccataaacacagtctgacttagacgttataagtgttgggttttatgccctaaataaaacttcatatgtaatctctattcttttaaatatcaataaagaaacagaagtatttatcactcatttgtgtgtcatttggttcatgttatcatttacttgtcttattgatttataaattcatccaaacacttttcacatttaaattcttgtttattgtgtcgtca

SEQ ID NO: 273556 - DNA, 906 bp, Cannabis indica
aatgccaagtaattcaaccataaccctatgtggtcttctataaatagaaggtaaaggcttcaggttttacacacactttgacattattttctttcactcaaaaaacatcttgaagccgccactctctctctctctaccttctctgttttacgaaaccctctaagtgatagagtagtgcccacacacatcggaaggctgtgtagaattcagagtcaacaaagaaggacagttcggctcagatcttgattatactctgcgagagaaaggaatcaagggttagagatctgagtgggaggagacatatattccgctgcacccaatgtaaggtttctcgtactttttatgtgtttaatttattatcgttttagaagttcaatatttaggttgttaaatcaacatacttgtgagtatatctaagagcctggtaaaataatttcaataactggcaccagagccatggtaaattgatttgcttgcaagaaatttggacttaaaacgatttgtttgtgatttggatggtatcatgttgctttgtatgtcatattgatgtttgatttttgtttgtgaattctgggaaaaatggttgtttttctgtctctgaaattatttttattggatagtcttgaaaattctaagcaatttactattttacagaactcgatttcgatttaatttgagttagttatgaatttttgaaaattggaaaatcggggtggtgagcacttaacccacgtgcgcggatgggctgctagcagcctccctgcgccgtgtaattaaggcatcacagccctcatgcgcgcgcgggtggtatgcaacgcataccattcgtacagcatgcaatttttttcgttttcttcgatttttcatgctatttcatggaattaacttccaattttttgtgtagtt

SEQ ID NO: 273557 - DNA, 1317 bp, Cannabis indica
cttctaagggatcgggtccgatggggcccgatgcccgtccgatgggaatttttttggatttttgaagtcgggtctgatgggccccgatgccaaattttgggtccgatgggttttttgggtttttgaagtcggaggcccgatgggccggatgccccgtccgatgggcccgatgcccgtccgatggggtccgatgggcccatcggacccgaccttaaaaacccaaaaaaattgaaatttttgcgcggcatcggaccttcttcttctccggtggtgttcgcccggcgtgcgtgcgtgggttcggtcgagatggcgtgcgtgcgtgcgtgggttcggtcgagtgggcgtgggttcggttcgtggatggtgctttgggtctccgtcggtgcgtgtttacggtgttgtggacggtggtgaggggccggcattttgggcggtggtgaggggccggcgctttgggcggtggtgagggggattgggggttgtggttcggtcggttgagagagagagagagatagacgaagagagagatggggaagagagagagatggggttgagttatgggaggggtagtattgggttttagataaaattgtcacatattttcaattttcatatgtattcaattagggaaaaaattatgccccaattaatgtatagatattcaaatttcccaaatgatattacatgttatcaaaaaaaaaaaagatattgcatccatgttcttctataatcttttttttagcttttaaaattcaaatagtcctatatgtgtttagataaaaaataagaagttcttttttaatttaaaaatctttttggaagaagataagatttgtaacttctctcaaaaaaggacttttgagaaactattttaaaaatgaaaataacttacataattcttaattcactcacaaaaaattttttttttaaatattcaaacactttgaaaagcaatttttattaaaaaagatcttcatataataattatcgaaacagtaaaaataaaacaaagcttatacttatacttctagctataagaaaaagtagaaatttagccaaacgaagtcgaaataatccatctttctcttcaattttaaaaatttaacagcaaataaaataagaaaattttgtaattcctctaagtattgatacacttttattatattttcagcattcatgtagttataattctattattgtttttataatagtattcattatatattcataacatcttgcaaaattttgagatatttaaaatgatttatagtagcaaaatcaaacaatttgttggatgtgtatggtgtgtgaaataaa

SEQ ID NO: 273558 - DNA, 1219 bp, Cannabis indica
aagctcctattctagtctacaatataatgatttgccagcttcccatgtaatgaaaatggacaactagcggtaagagcacaaagatactactaccactagacaatagtagctgtggtgcttactacaggttcaaagtcctcaatcaacagtaacaaaatgctaatgaatttgaattaccttcataaattgtccacaagtaagattaaataaatcattaacccttttccttgaggcagcaacggaaaaataaataaatatagaagcattgaactaactaaactacaaggctagggttgtgaggcaccacaaatggtatgttcccttgatgaatttctaaactgtaaaactcaaacataacttttcttctttgaaactatgatccccgcctaaccctacaataaccaaatgctatgtaagtacccacatagcaaactacatgcctgaccattttaggcttttagctatcccttttggattaaaactcaaacataacacgtctgatgcatgcatgtcctaatagctctagaagaaatgaggtgaaaagctaaatcagtacactccttataagatatgcacagggcaacaaacaaagtaactcaaatcaaaaaatgtaaattacaagtatcacaacgaagcttaccatccacagcatcatgcgaagttggtgagtgcccactacgactgatccaaaactgtagcctttcttccgcaatatcttcttccacaccatgttctttagctcttctccaaaagtaagtaagccaggcctgccatattaggtttaaactagtaagaatgggaatatacatttgttatcaaatgttgaaagacaattctaaaaaaggcgagagtacatggtttactccaagccatatgtttaacttgatgccttcctttggacaaaaagaaaattcaagtatgggtgtagaagactcagtttgtggaactgaacagtctttgctatgtttggacatggagcgagataaatgggtattcgaggataaaatcaataatgacagataaggaaaagaaacaacttttgggtatcattatttatttcttttcttctatacaaaagaataaaagaattcagtttgtttcatacatttggcggcattaatttaattaatttcttacaataaaaatcgaaattttaatttctctcggatagggttggggagagagagagagagagggaagggggggggggggtaggtag

SEQ ID NO: 273559 - DNA, 882 bp, Cannabis indica
tccctggtgattcctttgagccataaagcctctttgactgcttatgtacatgctatatattcagcctctgttgtagacaatgcaacaactacttggagatttgatttccaactgattgtgcattgatttagctgaaatacataccctgtttcagacctccttgtgtctatatcacaagcataatctgagtctacaaatccaaccacattggtattttctttacttttgccatagatgagaccaacatctctagtacctctgagatacctaagcataaattttgtagcattctaatgttctagaaaaggttttccatgaatttgctcactctactcacactatagcatagatctggtctggtacagaccatatgatacatgatacttctaactatgctagtgtaaggaattttctccatcaaactaatctcttcttgagttgatggagtttgtgagctagagaattttatttgttgagatgaaggtgtgaagactggttttacctcataaaacccaaacttcttaagaattttagtggtgtagcttccttgagataacttcagcaccctatattttcagtccctacagatatctatgcctaaaaatctcttagctgagccaaggtccttcatctcaaattccttgctcaaagttttcttcacattgtctatctcactaatgcacttgcttgctataagcatatcatcaacatcaaagagcaagtagacactaacaaaatatgttttcttcacataaacacagttgtcataagagctcctcatgaaaccatttctaagtcaaaaatcatcaaaccttttgtacctactgcctgggtgattgttttcaaactatagagagatctcgttgagtagacatacatgat

SEQ ID NO: 273560 - DNA, 808 bp, Cannabis indica
tgaaataaaaggaaaaactattccaatacaagatgataaaacatttaacaatttcttttatgaattatttttatgcattttaaattttatcattcctattcttattctcattcccatttctatttatgtgtgtagaaaatggtgaatagaattgtgtatcttattcatgtgaatgtcatatattttatacaacttagggagaaactaaaataggaaagtatgaaagaaaataggaaaagaaataattacaattgaccctattttctagctaaattacagctaatattctaacattcccccttaagctggagcatagatgttaatcatgcttagcttgttacaaagataatcaatctgcacccaattcaaagtcttcgtaaaaatgtctcctaattgttctttagttttcacatatcctgtagagattaagcattgttgaattttctcatgaacaaaatgacaatcatctcaatgtgcttagttcgctcatgaaacacaggatttgaggcaatatgaagagcaacttgattatcacactataattttgctggtactaaagtttgaaatcctatttcagccgaaagctaatatatccacattatttcacacacagattgcgtcatagccctatattctgattgagcacttgatctggacacaacattttgtttcttactcttccaagagactaaattacctccaacaaagacacaataacctgaagtggatcgtttatccaccttagaaccaacccaatctgcatttgagaaacactccatctgggtgtgcccatgatccttgtaaataa

SEQ ID NO: 273561 - DNA, 1823 bp, Cannabis indica
ttttttttattttattattaaagagaattgctacggtcgaacatttttaagaatccccgtgttttaatgttaatggtggttcttgttaaaacatattttaataatgatttaaattttataaaagagaaaaattgagctcattgagctaaaaagccaaaatcgtgatgcatgcataaaaatttatttttttttatcatatacaatatttacaattagagctattaatattttagatggagtacatatgcttattattgctatagatatattttgtagagaaaatagaaatatctattaataggtaaattagataaagttatgatgaagttatagttcaaattttaaatttctccaaagttagaaatttggtcgacatttgtatagtcttgttattactatttataggaataagatgactattttttttatcttatctagacaacagttgtattagggtgaaatcaaaagtcaaaaccttgataatttttttatttgattattatcaactttaatttgttattctagttctttttattctcttttaattttttaatattacttgaaatcgattgcttaaataaaattaagttttaatatttgttataattaattgttttaattattttaatctttatgggatgataatcggtctcttgaccacgattattacttgtcgatttgtgcttttgcaagcatatatataaaatttgcaacattatcacacagttaaactcatatatttattgctcgaaatacaagtataatacataataaatggcaaataaaaatctgaagattcccaaaatctaacgcctaaagagaaagaccaagaagacgtcgttacggaaagagatttggatccattataatgatataccaacaaaccaataagaaacaaaacttgtatctctcacttggacaataacaaccctattaatctaataaggtggtgaataatcactactcttagaaaaaataaaataaccacaaaatcaaacataataatgaaaatcaaaacaataaaaaaaataaaacaccatcgcacaaactgaagcccaacaaacccaatttattccccactaattcgacactaataatcaaccgaaactaacattttgtctcaaaaccccactgcaacattagtgtaattaaatagtgaattaatttcatactagttttaaattcaatcacacatttgaaaatgagttggaagcttcttatattaaagcattaatctttatcatcccacactaattatctaatatttttatttttcatgtgaactcacaatataataatgagtagaaaatcgtgatctctatatatatataataaattactataaaaaatgtgtataataaattaatatatattatactatttaatatatcatcaaatcacatgatggaaatatatatttgcgaatatacatgcattaaggcagaatccaagtttattgaatatatgacattaatgtcaagattttggactagtttacattcgtagctaattaagttcatcacaagtgaactacaatgtctactatatctatcaagtcaagcctttatatatataaatatatttatacacacacatgatatatcattacatctcatcaattaatataatgaactgccagttaagccctctgtacatagtaatattcgagcattgtcactgaaaatacaaacccaaatggaccccacattgtttcattaattaaagtgattgatgaaatcaaatcaaagttactaaattcatgcaacgaacccggttggatttctcggaggctcttgtggagaagcggcggcctgttgcttggc

SEQ ID NO: 273562 - DNA, 1779 bp, Cannabis indica
aaatatcaatttatattttctatttaataattccaatcttacaagtgcccaaagcaccctttatattttgatatttacaattttttttaaattgaaatcgttggagttgcaaataataataataataactcacattcccaaactttgcccggttttccgttactcagatcatcgagtctccaacaaacaacacgacatgagcagagagtaataacaaaattaccaaaacacccctttaaggtctgttggtatattagagctctgcttcttcttcttccatcttccccaagaggacttctgattttgggttgttgactggagccgagacaaaaactaccatctggtagctactatagagaaatcgaattcaaaatgtgggtccgaagaatttcgcactgaatatataaatatacacgtataaaagggcttcgccgcttcgccccgaaatgggcttgttctgaaatttctattttggtcttcgctatttcgtgatcgaattcgatatgagtgtttcgagaaaatggaagtttgatttgggtttcgtagacgggaattttttttttaaggtgatggtcatattatacgtgatgattcaagactgaaaggtcttttcttttccttcttcgtttccactattttctttttggccattttcaattttagagattgtatatttattcgaaatgggtgatatgtgatcgaactgagtagaaatctttagtgggaattttcttttgttagagaaaaggattgaaattctgtgaatagaaacattgcatgtgtgttttttggtttggtcgatatagtagttttctgccaaaatgtccggtggaacgccggttgccggcggacttatgagacataggcatagccagggttatgcgtctagtggtgatgatcttgaggatgatgcgtgctctaggatgcgatattcaatggagccaactccaagaatttggtcacgaatggagattttggagaacatcctttggcttatttcagcagcctttattgtctactatggtgataggcattccaacttgatataccttctctggcatgatggtcgaatcagaaggtacaattctactttgttcattattttttgtttatgcaactgttgtattgctactaatactattaacaaactaatggttcttttgtttattctttgttgctttggtttattctgcattttctgactggacaagatactattcctcttgtgttgccttatatattatatattttaaatttggagttgacttgattttttcttgttctatatggttcatgttaaatttcaattcatataataaggattccttaggaaataaactggaaaatatcagtggaatggacatgaagaaatgattactgtggaacccacttgactaataatacagtaacttgagccaaactatggcctttcagaagcatttaacactgtggggatttattttcgcatatttgtgatcttgtaatgcaatatatgtttatcttaaggtgaaaaatggttggaacccaaagcataagataacatgctataatagcatagatcaatttcttgaagtggaatgtttttatcttcatattgaactcttgcagattcatttttttcccaatatgttctcctgagttctgctagattgatagtatttgttattggacaattttgtgtaatataaatcttgtatgctcaatgttgctcttcgtggatttactcaatgcttgctctactatttcatcaatgggaagcggttaacattggggatgagg

SEQ ID NO: 273563 - DNA, 1512 bp, Cannabis indica
gcttgggataagctttgccttcccaaatttccttggggggccttaggttcaggaaaaccagataaatgaacttggcctttctggctaaatgggggaagaatattctgaatggtagtcaatccctgtgatggaggattttaaaatgaaaataccttagagggaaggagtttcttaactgtagctacaaagattcggactcctggttctagaaaaatgttgttgaagccaattcgatattaagaaaaggtgtttataaattggtagctgatggcagggatactataatttggcgggacccttggatcccccatatcaaatattttgtcccgaattctaatggtggtctcaccaatgatcactacaaagttgcatcacttagctcccaacggtggttgggatgttccaaagttgaacagcctctttgatcaagagattgtgtctgctatcttaaaaggggggttttcctctggtcagggcaatgataagtgggtttagacttgagaagaatggtcggttcttgagtaaatctacctatctcgctcaagcgctggaaagggctcctcactgtgaggtcgccccgtctctttggaacaagctctagaacaatagaattctaacgcgacataaagttctttggtggagtatcatgtccagtgcgctccctattcggactgtgatcatgaacatattttatattgaagatacgagctgcctctctttggtatgggagaggaatctttagagcacttatttcttacttgcgatgtggccttttacttctggcagacgtctccttggggtatttatcctatttgtgataccggtattcgaatgtggactgggtcaaattcatttgggatctcaaacacaggggcattcctgagggggatgtcttcttttatgcttcgattattgttgacaccatctggagcattcgtaatgataaggttgttgcaaattattttaccaggatcttagatctactcacaagtatgttgattaacaccctaaatatgaactttctaaaacgatgaaataaacacatataaagtttaggaaaccttacattgggtgcagccgaataatatgactctttccgttcgaatatctagcccttgattcctttctgtagcagagcattatcaatatctgaacctggatctctttctctgaatctttagtgctgaaactccttcttgctgaaagtctttcttcacgatcttcctcactatgattgaggtataacttggtctattcgaaaataccagaaagttatatcactgaagaaaagtctacactgtattatctcaattacatattttaaaatatgagagatatgtcttctgttaattcagatgtacttttaaaacagtaaagatttcagtatgatgagtaaagcatatagtaaaggatgtttcataagagtatttatgaactagtttccagaagtttgggtggattcaaatatactacatctgaagatcaagacatcagattgacctatttgcacag

SEQ ID NO: 273564 - DNA, 2200 bp, Cannabis indica
tcgcaaaaaaggcaacccatattcctcaactcagccaaatacacactcccaatgtctccacaaccaagctttttcaaaagcctaaaatgtcccaaacccaagtcaccatctttactcttcacgaactgaatggcgtcccatcgaatatcatttcccttgtgaggcttcgatgggcaaaagctacctaaaactaatgtcattcccttcaaaactattggaaatactagcaaaactcgaactgctcttctcactttcttcttcttcttcttctttacagaacaactcaagagtttcaacattcacactgttattatcagacccagaaatagtaccgctacataagccaatactcacactgctactaataactggaggggctatcatcattgctttcactgctctgtgtctggtttggtttgtccattgttttagagagtatttgttagtgcatagtaagtgtttgaataaaagtagtcaagaaaaattagtagggaaaaaagaaagggaaatgcaatggtggtcaaggttgggttttggggttttgggtttggggtttggggagtgaccgaggtggtcaaagggagggcgagacagacgggggtggtagtaaggagagaggtgaacatgggaagaagaagccaaaaggagggtggtggtggagaaaacggtattcaaatttgaaatctgatgagtgtgataataacggggtgagagacccaatgccattgcccggcttgggtaatttggactccatctctctctctctctctctctcttctttctctctctctcagaacatataacacatacagatacagcttagagacaacaaaacgcagagaagagagagagagagagagattccctgtttacgaggacgacaaaagccatttagattttctaaacaaatatatatttattcaaacctttgcacaaaaaaatatatatatatgtttgtttaaacactaataactgttattgttctactttgattatttttttcatggcatatcctactttgattatattaatattataattattattattattagattcttcttattattattattattattagagcattgttattattatgagagtatctctgattgaatacaacattaattttaggttaagtgtgttttatgattagttagtaatattttcttaaattatttttttatattacaagattcaatatttaattatcacaataacattataacaattctctattagatatttcataaaaattattacataattcaatatttaattatcttaaaggatgctaacttgctaagcacaatcttaatctaaagatttacatgtgatgataaataactttacgattgtaaaaaaaaaaatgaaaagtcctcatatatgctaaaacagataaatgtctaccaatccttttcggggttgtaccattaaatacttaggtgatgtttgctttgatgtaatgtaatgtaatgtactgaaaatagtaattgtaatatgaatggtaatgtaatggaataagaattgtaataagaatgatattatgatgtttggtttaactctgtaatggacattgtaatcaaataagtaagttgtataacaacaaaaatacctttagttttattatttttaatatttaaaatttaaaaaaataataataaaaaatggtaaaagagatattttctaaccatgtaatcatcattacattggttatatgatgtaatggggattacaatacatagtgtaatagccattacaaaggttaaaaatgaaagcaaacaatgtaatagtaaaaaatgattctattacaattctcattacactaaaccaaacatgccattagttttttagagctctaaaatcacttggataattgatgaattcaacttttaactttaagaaataattattttaaaaaaatcaaataaataatagataaagaatttaaaaaggattacaagaagcaagaagaatggataaaatagttattctcttttgtgttatttagtattaagaatacacctaaaaatggatagaggaaaaaataaatattaaaattattaaataaagttaaatctcaaataaagttattaaaatatctattacattttttttaacttaaatctcaaataaagtttttttttttgtaataatgattaattttttattaaatcaaatcatccacaactaagga

SEQ ID NO: 273565 - DNA, 2712 bp, Cannabis indica
aggataaactaaacccgaaataagattaaacgcggaatacgactcctcgaaatgagtatccaaacagagcataaatagaaaaaaacgagggaagcaacggcacattttggcgggaaacacgtggcagtcatatagggtatcatctactccaatttcccgccactgaaaaccctaacctatttcttattaatatttacatatcagacccatttcagacaatctctgtctaaatccaaaaatgagctcttcttcctccattcctttcagatccaagaaacccttgaaccaaatccctcctaagccccaaaaccaaaatctagatctcaaaactcccgagaagccgccggttcttcctcgccggaatgttgctttgtctctgaagcaagtgaggaaagcagctgaaagaatcagtgtaccatcgaatcagaagagttcttctgatgggaaggctcagatctcttctgctcgacggaaaatcgttgactttcccgagaggcagaacacgaaggacgattctgatgtggctgagttgccggaaaggttagatgagatgtctttttttggggttttgttttgggaaatgtgattattggttttgttcctaataagttgggggatttttgttttgcaggtttgagattcttggagagtttttcaataatttgaataattcgattcggttgctcaagttgaaaggttcggcgacgaattttactaatattcgccccaaaatcgagtctttaactgatgataggtatactattttcttttttctttggttgattcattttctcattgcgaagaaattattgtgtaaaaactttggtttttagttagagagatctgtttggttaaagatttgatgaaagattaataagttttcaatctgattgagtttttgtaattttttttttgttcttttctaggaggtttacttatagtcacttggctcagttgaaatatcttttacctgaggtgattgagattaagaagacactaatattcaatgagaaaacgagttgtatgaagccagatcttcatatttctttgaatctggatgcattagagagtgacaagaagttgaaatctgaagatcgtaattcatacctgagaagggtctttcagtctcggcttgtggatttttcaagatctcatcctgaggtatattcatttttactcagtatatgacattgtttaggaaagattgacttcaatttttacgagaaggatatagtttggttggtttttgatatttgttgatcatagttttgctcaatagattagaagttattgtgaaatctatggttttgattagttaatttggaatatcatttgaatgtttattgaacttggtgtgatggaatagtgattgcttatgaaatcagaaagcaatttgggaaaatttatataatgtcaacatcttgtattgagtctgttcccttatgttgttaagttgtttgatctgttttttaggatcttgaagttccgaaaggagagctgccagagccattcaataatctagagcgaggtgttaattcagcctttatcaaagttccgctgtcatcttcttgtgaggcagtagatgttcaattaggtggtggagaatctgataaagttcatgaggaactgaagtcaattcagtctactcatttaaaggtgaacaaagtgtctggttcagcattgctttcaaagacattatctgaaaacctaagacccaactgcaagctgcagcaagtcatctgtcttgctctttccaaagtcgcttttctcgaagacagagaagcattgctgttgatgacttgcctccaaaatcatccgagccttcagctcaatcttcgggtgatttagttgctgactcatgccctaagacagcttcctccattgaggaagtgaatgttggcaacgatttttgcccattgaatgcaacttcgagcaaagtactatctgtcctcgaagatggcactccgatgaaaaatgctagtattgagtcaactccagtaaaacctatcttcaataaagaagaagttactccactaaaaaatgctagtattgaatcaactccagtaaagtctgattctacaccagccaggctaatgactgccacacctgcattgcgtccatcaaagagaagttacatgagcccggaagataattctatcagtgacaagttggttaggcgccaaccttgttctaaatcattaaatttcgagagtcctgttaagaataacagagctaaggatgaagacattgatatgaagggtgtctcaatcgataaaaatcttctcgatattcttcctgagaatcttttgcattcggtaagtacatcttttagtaataatcactaagtacagcactaattctagtcttgttttgattgtagtagtaatcttgtttttctcattacagattagagaaaaagagatcaaagctatggaggaacgggatccagctataactcaagcaaagagaaggcgaaaaatgattgcaagcctacctaagctcttcaacatgattcatttcttatttcagtcaataaatcgatcagttatcacaaaggaagagcttatgcacaagatagtctcaagccatttcgatatgttgacaagagtaagacattagacccgccctttacacgaaattaagaatcttctgttctgtagtaagcttttctgagcttaaattcttgtatgttaacaggagaagttgatgagc

SEQ ID NO: 273566 - DNA, 2921 bp, Cannabis indica
aattaatgcatcaaaattagtatttcgtaaaataaggcaaaatattagggcgttacagttgtggagaaagttatacatatgatgtacctccttagcagtaggagccctaccagctaccttcttaaaggcaatgaagaagcaaatcagggtgttccagccattaggcatgagctactagggggctatgccgaagtaattcaaaacctccacgtaagaagtgtgaagcaaccaagtaacacccatcttaagaatgtattcgctaaaagttaccatgccttgaggtggtaaatgagcgcaatcattggacaagggttcgtaaccctgtgttactgcatactggtaaaccatcctcctgactccaaaccgagtcacagtactcaccatctcgaacatcctaaagggaatagatcggttggggattggaagtggtgcttatttgagcagcgtggtttatccatatctaaaaatcataaaatgagttagaacaagaagcaacacacttcatgttctttattcagcgagctggaaccttccaaattaatttaggctaggctgtgggatcgtcgcttgggtgaccctgggcaacgacagatggtgaggggtagtaagaggaaccgctgccttcgctggctaacagacagctcacctcacagccaaaggcatgggagtcgggtgaggaggagatgcctcaagagaaaaaatgtgctccaagggagaaagtttctttgttatgtcacgatataactgtctaaggaggaaaaggtgggcatttgtattagcgtgctcctaatcctctaagaactcaatttcttccttaagccttgctagagtttcctaaaactcacaaatttcttctaagcatttcaaacgctcaaacattggctggtgataccatgcccaagggtcgacaacgttcccgtccaaatcagacaagacctcaatgggagagaccccctcaagaatgaagggtggtctattgttctccataaaaaagagagaaaggaggataaggtgggggtattgttcaagaaaaatgaaggtggacgccaactcccgctggccatgtgtggagacacaacactaactacgactctattacaagggggtcgcctttgacccacgcctagtcacctgacaaaaaaaagagagaagcgcatgaatggacatgattagtagggggactcaaactaaaacctataacgagggttattataaatacgatgtgtattgacatgaatggtgggtgtataaatataaaagaaaaataatacaaatggagaaggtactatacaaagttggcatgtgtaagaatggactcgctacgtcagaacccgaggagaagacaaactttaaatggcttggaatgtaggaggagattggaagaaatataaagcaaagatggatggcaaatgatgggaagtaagaatgagaaagggatagatgaaagtggaggagtggaagcctatttaaggggttaagaagaaaatacaaactattggatcaatgtaagatcaacggatggtgattagtcacatgcacagatgagaagcaacatgtgactcacctacttcattgaatgtgctcttaaatattttaacacgtcatgttagatgatctaccagacgaggtgcaccgcaaagggcccagaggacaactcaactgtagtcaaaaagaccgcttaaaagtgcatttttagactgggagcaagtgttaaccacgaaaattcaataaatgaatattcctttggacaacaagtaaagggaggaaataattagatttccaaaacaaacaaaagggacaatgggtggccccaacttttttttgcttttgtcccctatcacatctccctatgcaccaagctccgcgtgcccaacctcctcgcgcccagctacccttgtgcccagcctccccgccctacacccctcgtccttttaccccttttttctcctcacacttaaacgtaacctggacgtcttgaatgtaaacataacctgacaatcacaagagatgatgagcaatgatcacagctagggccgtttgagcaaagatgttacagacgagatagcgaccacacaataaatacatataatgaagacaaagcttacctcaaccaaagtacaaatagaagagagaatttttgtcctattaaaagtactaggacatcagactatctgagttactagtctacttagtatgaaaacagcttgacacttaaaactagaagacgagatggaattcaaaattgcatgaaatacactatagataggtcctttaaggtatttgtaaaagggatattttttaaaaaaaaatcaatgaaatagtaattttttggagtgagtttaagagttttctttgattgttttttaactaaaatttctgaatattacatttgatttttaatatttcgttaacgaattctcactgtcaacgatgacttatacgaaaacactttttgttgtagtgtggaaaaggtcatggggaaggcaaaaaatgcaatttactttgacaaaaggatcccgagaaattaaaagattcatattaagcttcacatgattggaaaccgtgtagaatgaacttggctagacaccactttaattagttggatagtacttatcaaatttgtgctaattaatgaggttgactccactttacatgttgtgtgagattgtaagcctaatagggaggtcagaaaactcttcgagctcaattcaattcatggtgtttccccccataatagtttcaatttctcccagatcttaatgatgtgttgaaacctttggagattgaaaaaattattaccgtgatgtggagactttagaatggatggaagatatgggctcaagagaggaaatgcatgggttggaagacgagcacacactagagtgggctcttgattcctatctcgttttccaagaggcaaa

SEQ ID NO: 273567 - DNA, 1462 bp, Cannabis indica
acaatgataattcaacaccgaaatattaaaaaactactacaaaatagacttttggtgtcggttcgatggacgtttttttaaaaaaactgacactaaagaacacctcaactttttggtctcgatttataactgacacatataatgacttttagtgtcagttaatagactgacactaaaagtataactgagaccaaaaaaaatttaaaaaaatatatatacatacaaattgagtagagtataagtgtcagttcataaccgagacgaaaagattctttagtctcggttataaactgaaacttaaaactcatatatctttaaaacaaaaccccaagcccatcgttctaaacatctctctcgcgcttcacacaaagttttagaaaacccaaacaaaaccccatttcttctctcttgttctcacgcaacccagaccgacaatcggcgacccgaccccctctctatcctgcttggtgaccgagccccctatctatcccgctcggtgacccggaccctcctctcgaccctatgtcctctctcatctctctctcggtacaagaccaagacccagacccctcttcttgccctctcccctcggttctctctccctctctccgtttgatcagggacgccaccaaatcggccgtccaaggccaaacctgcccccttctccatttccgttcaagtatatatatattttttaaaagctgcaaatgtacgtatatataggagctgggtccatcttcctgcttaaggatccttctacaacaatgttgtgggagtaaattctcatttattaatattagttataaaattatgaaaatctattagatggccatgatgtttatagatgcttgtaaagtttttaaagattcaaaattaattttgatatgtttaatagaatcatctgttggggtttgcgaggaaattacttactaatcttgaaagaattttgatcttatagcttctatatcttcattgtgaatatgtcttagatcgttataaatttgactatgatccgttttaatcataaacatttatcagctgagtttcaaatttgactatgatctgttttaatcgttaaacatttatcagctgagttttatatatatttttattatgagttagtcatagtgttgttgacgaaaaaataaaaagagagaaatgtttgcctccttaatattagttccataagttagacaatcgataatttttttcctctgaaaatggagttgtgtaattataattggtgcttgtggtatagcctattccttgtgtaagtgattaattgtcatgtaaagagtaaagggaatctgtttgtatttcaagcatgaaataatatgccctacttagtggtaagtatactagtagcttattgttgtttgatgaattagattggctatactgtatttaattagcctcattaacattatctttttctatccttatttcttcttttttttttttt

SEQ ID NO: 273568 - DNA, 467 bp, Cannabis indica
tactatttcagtgattgtttatgtaataaaccatcctcccagactttgatatctaccaaatcatgtctcttgaactttaatatgttctaaatcatgcctcctgaactttcatccatgttaaaatattttttttttataaaattagacaaaagtccttaaatccaataatttcaatagttcaggaagcatttttaacaacattaaaagttcagggggcataatttagtacatgtcaaaattcgagggataaaaatatcaaaattaagttgtggtaggagtacatcgagaggaagatatgatgacagaagagacaatctcacccattcacgctcttgttgggaagttgagtgctactattctcacaaaaaagggaaatatatgttaggcggaattgtgaagacttgaccaaacatcttaaagcaatgaggaatcaagaatacaaagacatatcagattccccaaatatt

SEQ ID NO: 273569 - DNA, 2220 bp, Cannabis indica
tgaaaccaaaataaaagttttggggagttttgctgccatttatcctaacaaaaaatcaacaacaaattaacaatagcacaacataaaatgaccgtattttctgtaaataaaatcaaaaacttgtaaaaatgtttaaaattccgtaaaaccgtattttggtaattttttttgttttgtttttgtgtatttatgaaataatctcatttcaaaaactcaattcgtatttacattttttttagtctagactatagtatatgttatctatcgatttcaattaaatatgataaacctaatatatagagtatcattaattttaattaataaattataatattatataaagtaaaaatgatcataaaatataatttctcttgtcacactcttttgtattaaagtcaccatgaagagcttatattgtgcatgaaccaccgcttaatcatataataatatatatatacatatatatatatatatatcatcttatatgatcttgattatcttggtacttcatcaaccagttaactacttttcatattattatatatattcatcacataaatcaaatatatattattctttacttaattaatggccaacaacaacaacaacaacaacgatggtgatagagatcatggaatcgaaagtttcttcgaggaccacagattaactttcttcctaatagcagccggaacaatctctctcttcattaccatctaccttctagtcactatcttcttatatagccgggatcaagctcgagagcaaccacgcgagccggggaatattaatagcatcgagatggtgtctgtggccgaacttatcccagcgcacaagtataagaaaggagacggtttggtaggaaatgacaacgccgacaaagatgaagacgtggtttgcgcggtgtgcctagcagaattcgaagagggagaggagctccgaactttgccagagtgttttcactcgtttcacgcgccctgtatagatatgtggctcttctcacataccacttgtccggtgtgtcgtcgtgatgccacaccttccccctctccaaggatcggatgccatggtgagtccagggtggattaattctaaagcattgctattagtcactactagtatataaacaagatgacgctttgcgtatatttaacaatattacattaaaacctatgaaacctttagcaatataaaatcttataagaatgttaaatactattagtaacttttagtattttactttattttaaggcatattacacatagctattaataatatgaaattttgtatttcgcttcataaatttgtcatgtaatgtagctcatgatggcgatctaacaaaacctaatgtacatttttaggcatagttaaaaatatagaataaaatattttttaatcaatattattttcaaagtgttttaatagtactttttttatttaattaaatttttaagagtaaattataaattaagtaaagtattttaattgtgaaaaatagtttttcaatttttttttaggagtggagtctgattaatattgttttttgtttttaattttcaatattgtattttaaaaaactaagaacacaaaataatttttgtaggtttaaactaattaacaaaaggtcttcggttgattttttttctaaaatatatttttgatttttatttaaaaaaacttcaataaaaaaataattaataaacatgtttataaaaagataaacattttaaaagtttagtaataaacaatgagaatatgtaattcaaaagaaaaagtgatgaaaactctagaaaactaactttttgctctcctcaaaaaattatttaacattttgtctctggtacaatttatatgttgttgtgtttcttaattttcttttgttaaaatagttcttgaattatttacaatattataaaagggactgaagttccatttattttcttttagcagattgatattgtgctgccattttccccataataaaggtagtaatgtgatgtggataattcaaaattaaaaaaaaataaaaaaccttttaaaatgttatagttttctctttattattcttttcacgtggcgcgttgtgattttttatattatttattaaattaaattatttaagattcagtattataaaattatacttataataatatgtcacatcttttagtatttagggtaccactaaaataaactcaataaatcattaaattaaactaatc

SEQ ID NO: 273570 - DNA, 3325 bp, Cannabis indica
ccattccagggcattggttcaagtaagcttgggttggatgtatggagtatgcatccgaaaggaccgatattgaacttggattagatatgataaccttaccgtaatatttaattcattatcacctagttgatcctagatcaaatgatctcaatcctgagatggttaggttcgctctcaagagtgttatttgtgttctttgatttgttagttaagcctatcttttggtccgggtgatacgtacattttgggaacacaatagtacaattgagtgggagcgctaatcatagatatggaatctatagcttctattcgtctatagaagtgaaacaatgatttccttcaagcttggctaaatagagataaatgatagagtgctcattttagtgattatattaattcacaaaaatatcatttataggtggctaagtgttttaacgataaaatacattgaaagggtataacagtaattttgtccctatgcaatgtaaatcatctatagaagatcattgattattgggattataacaatggataattaatagagtatctatatcttggaacatatagagcattctatataactgagagtgcaattccaagttctatagtggttcaacgaggaattaataagttagtgaatttacttggtaaattctagatctccttattggaagctcagttatataggcccatgatccccatactagttgagacaaactgcttgtaagactcagttaattgattttgattaatcaattttaattctaaaattagactatgtctagtttatgaattttcactatcttatggcttgattgtgaagaaatggtattttagggttaatttattaattaaaagacttttggagtctaattaataaatattataaatgacaagtttatttgataattattttaattattaaataaatagttttggcatttatagggttgaagttgccaaaagtggtatttgtgaaaaatagataaaatagttgagaaaaatggcaaaaactaagctaatgtagggcccattatatggccgaccattaggtgcctattttgctctatttttatcaattttttatttcaaataattcaaccctaaccctattggaaattattataaaaggaacctatcatggtaaaaggaccaacattagcctctgtctgggtcaaagtgaatacctgagcaggaaccaatgtatcatctttcttttgttctactatcccacactggaagcaggctcgagcttaacattcgccctgattgtgtctcttgcacctcgagcactctagagaggttctctagtttttgtttccacctagtcaaaaaccctgattaccttggaatttcttattaggacccatagttgttgggtcattaggtcttttcttacgattattagggttagcacccgtaccagatttgacattgggcgattgtttccacaaatctcttctcacgctatttctctttcgaatttgatcttccgctccctcagtagcaatagctagctcaaccacttcagcataagtttaaacaacccctggttgcttagcaactacaattacatcttgaccaataagctcttccaaccccggaatgaacttagcctttctagtagcctcaatggcaacttcatcagaggcaaactttgccaactgatcaaatttggtggcatactctgtcaccgtcatactaccttgagtcagctgtatgaactcttttgccttagtagcatgaatagattcattgtaatactttttgtaaaagatggtccaaaaggcatcctaggtcatgttattcggatcatgaccctgaggcacaatttaccaccaaatgcgggcatcttctcccagcatgaagatagcacatccaacccaatcattaccctcaacacacataaagtcaaagatggatgttatcatgctcatctattgctccgccttaactggatgagcaccaccttaaaacactagtggattctacttcttgaaccgcacatacaacatctccagatgatttccaacatccgatggcactaccaaaggttctggaggattaggattgggattgggagttggctgagcttgctgctctctcaaatctctgatctaatcaccttgctgctagatggtctcttgcatcgctgcatacatttgttcctagttttgtggtagtggaggatttccaccctcaccagcaccgagccccaaaagctcacggttaaccctaccggattgcctcaggtgcataatgtaatacacctacgaccataacttttaaatatttagaatcctccaaaccaaagccaatgctaataagtattaccatacgtacatataaatagcatctattatctataacctaccatactgttctaatagctcatatatttcaaataagtagacaattcaagtaatcaacaaataatctaataatcaactaacaattaacacttactataccatgagtcgaacgagtcttcacaaccaatgtacatatccaacaagtcttaaggatctttaaaccttggtcattctgataccatgttgtaacgccctaaaccgtaaaggcaccacatgtgtggttttattaattagtttataataacaaaccaatggtttaagaaaattgtagtttaattaagacctttagtaaaattatttaaaacataaattagcttttcattcgaaatactactagatttggggatccccttaaaataaattttttcataaaatactacaaaacaacttattacaaattgctgtcacattttcaaaatacaataaaagaaagatcctatccattgagagcaaaaatatggcgactaatatgtacgttgccgaaagacctctgactcatggctggtccagttttccctttcccttacctgcaccatagagcacccgtgagtcacaaaaagtcaacaagaaaagaaggtaacaagcaaacatcacatatagcataacatttaataacacaaaccttatattaccatatatagcttaagcaattatccaaagcataatcaaataatagtgatcaattatttgccttataagaaacaccgaccttgatactttataaagtatccttacccctcgctatcaacaagtttcttatgtcactattgttgcttaattaagcaactaataagtaagaaacctatcagcaattttaaaagagtaataactcattcttaacaacggtaattaccttaaccttaatcataattgagtcagacgataataatcctatcttatttaacatgctaagtgttggaaattattttaccagtatcttagatctactcaca

SEQ ID NO: 273571 - DNA, 1675 bp, Cannabis indica
aacatatgaaggtccttgttcggtagaccattattattagcagcagcagcaggaggaggtggtgtagcagttgttgcgtctttcttcttaacagcaccattacttgtcgacccggaaaacatgggattaggaggagggtaagacggagcaagaccgccattgaagagctctccactcatgctcctcgctcctctctgcttctttcccatatttttcatcatctcttcgtcgaaattagatgtcctcggcgtgacgcctttcgatgactgaagtgagtagacatcagcgccgtgagttggtccaccaccgtagctgttggtgtacccgtgtttgggactggcggccttactggcattaaacatggcgtaaaaatcagtctggttgaagctcgatgccctcggggtcggctctcgcgaggattgtacagagtagatctcgacgccagtgaggttcgaagctcttggcgtcatggatgttaaagaatttagtccgtgagacttgttgaatgaagaaaccattgacgatgctcctgatcttctcaccaccacgtgtagcttcccatcgtcgccaatttctgcatcggtctgtaaaggctcgcggccgttgagagaaacgacgtcggaatcgacacggaaggaagtgatagagcctgcagtttcaggaaactgttcggttatgaggagcttggctcctctgtattcgaacatgaaaagcatgagagtgtaccagatcacactctggaggacaacgatttgaaccatgaggcttccggagaagtctccgtacatggctttcaagagagggattcccatgacgagagtgttgggaagagttgaaagagagaaaagtgttatcatccactccaagtttcctcgcttggaaaaggtttgccacagaaagagagcggtgaggatgaccactttttggagtgagtcggctgcaatgaagtggtagttcatagcgtagggatcgttggaggatatgaagtggaaggagagtaatggtacggcgaaaaccgcaacgaatcggttgatgccggagcattggtccggcgtgaagatcttccaccaacggactgaaccgtaggctaaaaacatagccacgtacaaagggacaatggccgccagaacatcgtagatatctttacctgtgatcatattgtggtgttatctaggaggaaattaagagagtgtttgtgaatgttttagagcttaaagaattatatataagtgcttttgttacacttacacatctcatttaatgagagagatgaggattggaggggatagtgaaatgtgaatgtgtgtactctagctcttattttatatagactgcttctcaaatttgattttatggtaaaagtgggctttctttcataattttactattttttattttattaaaaaagaacaggatagatgagattctcataagaaaaatatcatacaataatatgtagttaaagaaaaaaaatgtaaaataaaaggtatcatttttctcttgttttacagcattaatttaattctataaatgattgttcagtttctagtccacgttttacattgaaggaaggggaaaaattaaataaatattgtatagcaattcagcatattaattcaaatttcgtcatattcagatcagtcaattatatatatgtacttctcagtctattgcc

SEQ ID NO: 273572 - DNA, 1636 bp, Cannabis indica
aatttaacattcaagcatatatcaaaatgtaaaacatttttattaataatcagaatttttttataggcttttcaaggcataaatcctaacacttcagatacctaaagagaaccatgaaccttagattatattattagaagtttccagctgtccttgatggatatattgatgttgattggaacacattatcagatgactccaaagtaactagtggctatattttagtatagcaggtggtgttgtttcttgaaaatcaaagaaacaaactattttggcacaatccaccatggtgtctcaattgatagcactagctactgctagtgaagaagcaggttggctaagaagcctgctagctaacatccctttacgagaaagaccgatactagctattttaatccactgtaatattagcactgctattgcaaattagaactactattataatgataagagacgacagattcttcgtaaacatagtactattagagagctcctctctattggagcagtaagagtggaacatgtacgcactaatgagaacttaaccaatcctttgacgaaaggtttagctagagagaaagcccttaaaacatcaaaaggaattggattatttcccttagaatgatgagtcactcataatggtgaccagagatctcaagaaatagattcaattggtaataacaagttatgaagttataagaatgagatcatgatattgttataagaaaagtgaagcatgaattcttgaagcgataaaaagttagatgatagaaactattaatgagatatatatactctatgtgtagtggagtaccaaactacaggagtactcttgataaactcacatacgtgaatgtggtattggggtcgcttcttataaaattttgggtaaatttctaaagagttcactatactgggatagacgagcatgacaattaaagcacgaacttttggactacactctagaaaggttgtgtgtggtacatcgttagatatagagttcaagactacgagtcactctagtatattttaagttgtattcactacacaaaggtttaaattgaaagattcatttatctatgctcaatactattatttagattactgttcgatgaaaatatttttaaaaattcaagtgggagattgttagaatatttatttatgaattattaaaaacttggtgaaaatgtgctatgtgagatccttagtcacacaaaggttcacttgaacaccacacacgagccgccaccacccaaccgatttgagctggttggtgtgatgtgtatctttttttttgggagaaaaattatttattaagtcactttagacagttggacaagagtctttcatacatccgaccaactctgaattttctagctatcccatcctccatcacctcctattagagaaggttccctttagtttcatgagcaatctggtttcatgatattacttctcccactgaacatttttgtgaaaatgtaaattctatgttgatgcactattttatggtatatccttctaggaattttatgtttttctttttaagtaggtttttgttcatcaatagaacaatagatcgggaaatttgattttctatacttacatatacctaatatttttccctaaactaata

SEQ ID NO: 273573 - DNA, 1011 bp, Cannabis indica
acactattcagtgaaattgaccaagaaatgatattctgtaggaaatcaggaggcgtggccttaaagttgcagtggctggaattccaaaaactatagacaatgacattccggtaccttttcataacatggtcaatcttatttttcaattcacaaatgtgtcacactcaatattcacattatcctgattcaggttatagataagtcctcggttttgacactgccgttgaggaagctcaacgagctatcaacgcagctcatgttgaagctgaaagcttcgagaattgcattggccttgtcaagttgatgggacgccatagcggtcagttaaattttacgttcgccacaccacaccacagtactaatctctacatgaatgttgtcatctgatgaatttttaagtgaaacaggattcatagcaatgcatgctactcttgcaagcagagatgttgattgttgcttgataccagagtccccgttctacctcgaaggacctggaggcctattcgaatacatcaaaagaagacttaaagagaatggacacatggtaatagtggtggctgaaggagcaggacaagaaaatctttctgagaatactcgtagcattaaccagcaagatgcttctggaaataaactacttaaagatgttggtctgtggttaacacagaaaatcaaggtacaataacatagacaaaagcaaccaacaaagctcagttgttgataaactcttaaaatgcatgtttcccctagctttctatcttaatttaatttattgttttgtaatgcaggatcacttctcaacacaacaaaatattaatataaacctcaaatatataggtaagttaaaagaaagggggtattttcattctttcttatatgaagcttaacaaagtgatgtgatgctgcagatcccacttacatgatccgagcagttccaagcaacgcatctgataacgtttcctgcacactccttgctcagagtgctgtacatggtgcaatggcagggtatactgg

SEQ ID NO: 273574 - DNA, 701 bp, Cannabis indica
ttcctgaggaaactccaaaggaacatttttctgggtttaggttcatgttatacttctttaatatcttaaagcatttggcgaggtctgaggtatgatccttgctttttattgattttaccaacatatcattgacgtaaacctccatgttttgccctatttggtttgcgaacattttgtttaccaatcgctgatacgttgcctcagcgttcttcagtccaaatgaaagtactttataaaaatagtcccatgttggttacgaagcttgtgtgttcttaatctggaacgtacattcttatctagttatatccagaatatgcgaccataaatgacataagctcgtgcccagcaattgcatccactaactggtcgatcttgggaagtgggaaacaatcttttggacactccttatttagatcagagaagtcgatacgagttctccaagttttgttaggctttgggacgagaataggattggctatccacgggggataaaatacttcgcgtataaaatcgttgactaacaacttgttaacttcctattttagtgccacttgcctctcgaatccaggggcctcctttttggtctctttgctgggtagtttggatcaacatttaagtgatggtacataatattagggttcatccctatcatatccccatgactctaggagaattgatcctggttcgccttcaaaaagatt

SEQ ID NO: 273575 - DNA, 727 bp, Cannabis indica
gagaacctgtggtaacagaaagtgaccgtaacctccttgagtttgacaaaattttgcagcccaaggactataggttttccctgactctgctggagaaggagctgaaggaaagcagcgagagcgattacctaattctcattaagtttttacttgtttgtattggaacagtgttgctgcccaagaatggtactgaggttagcactagctacctgcactctttaatttatacaaggtcaattaagaagaagaattgggtgaatgctggctttcgatatctaatgagctctctacagcggtacaagattaagaatacgaaaaatgttttcggttgcaccatatttttacaagtcagttttccccttattgtgatggcattaattttattcgctcatgtactgcagtgcttatagatgtatgtatttttgttttgtggcagcttgtatatttgactcatgttgactggactgctagtcacgtggaccgcactgtggctccaattgacttttggaacataaaacagtgcaaatcagtgtacaagtgaattcaagaccacggtggtcacactagtggaaaggtaaatgtactaattcaattttctgatgcattagaatttgatttgggagatatgctaactaatttttttggtgtactaagcaagtgaaattgactaacaccaatgtgttagtaccaagttttgaatccggtgtagttgggcaaccaacaaatg

SEQ ID NO: 273576 - DNA, 2844 bp, Cannabis indica
tgagctctattagtgtttgtatgattaacatgagtattttgatgcagttggtacttactatgctctgtaatagacttgtgaaccaatttgatgacttaggtgaagttttgtttgagttttatgaactttcggaccattaaaattggaattctaggtttttcgaaccaagtcaccacgtccagacttatggtcaccgtggccaagacttgtagagagcactctcaatttttctaattttgttttatgcataactttggactctgaactttaacttggatgttctttacatcgttggatagttctattatttgctccagtgttggagtcttaaaggtgaatattatgaaatgtgatttttgggattaacctattgtatgaaacccgaggattatgactagacatacaaatacttggttaagatcacatgtggattgggatttctcctcatacattggaaatcatataagacagtgaattatgcacacagagtatatatagtgtggtggcgcaattatatataatgtgattaattagatgaaagcatgaattagggtcattaccctaagttaatatgtgtcgtgaattagggccattgccctatgtatttatattgtgaattacattaataccctaagtaattatattgttgtgaattagggttaccaccataaatttatatatatggtgaattagggttattaccctaaatatatattgacttcagcatgctataatgtataatgcgagtaaaggattagttatgtaagttaggttattaccgtaaaacttcataatgtagagtatatgttgaatgtattgtattcatatatatgtcaagagttgtgtatgagacataactaagttagacctgataaatatcaccaggattaactattttaagagcataatgtatgaattatatatatatattagtagagttatgtgggtaaggcataaccaggttagactcggtaactataactgagataaacactagtaaggtcttaaatgtaaaagagacgtgtgagcataacacgtatgtctatggtacatagacattaattatagtgacattattgtacaaaattatgtaagttagtgcggtggcacaatatgtatgcagtagcctactgtatgaaatgaaataattattataataattcatgttgtattattatttctatcttgctgggcctttgctcacggtacacaatatgcaggcattagtaaagtggtgtcagttcaacaatgagttcgagggttttgaagatgagttgtacatgttccagccaagctacaccacgagagttgcgtccaacagaaattgaatagaaattacattttccccttagggtggcctatacaaaacaacttgttatactttaaaattaaatttgatcagattccagatatgtagctttaaattattttggttaatggtataatattgatgtttattgcaatttatttatttaccaagtttaatatttgttttaaatctcatagcctatataccccgattagcaggattagtggtttgtaatcacgacatgtggcgttcctttaggtaggatgttacattttcaaaaaaaaagttctgagtcgcgagaacctgtaagcttgaatgttcctccttggccaacatgagacaatttccaagagaaagtttgaaagcctacatcaaccgtttaaacattgaagctactaaaactcgtggcgtagatgatagtgcaagactaatggcacaagtggtaggtatcgttaatggttccatattttggaacaacctttagggcaagagcgcgtgcaacattgatgaattcaagaagcgggcacaaaaatgcattaacaatgaaaggatagcaaacaacttctctctccaatccttgcagtccactcaagccacatttgcgctgccagaacttactaatacaactatgactgctaactctctaaacaacaacaaaagagatggcatagatggcgaggaccaatgtcctaatatgagtaggagtaatggccctgatcaccctatgtatttaatctacaatgagttgacagaaacctaagagaccatctatgtggcgaatgagcatcgagttccattctgagtttttaaacgaatgaagcatgatcgagccaagagagatgcctcaagatattgtcaatactataaggacatcgaccacacaatcaatgaatgccaaaacctcaaagatgaaattgagactctagtccttaatgggacacttacgcattattcaaaacacaattttaccttgttatttcgtaaagacactttcttatcaatttttagttattaaactattacctttattttctggaatgtaagtagctaaactcacatttataaaagtactacaataatcagatcttttcctatatgccaaacccaccaaagagtaaaataggataatgcttaagctataaacactcggggcaaaagagcgtagatataaacgtgctcgtaacaaaaaaaatcttaaagtcgttattgccatgaatattttttcaaaatttcatctcagacagggggcaaagtcagtatacagatgagataatagacaagtgacgtgctctaaggatccataactcaaaaaattccacataaaaaaagatatatcaaatggcctacattgagacttcgacaagtggatcatgtgctaatattgtgtacccaaagagttaaggcccatgttgacaacttactcggactagcaaaatgcaagccaccatcgacaataatcttatcttttaaaccacatgttacaaagataataagcatcggcataaaataagcgtgccttgaagacactaaagtca

SEQ ID NO: 273577 - DNA, 528 bp, Cannabis indica
ggatgacatgctcgtcaaatctaggaaggctgggggggcatatagatgacttggatgaatgcttcaaggtccctaagaaatacgacatgaaacttaatcccttaaagtgctcctttacggtcagcttgggtaagtttctaggctttattgtcaatgcccaaggaattgaagccaatccagagaagattcaagccctcctggatatgaaatcaccaacaaaaaccaaggaagttcaaagtttgactggtcggaatgccgcactcagcaaatttgtttcaaaatcaattgacaagtgtgtcccattcttcaacattctgagaggaaataagcaatttgagtggatggaggaatgtgaaaaggctttttaggacctaaaaatgcaactcgcaaaacctcttgtgctctcacaacctctggacagagaagaacttggaatatacctggccatgatcagaaaagaaaacaatatccaacacccagtctattacatcagtaaaagactcattgaagctgaaggccggtatccat

SEQ ID NO: 273578 - DNA, 1297 bp, Cannabis indica
cctgcacaggccttctccttcaagaaaggttggatacatgcctccgctagggtatgtgtatgcctcctccctatcagttcgagaagaacgctagggttgtctcgatggtaacccactgtctaggctgtatcccaggatttctctcgttattacgagggatctcttgttctctagttctgggttgccttatgttctcgtttctatgagaagattctggcacgtcattgttttcattcctgtgattcgtaaatcactgcgatctttgcgttactcctcgacgaggtgcttgattattctgttgttcgtcttctagaacatccccagtttccgcaggttgctcctcatgagtgttctagcaattttcttgatttatctcctgcctcctggttcttgaacctgatggccttcttccttcaggatcaggttagttttgtgcattatttccttcagtcaccctggctatagctgcctctctttccaactcagcattacgttggttagactcgaccagacattgccggagttgttgattttccaattctactaatggtacatacctagtgggatgataggcatcctcacttctaggtacataatcagtattagaattggttttatcaatccctctttctgggttttgatcatgaccaccttggcttcttcttaaacgcgttgttgctaaagtggctcgcctctgtgaacccattggctctttcccaggcctacaattagtctcttcaggacgactattatcgttttggttgtcatcatccatggaaaaaatttttgttggttaggagggattttttgagttttatcacgtaggctcttaatgaaagcaccaaactgttaacatagattttcgttaacaaataaataatgagcttttttccgtaataaattaaacacagatatataagaaaactgagaagaataataatagtaataatgacaccaagtattttacgtagttttgcagttaaatctgcatactccacgagtctatcttatttaagatatttctggatactttatacagtattacaattagtgatcttttctcccaaagatcttccgtccctttttctgtagactatgcccctatttttaagaatataggttggtagttatttacatttaatttgaattacataaccgtttttcataaaatgtggcctttaatcaggttctatttgaacagttgtggataacaattgataactggacaacagcttatcattcctatcttcaaggtggttaacgttgacgtgggtagaccacctcgcgttgcatatag

SEQ ID NO: 273579 - DNA, 1274 bp, Cannabis indica
gaggcgcggcaagaatcaatgttcatcgtactggtgacgtggcggttgagcctatccatattaatcacgtggaagatgagggttaaaggccaagcttcttgcaactaccaaatcctgactttgctcacactaaaaatagggatattattcctaacattgggcctacaattgctcaatcattggagattccacaagagtggatttgtctatcccaaaagccctataaattccctgaacctactcctttgggatggcccaatttggataaagaggcccaagaaatgtttcttaagttgtatggagatgatgataaacctttacaaggcccaacaatctttgatttccaaccctccaaacttatctgaaatgattttgttccttttgggaaacactaggaaaagaaaggcacatacctggtatgaaccttatcctgccgaggcattacctacaccctcgaacttagcctcggaggagcctgaacaaactaagtggacgccatcaaaggataaattctatattggctttgggatgaagcatcgaattcaggaaggggtgccactcgtggaaggaaattgaagggcaaagctgctaaccgcactgttaaaggcttttcgggagtgaaaaccagaagtggtagaagacgcagacctggtactggggacaatagtggaagtgacaatctcaatgaattactcaacaactgtattgactttagtattgaatatgctagagttcaaaattttggaagtgacgaggaggcggctggaagcatgcccccactgtcctcatgaggtgcttagcttggaactgtcgtggattacgtcgatccacgacagagaggacccttcagggtttaatccatgattctaatgcagactttatctttctttcagaaactaaagttgttgtggagaccatggttaatgtgatgaatcgactggggtttgtgaatcattggtgtatctcggccaatggcttagctgggggcttttgtatagcatggagaattagtgtgttgtgtaatgtggtcgatacttatgagacaggatttcttgtgtctttccaagctgttatgggatgcccggagtggaagctttattgtgtttatggaactccatatggtgcttctaaacgagaattttggaattggcttacagaaaaagtaactgagtgtaatgagccttgggctcttgtcggagatctcaacgctattattgatcacacggagaaggttggaggccgagaatttgatgctagtgttgggttttatgccc

SEQ ID NO: 273580 - DNA, 853 bp, Cannabis indica
attaaaaaattaaaaaacaaaagagttaccaaacggcacctaagcttatagtagtttatttgttgaaatacacatttattttaaaataaacattgattgttgacatgcatgaattatttgaatgttagtaatatgatgatttgattgaacacacacacacacaaattgagtttgaaaagtaattatcttgagttgaaattctatgattgaagagttggattttcttggcattataaagtggatgtacaatttttgaaactaaaattatttttcataaagaccaatttgtttgagtatcattcattttatcattaacttactcgaggatgagcaagagtcaagtgtgggggaatttgatatgagtccatatttgtcttataaatatgatcaatttatgtattaatattcttaaattgattcttataattattaattagtgtgattttaatttggtagactattttaaagattattcatgtatttagaattttttggagggcttttagcatattttggtggaaaatagtaaaagtcagcgagctcaattttataaggcggaacttaatttagaattcagacagccttagaggaggaattggactttgagcttaacatgaaagttttagatctcattcttagctttccagaacatcttgaatcgtctaattctgagtaatattgggagagttatggacaaaatactattagtcatcgcatcaggaaatttctgaaaaaaagatagcgaaaataaagatagcttttcaagtagagttgtgatttttttatttttttattttcaaaagatgagttatcttttcttttagtgagatatttcctaatactataaatagaa

SEQ ID NO: 273581 - DNA, 630 bp, Cannabis indica
gccaagctaacttgtaaaccccggttctcacgacagcttcaatacataaggaccttcccagtttgggttaaactctccaatagctggatctcgcgtattttcaaatacacgtcttaacaccaaatctctaacttcaaaaagtctttttcagactcttttgttaaaatatctcgtgattcaatgttgataagttgtattggttatttgcgactcattacgtctttcttcaagtagatccaaggacatattcagaagttcttagttttcttcatgattataaaattcatgcatgtgggtcgcaatgttaacctctagtggtaacattgctttcgagctgaatgccaatgaaaatggagtgtgtcccgttgctattttctctgttattctatgggctcaaagcacttgtggtagctcatctacccattttcctttagcagcgtccaacatctttttgatagtatcttttaaggtcttattaacaacttctacttgtctatttgcttgaggtcttgatactgatgagaagcttttaataattttattcctcgcacaaaactcagtgaacagctcaccatcaagttgagttccattgtcagatactattctgattgggattccaaacctgcaaat

SEQ ID NO: 273582 - DNA, 664 bp, Cannabis indica
agacataaaaataatattcgaataaaatttctagacatttttttaagaaaaactaattttttaattaatgaaataaattataataagaacataacatattatgatatatcatgtaatttatttcattaattgaaagtagtcacaataacttttaattccattaaaaaaaaccttaaaaacattttatattgattctactagggtgtacattatatataaaataccataacaaatatttatagttgtctcaagtttttatacgataatgatatatattatagttatttaaagttttattaatttaaaaaattttataacatgtagtaccgaaaatataattcaaaataaattgtaacgcatgcgtttttgtatacataataggctgtttgaatttttcgtctcgaaaataattttaaaattgtaagaaaattacagaatatcttaaaacaactcaattgactggtgttgaaaaccaaaaaaaaaaaatggattgtgcactatagaactccctaaattatataataattaatatatattttcttatataaaataaaaaaaaaataatggagttcaaatttaataattaaaagacttaaaactgttgaagtaaatacgatttttaatagagaaattagcatgtatattgtattttttatttttattt

SEQ ID NO: 273583 - DNA, 2008 bp, Cannabis indica
ttgtgggtcttgggggagacctgaagatgaaaatggtgcaatttgtgggtcttgatcagattatgatattcacgctctcaatgagagcaccaaactgttgacctcaaaaagtgatcaaccgatagcggggtcgtatagatctaatgcttgccacgtatttacacaaataagaatgaacaacaataaacaacagatttgttatagaggttcaacccccttgtgttagcaggtaatgacctacttcccttttagttgtattaataccgagggttaatgctatctagatcggtgggatctgctataacatccttaggaatacaaggtatgaatcaataatggaaaaactcaagtgttgagatgatgctagtgtaggcgtgtgagagaggaagtgaggaagagagaatttttcagacttagacttagagcttggagaaaggtttcaggcttagatttttaggctaaggttaaggcctttatataggaggcttaaaaccttatattacagtttagattcatagatatttgcatattttgttagataattacaaaagactaaagtacccttgaatctagatattattcagtcattctgttggacttttgaagtccaattcacagcccatgacttgttgtccatgtgtagagtgcataggaaaccctacagagcatctcctggccggctaggcccctatggaggccaggctggccagccatggtgtagtcccaaggctggccggccagctcctgagagggagttggtctgtcacttaatgcctatttgaatgccgaggtctccgtttgtttaggtgctgacttggtctttctattggtgagatgtactgcaatgtggcactaattttttccatgtaagcatgccacgtcaagaggataaaaattgagataacagtactaaacaactcaaaccttaacaaaaacaaaacactaaaagcaagcttaaaaatcaagcttaacattaaaatttaaaggacaaaaaggactagggctcttgatcttcctaattgaccccccttccaaaacttgttgaattcctactgtaaaggatgaggttctagtcttaaattataagttctttcttggaatttctaaattgagagagagaaagaggtgaagaaaaggattttaattttcttttgttgtatttaagtattatatttattatttatttgttttattctccacatatttaaacttagtaaagataagcttatctccaataaacaaaagattaaaatcaagcttaaggcaaaatttttaagatatctatttttcttcccataaagtaactttagagtctaggagtaaaatggccaaaactcataatcccactcaatctcgaaattctaaatgtcaaactcatttgctccactaattccaagatacttcactgtatctatatgacagtaatgaccaaaatatcgcattttactattaacgggcataaaatataaaaaatataataattcatatatagcatatataatacacctagatttcaataaaatctccataattgagaaattatttctcaaacacttatttgtgttaataggtcccattttgtactaataggcatatactcataagtattaatttaatcactattaagctgttaattatctgctaattttcatgtataattatgcaatcattataaagctagtgtcacatagtgtgtttttcctattgggcttcacatctcactccttatgtttccatgtgcagagaaataatattttagatgtttggtaacaaattgaacttaggcagcatggggtacatctcgtaggatcatgaaatgtgtatggtctttgtgcaaaagtgcaacatgaaactaaaagataacatagttaaaacgtaattaaaaaatatataattacattttaaaatgttattaaatttgtataacataaattataacatttaaataacataatttttttataatatataacatgaaaataaattataatagactatttaataacat

SEQ ID NO: 273584 - DNA, 506 bp, Cannabis indica
gtggaaaacagtctttagggcatgctttattgaggtctgtgaaatcaatacagactcgccatttcttgttcggcttgggcactaatacgggattggcgacccaaaaagtcttttcaacttcttccttcagggctactgctcgttctttgtctagcagcattcgctttttttgaacttgccggaagttgggattgatattcagaacgtgttaaataatagaaggatcaattccaaccatatccgcatgtgaccaggcaaaaacgtctaggtttactttcagaaattttatcaaatctgattttacttcaagcaacaaaccttttccgatctttagctttctggtcgggatatctcgatcgatcctgatcttttctaattcttctacaggtccaacattgctgcttgggtccccaagtcgaggatccacatcttcatccccgccttggaaagttccctacttggaaatgttttttcccttgtctgtgctctggctcgaggatatttcc

SEQ ID NO: 273585 - DNA, 557 bp, Cannabis indica
ctacccccaaactcattaaggcaggggtcgagaattctgagttccataagaactaaagagaaaaaccaccaagaacattctctgtaataaatactctcataaatacacagattcgtggacaaaggttcattaatgtcccaaccacgtaaaaatctcgtgcattaacttcttacagctttcttaaatattattattatagtggttgccgaaaacctcagtcaacagatatgtttataaaatttaaaagtttatttttttatttaaaaaattaacataataatagagattagtttttttttttttacttttaatattatggtttgaatagagttaaaaaagaagaaagaacttgaatgttgatgattaattatctttttcattctgattttgtatcttcgaaaaacatattagaagttgttttagaaataataacactaaaacctttttcaaatttccctttataattacatttaaaatttataaatcatgttcaggatgctgtcacaatttttttaggtagcgactaataacttactttattacaaaatatagaaggt

SEQ ID NO: 273586 - DNA, 516 bp, Cannabis indica
gaaatgccataaaaggtacaaaaatatataaaataaaacattaaaactatcaaaaacttatatgagcatgatttgttgttgattattattggtaatacattttgattaagtagtatttattaacatttgaaaatatccaaagttaataataaaatatttaataaaaactattaaatattaatataaaaacaaatatataaaaatataacaaatttaaaaaatttaattatggtgctaaataactaatggataataaatgcaaaagatatcataaaaataacattagactttttgaaaaaataataaaattttaagtgaaaaatagtagtgtgaagatctaaaatattacatgtaaatataaatggtaagaatgattaaaataacttaaatgagtgtgtgaaatgaatttcaattaatataatttaatgagtatcatttataattaatattaaataaaaaattaaaaattaaagttgaaatcaatcacgcattaaaaaagaaaaaataatatataat

SEQ ID NO: 273587 - DNA, 1511 bp, Cannabis indica
ggtccattttatcatttaacaaaaacagaagtctaatctgtaacttttgctaaaactacaggaaaatccaaaatgatatttaccctaataataatgataaactctctaatgcaatttgattttgtttataatatgatgatttttattgtaattatttaaaatattttactattttggaagaaatttcaaattatttagattattgaaacgttaaaaaaaataaaaataaaaatgaagtatgcatgcaattttaatgtcaacaccataaataatttgattttttttttaaattaaaattttcataatatcttaaataactataataaactgatatataaaagaaataaagagtataatttttttgatctcaaaataaaaagagatctattagacattagtacatcttctttgaaagttacaccaaaaaattacacacaataatgataattgtgacataagtacttaaagttttgtttgtaatcagcataaattcaatatctttttagttacataagtatctaatgttagtaaaaattgtattttacgtccaattttattaatacaaattcaatttgaatttaataaaagaaaatttaaaaatacctcatactacatatttctgtacagactcaatgatttattatttgggtcttacatgcgtcttattaacgaaaattatatctttactaacattaagtagtaatgtcgctaaaaaaatcattacaaactccaaaagcttgactacttatatattgaatgataagtcacatatttatgctactatttacactaataaaactcataatagttctccttctcttgcaaatcctaatagacttaaagaactcttaagaggacccacccacttagtagaagaagtgaaccaaatctctacattgcacaatcatcaaaagaaggaaaaataaattataaacttaatcaaagaatgaacaagctacaaaacaaagcatgtgtatcaactcaaagctataaagttattatttttaataatttcaagtgagaaacccaaattattattagggttaggtttaggaagagaagtggggtttgagtgttatagtagctttatagcaacaacaacaacaaaaaaacaaatggcacatccctgattttgaggccacaacacgtgagccatggccaaaccaaacccatctttctctttcactaattaattaacaccaattatcttaattaatattcattattttattgctttattttttttttaattgataaagttgtgtattatatgcccataaaaaggaaatgggtattaataaaaataaataaagaaataaagaaaaagaagtggataatttaatatgtgtgtgaaagacttttatggttattaaactagtactttatgaccataaacgaccaaagattagattaaaattataaagctaagcggcggtactaaataaaaaattagccctaatttaagggtcttggccttgggaagttccccaattggaatctatacacgtttt

SEQ ID NO: 273588 - DNA, 720 bp, Cannabis indica
tttcttttacaaataaattgcaatttatgagattgagctttgtttggggggaaaaatcaaacttagaaacacacggcccaataaaatgaacaacgcaaaaaggcccacgttaaaaggcccacaaaaatgaatgcatccaggcccaaagatatagagggcggcctaactcggtgtggaccagttattgatccttaagggagcactacggacaaaaacaaaggaaaacgacaaacgacaagaacaagtaaagaaagcaccgacggaagcggaagaaagaacggaagagaataggtaaccgacagattgaagatcaactgtaagtgaaacgataaaccagaatccaatgaggcacccaggtaacttgccgacggaggaagtacttgaaacgcaactaagggaggatatcgaggtaacaccactagcgaaacaaaggcccccgacggaagaaaacttggatctcctcagacgagagctccgacggaaaaagaaggtctcgagcataaagtaagaaactgatactttcaagaatgagatgccgacggacacgacaccgtcggatttagggaaaataatagcattaaaacccactagaaacacagacatgtgtaacactggagttatctattagaatacgaacacgtggcaggggcaaaaagaataaaagaaagagaacacgtgtcgataaggggataagaggatgatagatcgtacatgcaagag

SEQ ID NO: 273589 - DNA, 617 bp, Cannabis indica
cttgaattcataaatagaagagatgatgtccgcataaaacatatattgacatcagaccagcttccatcaagcagggagctcgcatgcaccgaccaagagatgtgagttagcaatttcagaaatatcttttatattctcaagcttgatggtgacaacataattcctacattcgtgggatagattcatatctttagagaagaaaagcaaccagcctaagtttccttctacattcgtgggatagattcttatctttagagaagaaaggcaaccaacttaagtttcctacttgaccttatcgtaattataaaaataaactagtttcctattttatttattattaatttagggaactaatctcttgtaattaattcctatataaatagtgggctcatttcactattcaagggcaagatttttattcatagagagatataacaatgaagagagaaacctcgatcaaagagagatttactcagagaccggtgtaagaggttatgagagacaataagtcattcctattcatctgttgggttttctaccctaaataaaactcatttcaatataatcagatttacttattaatataggtcagaaataacatttaatgttgcatggtt

SEQ ID NO: 273590 - DNA, 921 bp, Cannabis indica
gagtggtaagggtgctttatgaggcattgagattgtctcgtcttattgacgtttaattgcatatgcatgttgaatatgtgatgaatgatgagtatgtttattatgtcatgttgtgattacttgcattttacactgcgtgtaatttagtagcttttcttgctgagtctctgtgactcacgggtgcttcgtggtgtaggtaaagggaagggtaaagaggatcaaccatgagtcataggttttccaacagtgtacatatcaaccgtagtgccccgggtaccagtggacaagatccacccttttggctgtattttgaattgtaaccctatgttgtaatactaattttaaaaacgagtgtaagagttttatacaggagatccccgtacttgacaatggttatattttataaaacttatgttttatctttaattaaaagttttaaatcccatcgcacttttcttaagttaataagttaggttaaaactaatttgtaaaagcacaaacgtagcgtccatgtgggacagggcgttacaacatgaatcagagcgaccaaggtttaaagatcctgaagattggttcatatgtatattggctgcctagactcgttcgactcatggttcagtaagtgttagttgttaaattacttattaattacctaattacttgcttatttgatatatgctaattattagaaaagcatagtaatgagcaatgcgtatgcatatgtttagaaatgcttattagcattgattatgaactgaaatatactaaatgatggaaagttatgatcgcaggtgtataaatcatgcacccgaggcgatctggtaggggtaaccgcgagctttctgggcttggggttggtagtgagggtgagaatcctccaccacaaccaaattgggaagagttatatgccgcgatgcaaga

SEQ ID NO: 273591 - DNA, 738 bp, Cannabis indica
aataataccacaaattctaccttatttcttcaagtcccaacaagctaagcatatctttccaatggaggtgataatgctttcatgtgtagctacttagcaactaaggttgagtaagtccaaacaatgcttgaacttactaataggtaacaccttagtgccaatatcagcatggttctcttctgacttcactttctccaactcgattacttcttcttctatcttctcccttatccaaaacaaccgaatatcaatgtgttttgtcttctcgtgatacattagattcttgcacaaatgaatcgaggattggctgtcaaaatatacccttgcctttccaactagaagcttcgactccttcagaattccttgtagctatattgcttctttgaatgcctctgtggtcgccatgaattcttcctctgtagttgaaagtgctactacgaattggacttgtaatttccaactaatacaatctccattagtttgaaacacataagaggtagtagatcttctagtaccttgcttgatgcataatcagcatccacatatcctttcaatgttactttctctgaaactctcttgtaagtcaatccaatatccgatgtccctctcaaatatctcaacaaccatttgagtgccttccaatggtttatcccaggatttgacattaacctactcaatatgcttaaatcatgagtaatgtcaggtctagtgctaaccatgacatacatgagacacccc

SEQ ID NO: 273592 - DNA, 869 bp, Cannabis indica
tagcctttgtaacatcacatacaaaatcatgtccaaagcaatcgctaatagattaaatttggtcctcgataaattaatatcccccaatcaaagtgctttcctccaagatcgactcatctctgacaataatattgtggctcaagatatcacccattccataaagcttaaaactcgtggtaaaaagggatggatggccttgaaattggacatggcaaaaactttcgacaaagttgaatggaattttattagagccataattaaaaaattcaacttttcccgagttttcatcaatctcgttctcaactgtctcacaacggtcacttttcaatttaatgtcaatggtcagatctcgggtactgtcatgcccacgacttaagcttttcaagtaactcccctcctgaaatcccatccccgtcttctccatccccttagtggaaaactctttggcatctcaatctcccctctaagctaaaacactttacgtataaagccttccacatctactcttccaactaaaaagaacatatcctttaggaagattacccactcccctttatgtgaccagtgtaatagagaggtgaaatcaatccctcatggcttgttcttttgcaagagaattcgaagagtatggaaatgtagtattttctatccctattgatttatttatactactgcttattttcatgaaattgcttataatatttattctaacatgaacaaagaagaagcagagcttttcctttatatttcttggtttgtttagcataacaagaataaagagattaagcatcaaacaacagatcaatctcatgccattcccttcagctcgctggaaactacttggtagaatacaaagctacatcgactat

SEQ ID NO: 273593 - DNA, 648 bp, Cannabis indica
tctctaccccacatgatacttctccaagagaaagaaggactatgaccgtggacaacatgaagaaaagaagtgtgtggaaaatacctagccttaagagtaagactaagtaaggaattatgattatgaaaaattctccaagcctgtttcgctaacatggcttggttgaaatgaaccaatgacctataacccatacctcccacaaatttagactgacaaatcatagaccaattcttccaatgaattgaaggacgattaggggaagagctcctccaaaacttggaaacaatcgattcaagttccttgcaaatttcggtaggaatacagaagcaagccatagcataagaaggaatagcttgaagaacaaccttgaccaaaatttctttaccagccttagaaaaccatttgtgatgccaggactgaattacagacaaaattttgtctttaagaaacacaaaagattggtacttagcacgagaaaagcattgggcaagtccaagatacttagaaataaaaggcttatccactaatttaaaagtatgcataagcatgttggaaatattttaccaggatctagatttactaccaagtatgtttaattaacatcctaatatgaattctaaaacaatgaaataaacacataagagttta

SEQ ID NO: 273594 - DNA, 1763 bp, Cannabis indica
cctattccaacaatctgtgtttgttgcgaatgggatctagtgttttatacaatcacttttgaataatttgtgcttgtattttgagtgggaattttgacaattcctaatttctcttgcttgaatttcactcaattgatagttactagtttttacattagctgttcaaatttctttgttagatttttcaaaactttgtcattttctcatttaatttgttctccaaatgacctaatagaaatttctttagtctcaaagttcattttcatatattggctgtaatggaggaagatgaagtctttccattctcatctgatgtatttcattgtaatggtatcattcacatgtttgataagcattcttatatgttggctattttgctcaactcaaattcaagtttttttaggatttggatttgagtaagaatttttatgatccaatagctaactttagtaactaattgttggagcatggacgacgattaaggttattactagttggtggtggaaaaaataatgtatgtttatttcaaatgaaaggcttactatattgattaaatattttgatgaataggaatatccttgcttcttttaatatgtctgatgagacattacaattacaaacctagtttttacaacttgtgggtaatggaggacaaagttgatgaagctttatctagtaatagttatagtagtatctattggatcaagtgtctccgagttgagctactagaaaaacatatgttttaagttcttgtaagatgaaaacataggtggtaaattttctcgactttaatatgtatagtttgttgataagtctcttgtgcacttggtgctgttggtgctacgattttctcataattataacttctactttttaatgtttcttatttgattctttctttttttctttttatatgattttgattcaggagctaagaacaaaaatgagttagttgtgaactttgttagtaggtaaatttttcatcctctatctctgttttgtgtgcttaaaactatttctcttttatgtatgtaaaattgaaaaccttgaatatttgtttttaaaaaatatacaattatcaattgtctcaatacttctttttaatttagaaaaaccagagtactcttaccttttttgtgtttaatcaaatgtgccaatgtgtctcaatctatctttagttttacaaatttataaattcaaattttttattattattctctttgattttttagtgttaggacatgagttgagtatcccatcggataatgtccattagatgcacaaatttaacaaattggtattgagtgaggaagattatctgctagaaacttaagctagattttcaagaactttttgtctattcgaattaagaactgaatttcatgcttaaatatttaatgaactagtacattcttattgaagaattacatgatttggtcctttggaattcagtgtctgtttgtaagatctctgagtagagaatctcaggttttatggtaaaaagtgatcacttactagttaatgatcttggagaaaagaatgtagattatgtttgatttcacatattatgtttattaatgactacttactcgagtctcccattcaagaagctttatacttgatccacttctcttaaaagtaaaacatcggtaaaaagtatattagacatagatgagaagcaactattgctctatgctcagatggttaaccttatcaacttgatgatttagttgcctgatatcaacataaaagagattgcagaa

SEQ ID NO: 273595 - DNA, 481 bp, Cannabis indica
aggcttatcaggtgatgatgggctttcgagtcttgctcgggaaatcgtttggtagactaccctgtcttgtttttaagcttcttaactattatgctttatgcttctagtgtctattttctctaaccatgttgtttttgtttcatgcagatgtctcagaagatgcttgatgctctaaagaagacagttggaggaagctcgagtgcatctcctccagcgaagaaatctaagggcggtgaagggaccccttccaaggaaaaggtgcctaccggggggttatcaacctttctaaggagctaactgttgcaaacccctctactccaaaagttgctaagtccaaggattctcgaggaggaagttcggacagacctgagcaatcaaaaggtggatccgaggtgatgtaggctcctaatcctcctttgccagtgcttccagaggccaagaaaggcaaggaaatgctcgcccactacatgaaccggttggt

SEQ ID NO: 273596 - DNA, 669 bp, Cannabis indica
agtccaaaaggcatgactaacaattcatacaatcaatgtttagttttaaatgcagttttccactcatctctttctttcatacgtatttgatgatacccactcttaagatgaatcttagaaaacacacaagaaccatgcaactcatttaacatatcatctaaacgaggaatgggatgtcaatattttactgttatgttgttgatggctcgacagtcaacacacatcctctatattctatccttcttaggaacgagaattactggaacaccacaagggctcctgctttctctcacatgccctttggtcatcaatccttcaacttgcctttgtatttctttggtttcattacaattagttctatatgctgggcgatttgggattgaagcacctggaataaaatcaatttgatgttctattcctcgaataggtggcacaccatgtggtacctcctcgggaaacacatcctcaaattcctgctaaatagaaacaacaacactaggcagcgaagaatcaagttagtttgtgtttaaaagagcctccttgtaaacgaacaaaagcgttagttgttttgtatgccaagcttgcgcaatgtcactttcttttgcatacaaattattttgttttctctctatttttttctcattgatagaactcttctctttcttttct

SEQ ID NO: 273597 - DNA, 780 bp, Cannabis indica
cagactttattgcgtgtggcagtcccaacacgtttcctccgatgcgacattaaatgcgagatgagtgctcagaggatgcctgacacctcgtggagacgctttgatgttacttaggcctccgggagcataggggacttcgtatgccttctccgagaggtaggtcccggatgctacctttcttcataaagacttagcaattaatttaaatgttaatatcttttggtccacgtgtccttctccgggttgtccacgtatattgggcaaaatcaggggcaacactagggtacagccactataccacatacactacgtacctcactatacgagtgttggtagggtttgtttcgtaccctgagtaccactgagtgatataccacatacctcagcactttcccctacttgtgttggtatcactgtactgtactcacaaaaaatattcactataccaatgcactctgtaccacaaccgtaaaagtgttggtagtgcaattaacaacttaagcatgcacatacacataacttatacatacattcagatattcatatcacacattatatacagttcttaccttctttccgaattcaagtgtgctggcccacctgaacggaaagtctcgtgctagatggatgccctttgattgctcctccttgaatccctagctaaaacatagagaatttaggaagaaaaagttggttcttgccctaattttgcctcagccgaaagaaagagagagagagttcaagagaaatgctatttccttctaattttctttttgattt

SEQ ID NO: 273598 - DNA, 567 bp, Cannabis indica
gagcttcattccaccctaacctgcccccaccagctggagaacatcgtggaggtggctggaatcaaaccctcaacatccgggacgtatcaccggccgccccgagatgcggagacgcccaaccataactatggcggcttcggggcttggagccagacgcacctgatggccggggccatgcttcctctccaagactattttattaattttttagtttttgtcggccttgcgccataccaactgattcctcaagcataccgcctgctttcaggcttgtttattttttactccgcccggggatggggctctcccagtccggcggagattttatatttttatgaacttgtttctgtccccaagaagggggacaaatttaaagatggtttttatggattccgggcccacccttccaatgatggggtggtcccttataataggcaaactcatgttaaggagtatcgccaccgcttcttcttctcctccgggttccgagcagtggagcacccggagcttctcacagagtgggtcaggattccccccgtatgagcggaccgcgcctactcaggtctt

SEQ ID NO: 273599 - DNA, 907 bp, Cannabis indica
ttttttttttttttagaaaactttacagtggtgggaaatgaatagagctctattatttttctctgtttgtggatttctagctaggagccagcttatttgtttatgctaacgaattgagttagtgtttttaccaatttttaacgcaaagaagaaatagaaaattgatgaagaaaaaaaaaagtggtgagataattcttatgtggaagaattgaataaaatgttttgagtgaagaacttagataagtgtatatatatccatattaaaatttacaattttttaagaaatttatagcaatatatttaaataatttatattacacttctataaaataaaaccaatgcatatacttttacaacaaattatttaaattttatttttgggatgtaaattatcatgaattatgtatatataaaaaatattagtatcatatcatgatgctcgaagtataaaagagtgcatgtcatgtatgtgcatcctataatttctcttctcataaaagaatttacttgtattaaaaatgatttttaatattatggtattcaagtggggacatgagttaattaatgttaccacaacagtgaatggataagggatttggattgccataaggagaattggcaccggctttagcttattaagtcaacaaaaatgttctcaaaaagtagaatcttctaagaatttggcaaatttacatattattacaagcttcaagctagattgcaataaatatacacaattatgtaaaagggtgtattgttgaataaattttgtttttgtcttgttatccaaatttttacacaaggtgacttaacattcacttgagtgacacgtgatagatttcattatctaaacaaaagattttaaccttgatgaaccgtgcagaaagattaggtactcaaagttagt

SEQ ID NO: 273600 - DNA, 628 bp, Cannabis indica
tggatcccaccaattataattaatcattttcttcttctgttgaaataaaagtaggaaaaatatgactatactatatacatgcaccatatgcatgcatgatcattactctaaagcaaatttattcagctttaattatgatcaactatagtttatttgattttactttgcagatgatcataataatcatggtctgattaccagaaaattgggaagactatcgactggccctgcgcctccctctccaacgaaagcaaaacctccccgtaataacattaacgtgccgcctgcccaaccttgactctgttaagctactaagttcaattttaaatattaataaataaaaatattttattagaaagagttaaattcctagtataatattttgtatgttgtaaatatcatatatatatataattacaaatatatgatataattacctaaaatatatatattattaatattttttgatttttttttttccagagcagtcactcacccatgctcctgggcgctagtcacaaaataaaactcatgaaacaacttatatataaatatattaaaaataatattggattgtactttgtttttttaccctgtgaaaaatagaaaattgaagagttacggcttc

SEQ ID NO: 273601 - DNA, 649 bp, Cannabis indica
aagcatttggaggtggtgttgtagagggtgcagcttttggctcattaaatgtggatcaacagattgctggagatttctgcacctgctacccgactcttttccatctgttggaggaaacccatttgggtaaaaaatacaaaggaaggaggaagcctcacttatcctgtttaggctataagcatcatcttgctgctgcctattatgtaatgtcaggctcaagttttggatttctacgttgtatacagcctgctgacatatttgtttgaagaatccctggggtcaagatcacaaggtctgtgcactagccatgtaaaatctgattaatgatgtaacaaacgaagagttagagagagagagaagagagaagagagtacataactaaaagggaaaggaatggaaatagtttggagggggacctagattattattgtttttttttttggtcagtttggtactgtggtgccttgataaatatatgtttttttttagtgttgtaggaagggtgatatgtgtgtttgtttgctgcccctttgtgtccagacgttattgtccgagttgtatgattctttcctcccattatgcaatgttccagtggaatgaagtttgaatggtagaacttacatattttcagacattttaagtttttgct

SEQ ID NO: 273602 - DNA, 535 bp, Cannabis indica
ttaattgaaatagtaaaaatctcacttttattatattggtaaccatttgtgaaatgtggtccggacccatctcggaatatatttttgcattagtcacaatgaattcgcactaataagccatgaatatgaagattggtttcacattaaattttgtttaaatggacccctaattcaaatattaaaaatatttttctttttagagtaaacttcaataagtttttttcttactcttacactcgttagtgttctgctaaaatctcacccgacaaatctcaaaaaatcatgaaatttcacacggaggaagccaagactgttatccatcacttttctattggtcatgttgagagaaaatgtacttttcaagcactaacaatcattttaatcgaaatagtaaaaattttaattttctaatagttgtacccctttgtgaaatgtggtctagacccacatcgaaatatttttcggcactagtcataataaattttgggccacatttcacaaataggtacccttattagaaatgtgatattataac

SEQ ID NO: 273603 - DNA, 1393 bp, Cannabis indica
aataataacatatgattttttttttttacatacaatcttcctctatatatttcaaaaactagttatattaaaaaataatgaaaatactttcaattttttatttttttaaatacttatggtgtaatttccagtaaaaaaggaaaaaagaaaaagaaattatactggaaatgcctaagcttagccactcctctcaccattttcatttatttcattcatctttgtgtagcagtaagtagtttaactacttccatttcatggcatatgcccaagctctttctgcctcaatctcctacgcctcggcttctttcaacaaagtttacctccctcacttctctaactttgtttgctttcccacaaaatataataaacaaaaataatattttcaattcaattcatttgactttttccttctgatagaaattatatatatttaagtttgttttgttgaattttgcttgtgcagtacctgagaaaaatgtgagaatgaatatgaggaagaaatctagttgaaaattttcttggcctacttattttttattttttttgacacatttcaggttttgcctcaaggattcccacaatccaaagggttaacctattttgtgatgaattcaagagccaaccaggctaagcaggcccacatttgtgcggagatacagagagaaagggacccaatggcaaaggatcatgctgggataaaggttcctcatgtgttgactgtggccggctctgactcaggggccggtgccggaatccaagctgatcttaaggcttgtgctgcacgtggtgtttattgctctacggttataacatcagtcactgctcaaaacactgttggtgttcaggttgttgttctgttctttaaatgacttactctttgtttggcatctgagaaaatgaacgagaaaaaaagttctgttggtattctaatttctgaagtttgttttgattgccagggtgttaacattgtgcctgaggaatttgttgcaaaacagctgaagtctgtgctatctgatatgcaagttgatgtggtaagttgattttgatgattggcgtgaatgttagtttaatctctttttctttcttgtctacatcatgtgatatcttggttatgagcttgtttttattattattattattaacttctttctcttcaagggcttagtaaaggtgttaatcaaactagtctataattaaatcatggtactgcaatatgatttattttgacttacctattgtcttgatgtgctctgttattgtacttacaagaagccttgataactagtttgaggtcagagttgtaattatcatcctgttcatagggtattatgaattgtacagaaacttcaattctcacaaatgttaattgataattacatccatcttgctttgt

SEQ ID NO: 273604 - DNA, 2456 bp, Cannabis indica
tttttttttcatgtgtatcatgtagaaagtgttgtagtaaagctgttgtagattatttctttgttctttcttttttatgtttcttgtggccgtttgcactcaatatatagtaagatgacattttgtcgtttacattgttttcccatttttttttactgataattataaatttattgaaccaaaatcataaactcaaaaggggatcaaaattgaaaagaaaaaaaacacctttaaaaatgcctcatttttttttaattgtatatcatcgcaaatcatcaaaaaagtattaagcgtcattttttggcgttgttaaaaaacctaaaagcaatattttgcatcaaaaattaagttcatagtactattgtaaatacatcattagacatcgtaatgttttaaaataaaagtttatatgacaatcacacatccgttaagcatgtgcattgttaaacacatgtcttgccttaaaaagaagtttcatagcactattacaaatttatcgctaaacatcgtatatgcattaaacattatatatttccttgaaagaaagtttggtgtcataaaaattgcattattacaacttacgcatcgcatttttgtgaagtttttatgccaccattgcaaatgtatcgttaagtatcgtaaatatatcataaaacatcgcaaatgtatcaatttcaataaaatatacaattttcagagcaggtctcgaaaaaaaaatgttaacataagtgttcgaaagttataaattagtattttaaatggataatttcatgagtttaagtttttgattaaattttgaattactaaaacataaattggtgggtgctcttctatagtgatggtgcgtgttcaatgctgattgggggtattaattgtttgtgttgttaattaagaaatatagaaagaaaaatcaattgaatgagtgttttaacgatggatttatggtctgaatactttgtttttgagagattcaaagagagaagagagagaaaaaagttagtttttttttttttgttgataaaatcacttatagcattaatctaattacaaagagagagaaaattattgaaattatgtcataggagagtctattagctaggctttgttttcccactcaatttattcactgattatggtttgtgttaaggatacgtcttatacccttatgatgaatgagagattttagagtggttttcaaggcataaagggggctgagacaagatgaccccatattctctttgctgtttgtgattgtgatgtagtatcttacttgactgcttaggtttggggctagacaataaagatttagatttcatccaatgtataagagtctcaatatcattaactcttttcggatgatctcatcttctacaaagctcaacatgggattgttcaatgtgttaaagatgtctttgatgagttctgcagtagtactggtcttggggctaaccgcaacaagtctcaggtagatttctaagccggagaagcaacaactactacaagttctctaggttgaagatggatcttttcctcttaagtacttgggggtgcctttgagaccaacaaagtggaaagctaaagaacgtgacattatcattaaaaagattaagctaagacttcactcttgggcaagtcgacatctctcttatgcggatagatctcaacttatcactctattttgttgggcctagaaaattattggatgagtaattttttacttcctcaaagcattgttaaggaagttgacaaattttgtctgtggttttatgggaaacaatggtacaagaagtatttcacttaattttttgggaaaatttttgtctccccaaaagcttatgggggtgggactttagaaggaactaaatggaacaaagctatgagtgccaagtatgtttgggcaattagttagttgcatgattttctttgggttaaatgggtgagtcatgtctatttaagaggtcaaaggttttggagttattagctaaaagctgatacgagttggtattggaggcagttatgccatatttgagccacttttactcaaactgagatagaaggagctaattctcatattcgatctaatatttaacttttttatttacaatttagtcccttttaaattcttcttacacttatactttaattttgtaaatatttttatacttatactctctttatttttattttaagtaatttgcggcataaatacttaagtttaactttcagttacaaataaatatctaagtttaatttttggtggtaataatacctaagttatatttctggaactctgtaggtaactaaccgttaaatattaagtcattaaatccacgtgtcattttttattggtatatttaaactatttttttaaataataaaaatttaatgattaggaccaatcatggaatgccacgtggcaatttacttaactaggtacctacataagttttaaaatt

SEQ ID NO: 273605 - DNA, 654 bp, Cannabis indica
gtgaggtataagacttctatccttatttttttatttgttcattattatattatgtcgtttgaataatggacgggacaatggattcgcattatttaaactagttatgtcgtttgaataatggacgggacaatggattcacattatttaaactagctatgttgtttgaataatggacgggacatggattcacattatttaaacaaagttatgattatgattgttatgttatttaaataatgtatagtagtttggcattatttaaattagatagattatactttatgtgacatggtttgaccgagaagataatggtcaaatacttgactgttgggtctatttggtagataggggggtcatttagtagtgggtacgattttactgaacccagccctccgccatttagtctaatagttcgggtttatttgccaaagtcgaactcgagcgtaatcattattatgtgacttagcttagaaactagtttttagctactagtgatcaaattaggtttatgtattgctatttgtctaattatgtgcatttcagttgtgtgttttcttttttttatttatgtgactacctgacacacatttccttactgagtttagtagctcacccttatcaaattaccatgtgcagaccaaggtaactgaaagt

SEQ ID NO: 273606 - DNA, 710 bp, Cannabis indica
tcttgttcagatcgtgtatgagctgtcaataagatgtatattaattataaatatatcttataacagttaggtattgtattttttccattcactttcaattgtgttcatatctttgaaaatgagagttttgttttgtagagaagagtatgttcgtctctttctctggtttatgtattttatattgtattgagtctgtaatcaagtcttcaacagaagaagaacatgataatgttggtatttttttttgtctaacctgaggttagtagtagggacagacctacttgcattcatgtggggctatgtctcccactaacaaaatattgctttttaaaaaattaaatgtaattttttttaatttgataattatagattaaaatagtagaaaaatccccacaaaattaaattaatctaataaaagtgattataatgcaggtataaatatttttaataataaataaggccccataaaataaaaatttttgatccgtcaaaggttactagaattgcccatgtattagcctatcaaacttggattaacaaaggtggcgtttagtaacacttttttaatcagttttctgtttttaaaattgaaaaagtaaaaatatttttcaaaaacatgttctataaaactgtttttacttttcaattttttaattgagaatcaatttttctttttaaaaaatcactttcaatatttttttaaatagttt

SEQ ID NO: 273607 - DNA, 843 bp, Cannabis indica
gaagagctctgtgctgcagtgaaccttgccttcgaagagcagaggtgtcaattcgttaaatggagggatagtgagatggaaacattgaaggctcaacaggcagcccttgatgaccgaacaagacaggctaccgcactgataaggaaagcttaccaagttgctaaccagcaactagccacaacgtccaacattccactgggcaactcggaagaaatttctgctgggcataccgcccaaactctaaacggtcagccgtccaatccccagtcacaggttccacctgtgggctaagtggtaggcggccagaccttgtctagctattcatcaagtggagttatacctaataaatccatccaaactaacggttctagccagctgaccggccaaagcaaccagtcactaagacaacctggtgtttcagtattcaacagactggggacagttcataatctctgagatgattttaatagaaggaggggtctggacgaacaatatgttcaaccaaccactcagcccggtattcgaatccaggacccaactttaagtgatcctgatatgacacaagtcggccaacaggctgaactagttcacccgtctatgcaagcacaattggatgaattgaaaaatatgttccaaggcctggccagccaaaaattcactgatctcgagttaaaccaagcacgcggatcacccttcactcctgagatcaatgtcctggagctacccctcaagttcaaaatgccgacctggaagatgtacacagggaaagaagatcccttatcacacctcaagtatttttgaaatgcaaatggatttgcaaggtcgaggagatgtgcggtgtag

SEQ ID NO: 273608 - DNA, 698 bp, Cannabis indica
aacacctacatgatgattaaaaactcattttagttctcattacaatagataaatagatattagagtacaatcaataaaatgttaatggcgattgaatagaaagattataatatatgtctcactataataataaaaataatatttcttatatatagtttctaaattcaaaatccaattatgttaagcaaactttattctataattaagtacaaaaaatagaccaaatcatgatgttcaaacttctgtttttgttaaatggttgtttacctttgaatgtgatctaatagtcaaaatagttgatttgtaaagaaaaaattcctcgaatatgtaatataaagcattttatcaatttttttttttcgagaagtataatattattacaactatagcatgcatataatttcaaaaatattttaattaagatgagttctatcatgtaatttagagagcaattataagatcttatcttatacaaaaaatttatttattgagacgagcaaagtatcaatattaacaacattattacaaaaaaaatggtttgatatatataccataaattggactctatgcaagttttatcggttggtaataatttacatcgtcgtcacccttgtacgtacatgttttacataatacaaagttttcatgcaatttattaatttttcttcgttgacttttttttggagggaagctcgttg

SEQ ID NO: 273609 - DNA, 2789 bp, Cannabis indica
tttcagaattacttcagcaatttgccccaatttgaacttttgttccattttttcctttgaatcatttcctttttcctaacaatttaatttctcttttttcaacaacaaacaaggacatttaattaaaaaaacacaactaaaataataatttttacaagacttaaaagttagcttactaaatagaaaatgaaactaaaactaattaaaattaagccaacaaacacattttcattactcttctcacaataatttcagttaaaaaggataaaaaaataactctataccatagagtgatcatatttcatgaaactgtttttccattccacactcataatgccttcactgtggagcataaaagtttcttctctgcatctgctacatattttttccataataatgatcattttcttaatgaatctttaataacacatgttgcacaacaacctgttatttcccggcctgcacctactgctattgacagaattttgcctcataacagacccatcagaacctctcataaaccttcttatttacaagattaccattgttttcttgctcatactaattctgttaaagtattgcaggagccttcaaaagttacaccttattctctctcacaggttgtggattataacagactttcacctacttttcgagcagttattttggccatttatagtcactatgaacctaagtttctcaatcaagctaaggtgatccattatgggactatgctatggattgtgagactgatgctcttgagaaaaaccacaattggatcattgtttctttaccaactgaacaccatgctatgtggtgtagatgggtttataagatcatatacaatgctaatggatctgtagagcgatgcaaagcaagacttgtggctaagggatataatcaacaagaaagtgtggattatattgatagcttttctcctgttaccaagttggtaactgtcaaacttatgcttgcccttgcagtaataaatggatagtatttacatcaacttgatgtcaataatgtattcttgcatggagatctccatgaagaagtgtatatgactctacctcctgggtataatcctaagagagagtttccaccaaatgttgtatgcaaacttaaaaaatctctatatggattaaagcaagcatcaaggcaatggtttgcaaaattttctagtgctttggttgaggaagggttctatcattcaaccacagattattcattgtttatgaggcacagtcgagacaacttcatcatccttcttatatatgttgatggtgttatcttggcaggtaataatctggttgagatggaggctcttaaagttcaattgaacaataaatttcaacttaaagatcttggagatcttaagtgtttcattggattagaagttgctagatctcctaagggaatcattatatctcaaaggcattatactttggaaatgttagaggatcttagtcatttggggtgtaagccagtgaatactcctatggaagctaacctgatattaagtcaagatgaagaagacagattggctgatcgtaaactttatagaaggacgattgggaaactgcaatatttgaccattacaaggttgtatatatctttttcggtcaacaaattaagccaattcctggttactcccaaagctagacatatgaaggctgttgagagggtccttcaatatgtcaagaattgccctggccaaggattattcttccctgctacatcagagattcaacttaaagcctacacggatgcagattggggtgcttatcctgatactagaaggtccactacgggattttgtatttttcttggaaaatctctgatttcttggaagagtaaaaggcaacatgttgtttctagatcctcacctgaagccgagtatagagctatggcaaatacctcatgtgagcttgtttggctgctatctgtgcttaaggagttacgaatcgaacacaaaggtcatgcctggctctactgtgacaataaatcagctcaatacattgctgggaatctggtttttcatgagagaacaaaatatatagagattgattatcatttggtgtgggaaaaagtgcaagaaggagtaattaaaaccagttatgttggtactaaagataagtttgctgatatatttaccaaggaactttttcctactcaatttaatggtttcaaagacaagatgggattgataagtattagttctccatcttgagggggagtattaaaataggcttgttatttttcttttactgccactgctttagtggttattttcagttgtattctgttatgttagttttattggttagttgttctttcaactaactttgtactgtactcctcttgagcttgagctatataaggctcactcccttctctgattcattaatgagaaatatactctgttcttcctcttctcttttttctctcgttttatgttttctggtttgtaataatattagaatacaatgtcaaataatgttgcagcaaatgttaaaaagtttgtttattttttttatgcaaattagcattatgtttaaatctttgtaaatggtcttatatgaggtaatggtatggtcattcaggatcacctcagcattgttattacgtctacaactacttggtctgttagagcatctctaatggtaaaaaattatatggatgcttacttagctggattgatgaagtggtaaaatattgagatgctataccattggagggaaaagaatactattctatgaatatttgtgaatgatatacagtagcattga

SEQ ID NO: 273610 - DNA, 3457 bp, Cannabis indica
aattttttttttttaataatagtacgtgcatgtgatccaagtcgtccacccaccctagctaataaatacaatatcctaataaactaattaattatatatttggtatgaaaaagaataaccaattaattagtgtgattatgtacgtggcctaccatgcatctgacgtcaatgcgtattatatataaatgtaaaaagtttcatgctcagtctctatagggtaagattacaatatgtaactgcaaacttttatgcataatcatgctcaattttacacttaacgaacctactcaatgttttaatttttctctttgaaatgattcatgaggaatatatgctaaaataagattcccaataatataacgctgctgcaagtttgtttagagacacaacttatctctaagtttataaatatataattcaataaaatagtatgcacatttatggtcgtgcctaacactactatacatatatttttaatttacatttgtttccatattaatagaaatacattttctttgatgaaagtgatcagatcatataattaatggattttgtcactggtgatggatgaaaaatatacaaataaattatattttgtcgcgtatatatacattattaagtgtagtggtgtcaaatcttagtatatataatcggagtactactgactatgcgttactttataataatttattcaaatatatatagatgtaaatttgatcttgtgacatcgtacatttagtatttaaaatattttatttctactttttggaaattaagggacgtgggatatagagtgtcgatacacgtgaattgtacgcagcactacaagggggatggatgaaattattacaagtagataagaataataaatgattgatcggaaaagtggagagtggggaagaaatgtatttatttggtgggaaagaaaagaagagtggaagacttaaattaaagaaatgttaaaacacgtgactaatatctttatgaggttgtaatattgctattgatataattttcatttattttaattttataaaaattatttaaagctgctatataaattacaagatatctttatgaggttgtagtattttagtgttccataacaatacactttaaaatataatgaattattacttaagtaggggatggagaaaatttaatgaagagagaagatgaaaaaatatttattttattattagaaaagaaaaatagtgaattaagagaaaaaaattactaagtctcattatagtattgtaagagtaaaattctttttgattttaagaccaatacaatttcagttacaaaattaattaaatcacttgtttggagccttattaagaacctcaacaggctctcaagatttaatcgactcaacttaaaaaatagttacaactgaaatccagttcaactattttacagtcaagctctcattgacttacaacatatttataacctaatttagtgcacatgattcaatacctgggctagagagaagatccatggagagacgagtgagagagagctccatttaagttgtttgcgagaaaacaaagaaagaaagttagagcataatcgtgttaaatagaagtagtgtaaagggagaataaagatggtaaaatattatcagttaatgaatgtgacttgaaatcaatagagaagttgtaaattcatacgtgaagatgatggaaactcaagtatctcagtggggagctcgaacaaaggacgtatcccatctttttgtaggtgaaccttgacacaatattcatcatgcttttcttttactatttgatttcatcactttatctctctgtgtattttgattttgatttgtgttttgctgtgtttgtgtgtggatctctaaccctaaatcgtttaaagagttcctagggttctcgaagatttgttctaaccctaatttctgaagactcgtggttttgttaaagttgcttttgaatcaagagttattgggcttgatcgggttaggctattgttttggggctcatggatggatgagtgtaaatttgcaataatattagtttccaattaataaaattgcctaatatcaatttttgtgttttctaatagtggtatcagagcacaacaacaacaaattcaacataacaaagaacaagaaatcaataattctggaggaagaagatccccaagattaggggcaattcaatacacaagaacaagtcttcattcttgaaggactagtggatgttccactaaacaattcactagaattctctaaatctagctcttctattttagatttatgtactggctataataaaatgagtaactttaaaattgatatagatgaatttgatgggtcaagtggttataggatttggagaaacaagattagatcattgttggcatagtagaagcttaagggttcttgaagaatgaattgaatggacgaagggtacatctaagatacaacaagaagagtaccttgaaactgcaacatggatcttaatctttaacctatcagatgctataatcaggctttggataaggaagagactttagcaagggtacagaagaagttggaagagaaatttccaatagaagtctctcaccaataagatctttttaaaggaaagatctttggctacaagatgagttactccaagactctagatgaaaatcttgatgagttactaaggatgcatattgcgcttgttaactctggagagaatgagactctaagtgataagtgatgaaaagtaagaaattataattccaaaatctctacaagatttattatgaaaaatgaagatttctataaagtatgtaaggacgtcttttaccctagaaaaagtcatgccagcattgaaatccatggacttagagatgaaaacagagaaggggggactctaatggtgaactaaacttgagtcatggcagatcacaccacaagaagccctataataatagaggaaagagtaagagcagatgactacataggggaacaggaaatgggaaaggcagatcccaattaagaggaccaaaaaaccttaatggttgttatcattgtggcaagcctagccactttagaagtgttatacctgatttttaagaaataaaaaaagtcaaccttgaaactttgaccaaggcttacaaaggccaaataaattaagatatcctatttgagggcccaaaagatggcacaagtccctcccactaatttgccaagaattaatgtgaccaaagcattttttctagcatctatgtaaaccacacaatatattttgggcggtttggattttcattgtattatttcaagttgttttttttgtcagtttattcagtttggttttggcaatttattctggttggacggtttgtaaattttgttgaaaaaccctaatgacaacaattacttttgataatattttttatgtatgagctgaactggcgaaagtgatagaagccttcttctttt

SEQ ID NO: 273611 - DNA, 1821 bp, Cannabis indica
tttttaatggccaagtatgtacagagttccagaaatataacttaggtatttatttgcaaccaggagttaaacttaggtatttatgccgcaaattactttattatttataacgaaaaaaagaacactattacatatccttgtatttgtgaatttgtttttcaaatgaaagatatagagtgtatttttgttttttttttgggaaaggcatttttttttagaaaagtttcactattattataaatcagaagtcatttacaataatagagaaaatagaattggggatttcacccatccaacaagaatttttatctaacactaaagcatgtttagctaaaccatagcaacatggttagtatttctccgaatatgagagacaacaactctagaggaaaaatgatagaagacaacgaacatctaaaattaaatcattgaagcacgataaatctgtagatatagaattcaaagtatttgaaactcgcaaagcatcagtatcaatgtaagtgatcggtatttgcagttgcaatgcccaatgaaggctatggaatagagcttttgcttccattttatcataacgaaaacaactttgaattggtttagatagcacagctagcactattccttcatgatctcgtattatagctctcacactaagtacctttaaatttttatttatagcaacatctacattaatttttaacccatttgtgctatgaaattgtttctggttgatgcagaacaaacccgttaactattccaggttccatgactggatctttttccttgaattttcatctcgcttgatggtacttctctaagtaattggctgcaaacaatgaagtttggccaccatcttgtttacttccaccatgaaacaccttgtttctctctgaccaaatagcccacatgtagcaaataatcaattccaagtcagatttggagtgtaatgaagaaagaggaatcaaataatctccattatacatattttggcatgccccataatcaatggaatttagtatgtttctaaactgatttggctctaggacaactaaacaggcatgaccaattgattcacaagcatgagtgcacatggagcacgctgccgcatcaataatcttcttgtcaaaaagactagctgctgtggagagtgcattgtgtattaccttccaaacaaaaatcttgattttgggaggaaggtttaagctccaaaaacttttccacaagtccctttgattatatgagggagaggattcttgtgcctcatcaaaagttgctgcaaatggaatccagatttaacagtatatattcctgatgtttatgatgccatattagttggtctttagttggaaaagagcttaaagggattgtaactattcgatccacatcaataggttcggaatagttattcaagagctccaaattctattcctttttatctgtaataacatttgccactagtagcatctctggccccatataagttaacggtttgcattcggtgtgcccaagaatctatttgtctattccacattgaatatgaaaatcattttcaactttgtatcgaaggccttgtaacagtagttttcgaccctaatgtatactttatcgagtaagagacggagaatgcttaagccttgcatccaaaaaattattgttagagaaatacttgaattttaataagtggcttaacaaagagtttggcatctcaaagattcgccaaacttgctttgctagaagagctttgttaaaatgaatgaaagaacggaaacccattccacagtcaagcttgaatttacataggaatttctatttcttcgctagaag

SEQ ID NO: 273612 - DNA, 642 bp, Cannabis indica
accagcaaacataaacacttaaccagatcttgatttacatgaatcagtacaacaagagatatatgaatttgagtagccaactatggagatacctcattaccttctttgcagctttccagtggtctatccctgggtttactctgaaatcttcctaacactccgacaaaataagcaatgttagatcttgtgcacacctgagcatacattaagctttcgacagcagaagcataagaaatgttcttcatttcttctctttcaaaatcattctttagacactaactcaaatttaatttatcacccttcacaattggagcaacgcttggtgaacaatctctcatccaaaatatttctaaaactctattgatgtaggcttcttgagataaacctaagatacctcggtatttatctctatgaatcttgatgcctatgacataggatgcttcagcacatcttccgtagtgaaaatcaagatgcacatctcaatgcaagggaagcattaaggctagatttggagaatttaaattctcttttctctgtagctttcttgtattgctacttcaaaaaaaaagcagcatttattatagaattatgatatggtaggtactataatgtaatcctaaaaattatgttgggttttatgcc

SEQ ID NO: 273613 - DNA, 3031 bp, Cannabis indica
tgctctacaagtttgaaaaccagaaaaagaagaaaataaaccagagaaatgaaaaatgctcagctcaaagaacaataggctggctgctctatatttatactgactagggcatttacagaggaatcatctagaaatggtcgtacaatcatgacctcataattacaaagtaaagaataaaataacagaattgtacaattgaatattctctagggatctgtactaatcattacaaaattggttatgacacctcagcaggtaaaagggtaggtgaggaatttcatttcttgacagcccatctcaaacttggtggtgtttcaactacaccgagtttgtcaactaggaaatgaaatctgtgatttgtgagacttttggttaagcaatctgctacttgatcactagagggaacatagcgaacttccaggcacttgttaagaatcttgtctcgaacaaaatgaacatcaagctctatgtgctttgttcgagcatgatacaccggatttgcagccaaggcacttgctcccatattgtcacaccatgttattggtgtatattgaagcgggaagtcgaattctttgagaagggactgaatccatgaaatctctgctgaaacatgagcaagtgcccgatactctgactctgtactagatcttgaaactacagcttgtttctttgacgaccaagaaacaagtgtatccccaagaaatacacaataacctgctacacttcttcgatcatcagggcagcacgcccaatcggcatcagaatatcctgtgatggcaagcctgtttgagtttttgatgtgtaaaccatgatacatagtgccctgtagatatctaagcaccctattagcagcactccagtgagctgtagtgggggcttgaaggaactggcttaacttgttgactcaaaggagagatcaggtctagtgtgagtgagatattgaagccctcctatgatactcctatattcagtagggttgtgtagagggtctccatccgatttagatagtggcttaccgactgtcattggtgtggagcaagacttcagatgcatcataccagtcctttgtaggagttctctcacatattttccttggtttagatacaagcctgtctcatctctgtgaacttcaataccaaggaaataatgtagaggacccaaatctttcaaagcaaacatattattcaacttgttaatgaactgatttaatttactagtattgttgcttgtcacaataatgtcatccacgtatatcaacaccataacaactagaccaggtactttgtaaaagaacaaagaagaatcagcccttgaatttctgaaatgccagttgataagagtgcttttgagtctatcataccaagctcttggagcttgtttcaaaccgtagagagactttgtaagcttgcaaacataatctggtttggatgcatccacaaacccttgaggttgttccataaaaacatcttcctccaacttgccattaagaaatgcattattaatgtcaagttgtctaatctcccaagactttgaaactgcaatagtcaatataatcctgacagtggaagcttttataacagggctgtatgtttctccaaaattaattcccgctcttgtttgaatcccttggcaactaatctcgctttgtacctctgaaaagaattatcagcatttcttttcactttgtagacccatttattcccaataacgttcattccagcaactcttggcaccagaatccaagtcccatttcgtttaagtgcaaccatttcagttgacatagctccattccaaccattgtgtctaagagcttcttcaactgttgttggttcttcatcattgtgactcaaactgatttggccagtgtaaaccttaggcttgaatataccagccttggatctggttaccatcggatgagatggaattttgggagcaaccacttgatctgaaacttcagctgaagtatcaccttgcaattctgaaacgtgagatatatccctgtccaggttatgactgcctgaaccatgctgaaaactagcaggaataatatcaatagaaccagtagaatctgaaggcaagcgagtttgtgatacctggttttgatcatgagaacccgactgtgttacagtagtttctccagggacttgagatggtgttgcacgagcctcaggttgttgtgagttggatggagaggaagacctgtgggactgaaacaaggctgaccaagaagggacactaacacagatttcttgttcaggttggtagttgtttaggaaacctgttttaaagggaaaatcttcctcattgaatataacatttctagaaataaacaatctacctgtggagctaaggcatttatagcctttgtgggaatcactataccctagatttacacatttaatcgagtggaattgaaacttgtgagtttgatagggtctaatacaaggataacaagcaactccaaagactttgagaaatttataatcaggtttctttttgtaaacaacttcataaggggactgatttttcacaacaggtgttggcaatctatttatcaaatagacagccgtctgaaaagcatcccaccagaattttaaaggcatttgtgcttgagctagaagggtcaagcccatctcacaatatgcctatgtttcctctcggctcgaccattttgagccgaggtatgaggacaaggatgttgaaagtctattccattttgaatgacacaatcactaaaggactgaaattcacctccccaatcagttttgagagctttgattctcctctcaaactgattttccactagctttttaaactgaataaaagttgaaagagcctcattttttgttttgagaggataaatccaggtatagcgactatgatcatcaacaaaatgaatatagaacttgtagtttgtgttagatgtgactggtgcaggaccccataggtctgtgtgtattaaatctaagacattttgggcacgatgagaattggtattaaagggcaaagcatgcgatttgccatattggca

SEQ ID NO: 273614 - DNA, 588 bp, Cannabis indica
gcggatgtgcattgactacccggaattgaataagctaacaataaagaataaatatcctttacctaggatcgacgatctttttgatcaacttcaggggaaaactgtcttttcaaagatagatctccgatcgagctatcattagttgagaatccgagaggaggatatcccaaagacagctttccgcactaggtatggacattatgaatttttggttatgtcttttggactgaccaatgctcctgcagcttttatggacatgatgaatagggtattcaaggatttccttgatatttccgctattgtatttatcgacgacatccttgtgtactctcagtcagaagaagagcatgagcaacatctccgaatggttcttcagcgactccgggaatataagttatatgccaagttcaagaagtgtgaattttggctatctcaggtgtcctttcttggacacattattagcaaggacgggatcaaggtagatccgggaaagatagaatctgtcaggaattggccaagccgaaaacagtgacagaagttagaagtttcttggggtctggcctgttactatcgtcggttcgttgatgg

SEQ ID NO: 273615 - DNA, 2453 bp, Cannabis indica
ctggtttcgctcttgcttaacggctccaccagagggaagaaggatgcactaacaacactatacaagctctgctcagtgaaacagaacaaggagagagccgtaagcgccggagtggtgaagccgttagttgagctggtggcggagcagggaacggggttagctgagaaagcgatggtagttttgagtagtttggcggcggtggaagagggaaaggaggctattgtggaagagggtgggattgcggctctggttgaagcgatcgaggatggttctgttaaagggaaggaatttgcggtgttgactttgcttcaactttgcgttgacagtgttagaaatagagggcttcttgtcagggaatgtgggattcctccactggtggctctttctcagtccggtagtgttcgagctaagcataaggtcagttagctatactcaatttttcccagcttttaaattctataatattattctattagtgtgccgttttataggcattgtaattgttatgatacatttgagacttggagttaaatttgttaatgttgtcaaatatttgaacattgccatttatatattacatgatgtcatttaatgtgatttgggttttgatttttagtttcaattttaatggtgtttataacttattgtaggctgaaactctacttgggtatttgagagaaccaaggcaacaagaagctgcctcttcttcaagtccttgaaagaggacgaaggagaattaaacttcataatttagagaggagattatatacagtgtggttggttgttcatgtatatagggaagttggcttgttctcttttttcttttttctttcttgggtattgatttccataattaattgcatgtacagtgtgtttgagaaactagggagaaggattgtagggggggagaagaatataggggaagtaaaatgacattttagatgtatgattaactaagttttggttcctttccccaacttttttaattttttttttcttagaggtggaatacatgtttggcttgtgggttctgggttgatgagatttgggttattgtccttgtgttttgtttgggcaaaacccaatgttgttaaaaaaagtaaaaaaagttcactaatcattttgttttacttagtgaaattaaagatagaaaatattatgaaatgcttggtcttggagcttgttctttctttcatcccgtgctttaactttgcagcctttgcagcttttgagggtttgtgttctgtcatattgatatggtatactacacaatcttacaaaaaaagggaaagaaaatactcgaactttatattccattagaccattcttttccaatttctttaattattagtgttttttcccaaggttccttcctagttggtcctggtggtactaaaagtgtctttgtttagacaacttgtagttgtaataaggtgggtggtgatacagactcgtggtctgtcctccaactgattcccatgccatctttacgcttctcttaacaacgtgaaagaaaatgaactttatactttgcttaatgaagcagggatagatagaaagtataggaattgaacctaactgagtagtgttactttgactatttttcactgtcatttattttgtgttcagttcagttctgacccaaaaataataataatataagatagttaaatatggcatgacataataatagttggattggataggaaggcacaggcacatatataataatccaaatataattaattgagatagtctaaaacgaaaggagtagtaatgttaatataaggaggatccaaatactggtatggtagtagaccctcctctaaattaacatgcttgtcttgggtgtaaagtcgcctcggccggtgtgttgttcacttgttctagccatttccaccacctgtcgtacatgcatatatctggcaaaatccaccaaccgatctaaccccacacacaaaaaagaaagagatttatatttttatttatttgttatgaatgaaaataataataataataataagagggttgtaatgtaacttgtatatatgtgtcttttcccttggctttccttgtcgttacttcatcatgcattagctggcagaggcagagcaggtatatttttgtccctgtttttgtttgcttggcttgattgcaatctcataaattaaaatggtttagcgctttgcactacttgttttcaatttcatatttcaaagagaaagaggtgtcggtgctcatttccataataatgttattatgattattaaaaataatgaaccttttatagcgtgaccacgactgatatacatacttcatacaatggggttggaaagtgagtttagggtgttactaaagcaaacccctctaatattttgtttacatcaaatcaaactattaatcaatttcatcatgaaataaaaaccatttattacactatgaggtttagtaag

SEQ ID NO: 273616 - DNA, 863 bp, Cannabis indica
aaattatatatttttgtcattgaaattatttttgatataggaatcagaaagagctattaacttgaacactaaacaattgttgatgttttgaaggagttttcttgattagggtcgggtttgagttaaggtgggctaggcctgcacttagggcccaaaaagaaaacattttccttttttgaaaatatacataattttttagtggttttcgaagatactacatattttttataaaggcctcaatttttcttttttttcttctaaggcctaccaaatttcaggaacgtctgttttataaaacaagattttcattacattctgccttggaccttggcttaaattgcatgatccaaattgactcctttctaaaagagaagcaactatagagttaaactgttatatgaaaaattgtctaattagtacacttttagtccatggttctggaatccggattggtcatttttgctcaatatggagtgttgtgctgatctcattgcattggttctgagaacccttctctttcacttagacaccgagccttgttaattttctttgcttagtcacttgtgtttcatattgacactgatttggcttgtaataacagatctataacggctaagaacttcctaacagccgttcggagctacatggagaagcacgaagaggcttcgccagtaagtgaaatggttacatgcaaaaaagatcagacaatcaaagactaatttgttgctagacgccaagaagattcatcgagtatacgttgttgatgatgacggaaacataggaggtgtaattacactcagagatatcatctcaaggctagttcatgaaccacgaggctactcggtgatttcttcgatggtgtt

SEQ ID NO: 273617 - DNA, 868 bp, Cannabis indica
taatgtaatctaacaggtaatcataacatgcacgctaaacatctaatcatatatatatcattatactaatcttacctcgattctgaattcaagtgtgccagtcaatctaagtggaactgcagcccgacagtttacagactcctatgtcacattatacgcaaaactaataagtgatacactaaatcactttctatggactttaaactcgaaactaaagtttccttatcaatatctagcaagacaaagtcctaagcatcgaagaaacacaagaaaaacaataaaatggggaacctgccggaaaacggcaagttgtttctgaaaaacggtaggctgtttttctgggtcctgcaccaaaaaaataaatcaaaccaacttaattagcctcagaaaatagcagcaaaacaaatcaaacctaaacaacaactagtcccataattttcatgcttaaattaatcaaaacttgcaaaaatcaaaggagaactaggatctttaacacctgaatgcagctagaattcacccaaaattgaagaagaaaactctgaactatgcctggtttgcttcagctgaaaagagaagaagatggttcaagaggtggaattcttaatttgtccatttccttgattaattttatgtttctcttttccactaagggtaattctaaattatctaatattttctcttaaaatggccagctgccaagcaaagaaaaagccacctattcacaaagtcaaaatgattaaaataccctcactttcataataaatggtaaaataacataaggataaaatggtcaacaactataatcctaactaatctcgacattctaaatatctaactagattgccccattattctaaaaatactaaat

SEQ ID NO: 273618 - DNA, 663 bp, Cannabis indica
gaacacttttctagataaggctgtaaaatagactactacaacaagatgagagctagaaagtccctatctgacatgatgtctgcacagggacttcgggggcaaatgttatcctaattttagtcctcatgacatggcattcttaagtggatagaaccagaaccatgtggcagtacaactcactaaaaggcaggtgaagtcaacacctgagcaaatgaagaccccgacactcaaacggggatcaagcgacaaagggtggtcgaccagccttgggatggcaccctgaccgaccaccctggccatcaccctgactggcccccctggccatcatccttgccagccaccctggccatcataggggcctggccgaccaaggagtgcactggaggctttgctagacagccctgcacgtggacaacagatatgagctgggaattgggccctaaaagtccaacagaatggctgaataatatctagattcaagggcactttagtcttttgtaattatctaacaaactatgtaaatatcaaggatttaaacttgtaatcaggggtttaggccccctatataatggccttaaccctagcctagaaaactaagtttcctttaagtcattaagccaccacatcactctaaggccgaaaccttactctctctctctctct

SEQ ID NO: 273619 - DNA, 582 bp, Cannabis indica
gtcatatcaatcatgactaaacccatcaacggtcacatttacaaatataaacaaataacatagatcaatcatggatgtgtaacatggaaattacatgcaatgtgaaatgaacatgcatatttctaactagtcctccttaaactaaagtaaggtcagatttaaacataacacaatagagtgaataaactgaaaaatttatatttgattagaaaataaccaaatacataaatgtcttaaacaaacataaagcaaagaaaatataaactcccactaattcatgatatctacaagcattactacacccatatgagcagtgtactcatgaacaaccttgggtggtaatcctttttagagtagattcgctatcatggagtttgtcccaatgtgatctatggatatctgtccactctatgctttttcttttaatatgctttgacttggatgagttcctattgttattagaatatatcactgctaatttattgtcacaaaataacttgagtggtctttctacattctccaaaatagcaacctagtgacaaaatttcttagctatattccctgatttgatgcctcataaca

SEQ ID NO: 273620 - DNA, 536 bp, Cannabis indica
taaagtttttattaatattattactatattattatattatattagtattataattattataatattcttttaaaatgatcgtgaagtatatatatatattatatataagttataacttatattatataagtctgaagcagaaaaaagaacgaatgaaaccctcgttcatattctttcgataaaacattctcctcttatatccatttttttattttcaatccgaaacctagcgatctaagatctgttagtagcagaatagcgaattctcagagcaaggaagcttaaggtaaggtttaatatcgttttaagtttaataacaactggttttgtataggagttttgtgaattagaatagttatgaaggttctgaccttataggattgttctcgggtagtcatgggactagttttgatgtttttttttgctgaaattgaggtgattttgggttagaaatcgagtttggaactttttaaagcttagttcgagcgttaatggcgttttctatttacggggccgattttaatttctgttacgta

SEQ ID NO: 273621 - DNA, 994 bp, Cannabis indica
atagtatggtcaatagtactgtcgtacattctagactcagtaccaccgatggtgcggggataggattagggttgggtgtatgggtgcctaattataattcgggttatatttatgattatgattatgctttttttactaaatctgtgaactcatagatattctttgcatgtgtaggtaagggcaaagctaaagttgagcagccgtgagagcgagcagatgaaggttgtacatgttggggcggttacacctagagaatacgatctttgggatagttgtgttaggttttgtgccctaaataaaacccatattaatataatcaaatttactaattaataaaaatcagaaatcattttatgttgcatggttcgaatgatttatttcatgattatatttaatatataaattctattaagtccaaaacatatgtatttgttcgtgataatagtgttgtcagcatagtagaatataatcatgattatatgttcaaaagtttaattccttgatttttcagttcactggatttagactggcatgataatcagcgataggtatacttacaccttggataagtgttatgtcatttccaaggcattggcaaagtttaccaatatcgcatatatggggtctgcattgcaagggatcgatattgaactgggattagatatgataaatttatcgtaatatatattcaattcaatacaaccaagtgaacccaaaacaaaagaacctaaatcctgacatggttaggttcaatctcaagagggtaattggggtccttggatttgttagttaagcctactttttggtctgggtgatacgtacattttgggaacatggtagtacaattgagtgggagcgctaatcatagatatggaatctatagcttctatccggacatagaagtgaaacgatgatttccttcgagctaggctaaatagagataaatgatagagcgctcattttagtgattatattagttcacaaaaatatcatt

SEQ ID NO: 273622 - DNA, 2441 bp, Cannabis indica
actagtaatgtagacggaacttagaaaattaaatttaatttaaacttaatcaatataacttataattgatatgcaattactgtctttatgaaaggaataaacctaaatactataggtagtcaaataataagggtggaatatatatgtgtgtgtgcgcgttaatttgaattgaaacatgtgccaaagttggaaactgcaatatttattttaaataaaattaccttctccactctttcaaagaaaaaaaatcttcacaaatatccttttgtataggtttatcacaacatatttaaccctatttttccatcaaaacttacaagaaaagtaaataaagtgtaatatgctaatggtaaaagaaacaagatgaagatggtatagtttattaccataataaaaaccaataaaatccataacaactaaagcatttatcactaattaaataaattaattacgtatgccagtaaaaacaaaataacaatagattggttaagttaaaaaaaaatctgtaaatacctgcttgagatgatttattggattgctaaacttccataatgtacctacaaaaatatataaatatacaataaaaaaatatcaatcaattctcacaagatatatattaattacataaaagaaagcttagaacattttgagagagagtaagatctgtgaaggttttttgggcagtgaaatgtggttagaagcagtgtatgtttcactctcataaaaaagatcagaggttatcaatgcatgcaatagaaaagtagactaactaagaagacaatatagtatttagaatacaaaagaatcaacaatagataatattaaaagaacattaaaatttacaacaaacctgatgagtctttgtcctctttcatcataaccaatgtctcttttaagctcaatcccatgaaatatctcaaacatcccagatgaaacccagctcaaactaagcctaaaatgaaaaagaaaaacttcataaattacttcacttcccactaaaccaaactctcagtcttggccatgaaacaaagaaaatatgaatagtaagaaactgtttcaggagtcaaaattctgtttgagatcaaacacacatgttcaacaaactacacaattaactccatggttaatagggcaggacagagcaatgctagctgcaccaatgagtttaggccttgcactagaattaggctataaaaatacatatatacatatatgttcaaccagaaaattccacaagtttaagtcttcttgcacatacatacattcaatcaaacttgagatttttaccaacagagaaatagaataatggcttttcttacctgctctatcattggagaaaacatattcagagtgtgtacagaagtgtatgactccacatcaatcctacgaataatggctaacatcatttaaaaaatatcatcagaagcagtctaaaaattcaccgaggaatagtatcaaacagtttatacgcatatacttacaaaattgttccatatctagctaacaaattagcatccgaacacaacttaactaaattatcactgtattacttgctaatatttatcatttttcctacactaaactcttttgtcacctaaacaaatacaccattaaagttacttcgtgatatataaggtatatagcattttcaaaaatgaatttgagtattcaaattcaattgaatggctacttgaagagaaatggaccgtaaccatgaattgctaaaatctattattagttaattcgaactaaaatctcaaagcgataaagaagtaaccacagaaactaaacactacctgatgttccaaagaatggccacttgaagagaaatggaacaatgagaggaatagctacagacaagactacaacaaccttgctgtattgctcaccaaattggtcaagccacctttgaagctttggtttattcaagcgtgcttcttcagtcaattgcactatcttgttgagtgttgaatcattccacgcttttgtagcctgaatcattaacaattttaacaaaatgaaaaacaacggaaggatatttatgaaaagtatcaactgtacataacaaataattacaacaatgagtactcaataaaatattccaaaagatcaaacagtttaccaccaacgcaaaagagaaataatcgaattaacatggtgctcaccatttggagaaagtagatacaatttcatattagaggttaaatcaaaggtcctaaaaccgcacacacatataaacatagctggttaagagaaaaaaagtttggtcattgccaaagtaaacaccaataacgtccgtgaagaaatggatagatagagaaaataaaggaagaattaacagaaaaagaacaaaggaaatgatgcatacttagtaatggtatgtcaagaaattttacttttgttctcctacgatttcacacactcttatggtcttcagtaga

SEQ ID NO: 273623 - DNA, 666 bp, Cannabis indica
ttttaattcgtaaatatatatttatatcgtactttgtagtgtacgctctgctcgagttttcacacataaatatattatatatatatgtatttgaaaaactcatgagaatcactacacattaatgttttgtaatatctataatggtgagacttaaatcttttatatatatatacatgccaactatatcttattccattgccatcttacaagttttttagaatatatataattgtacataattcatcgacaatatccctcgtaccaaactctccctctaaactaatctacttcaattaaaaaagtagttgatgttgaggttatccctaaaaaacagttcttagctttcaccgttcggaaaaaaagaggtctcaaaatacaaaaaaaggcacagatagattaaacaaacaaaatttatagaaagctcccggtcaccaaacacaagacccatctaaactaagcgctctcttgtaagagaatgggtaatagtattcttaaaccctactacaatgagacaataagatatactacgaaaagatttccaaaacatcaaaaattaatatcattaagcataataccaaactcattataacgaatatttttaacactgacagtaagaactatatgaaaaaaatcggagaaaacagtaacattcctgaaacctaaccg

SEQ ID NO: 273624 - DNA, 571 bp, Cannabis indica
ttatctggttatatctagaatatagcgtccataaaagacataagctagtgccgagcagttgcatccattaactggtcgttcttgggaattgaaaacagtctttcgggcatgccttattcagatcggagaaatcaatacaagttctccaagttcctttaaattttgagacgagaataggattggcaatccatgagggataaaatacctcacgtataaaatagttgaccaataacttgtcaacttcctgttttagtgccccttgcctctcgaaatccaagggcctccttttttgtctcttcactgggtagctgggatcaacatttaagtgatggcagataatcttagggtcgatccctatcatatccccatgactccaggtgaattgatcctggtttgcctttaaaaagcttaataattgctattgctcgtccaggttcttcccaatgtacacacatttggtgggatttcctaggtcgagaataccgtcctccaattcttcaatatgtttttagcaggtttcttttcatcttgaactcgaggatgaagatcttcatttttcttctcgtgttct

SEQ ID NO: 273625 - DNA, 894 bp, Cannabis indica
caacaagagtggattaggctcattaacatgcccgtgctgataggtgccacaggcatgatgccacccgctacggcagtgaactacaccacttggattcttgcaggatttttatctggttttgttgtgtataggtacaaacccgagtggtggcgtcgacataactatgttctatctggcgcgcttgatgccgggttagccttcatgggtgtgctcttgtattttagcttaggattggaggatgttagcctcaattggtggggaaatgacctcgatggttgtcccttagcttcttgtcccactgctaaaggtgttgttattcaaggttgtccggtttataattgaagaattatttagatggaagaaattcacaaacaatgtgtaaatatcatcaaagatttgttatgtaaattaacatggaaggaaaatcttttattttgaattcttttctaattgaggatgttttgagttttgtgtaaatatgcatatttttttttatgtataaataatatggttgtccatataatttgtaatttatagttattttggactatttacaattctatggttcaatcacaatttttaaaattctctatagccatttaaattaaataaatttatatatatttttatatatatatatatctttaataattaatatgtatgagtgtgaagtaaatattaaatcaaatatcttttcatttactaatattaaataaataaaaaattaattatgtttttttgatctttgaactttaacatgtataaaatcatgccctaaactttttaaatagtaaaaaattctctaaaattattatttttttttgaaaaaatactattattattattgaatagaatccataacaataacagagtggattggagaaggaatttccc

SEQ ID NO: 273626 - DNA, 2828 bp, Cannabis indica
  modified_base (2108)..(2108): a, c, t, g, unknown or other
tacgtagtcaatcatggaataaaggaggaattcatggacgaggtttttcatcagagcaagagatttttcaatttgccattggatgaaaaaatgaagcttttgaggaatgagaagaacaggggctacacccctgttcttgatgagcatcttgattctgaaaaccaagttcatggtttgtctttttatgttcatcacctttgtttgatatattttgggttatatgattagggtttgatggatcagttgtttttcctatgattaaagtaggagattataaagaggggtattacataggcgttgaggtacctgaggatgacccagaagtggaaaaaccattttatggacctaatctttggcctgaacaaggtaagtctagttgtaagaattagaatctagttactgatttattagtacaagagtttgatataaatgcgtttaatgatgttgtcttaactcttcccattgttctcttagataaattgtctggttggagggaaaccatggagagatttcatctagaggcattgtaagtatgttttacctatgtgataataagttcatgaatggctgtgttctgttccattgaattgtatggagaatttgtgatctcatgcaaaaaaatgtgttgactttctttgtttatttagattgattttctcctgaatctttgaccacatatgataaattgtgttatgctcattttctgttctttgttttccttatgaaaactacgcttcatttgcattcagggaagttgcaagagcggttggaaggatcatagctcttgctctgggactggacaagaatttctttgataagcctgaaatgctaggcgagcctattgcaactctgcgcttacttcactatggaggtgaaaattcagtcaaactttttaactttcatcactgatctcatcagttgttatgattttgatgcaatttcttgtttaggtcaagttacttctgatccatctaagggcatatttggagctggagctcattctgactttggcttgataaccctcttggccacagatgatgtgttaggtctccaagtatgttggcttctcactacttcatgatgtatcttctagtactatttttctaagttggttcctttaccttactcattctttttacagatatgcaaagataaggatgctaagcctcaagtatgggaatatgtagaaccaatgaaagggttagtaactgagccactcttcatcttcatttgttctttttcattgatctttgcagtcttaaatggcaatctaagaaagaaagaaagaaaaaaaacagaaaatttaagagcatttacttatctgtttctcttgttgtatcgtaacagagcatttattgtgaatcttggtgacatgctggagcgctggagcaactgtattttcaagtattccaaagttctatgcttttttggtgtagttaaatactgatttcacttaacaccactcatgtttggtcttttctggtctctttttttgtgttaaggtccacgttgcacagagtcctgggaaacggtcaagaaagatactcagtaaggaatcttttcctttacgtcgcttttaagtgtgtgtgtgtggtagtcttcctagttcctgtggcgttcactagcttttgaataatttaaaattccaataaactacacaccacttaatactaatatcaaaagtctaattatatggaatttgaactcgttttctactttcacagatcgcatactttgtggagcctagccacgattgtcttgtcgagtgtttgcctacctgcaaatcagaaaaaaacccctcccaagtaagttatgctttttgagatgtaaccaataaaaaaaccccatctcagtatcatgataaatgcagcaaagctagtaatacaaaccaaagaatagtacaaagtatgtctattgaataagaaaacctaatgtgatgttaaaatattaacttgtgcataaaatcttattcctttaatacactaataatgtctttgtctcttttcttggtcaggttttctccaatcttatgccggacttacctagtccacgttaacaggatacacatgttgatctgaacatctacaaagaacatcaacgtaaatgcnctttttatgatacagcatttggatatgagagataaatccccttaagagctcagagacagatagcaaacaataaaatatattctacagcatctctagtgtaacataatatgtatcaactagtacaagaagtgccatttttcaatgtaatagaattgtttatttccttggttgagcatcattttccattggaatgtaaagacattccaagaatagtactttagaatgtgtacttaattaatagccaataaacactttgaatgagtatggtagtatttttaacccttgttgaatgagtatggtagtacacaaagaactgagtttatagctagagtgaaactgaatataacagacaatgatctacataaatagaaaaaaaaaaaacacaataaatgataatctacattagatgctatccaacaaaatcccagataaaataaccactcatttttttttaacattaacaaattaactctaaatatcttatataggttttactacatatgttttaggttggaaataaattaaattattttccactttgtatgaatggtatgaagggataaaaggtccaccagactgaagctttaatttctctttctttacaataagagaacttccatataacacgtaaaagttgatgaaaatgcttagctaactcgttttaatcatgtcaagtctctctctctcttataatttcttttatgatatatatatatatat

SEQ ID NO: 273627 - DNA, 516 bp, Cannabis indica
ctaaggctagcttagtggtaaggtaaaaaatactattacgctaagctaaaaaaaatagggagcttgaccacattcaacaattggagagagtattttagtgttaatgcttctgcagtctattccagtcattgggataaacacaatgtcaattggacttaaatttgtctttctattaatctttttcgctgtgctttaaattcttgtaagaaagaaagcggcatctttaggctgaacacattgttgtgaatgtgtagtggagaaagtagaataaaaagatttaaactaggtaagtagttctacactttactagctcaggaacaatcgaataaaataaaacatgaataaccgttttataaatagagcaaacccgtttttaagtcacctttcttgaaaagagattaacagaaggaaggagatgatggtagcatgcctagcaatgtttcgtacaaaacatagactaatcaaaacgcaattatagtctgcctatttatgcgtaggcttcttaatttccacaaa

SEQ ID NO: 273628 - DNA, 870 bp, Cannabis indica
tcattccaattaaataaacatttatcatataaaattctaagcatggcatcatatatcacataaatactctagatgctcgcatactgcctaaaatggaaagcggtaaataaatgatcatataagcagtaaagcgtttactctcaacacttactgcaccatgagtcgcgcttgtctctgacgatgattgtacatgttcggctagtctacaggaagttaaaaaccttggcgctttgataccaaactgtaacaccctaacagttaggcatgttaccctagctgattaagaaaccctaatcccctaaaatagaatgaaaataaaacttgtaataacattaaactttacaaccaaaagtgacaggtttcgggatcccaaaaatacatcacataaacattaatgccatttcccatttgcctgtatgacacagacccacgtgttacgctcacacgcctatttatgtccatgtgacatagacctatgtgttacgctcacacgtctaaatacaataaggccttagaacagttcatctcggttctagttaccgagtccaacccaatcatactttaaacgtataatccttaatctcaatacatatataaaatggcataacatttagacattaataatcaatagggtaatagccctaggccattaagctgctcatgttagggtaatgaccctaatcccgatttctaattactcccatatatcattttcaatataagtgctactgcacataactctatgtgctaactactgtcttacctgatgtctctcaaacgtggagattccaaatccccaggtgctcctgaccaagttccactaaacctagtcacaatttctaggagtcacaagtatagggttaatctcta

SEQ ID NO: 273629 - DNA, 569 bp, Cannabis indica
ttttaatttttccatatttataattaataccgagtaactgttatccttactttattttttttttttaaaaaaagaaaataaatttggtgtatgattttttaaatgttattacattaagaagcattgcgaaacagtttttaaaaaaataaaaaaatattgactaaatttttaaaaatttaagaaaaatactatataaaataaagtaatcaagaaaaattatttagtcattgttatttattatggttgtaagaattaaattatataagtttttataataattatttagaatataaaattaaataaataaaaatataaataaaataaaataagaagagccaaacacgtcacggcccagttcacacccatctgtgagccaatctttaaactgctcaaaaaaaaataccccgcctttcagaaaagatagatacaaggaacgaggattgccaaaaggcgtttgacaaagtgaagaagttgccatcctcctagtatatataaatataaccttttggaagttggtcgactctatatgtatatgttattagaatattttatttatggaaattattttc

SEQ ID NO: 273630 - DNA, 1498 bp, Cannabis indica
tttttttaattttatttaatattaggttcttagcttttgacttttttattattttttttttcaaaaaaagatctcatacgtatttttttttctttttttttgttttttaaaatatcatagttttagcttttgaatttatttttttaaaaaaatatttttttcttttttcttttttttttttttggttttttaaaattagcacatctttagcttttgaactttttttttttaaaaaaaatatcatacgtatctacacctaacttcttataatattcagaaaaaaattatgtaagaaattagtaaaatttaaatttgatataattttttattatctagttatttatttaataaaaaacaatttattttatacatgtaatttaaaaaaaattaaatatctgcctagtttattataatactaaaaaaaaataaattaacagccgcaaagagcggctaatacaataattcgcaatagtttgataaataaaatgagttaaaaagaaaaattataatttggaaacgagataacagaagatcttgattctactattagtggtataagtgtaaatatcgttaaagaaaaatattaagattttgagacattcatctggaaagttccacagagttctgcgtcctactactactcgctagtacttcccacacaaatctaccttctaatgatttccttcttattattccatcccacttcctcaccctcaactctttcataaaattctatcccaaaaaaacaaaaaaaatcataacactactaaataattactcacaccatacaattttctcacactatttttttaaggttaaagaaaaatgggagtagattactataagattttagaagttgataagaaagccaacgatgatgatctcaagaaagcttacagaaagcttgccatgaaatggcatcctgataagaatcccaacaacaagaaagacgcggagaccaaatttaaacagatctctgaggcttatgaggtatttacttgctacccattacaagaatagcttccctgcttttatatttgctcagaggaaagaagtttttgttttgttttgtttattctaatgattcttattctatctggctttgtttgcttctcaaaaattgtaacttttttttggtgatcataagattgattatgtgctctatttagtttagttttaaaatgattagtgttaatgatgttttttgtttgtgtgaatatgtaactagaaatccagaattgaattaacgaaagttttgtgttttagagttctttatcaattcttatatttgtcattgaattgtagtggtactagtttgatcaatgctctgtttctgtctgttttctggttttatttgatacgattctcctgcgattttcgttgtaggtactaagtgatcctcagagagagcaatatacgatcaatatggtgaagaaggtctgaaaggacaagtgccacctcctgatgcagcagggggtttccctggtggtggtactac

SEQ ID NO: 273631 - DNA, 1732 bp, Cannabis indica
gacttgggattaaaaaagcgttactctgcagttgcttacccgcaaagcaatggacaaactgtagcagtcactaaaataataaagcacaccatcaaaggaaaactccaagagcgtaagggggtatggccagacgagcttccgcaagttctatggtcatacaacacgactcctcgatgcacgactggcgagactcctttctcgctctcctatggatgcgaggccatggtaccagtcgagattgcggcaggttccttacgaagagacgtttttaacatttcacaaaacgaagaaaaacagtcgctctacctcgaccttctggaagaaaagcgcgatcaggctcacctgaaaaacgcgacttactagcgacgaaccgcaagatatttcaattccaaggtcaagccaagagtcctacgagtaggagacttgctccttcgaagagtaatgccaaataccaagaacccagcacatgaggtcttcggagataattgggagggaccatatctcatcgcagaaaagattggtcacgccacataccgacttgcagaactcgatggtactgcgattcaacgggcttggaatggcgagagcctaaaattgtattattaatagtactcgcattttctagtttgtgctcgccttgtatttatacttagtcactttttataaaaagtcctaagtatagggggtatataccatgatgtactattgattacataaaagaaattttttcaagtttctgaaattttctacttattacaccaagttgtaattaaagtcgcgatcaaaatattatagataacaaacgcgagtacccatgtactgcgaaaatactgtaaatagatatccccacgaggatataaagtcgttcaaaataaacataaatatgaatttgtctaagtacaaggtgcgagtacttgtaccgcataaacaaaaaaaacagagagatagagtttaacacaagcaaatatcaaaggaaaagtcaagcatttggagtagtaggagcagatccatccgcgactttactgacggcttcattcccgacttcttcagcatccgcagcctcagcctcctcgagaagattccctccaccgcctcgagtttgtgtgggcaacatggcgcaaaaagcctcagccattttagcggcttctgctccgaggattgaaaagtcaaaatctgggattttggaaagagtggtgtatatgtagtccgagaccgcctggtcatactgcttcttcccattctccttctcggcctccaaatcgcgagacatctcctcgatcttcgtctgagcactcttagcctcgagctcgacttgctccttggccttgcaaagttcctcgagctctttatccttggaagtcgcatcttctttcaacttcttaatgtcctcctgaagctgaacgttctgtctcttcacgagttcgacctccttggatccagtaacaaaggccttcgagaacatggcgatgaactgcaaagctaactccgtagagcgaggcaacaactccttagcaggagtcttgtcgatcttcgattggaattcatcgcttacgaacttctcttggagagttagtatgttgcgggctcagacagctaggtcaatcacgaccttcttccctttctcttgtatgcccttagctggcctcttggaagaatccgcgacaggggtaactaccacgtcgctcttcctcttctgaggaacgataggggaagttgccgctgttccagattt

SEQ ID NO: 273632 - DNA, 1517 bp, Cannabis indica
ttagctgatcaccgatggggaatcatattgactcaagtgtgtgacacttgcaatccctcaaatatcacacaaaattgatcataagcatttttcattatatattgattgaataatatattaatatatgtgaatatgtatatactttggtctaaaaatgattagacaaaaattcatttcttaaattcatactacctaaaaaatttcttacacacctcctctcagagaaaattattcaatggtaagtattatacagtaataaatctacataaaagtgtaggataaacgcccctccgaaataaatgtatatattttagttagttatgaaatatatttgtataaaaaaataatatttataaatatataatattaattttagtgtaagggttcaattttgtttttcttaattacgccccctcacagtccgttataataagaaacttttggaaatggttgtatacaattttaatttaattgtgaatgagagagcacaatattaatagcttcctttccacgatcggagcttattatgaattattattttacattagttacatgaaaagacaagctaaagtaaagtcacctgccttttcactatatcacatatatatatataactatacgtacataatgatattattttttatatatcataaggtgtgtaaacaattctttggtgatcccaaattactgcacctccaattaattacttcctccaacaatatgggtttgaacttctatttaaaacctgcattgatatgttgtagagattgatctattagaagaagagataggtaacttgctcccttaattaataatcatcataattaattaattttggaaatgatttcaatgaaataatatctttaccctgtattctccgaagcctagctgtcgatgatgacgtgtcagctaagcttatatctctaaaacaatatctacaataaaattaagaaaatggttcaactcacataaaaatatatatgataaatcataacgagtaattattttgcaaaatagtctctctaaaatattttaccgagtgtgagaaatctaaatatagatattatcgagattgttgagttgagaattgttttttttttttgctaattaaacagattgttgagaatgtcattttgcaaaaaaaaaaaaattaatctaaataatgtattgtgcaaagtgactgtaaaaataaggtgtcaaacacaagaagcaagtgtttggcgagataattatttttaagttactttgcacaaatctctttttgattaatcttttgcaaaatgggtatgctcgacaatctgggggaagctttctcaatataatgatattagaagaagtccattttcacatctatatgtatattagataaaatgcataaaagaaaaataaggcatgtatatggtaataaatgttgtaaaaagtctctattacattcagaatcagttttgtcccaacttttgcttccactttgagtactgtcatttttctgttctatcagttaagtcgtccgtcactta

SEQ ID NO: 273633 - DNA, 1333 bp, Cannabis indica
  modified_base (975)..(975): a, c, t, g, unknown or other
tctctctctctctctctctctctattataaataattaataacaaatgcatgtaaactatcaaagttattttctctgaaatatcaaaatctttaaacttagcattgaatatttatgagaaatgctaaaagggttagtggtgtctgttttagaataggctactttagttgtaagatgttcacaagatctagagttcataaaactttgatgaactcatcaaccaacctggttcggtgatatgtaaaatggatttttatatagtgtttaataaattgttagcaaaagtaaaagagaaacgatattactgaatgaaaaattctgggttgagttgcggactaggtcgctctctttaagatgtttacggcagtgcccaggagtgtgcaagcagtcggaatttgcccgtcgtcctcaggataaaacaacaaagtcgtactacagtgcaccgtcgaatacacccgaagatttttgatatcgcagatgtacttttaatttttatgaaaaactgtatttttttatatgagaaaaatgtattcttcccatcagttcaatcgcaatatatacacgaatagattgagaaatcataacaggaagaagaacgttttttctgaatcgtggggtgagttggttgaacgcgttcctgatacgactaaattcagctaatattagtttatagtatacctctgaaatgtgtgttttgatagactccttatcgacaattagtctaattttttattgatcgtgtacgttatagttatttagtaccacttataaattttttagaaaattctaagtaatttacaataccaaatataagatttgtacatattttgctgatgttttttattatacgtatagtaagtaattgtttaaaactaatttttagtattctaagctatttagaatttttcacttaattatcattatagctagtgctagtaaatatgaactgagaccttttgacataacacaaaattaanataaaactcaaacggtacaaaaaaatatagactttaacacgatacaatattataaattagcatgacacgaataaaattatatgtaggaaagaatgatcaatattcattgatgactcttagttcaaaaaaaaaaaaaaaatattcattgatgactccattgctaatgaaattattaatatgttaggataagatttcagttagatcaatatgaaaagctggagatgatacaactaataagtaatttaaatttttataatgtgcgattaacttcttaatttatagtcagggccggccctgacttttagtgggccatagaaaaaaaaaattattttgggcccttctttagaaaaaaatatgg

SEQ ID NO: 273634 - DNA, 953 bp, Cannabis indica
ctctctctctctctctctctctctcctctctctctctctctctctctctctcacacacacacacacacacacacacccactatagcatccctcaacacttgagatttgcaatctttaattcctactttataaccttcagagagctatatgatatcccacatatagtgatctgaatagtatttctcgtggtattaatacaactaaaaggggagtaagtcattacccgctaactaaggggggtcgaacccctataaaaatccttgtgttttttactttctagttcttattatgtaacacgtgacaaacatcagattaatacaaccctgctattggttggccaatttctgaggttaatagtttggtactttcattgagagcgagttgatatcatatttgatcaaatgtcatggttaaaaagagaaaaactcatgttacaccatctgcatcttcatgtcttcctgaagaccctcagactgcagatcatgatgtctatgttccagccacgactgaattccatgaacactacagatgttgtcaatcctaccgctttagaaggcacttcgaatctggtcactacagctgaccagagtgacacgaacattctggtggatttgaacagcaggcccttgcctccgagggagggccctccactggagcctccaactgaaggaaggaaccttggggaacaacccccaggagcaacaactagatctcgtctccagtactatggtggagagataggactagaaattggtgagccccatgtggacttgggagaagatctcgagttagccaaacttagagaggccatcaaccaagctggcctagctgaagaaccacacactactaattgcgatgtattcactcaatagagatgcgaattcctgagatgaatggatgaccaagagtacattcttcaatctcacgagaaaaagcttgattgctgcaataga

SEQ ID NO: 273635 - DNA, 731 bp, Cannabis indica
tcataatgttgaattaatgttttatttatgttataataacaaaataaatacacaacatattttttctcaggttagagcatcaaatgaacacatatttaaagtgtacaaagtaaaaaaaatcatgggttgtgaatgtagaacaaaaaacatgcacatgcaacaggttttaaatagatgaaatgccatgtgcagcagtgatgaaagagatgtatctcgacccacaaaattactattcagattactatagcacaacaaattggttcgaaacctatgaagcaactgtatacccaataggaaatcaaagcaattgggacattccacaagagatcaaggatatagaaatattgccaccacttgaaagggtgaaagcgggaagaccaaagaagaaaagaacaagacctagttgggagacaaagacacaaatcaaatgcaccaaatgtggaagaaaaggacacaacaggaggacatgcaagaacccaagtatagactaaaaaaaaacagcagatacagaacaatacaacaacataaatagaacatttttaaagatacaaaaaggaaagaaggaggaattttaaatagtgattgctattgaattgattaactgtgaattcggttgctactgaatagatgaactctgaattacattttaaatgaattgatatgataatgaattgtttagttttgaatttcattaaatcgcaaattaaagttgcaaaaacattaaaatttaa

SEQ ID NO: 273636 - DNA, 572 bp, Cannabis indica
atttagtttggaggtaattatagtaaaataagttctataaaaattggaagcatagtaggaaaaaaaatggtaatactcttattattggtaaattttctaatgtatatcagatttagattaataattataatagtattataattgttaaatttaatagtattaatatataattaattaaattattatttataatttttacaatatataaatcagaattaaaaattaaatatatattatttttttgaaaaaaataagatactgattcttttttagtgtcattatatctctaaaataaaaataaaaattaaaaaaaaaagaaaaaaaaaagatttagtgacactttttgtgggttgctgttacttttcagcctgactctaaatgcttacagtgacgcgcaatgagtgaatgcaaaaggtttcagtgacacgtgtagagtgtcactataaactgcctttccagtcagcctcattagtgacgcgcgctgaagtgtcactatacatttttagagttactcaatgtgtgtcactaaaatcctattttctagtagtgccgacttgataccttctaaactt

SEQ ID NO: 273637 - DNA, 809 bp, Cannabis indica
ttctttttgctcatgtttgtactgttcaggcatacctttcccgggctttttcctgaatctccaactatgtgcggacctctaataatgagttgcaggtgtccatctactggtggtggtagtaactcttggttgttatcgtccctcagattttgatcggccttgacatacttctgtacgtgcggattagttttcttattagaaattcaattttccgctttagattgttgcattcattggtatcatggccgtaatccccatgaaaatagtagaacttggtcatgtctctcttgcttacatcatttttcatgggtgcggggcttcttgtacggagctaatgactgagtagccatgtacatgctttctatatcttctgttaggacagaaaatgcagtaaacctgagaggattctcccggggagcttgttcagttttaccagaaaactttccctttttcccatttccttgcctattgttgctgttggaccatttaccacccgagcttgaattgcgcgggtactgggggaactgggcggatatcccagcggaagaggccattggctggctaggtttttgctcaacttcagcccgctaaatggcttcttcaagcttaatgaaaccttctacacggtacaggaaatcgctcatagaatcgactggtccgttcttcctggtgtccttccaaagttctccaagaacttcaatgcccccagtattgcggacaactttccgtcttcggtcacccgtgcaaccttagttgcctctgtcataaatcggctgatgtaagcttagagaggttttcctgttctttgc

SEQ ID NO: 273638 - DNA, 867 bp, Cannabis indica
gtatacgagggtaagtccttcctaacagcttccttttatccttcttcacttagttcaaattttaaattctttttctgtacagattggtctgaagatggcttatgcttattcccgagctaagtccgctgcctctaagaatgctgtcatttctaacaccatgcgagcgaaagtggacttggataggaaggatgccgatgaagccagggttcagcttggggctgtctggatggaactgggacaggtcaacaagaaacttcttgctgctgagaagaaggtggccgaactgaccaaagatctacaagcctctgatcaacttgaagcctccattgcttccttgtctaaggaagtgaccgaccttcaagaggaaaaggaggttctccgggctgtcttctgcaagttggaagaagagaagaagaccaaggaggaggagcttagagctgaggttgagaagtataagtcagaggccgggcagcagagagccgaagtggagaggctcggcgggaaagtgaatgccttagagatagctggtctcgagattttctatgacttctggaaagctaatccccagacaaaatttgattacatgggcgataccaaagacatgtttctcaagtattccacttctcaggtggcctatggggaattcgaggtgaccacttccacctctctagctgaccaaaacgttgaagttccccccgctcagacaaatgatcctccagctccaactgacccagaagaccagtataaagaacttgggactccaaccgtttgaatgctttctttttatatctctttttttttgttcggccataaggccttttttttttaaaacaaagtgatcgacaaagcggtctttaaacttggaat

SEQ ID NO: 273639 - DNA, 1305 bp, Cannabis indica
aaactaacgcaaatcgcaaagctaaaattttcaggaaccctgctgcagaaaccggttacccggttttacaggtacctgtaaaaccagttaaccggttttacccagaaaacccaaacaatttcaaaccctaaccaaattgattctaataccaaaccttccagacttgcatattataccccaataaactatttccaagcaataaaataacaacccaagctcagaatctaaaatcaccattaaagctccaagtttgagttctaaaactcaaaacttggttagatctactaacaacaactactacatgcttaattcaacataataaatcatatattaacttctggaaataacatctaacaactacagcaacaataacaactaaaaactccatttcatgcaaaatgaacttcttaaaactcaagaaaactagggaagaaatggttaggagcttacctatagagcttgagaccacttaaaccttgctgaaacttgcttgaaatgcagaaaaatacagcaagccctagctgcttctgtggatttcgaaagagagagggcaaggagagaaagagaatctttttcttgaattttcttattttgaaataaaagagtaaatgacttggttttattaaaattactctcagcccataatttaaataaaaatcagatttaacaactaaaaacattccactaaggacaaaaggctaatggggtaaaatggtcacttaagggtatttttaggaaattctaaaatcctgactattcccgacatttccaatgtctaacgatattgtattgctattctaaaaatattagaatgtgattctaatagccaaacaccgtgttccagtattcccgggcacaaaacatgcaaaaattataaaatttctatatatgacataaaaatacattttaaatttaaataaatcatcataaataaataatttaatactaatatataattttcataattaaaccctaattatctgctaaattctaaattaaagctaaacagtctttataatatcccaatatttttatataacaagcatacattatacatccaattagtattttttttattacgcgtataactggttatttagaattttatttattaatactataaattatttaaaatacctcaaaaataaatgaaatatttataataattacaatatacaatattatataaaattaatgatataatttctttaggtgtcaaaaaaaataaccatagactaaaaacaaaatgaaattaacctaaacttttatattgtgtttgtaacgtccccgcttcaagcttctatt

SEQ ID NO: 273640 - DNA, 763 bp, Cannabis indica
cttacttatcatctcaagaaaatccccaattgccgccattgttaccggaggagcttacacccttttatgatcggactgttataaaagacccatctgggtttgaaatgaaggtcttgaattatataataggggacaatcctggatcaacttcctcagattgtagaaacaacccaaaactgtttgaatttgaatcatttcaaagctctgatcttgatgaattatacagagccattttcgaactaagccggtcagatatagataaactccgtcgaaaggtgtcaaattcaaacccaaatgagcttcatttatcttcttttgttcttacttacgcttacattttcgattgttttctcaaagcaacaaatgaagataaaactaaaagtaaagtctttatattattcaccgccgattaccggaatcgtttgacgcctccggtgccgggaaattacttgggcaattgtgtggtagccaagagcaatttcgaggacatgagggagcacgtgatcggcaaggagaaggagggggtggactcattcagtgctattgtgatgatagtaagtgatttagtgaaaagtgtgggaaaagaaaaggatttatattacgaaatagagaaagacatagtgacttttccggcaacggagtctgataattcttgccacgttggagtagctgggtcgccaagtttgggcttttacaatatagattttggatgggatcggccaaaaaaatttgttgtggtatctatagagaatggtgccatttc

SEQ ID NO: 273641 - DNA, 1061 bp, Cannabis indica
ctaatccatttcttaattccgggtattacaatacctagagtatagaccatgtatttcccattttatatttcttgggaatgtgcggccctactgaaaaaatacagaaagacatgtagctcggttctagggatcaccccacaaaaacactataaactacccccccaaacacattaagacgggggttgagaattttggggtttcataagaaccaaagagagaaaaactaccaagaacattctctgtaataaatactctcataaatgaaaaaagactcgtggactaaagctcattaatgcccgaaccacgtaaaaatcgcatgcattaaacttcctacagctttcttatatattatttaattggctaccgaaaacctcggtcaacagctaaaactttagcttcaccatatgggtgtcttacaagaatgtagaggcttgttaataacaatttctattgattgttgttttgttaaacggtctgctaattaccttgcgcatgttttggcgcaggcttctctgtttgaggttgaccgtgttcttagtggaaattctttacacgcttgttactcttccatagttttggaagacttgaatgaataaagctcttttatttttatttttttaaaaaaaatgtattataagatataataagaggcagctcaattttcacaatcaacgtgatattaatgaacaatataaggacattggtaaataattctaaactgaacatttatattaatgaacaatatataatttatttatattttatcataaaaacttaatatattatatatgaagacataactttccgagcttgaaattacaactagcgcaatagcaatagaaagagtaagaaggaaataagcgaagagtgcaggaccaggagcaaggatcgataaggttaatcttatcactcggagcagaagcagccataggtcccagcggaatctttggaataaatggaatactactatttaatgtcttctgatcaacaacatattttcattctcattctcatgtgtaatttgttttctgatttctcaaagagaaaatcgagcattggct

SEQ ID NO: 273642 - DNA, 1255 bp, Cannabis indica
tatatatatatatatatatcccagccccatcgccaccaccgtccgagcagcccggtcaccaccaccgcactaccaccacaacctaaggccaaccgccaccactacaatccaaaatctcctaccctttattaacaaaactactccaaaaatctcggtcccctttgcccactaaaaaaaccaacactgcccccaccgcacaactttgcctgctgattgagcccatttagtcgccaccactacctcccccctctcagtcaatgtatttgttattttgtaatttttttataattatttatttgtattttgtttatacgtgggtataattttttgtatatatatgcataagtatatattcatattattttaatttttattatttttttactttaaatctttatgtatatgtatgtatatttttgtgtatgtgtatatgtgtaaatatatgtatatatactaggttattgttatatgcatgtatacttagttctattttaagtttttatttttatgtgtatttaaaattttataaatcaaaggaaacaaattaattttttaatttttttttagaaaatatttaaagttttaaaaaattgaggaaaataaatataaatttaagaatattaaaattgaacatacttcccaatattaaaaaaataataatgttacaaataatatattaatatttatatatatttaaataaaaccgttaaatttaacataatattcttatattgttaaaacattttgttaaatcaataaaaaccattaaatagccacattatatatataaagatataagtatgtgtatatatattatgaatatatatataactatatatgtgtgtgtgagtatccatatatgtttatgcatatgtgtgagtatgtatacggtgtatgtatatatgtgtatgccatttttttatttatttttgtgtatatatgtgttaacgcagattttctttaactaaataaatagttttttttttggcaataaatactctacggaaataaatgaaaataaatgacaccagatattttatgtggttttgtagttaaaatctacatactctacgagtccttattattagagatattttttggatacaaaatacaatctcaatatttgaaataataagattttttctctcaattttattgtcctttttctcatgaattttgcccttatttattggaatataggttggcagttattcctttgaaattgattcatttataactgttcatgaaacgtgga

SEQ ID NO: 273643 - DNA, 1614 bp, Cannabis indica
aggagttaggactacaacaccttcccctaaggttcttaaggaaaagcataaactattttcacacaaagagtatagttgccactaacacctcttacatgtacggaacgagaaaacaaaatggaactttgaactgttagaggactggccatgaccatacttgaactaactgaacaagaaaaagtagatccaacaagtggaaccaaatgggcacatcagaatatacactaaaagaaccaactaaaaacaatgcagtgatgaacaatatgtcctctttaaaatatcataaacctgaaagttcaaggaacccagaacttcaaaagaactaaaatcagcaaagaacctcccaaatcaggtcatggaaaccttaccataagcaggaaagcccttaatattgcagaagaatccaaagtaaccaagtcaaaagatcagacgaaaatgcaaatgggtattggagaacaatgcatagccagagccaaatcaaccgccaaaatgacgaaaaaacgaaattccagaagaagaaacctgcaaaaatggaggtgggtcaactcaaaagcagtgttaaagaaaaaccaaatgaagcaaagaacaaaaattaatactcaaaacccattaaatgagagaaaaataaaaagttacaggcaaaagtgtgatcaaacgtaggagtgcttgagcgaaacgaaatcaacaaacaagggaagatgaaatgaggagaggtgggagagaaaggtgaagggaataattagatgaagggggcacgtggagggctgtgattggttggatctctattcgggtcccactagttggtgttttttcctggtttagttttatggttgagtacgagtcatttgagtccttgtggattgaatttcttgtcatctgatcaattcattcatattgggaagttgaaaacaggaataatgtgatctcatctcattaccaaagaaacgttatagcctcaccttcacctaagaataactctacgaagctaagtctttttatatatactcaaatttaatataaaaattaataattttattttatgaacaaagtaggactttaattaggtatgttattagtgtgtttacctgtgctaaatctctttatgattgaataccacacttcccagctggcttttttttgttattttattgttaaatataatgaatatatttttggtgtggtgtaacttcagcatgaaattgatagaatttattttaccttatcccattaaaaaatgctaaacacatacctgtttataaatacatacaacagattccctaataatgactagtgagataaattaataaattagaccaaaactttaacatttggatgtattactaaatgacaattctcctagctaatattaaaaaatatatggagcccataatggggtggtgtggtgtagtatcagttgctagtatcagtagtaagggataatataataaggcataaattagttattttattactttgaaatatctaaaccggttgtttaaaaaaaaaattatacatataaataaattatgtattttagttatagataatatttaagtaataaaattgtatcaaagtttaaactaaatattttttaagaaaatttgtggtataaat

SEQ ID NO: 273644 - DNA, 1051 bp, Cannabis indica
acactcgagaaaatatccacaaagtgacctgtaacatggtccattataggaaacctccacagatgtcacacggaggaaggaatatacgtgatcaaaataaagaatgcgagtatcatggggagaagggtcacaccactaatgagtgtaattaattgaaagatgagattaaaatgttggtccgagcaggacatctacgacagtgggtctagattccgatcatctatctcgaacagagggtcgtgcacggacacatgatctttcccagacagcagaacactataaatcctccacaaggggtaagccgttctcaagctctaggaacatcattacctgcactccttactctgtgagcctcagctagggtgaactaggatcgggaaccccatatcctcctgaactcgttttacgtacctccggtggatggacacgtagctacatcttaggtggatcccatcatgctagaagtagtcgaaactcgcaaaaaggtacctgagagaggtagaagaaggggaagtatgcgcgctggtgtagtctcccgcacaacgccctagaatgatgaattttcccatcacctttatagaggatgatgccaaaagcttacgcttctcctataatgatcctctagtgaatgatgcatagatcaccaacaaacaagtttccagggtccttgtggacaatggaagcttagtcaacatcctgttcaatttcacattttaggcaatagggcttactagagcggacctaactccctatcctatccaattgcaaggcttcaacggggatgctttgatgccgatggataaaattcagttacctatcacccttaaagaggagaatcatgcgagtgcttttaagaactcaacctttgttgtggttgattgcccaattgtgtacaacgctatactagggcaggcaaccctggtggactttggggcggtaacttccatcagacatttatgcatgaagttcccatgtgataacggatgtatcgacacaatcaaaggcgatcaaaagagtgcaagaaatttctataatgtctcaatacgaactg

SEQ ID NO: 273645 - DNA, 513 bp, Cannabis indica
gtttggccattagagtaacatagatatgatttagtatcttttatttggcgggtaaaaatattggacatatgaaatatcgagattatacggagcagtggtttttgaccattttacccctaggcatttagtttgcttgagtactgagtaaagtgagggcaattcagtaatttccttaaattttatgtgatgcttgtgagtgggatttctagagattactatagtaatataagctgatatattctatagtgttattttaatttttacactatgatgtggcacctaactgaatgacacgtgtctcacatttcttaacctgggcagatggttctatgcctagcaggccacacagattgacatgaagctcaaagtcatacacacatagcaggatgtctgagcaaagtcattgatggacatccgaccatcacgatcgcgtgatcaactcgcatgtaccaactagggggtgcgagttggcaattttagaaataaacattgtaagaaccagtatattctgta

SEQ ID NO: 273646 - DNA, 5252 bp, Cannabis indica
gacaaactcgacttgtcatctgcatggggagcatacctgggtgtggtcttcgccagtgtcgagattgggctgatcattgcagtaaagtacaaactcaattctcttccttataacaatgaataattgaactgattgaaaatgaaatctgaattgggatgagtttgttggtttatgcaggtcacaatttcgtttatgagagttcttctgtttattgctagaccaagaacgactgttcttggcaacattcccaactccatgatcttcagaagcactgatcaatacccaattgccaacagtgttcctggagttctcattcttcatatcgatgcacccatttactttgccaatgcaaactacttaagagaaaggtagagatattcaaaaatagaagtaaacttaattaaagtaaaacacttccccacttgataatagataactaagtactaatcttggtcgatgatattcttcattgtagaatctctaggtggatatatgaagaggaagacaaactaaaatgctctggggaaacaagtttgcattatgttatactagacctcagctgtaagtacaagtagtactactgtcaatccgctcctcctattatgtaactcttaaccttaattgatcataataattcatatcacagctgtcggtagcatcgatacaagtgggattagcatgcttgaagaggtcaagagaaatactgagagaaagggtcataaggtaagaatttatactcctatcctatcttaaatctttcacttcacttaccttccttttgcatggaaagatatttgtatctgactagaattttttcattctttcaatttagcttgtgttagcaaacccgcgaagtgaagtgatcaaaaagcttgacaagtcaaaattcatcgaggccgttggtcaggaatggatctatctcactgtaggagaggctgtggcagcatgtaacttcatgctgcatacctgcaagccaaatgtaggagcagaggaatcaaaaagacaaactgatgataatgtctagacccattatgcaagaaaaaagatcatatttcttttactagaggcaagcaacctaatcaactatttagaagaagccccattctaacacactaatagagtcaacaaagggtttcttacctcttctgagacgtgggaatcctataaattatgtagttacacaagagttaaattcaaggaagctggtttgctgggaatctaaatgagttcccacttaccttctatgcagtaatatgtccaactagaaataaaaatttctgttaaagcagacgttctttttcgcaattacaaacgaagctagttctatgcaaaccaagttcaatgttttctattttcatttgcaagcatatcacaaaatgtgtctcttctttaacctgggggcaaagctgtcctcgtgaccacaatacacaaaagtagtcgtacaaaaaagaattgtcctgaaaatgaaatcactcaaaaaagcctcagaaatccatttttccttcccaaaaagtaaaccttcaaaattgagtgcatacatcagaatgactgaaaagcaagttctcaatagtaaccatcaccaaagaacttagcatatgaagtaaaggaaaatacaagcactctatgctgtctattctatgtggataaatattctccagcagttccccaacgaaatgtcaacaagtgaaaacatctaagagctggaccgcttttccttgtataggcgtggaagcacttcatgagcaccgatatcaaggatctctgggtccctttaaaaagcaagaacttgagttaataatgcgttcgtacccattataatctgtttacaaaattttatatttgctagaacaataaaccctcattacttgcaaacgttaataatttaatgtatgaagaaaagacctgcacagcatctggccctgttcattggaactagggacaaaccaaagctttcgcagaaaagctgtctcaaattgaacaaagaaaccatcttgctgcccatgtctccacttccgtggtccttgacctttccaaacctgaaacacaaggcaccttcatcaatcacttcatctaaacaaacgaaacaccctctaatatgtgatagataatacagtaattaggcttcctcagtgggaggttgcataatgtgatatgagtatgttgaatggatattatcgtaattgtttaggatattccatgtccttgatatttctagtttgtattacaagagagtaaaatttagttccagatgaggcccatgtagatcttatattcttatgttacattcactgaggtttggctgaaaaatagataggtttttgcctcagtatatcttgttttaaaggatttcaatgtatttggagtattgttaatacccttaccatggtaacacactatcaacacatatttcaggtttgattattttccaaatagttcttctagatgacgaaattagcaacaggccaagcaagcatgttgaatgtatggggaagaaaaaaagtttacaacatatcaaattgcaaacaattacctgtggatatgatattatacttttgggggtgaccaagcatgccgctctggagaaagaatcctcagcatactgcctgagatacaaaaagcagttgctgtgtgtatggggtgattcaaaggcctggtgcaatgaagaaaattttaaggtaagaatcttctgttttgttagaattgtagaaaatagagccaaacatgatggctccatgctagaaaataaattttacaaactaaaatagcatttattaatgcaagatgacaaatgttaaaagctaaagttgcatttactaattcaggttgtcagcaaaaagaggctcgcacctaacaaaagcagaacagtactttatgtcactaattaacagaaagtgcgataccttatcgatgttgaccattggagcatatttatcagtctctgtcttctccttatcaagaagaaagtatactctaggatcaaccttcgagctttcatgccagcattttacagctgtttccattgtctcaacaagaaaagagaacatttcttcccaaccttcctcggacccatacttatcagactgcaaagagaaagactgttaattcctttcctgtagaaattgcttggaacaatcttagcacaagtcgtccactaaaagcattgaaaatcaatggagaaagcttaagcaacacaactaataaatatgacagaaagataaatgataagacaaaccccatcaaggaagggtgtcaaaaggatcattaagcaagtattaaacttaagttacagtacatagttcctgagagtatgaaacttatacatgtcacatgtgaagcaaaagaaaatggcaagaaagattgtctggaaaaagaaaaatataatagatgactacagataatttatcatgatttacagcaacgaatagttaccatttcagtctttagtttttccaagtgctttgccatattgatattggatttcaagttctctacttcttgagctcgctttttatctttcaccaactgggttattcttttaatttttcttgatacttctgcactttttggattgaattgcagagcagtatggaaagcagctaaagcctacaagaaatgaacactgaacacgttaattatcagtgatagaaaacaaaatttatgagctcttcctacaataggctctatacaatacttgagtaagaaagattttacagagcttctggtcatacatcatcataacgctccatggcctctaatatgcatccttttctgaaatatccctggaggtgcatcacaatgcatattttaggaagagatacaaaagatcaatgtgctctcctcccaagaaaataaccaatatcctctcacaaataaattcattgaaaatgatgaaaaaggaagaataaaatgaaccaccttttcccactctgggctcaaagcaattgctgtctcagcatcagcaagtgctttactaagcttaaccaattgcagaaatgctgcagcacggttgctggtcaataacgaaacattaatgtgcatcagcacatattaagaatttgaaacaatttgataagtaacaattagaaagcaagtgagaaagaataaaccatgttcacagcttaaaatagagataaagttaaacctacaagttgggaaaacactgccaaccaaatgaactcaaaacttggtatttcaatgtcatatttaccctcaaatagaaacaccaaccaaaattcgttttggttcttgggaacttactcatgttcaaaacagaaatagaaaagtatatggacactaaacttcagtgttttataaacgacagctaaaaaacccagcaatcagggcttcatcctgagaatgcatatacctaaatcttcaactgaatccaaattgtaaggattacttctgcccatttagaaaaagcaaagttgatagaaacttaacaatgcgagatcaatctttgtttgaatataaacattttcattagttgtcgaataataagcatgtaaacatggcttcacgatcaaccataacaaaattaaattgaaaagttatcaaaatccatcaactttttatgacaactaaagcaccacacagctctagaactcccagagtattacgtatatattacacgaaatagctctccatatgattatgcataaatcgataaacaaacccttaagccaatttgcttatatttaatttttgtatgaaatgaaaagaaaaaaagagaaaacctgtaaagggcagagttattagggtcttgtttgatggcctgggtgtagagagcagcggctttgagataatttccagctttgaaatgctcatttcccttatctttcagagacgtctccaccattccaccaccagcgattgatgagcccgccgtacgtgatcctgcctctacttccgccattgttagtggtttattgatacaaattagggtttaattatgggttagagggagaaacgggggaggtttaagcatctgtgagaagaagaaaaaaggagaacccagtaggcgcaatagctagctctcctcgctgaaactgaaggagagtaaagaatattatggtacgcgaagactctgctctgttacgctgctcctacactaaccgccaatattgttcttcttaggtttcagtgactgacgagttggtaaattgtggtgtatgcctctgccttgtgtctcgggaacgacgtgtcgttttgactttcgaagttaaatgaaatttgttttttctttttttttt

SEQ ID NO: 273647 - DNA, 618 bp, Cannabis indica
tttaaaaagggtccacatatgcattccttatatctgtttcgatatcttgaaaaatactttagtccattttttttttcataatcctatacgttttaattatttagcatatcctgtaaaattttgagaaattcagaaaaattattttacatgcatataaaataaaataaaagaatctcacgtgcaatagactgtttgaactctattttcggcgtattatattttttcaaatacatgatgtcttaaataagtataacatagaccacaacgaaaaaaaattaaactaaaaattcttcgagatactaaaacaattagaaagcgcatcaataaatctattttaaagggtgcatggtagaagtatccggtatattttttttattattttcttttccttttttcttaataatttagggtgattatacaatgcaccccttaaaaaagatagtactgatataccctgacttgtttcggcatccagaaaaaatttttagtctaattttttttttcatatttatgtacattaactatttaagacgacttataaaattttgagaaatttcaaataatttacaatatacaaaacaatgttcgaataatcaattttacacgcgtataaaataa

SEQ ID NO: 273648 - DNA, 879 bp, Cannabis indica
aataatctaaatatttacaaagaaaaaaattataataatccttggaagctttgaggtctccatcttcatagtgggtaggttctccacacttcctcttgcaaatttcatgcttgaaattcgaaatttgatgaagtttttagcacttctttttggtagtttttttatggccgaaaattgatgtggttgattgggattttttgattttttgatgaaatgtgagggtttgatgcttgagtttttgtgtaatttggaaactttgttgatgatgcttggaggggggtatgaagctcgacctccttttctgaccaccaccctgagatacccccattgggggtcggggtatgtaccccgtgagtgggtgttaccccatgccccgagcttgcatgtggccctaaccgagatgggcctatgatgataccctgagttgggggtttttaccccgatactagggggtcggggtacaccccgagtaaggccctcttttttttccttggaaatctcaaactgtggcttgtttgatggtgttgagatggccaccgtggcccgagatggggttttgagccggtaccccgagacggaaccttggcctcactaagaagccttgagttaggggttggggtatgatccctatgactcaccaaatcctgagatcacactttcacccgagacgggagtttgcaggcattacttctaaaccatttcatggagctcaggttacaccatctcacaacaatcccgtgactacattgaaactcacaaacaccccgtacgtacatcccaaatccatgtaccccgagtatgcatcttcatttatttattttcctcatcgtgggcaagctgaggtttgcggttgggggtgttaccccgagactaacatat

SEQ ID NO: 273649 - DNA, 637 bp, Cannabis indica
tccttggggcaaaggtcctgctgtcagaaccaggttgagatgaggcacccggttcttaatccactcgtagagatgacccaatcgaatcaagttttcgatctcgtctttatggtttttgcattcattggtgttgtgtccaatgtcgttatggtactcgcatcttttattgggatcccttcgggagctatctctgtacagaggaggcggtctccggtagtgcgtattttgcctggtggcgaaatatacacgttcctaggagtccgtcagttccgtgtactaggtgtattggggagtgtacccccttttctgtcgcttgtcctccgtccggttgctatcttttgaggacctcttgctccgagagccttgagaaggtcccgctaggcttgcagcaggagcggagtgagacaggacttgtccacttatcccagaaggattcccataatgagaagatgcaggagccaatgcctagctctgattataccctggggtggcggagaattgtatgtcgctcattggtggagtagccgttggtagggtccccaggagctggactctaggcacataccctgctattccggtcggatagtatcccccataagccactatttggcttcttctaagttgatgtacttttgga

SEQ ID NO: 273650 - DNA, 946 bp, Cannabis indica
ttgtttttatgttttttgtgaaacaatcccaaattaaattgtacacttattttacttttatttttatattcttttaagatatactagtgatgtttttattatactctttaagttaatgtaagttatgtgctaaatttaagtggaagataaaaatatattaggcaatctatttacaaaagtgagtacattttaataaaatataacataagaatatttttgattaatggatataaaaaagaagtattcctcaacataacttaaaatttaaacattttatttttataagcatattttttttagtaataatgaaacttcattaattcaattctattaaaatcaaggaagcaattacagtaggtaaagaaacactactaaagatacgataagtctccacaagagaagattgtgccaaagcatgcgcaaccttattagcagaccatttgataaaattaaaagaaatattaccaacatctgcaaacaaatccttccaatctgaaataatatggccataccaagaagctataattttattattttgtaaattcgaaataactcttagacaatccgactccacaaccatgctcgtccacccattagttttgatccaactcaaagcctctttcaccccaatggcttcaacctcatgaggctaaaaaacacctatcttcttcgaagtcttggcttgaataaccatgctagctgcggaacaagcgaccaacccaataccaaggagacttgagtgaggcccaaggattgttcgtacaagtagggaccatttgaggatgttagttgttatgcacaactatgtttgtaccgagaatgtcaaagaatatggtgttggacaaaaaggtaatcttcttttggtagcactcgcactccgctggtttgatgtaggggataaactctgacactctggggctgcgtgtctattcggttttgggctagg

SEQ ID NO: 273651 - DNA, 1060 bp, Cannabis indica
tactgtggggtggaattttttcaaaaatactgtttactgtattaagtttccagggttgtcttttagttgttctactgttgttttaattgttcgattttattgttttacgattattttataaaaaaatagtattttttttaaaaaaattatgtcggtaaaattataaactttaatctaaaaattatttttataaaaacccctagattagtatataaacttatgtaaaatcatatcacaaagataatgataacatgattatacaaatttatatactatcaaaacaacaacaacaacaataataataataataataataataataataataatatgtttaacaatttattttgtaacgaatgattgatttaagaatgaaattttaatatctaatggatgaattttagtgagcgaggtgtacttattaagaataaatcatttgataaaagaataaaaatgcatttaaaaatttggggtatactcaataatactagggtgcaagttccctagtttgtttcatcttgagttttattcaatatattcttaaattttaagttttattcacacaacatgttgcttcaaagttcaaactacatttaaaggaataaatggcagcacatgtcttgcatgtggcactcccactaatttatatagaatgggccatatcaaccatacttgttgttgaacccaaatttgacatgatgttttgtcaacttactctcaaaataaacaatctcaacacaacctttaaaaaaaggatgtacatactacataccttttttggtttttggtttgggttgaaattataactccaattttgcacggtaattgcattgcattgtttttttttttcttacactcgcaacaaaatttttaaactctgattttgtcaccttaataactgtaacaattaccgttgtatatataagaactaataataattgtgattatagtttctctatgagctaaagcaaaagataaatgcacaaatgcatttttttttttacatctagcttaattttacgttatatagcttcacactaaacataacatttatccaatt

SEQ ID NO: 273652 - DNA, 496 bp, Cannabis indica
taagtacttgtctcaaataaggtaaaataaaatataatttatcattaaaaaggtaaaccactaccttaaaataagataaataacatgctttatttaggtaaactttctgccttaaataaggtaaacgacctacattattgtacaaatatcgtgcctcaaataaggtaaataaaaatataatttatcattaaaaaggcaaacaacacgccttatttacgtaaatatggtaccttgaataagatacatcaaaacaagtttatcagtaaaaggtaaaccactaccttataataaggtaaacaacgtatctcattaaggtaaataccctactttaaaataaggtaaacaacatatcttattaaagtaaataccttgccttaaaataagataaatgacacaccttattaagcaaattttataccttaaataaggtaaatgactcgtcttattttgctaagtactatgtctcaaataaggtaaaataaaatataatttatca

SEQ ID NO: 273653 - DNA, 1404 bp, Cannabis indica
tttttactattttagaaaatacagggtccattttgtcatttaacaaaacatagggtccaatctataacttttacaaaacatagggtctaaaatagtatttatccgaaaaacaatcacataataaactttattttatgctgttaaaaaaatttaaatatgttttatgtatttttttattttaatatataatatatatatgaggagagagaataatactaactcctcaagatggttaaggggctttttttgtaaaatagactatgaaaagcccaaacaaccattctcgtttttcataaggtttatagatatttagctaatgcaagtggtaagttttagacaccagatttgatatcattttcccccatcatgttttattcagacatttctcaaagtatttttgtcgcaaaagtaaaaaactcatgttctgtggatcaacttttttcgttcatttcaagactttaaaaatggttacttactgattacctttaatcaaaggtggatcatacaagtaattttccaaaatgatagaaacttgttatgctctttgtaccagtactaaagacaagagagaatgattcccaaaagcctgaaccacgtttttagcttacttcttcgactttgaaatatataggcatagccttctcaaataactgtttcttttaggaagagaatcatgtgttgttgattcagacattgttaatcttggattgacttttatgccctctaaattgatagagaaaagcaaatatcttaatagaaatagaaagggaataacacagtcacaaatgtataaatcatatttcattaaaaaaagtttaatgcattcacatgcaaaactagagaacactactgttctgtataataacacaaagaactgttggtattccagagaccaccacttctaaaccaaactcatacaatagataatccctttcaactgtccatacaatatttaagtatactctatatttatacttctaagactctttacacatcaccaaagccacatatagacccttaattacgaaatataactcaccttctattaaatacttctattaatttgactcttgggtgcctagcacaaaacctatacaaagtgcagcatttaagcaagattatatcttgctgtgactatttgtccaagtagcttgattgtgctttctatacttacaagatacaaaaaaaaacaaaaattaataaaataatcacaactttcacaattcctaacttgttttagatttcaaaccactatttagcatcatacacgaccatacattagatatgatacctatacccttttttttactattaacaatggaaacttccattaattcaaaagatcatccaaacaaagggataaaaagtccgaaggagtactactctctctaataaacacaatct

SEQ ID NO: 273654 - DNA, 1700 bp, Cannabis indica
ttataagttggccaattaatgatactgttgagattctttttctgtcaattgatactttagagtttctactattctgtgtggaattaattaattattaggtgagtgtagttcaagggaactatatataaattgatgggtttaagcttgtgagattaattagtattatataattattttacaagcctacatactcatattcatgagatttttttttgtaagaatattcatgagaatgaaatataaatttttgagaaatgctaaaaggtacctatagtatagtgtttaacacttttataaggtgtaatattcttattggcgttatttaatattaggtctcactatctttataagacaccacctcacaatggtgctaaattttatataataaaaaagaaaacaattttttaatgtaaattgtgattaattactcaatcataccaagaaaaccttacgtgatgagtaaaacactataaattatttaaaaatatatatttttgaatattcttttttacctttcaatcttagccattggatttacttttatttatttatttatttattttttaaaatctaatatggaaaatgaatatttaattaaaaaaaggaataaacgaacaaaagaattgggtcaacgaatgactgtgtctaaaccttggtctcttaaggagattcattcagcaaataggagtacatcaagcttgcggtaaaatcattagagggaatctatgttttgtgtaagtcaattactttgtacgtgttaaaatttgaataatgaaatttggcctcgtggactagtagcaatctgcaaggattgttgataccacgtataaaatattgtgtgtcattttagtttctacaattttactttctgtagtatatttcttatctatcaggttcggtttttgatagaacaaatttcaattctattcaaataattttataacagttttgcattaataaaattgtttgttaatttaattttattggtaatattaaaaaatagaatttcaaatataataatcgaagaaacagattcagagtgactgactttcgaaaaaacaaaagataaaatgacatttaaaaaagaaaaataaaatgacatttaaataagcttttgtataatgcaaacaaactctcttttggttttttttttttaattattaataatttataaacaataaattaaatgcaaaatatatgaaatggaaacaaaggtgtaggtctttcatatatgtggaactatgttggtctatgcgggggccatggccccccctaacttcaactttatagtttatattgattattgattatttcaacttcttcctttattctttctaaaattttactatttggtgatgggaataccaaatttttccacgcgtctacggtaattcggagaagaagaaatgctattgatagtgtggaaaagaatggggagtggcttcatcaacgtgaggagattgggaactacttcagggagaattttatgcaagtttatgaatctcagaatccggttattggcatggactttgatactcttttcttggagagtgttacggatgaggaaaattcagtcataagcagatgtccgactgtggaagaaatcaaatctgtggtctttcagatgcatcctcttaaatctccggggcctgatggtttctcgggcatcttttatagaaaatattggcgaattgtcggag

SEQ ID NO: 273655 - DNA, 1007 bp, Cannabis indica
ttgcttaattttttttttatttttttttaccgatggaacaatctcaatccatatgatataaaaatgagagatttttttatttagatagaaaaattaagcataaaaactcaaaattttctaattttacccattcatgagtaatacctattaagagtgcacccatgtggatatatatccacactattaatgtagatatacccattaatgtagatatacccattaatgtggatatatattttcatcactagtctcaactaacatgtacatatatacactattacataattagtatcaaaggaacacttcttaacgggtattacccatatatgtatccacattttggtggtatttgtgatttctacaataataaataagccgatgatgtaacaataatttaataaattgatttaagtatatttgttagaattagttccttgtttaaaattactcaatgaatcgcactatagacatcggtagatgtaaaaattgtattatatttggcacaaaaagtaattttatggtaaatttaccctaaattttagctttgtgctccaatatacaattacaaaattttgatgttaaatttaatatctaattaatattttattgaaaaaataaaatctaataactttataatcaattttattattattttaatatgtaagacactaaaaaaaataatataaatatttcataatttaatgtgatagttaaatatactaataaaataatagaaatgacataaatataaatgaaaaagtagtgtatttattgtggtataaattttacatcataacaaatgttgtaccaaatttgccacaaaatttgctatgtgccaaatttatatcactttttggcacaccattgaaatatattttttattaaatgagctatattttagttttttaccacttatttacactttcattaacgatactcttatgcatgcttttcaatgaaaagtgtctgtagagtttatagtaacctatatatatatatataatata

SEQ ID NO: 273656 - DNA, 4487 bp, Cannabis indica
ccagattttgtttgagaaatgttacaagcttctctcgctgctgaaaagtcagtttagaaccaattttttaacacattagaattatcgagagaatcaataggtacatcaattgtttcctccgtggcttgtgcaatatttgtgtaatcgaggactcttgggtccagatcaggtttctccacatgcgatacttcttcgattctaaaagactcatgttgaggaggaggacgccttgagacaaataaataacattcactgactttttctttactgtgattttttaatgcagtattgtagcattccctcaaatctgcctagactccttgcatcgatcccacacccgcggggggtggggaattccttggtgaggtggtagatcaaggtaactattttcatctctttcaaaatggggcgacctattactgcattataagcgaagtgtcggtcaattactgtaaaattggccatcgatttggtagtaacaggtgttgtaaatttactttaaataagtaacatcaacacatcctatacagcagtgagaccatgtttagaatatcttgactcgtcaaatgaggaataatgcagaccgtttaccgcgtaatagttcggttgcagtttgtaataaatagttaacgattaaaccagaccggaccgtttataataaataattgatttatatattttatatatgactatatgtataatatatgtataattttaaacttttttgtgtcagttttgtattgcataaattttagatttttatgttatgtttgactttgagaatgttttcttactactacttatatgtgaaatatatactttgaaaaatacaattaaaaatttggtaaaaatattacaatgacttaaaaattatgaataagtataaattccacttaaactgtggtttcaaaccaaaccaaaccgttcattcaaaaaaccgttatactggtttagtttaaaaaatatgataattcaaatgaaaccaatccgtgaacacccctaacaatatattaaaatattattttaattattttatattaaaaattcattcatttctcatcttaattattatgaattacatacaatatttatcaaataaatttttaaaatcatgtaaattgtactttaaataactctttattatgcaaacccatctcattcttgtaaatagtaagcgcaaagcagagcacatccacttggctttggtttcacttttacttacggctgaggatagcccaaacgccatgctctgatatcctcaacctcctccacccaacccaaccacaaacaatgtcttccatggccttgttttctccgccaacccatctccaaacactctctccttcttcccattccaagacccatttccctaacaacccttgtctccttctcagacccaacactcctctctttcgccgtctcttaacccccaaatcctctcctgataatggagccggagccctcggctcagctgccaccgctgtggaacccaaggccccagaaccttctgtgccctcctctgagaaggttgacagctcagctgggtcaaacgggtctgcgcttaaaacccccgaagtggaaatggtgagcttcttcgacaaccccaaatgggtcaatggaacttgggatttgactcagtttcagaaagatggcaaaaccgattgggacgctgtcattgatgctggtgaggttcttgctttcttcttcctttcttttgtctgaagatatggttagaaatgtggttgtgcagcattacacattgattgttagtatcagataaaaatgtaaactttaattagtttttattttggctagttaatgatttaaactagtttctaaacaatcttttatttatgtaatatttatttcttggaaattagccactcctgctacttgtcataacactaatcttatgctatagcaccaccaggatccttgtggccatacttgttactgtcatcacttaaaattaatcaccataccaccactcactgctattacaattccactagttctgtccacattagccactgccttctagttcaattttgataatgtaatacttggtcaattaatagaaaacttgttctgggttcaatttcctcatgagatattttgtttaatgaaggtgtctactctatattgagcatacatagcataaagggtttctaaatttcgaaccatttgcatgaagtttgagataagattaggattccgatcacattagctcatatttcaagttttggttaaaaaatcagcatatcccacttggtcttcttcaagaatgttaagaaatcgaatggtgatgctgatctttcttatctctttctgtgcactggagcttattagtctacatacttgagcatatcaaaacagatttggctaatgaacttttcttcaacattgtcatcagatacaatacttaggagtatctcaatggcttattattagatacatggtttctaatcctctttgtttcttttcacttattttggcttgatacaggttatcattattcaattttgtatatgactagttgttatccaaaactgataatttgatatggactttacacctctgaattagtgttattttctatatgttgggggtaaatatatctaatcttttctttgtacattgggtaaataaatcatgcatgtaacttattagtaaagtaacttgatttcgattgtatatatttatgtataatttaacttgtatgcttcatgataattccaaaattacttcaacgctaatgagaaacattaagtattgactattttcagaggcaaagaggagaaaatggcttgaggacaaccctgaatcatccagtaacgagaatccagtagttttcgacacctccatcattccttggtgggcatggataaaaagataccacttacctgaagccgaattactaaacggtttgttaatatcggcttcattttgttggcacaaaaacacattccgctagcctccattaatcaatcataagtcgtttacatgttttatgcaggccgcgctgccatgattgggtttttcatggcttattttgttgatagcttgactggagtaggtttggttgatcaaatgggaaacttcttttgcaaaactttgttgttcgtagcagtgtccggtgtacttctaatacgcaagaacgaggacatcgatacactaaagaagctgctggaagaaacgacattttatgataagcaatggcaagcaacttggcaggatgagaagcctggcagttccaagaactagttaaaattgttgttagaagtttggcttttgaattaggttgttgtcttcatttgatttgcacaaagacaagatattctgctagcctatatatgttccttttaattacttaatcttttcattcatgtcctatatagaatatcaaagtatgggtcgattgataagattaaaaaaaaaaacagacaaatacattttcctctcgtattttgttttagaaattgcttaacatatatcattggataaaaagatttataaatcatctttatgatgtcactatttttttttataaaaaaaatgagtggcgcagctcagatgatcatatttcagatattctatcccttaatgatattaatttttaatcttaaaaaaatctcttacttatatatatgcttagtaaaggtaacttaaacttaaagttgaattagtactttattggtggtccaagctagaaaaattactcattaaatatttagtatagatttatatctttgactttaaattttagattccaaatagaaatttaatttcaattttcaaaatacattgaacactacggtgtaactttcacaagttgttaatatttattttctatcaatggatccaaactgtatgttaaatgtatagattatgagttttatattctgagaccaaaatccacttgaattattctaagaactctttgttgtaaatagacctaggaatcatcaaaagaccacaaccacaataatatatttatggcatttacatcttgttcataatggtttttgacaagattattctttgtaatattgttagttccctaatgtatacgtgtcagttatagttaggtattgttcggtaagttagttatgttaactaactcctagctagttctaggatatatataagtgcctaattactactgcattgtaattgtaacaatacacactcataatatacaatacaagattcttttaatgttgtagaacttggtgttcaatggccaatcgacctatgtccatgtgaattgatcttgagtgcttgagagagatcaatgctagactttgcataacaagtggtatcagagcattggaggaggtagttcgaagtgaattgtcttgtttcttgttcaagaattcaatgaacaaccaagaagatgggcactgcaaagtatgatctcgagaagtttactggaaagtaggggtgttcatagaaatcgaaaaaccgaaaccgaccatcaaactgac

SEQ ID NO: 273657 - DNA, 1205 bp, Cannabis indica
taattaatatatacatacatattcctactatataaatatatatatatatatgttactttctcatcaagagctgaggaagcattccttttctgtgacattttggcatatttcttttatttattttttaaagaaaaaaaaagtaaattcttatcactcatgtgtatgtggctatgtgtagccaagaatatcatggttttctctatgattgtgctttattttcctgttaaaagacttggattgatgccactgatatatcaatggtttaaactgtaccttatacatatatatatatatatatatataaatataaataaaaaaagctttcaacatgctcatgtttgcttgtcaaatcacatgtttttgtaacctagcaactactttaggatttttaaaatccttggagggatcatagatatgctcatcaagtacttttgatcatctcatgtttaatttattatttttatttttttaatttttttgttggtttggattggagctggattatttggatgataccatttataggtgatgttttgttgagctaatatactaatcatgaattatatatatgttaattatgttatccatttattcttataaatatatatatatatatatttattgtatgattttatgcttcaattaatatagtttcttaaccttctatctctattatatataggaaatttttataataagaacacttcatttgttcttataagatagtgacaatttattaattaacctattattaaattaacttttagtaaggtttatttaaactatacaattaaattagaaaaaatagactttattaattattaattttttttttttaaaaaaaaaaatttaagtaaagagatattcattagaaaacacatattaatcatgtgacattcaactatatctcgatagcaaataaaataagtaaaatatttaaaattggatgaaccgtattttattaattttttttgtttatttttattgtatttgtaaaataataccctatatttattctattatgacccgataataatatcagacatatacattacagattatatatatatagttatcattacatttataatataatctcaattaaaaagtagtgtacgaatcaataaaagacaagataaataaaaaggatataactgcaaaaaatgaaaagattagatgattttatgctgagggcatacaggctc

SEQ ID NO: 273658 - DNA, 1176 bp, Cannabis indica
atatatatatatataaaatcaatttataggtagtctttaaaaaaaattaaaaaagaaattaatcaatactcacgtagtgtttttggttgtggtggtggttgtttgattagttataatattttaagctaataatatggtataaaatgaatagggtgaagcagggtctactttcgtctccttcttcgtctcttattgatacaaatatgaatgaaacatcgattattatttgatttttttttgaactgattatgattattatttgaatttggtgtcattattcctaaccaatttattagttttaggctagcctcaatatttcaattaatctttcaaaacctatataattaaaagaaaaaggtaaacgttaattatttttcttgagagaagcacaaaattattcacaactgactatatgttggattgtattatattgtattgtagtaatattatttaatacaatattatgtttgatattgacttgtatgaataggttgtgtaaagttataatatatttttaataaactcgaccccaacactgactccgggttgggtttgggtacgtggtttgggtttggggtacgggttcatggtccggatccagtccaggctcaagtcaggtctagatctaggatccgggattcgcgtcttaggtccgaggtctcaggttacgagtttgaattctagatttcggtctaggtctgggttcgagtcccgggtccgatccggtccggtccggtctgggtctaaggtcccaaacccgtttaggttcggggtccaggtttgggtctgggtccaggtctaggtttcggatctgtcttaggtctggaccaggtttggtctggtcggggtccgtgtttgggtctgggtttgggtctgattctagggtccaagactcgtctaggtccgaggtccgcgtctgggtcttgggtgcggtctgagtccggtctgggtctgggtccaggacttgtctaggtctcgggtctgagtctgagtcctgggtccaattcctggattcagtctaggtcagtttggggtctggggttcgagttcgtgtctggtctgggtccttggatccgggtcggagattggagttgactctggatcctttataaatattatagtacaagctaatacggactatttgttatgtatcaaataatacaatttatattgtat

SEQ ID NO: 273659 - DNA, 679 bp, Cannabis indica
aaatcgcaactctacttgaaaagctttctttattttcactattctttttttttttttgaaattccatagtattttagccataactctctcaatattaccggaattgaacgattcaagatattctaaaaagctaagaatgagatctaaaaccttcatgttgagctccaagtccaattctgcctctcaggtcgtccaaatttgcaattaagttccgccttgtaaaatcgagctcctcagcttccactattttccaccaaaatatgctaaaagccctccaaaagactctaaatgcatgaatagtctttaaaataccctaacaaattaaaatcacactaatcaaagatttaaagaatcaatttaaaaatattaatacataaattaaattttcttataagacaaattgaactcatcacatcacctacaaataaaatgagcaaatggtatacaaataggtgatcgagcaaatggtatacaaataggtgatcaatgccaaaaagaaaaagagaaaaaattgatcgttaagtcgtaagagaattcataattattgtatgataaatttattacacattgccttcacataacaccttgtggcataacacccgtttttgttccgtataaaaaacttcatatggtcaagaagattataacataatttcagagtgaccgattgcaaacaaat

SEQ ID NO: 273660 - DNA, 760 bp, Cannabis indica
attaaaaaaatataatatttagatgggatagagaaaaaaatataaaagttgatgtatgatgtaatgtaaaagtgtgaggtaaaataaataaaatgaagttaagtagagaagttgatgtaagtgctctcagaataaaaaaatattttattaatttacagtacaaatattcattattaatactcaaaaccttaatttttcaaacttctgttgacacatggacaattcatattatttcactattttttttacctaataactaatttaaaataaattttatttaataaaaatacatattctgttaaaaaaataaaaaaataacctaaaatctaaaatccaaaaactaaaaactaaaaacctcctactctaaaagacaccatggaggtcgttttccaaatcctctcctccatgaacaacaatgctccttcttcttccctttcaaatggcatcattgtcgttctcgctaacagagacgtctctgcttgtgatagcaccagaaggcagactctatcatcacagatagcttggtggtggcggtgttagtaataatatacgtggtatattttcattgaatttaaaattttactctcatatatacacatctatacatagtgacattctagatggtatttaacagttgaatttaacggacgcctcaaatttataaagaaaagtgaaattaatgaggtattgccactaaaaaaagatcaagaatttaagtgtctaaaattaaaagggaaatttgattttctatacttagaaa

SEQ ID NO: 273661 - DNA, 540 bp, Cannabis indica
aaaaaaaactttttttttaccttctccccctcttgatcatacaatcaacaattcccaaatggaaaggaaccttctcttgtgtttgtaactgcaacaacaattgcattgatacaatcaaaatgtaacaaattaaacatccaaatagcttagaccgaatgtaatggaattgaagttatactaccaataaatcctctctataagatcaaataacaataccaataccaacttttgactctaccacatcaataagagcattcattatgttatttggttattaaacaagaacaaaaagaaacaaaatgctatgaaaaattattactttctttactataattttaatttaataattattaatgaaggtaatttaataaatttacatatatacatttagaaaattactataatgcacctactcaaaagtgatgtatcaatacatctctatccattttagtattcgagataatttttagtccaatttttctcatgtatgtaaataattagttattaagacatcctgcaaaattttagaaattcggaaaa

SEQ ID NO: 273662 - DNA, 830 bp, Cannabis indica
aattctattttttatttttattttccgattttatttaagtcggatctagatttggggtcggattcgggttcgggtcagaggccgggttcagcgccagggctgtggggggaggatttggattcgagtcggagtttaaaatattgattaagaaaaaaaaaactgtttaaaaaactattgaaagtaatttttttttttttaaattttgattctcaattaaaaaattaaaaaagtgaaaacagttttatagcacatgtttttgaaaaacattttcacttttctaattttaaaaacaaaaaactgattaaaaaaagtgttaccaaacgtcaccttaatcaattaaaagtaattctttttgatattttacaattaaattggttttatagaatagtttctattgatattttagatttctcgctacaaaatagtttgtgaaaatgagtgtctgtaataggtggaaattacatgatttattttatagcttcattcagtggcatgggttttgtgttcttgagcttcacttataaactcatcgtgatttgtttatatgtaatagagtttacttttatatgacataaataaataatgaaaaaaaaaattatagaataaaaaataattaaaatttaaaatatagaaaaaaaataataaataaatttgataaaacttgtaataataaagttcgcccaaaaaaaattgctgaaaaagttaccatcgctaaaaaaaagtcactggaaaagtcacctgaagtaaatatctgagatatgaaaaaaaaaataagaaccaaattactataagataatagaataaaaaaaaaataaaaaccgaaacttaat

SEQ ID NO: 273663 - DNA, 518 bp, Cannabis indica
aaaattgaacctatcatgtaaaatgaaaaagaaagcaaacaaacttatacatacaaacataaacgtaccggaaacaaactcgccggaggtagcgttaagctggagaatggaggaagaatctccggaaggaattaaatgaccggtaattgcttttgcacgtcggtgaggcgccgtcgaatccatggaaggtaggttcgaggattaataaggtgtggttcgagtaaggaatgcgatcaaatctgaatgtgttaaggtttgtttcgagggaaaataaatggggagaaagacaggatattgataagagaagaaaaataagattgagattaggagaaggcacgctacccaacgctaaacgacttgagaagaaaatgacgtggttttatatttatttttttactttaaaagaaaaaacatcagacgaaacccagacagagacatcataaataaaaaagattttggaatatcgctaagtaaaagaaaatcaaatatatataaacggacagaacacgtaaaaaaaa

SEQ ID NO: 273664 - DNA, 649 bp, Cannabis indica
gcagttccagcggtactagcaaaacaacctattgctggcaaccgtatgaagccattatatgaaaagttccggaagcaagcacctccagtgtttctaggaggtccgagatgtgacgaagggctgagcagtggctcacagtgattgagcaaattttgaattttatgggggtggttggaaatgatcgggtgacctgggccacatttcagttccaggaggatgctctcgtgtggtgggagttgataactctcactcgggacgtcactgttatgacctgggaagagtttcaagagctatttaactccataaattataatgaagtcgtccgcagtgctaatcggaaagagttcactgagttagtacaaaccgaggggatgtcggttactaagtatactacaaagcttgaccgtctggccaagctctctgtgggtattgtgccaacggattttagtaagaaagaaaagtacttggcgggtttaaatgtgaagattagacatgatttggtgatcactaccaacgaagcaacatcttatgcagaaatggttgaggaagcccttcgagccgagggtgctgtaaaattccttcagcagccccgagtgactccgagtgttggtgggacccccacctttcctactcctgtttatggtaggga

SEQ ID NO: 273665 - DNA, 1010 bp, Cannabis indica
caaaaaactttgttatatatattttttgaatggactttgttatatatattattttctaattaatacattctttttttaaaaaataaataaatacattcactaattattggttggtttataattgatcaggaaccaaaatttgcatggtccgacaatcgtttaaaattagtgagctatgaaaaagttagagaagcccggctgaaactcacactcgaagtaccaatcttttttgcttcctttgatcaaatgaacaatgtagtttccggagaaggtgcttgttcggctatagccatagtcgtttctcattggcttcttagcaaccctaattctctccccacgaggtttcaattagactctctaattattcaaggctcctctgaatggcggaaactatgcaacaaaacctctcatcaaaacaggtttttaaataaccattttgatattgagacgttggtggaagctggcattaggccgctctcaataatcactgaaaagtctactacaggattttttggtgttgaaaagtttgaggatttgaaaggtcatttctccctagacgatatgtgggaggaaatcacgaaaagtttaactgatgaaccaaaagttttcattttgggttggaatgatcactttttcgtgatgaaattaactatttcatcctattatattattgattcactgggaggtagactcttcgcgagatgtaatcaagcttacatactcgattttgacgagtctagtactctctactctgaaaacaaaataatttgtgcaggcaaagaatgctgcaaagaatttttatcaaaattcatggctaatgaaattgttatggagctagaagagtataacaaaaaaggatgcatttcgttggagtatatttacgagaagttgcaaattgatatgcattatatgtgtttaactactccatcgtccccaacattgccatcgtcttccttgctcctccatactaatccatgaatagtgttgagaacataattgtatattttttt

SEQ ID NO: 273666 - DNA, 598 bp, Cannabis indica
tagattcaatgagtgacttccttaaccgcgcaagttttattaagcttgaagaagccattcagcgggcagaacttgagcaaaaacctggttggccaaaagcttccattgttgagacatccgtccagctcccccattacccgagcaattcaagctttggcggtaaacggtccaacaacaataataggcaagggaatgggaaaaagggaaagttcactggcaagaccgaacaaactcccagggagaatcctaccaagtttactgcattttctgtactgacagaagatatcaaaagtgtgtacatggctactcagtcattagccccgtacaagaagcccgcacccatgaagatgtaagcaagaaagacatgaccaagttttgtcgatttcatgcggaatacggccatgacatcaatgaatgcaacaatttgaagcgggaaattgaatttctgataagaaaaaatagtccgcacatacagaagtatgtcaaggctgatcaaaatcagaggggcgataacaaccaagatttactaccaccaccagtagatggacatctgcaagtcattattgggggtccgtacatagcaggagattcaggcaaa

SEQ ID NO: 273667 - DNA, 1053 bp, Cannabis indica
acaaaatataaaagcaggtcacataaaatatgacacgaacacgacacgatgacacgttttgccatccctaagcaaccctgcatagaaatacttatgtgagtagtagcaccataatctatccaccaagtgtttctaggtactaaaactaaaaaacctttaccaaagtaaaattaatacctttctttacacgccatgtgtgatatttggcacaatttttgttcacatgtacaagttggctacaaaagaaacaattcttataatcatgtgttgtttcttttgaactggacccttaacagcttcattctcaaatttctttttcttgcccttatccttaggggtagtggctaagtgagcacttttagttttgttatttttaatctttatttctcttgcacacaatgaaaaatgggctcattaagagtcaatttctccttttaacacttgtaactaattttaaattagttaaactgtggaggaagcgttaacaaaatcatgagcataagcacatcatcagaaaactcaatcttaagtgcccttaatcttgagacaacatgatgcatttacataatatactaagaagtgttctcatttcaatcttattatttttagcaaaatgttcctcaatttgttaaaggaaattcttgaccatagtaaccctttcggattctgtgccccaaaagacttctggaatgttgcatttcataatcattagactcgtaagatttgaacgatcccacctctcaacttttgtttaatcatcttgagttctttccttagtgagaggtgcatgttgtccatcccttagtgcatggtctaaatccatacattctaaaactataaataagttctttttcaatccttaaaattagttccattaagcataggaagagaattattattagtatatattgaagcaaacagaagacgaactagtcgaacatagaataaataaaataagctcagatttgttaacaccgaatttcgttaaccaataaatgggccctcgcccccagactcagactcgaacttggggtatgtgagagaaaatataaa

SEQ ID NO: 273668 - DNA, 538 bp, Cannabis indica
gatatcttttgaagtcattgtctttattttgtttagtttttttgtgatcattgaatataatctgtcaagtaggagattgtaaggttcatttttttgacagattatattaatagggagtccaatcttatctgtggttttaatctgttataactgcataccaattttccgttaaagtccttgtgagtctgttatgttttaactgttaatataaattgttcttaggtcggttgaactattgtctataaatagctagtttcattctgtaaacgggttagctagctaattcataatcttggttagttcagatatatcgtggggtattgtgtgtggtatcttgcattgttcgttgctattttttaggtctgattgcatagcttgtgatggatatccatagcagaaagatcagagcctggtgttgctgagttcagactgaagggagttcagtgtcatcttcgtcatcagatctgaaaggatttcagattgaagaaaagtgtcgaagaagaacttagctctgttggaagttattttaccaggaact

SEQ ID NO: 273669 - DNA, 783 bp, Cannabis indica
catcatccttaacctcaacctttagtgaatgaatacacttcttgattgactcttctaactctttaccactccttagagtgattactttgcactgatctttaggattcactcttgttacttggaaaatttccttgaggtttattttaaagaagattggtcaactgtccgacttgtgtctcaagatttcgaatcgatgctctgatctcagcatgaactaagtttgcatattggtgagagttaacaaagaagcttttaaatcaattgttggagcaggtggagcttgtaaattttactgctgagaagtagaagcttagttttgattctaaaattgaggttgttacccttgattatttctccatccattattaaacaaattgaataaatgattgttgaactacctctgaaaattggctatggcttgaacttgagcaggaaacatcaaaatgttatcaattgatgacctccacaaattttacacccagattgagcttggatagcattaacaactacagttgtctgctgtaactttttagtgatagttgcaacctgagcagtcaacgcagtaatcgcatctaattcatacattccaactgttttcttcttcctagatgctctctcataagaccactgatgattattcatagccatatcttctagaagttcataggctccagttgcactcttactcatgaatgtttctccagcagcaacatcaataatagttctagttgtgggacacaaaccattattagaagcttgaactaacgttatccacttctaaat

SEQ ID NO: 273670 - DNA, 1239 bp, Cannabis indica
ctagaggtaattagggttaaaaagtagatatgtaccctgatactcatttaatgtaccttgagacccatctaatgtaccacgtaatacattccgtgaaagtacatcaccgtctgacggctgagcttgatctagaggtaattagggttaaaaagtagatatgtaccctgatactcatttaatgtaccttgagacccatctaatgtaccacgtaatacattccgtgaaagtacatcaccggattagattatgatgacacaatctacgaaacaatgttttatgtttttggtgggatcatatttgttatttgtggtgcgtgagtacagtataaataaaacaaaattaatcatcttcagtgggggctatatatcaaatcatatccagatccagtacaccttgttattgtattcatcatgatattctgcgatgtgcttaaaataattatttctaagaacattctctaatctcggaaagaacccagcttacatgacaacataaaaaggtaaaaatgctttaataattagtatctaaaagtaataaaggaaataaatcaaaatgttcgttgtctactatttggttcgcatttgcatgcacgtgcggctctataattataataatatctttcgtattgttcgattaaattcctccaacattcactttaccattgtaacactatctatctctaaatttgttaaattttgcaaaccagaactagttattaatttaaccaaattaaacaaatacatcagtgcagttttttaagaaaaaaataaaacaaattaatgaagtatgtgggctgtcgttagtctaatattaattcaactagggaactaagccgcgccttccgcagatttggccctagttttgtaaattttcttttacttgttaagtaataccgattaagtaatataatgtaaaatataatatttggatgtatttatatatatatattataaataaagtaaaattttaaaattagaaatataaggaaaagaagagaacaaacaacaacacaacatatagtcgtatgagctactactttattatgaactcggtacacatgaaatactgaagagcataaacaaagacaaaaaagatatttgtttgatggtgtggaaaagtcatctgaaaccttcaaacaatcacattcactcaataattcctcaattctacttagaaagtgttcatacgggaaagcatgagaaaacttgaaagcaaaatagacatgaacttcacatacat

SEQ ID NO: 273671 - DNA, 761 bp, Cannabis indica
attttgcctccttctccctctcttcttcacgcactctctctctctctctcttctctctctctctctctctctttcactctcgctctctcttctcgcactctctctctctcttcactcactctctctctctatcactgccgccgactccgccgagtgccactcgatcctctcccggccgactgccacctccaccattttcaccctcaacctccacctcactcaacaaagcaatgggtaagtgtttttcttagtaaatagtgtagttttttgttgaattgcatggatctgaacgttgttagttgtaatttgtgacctttgtgtccttgaaatggaggtagagtttgtggctaacagtctgtatttttcggggtttttttgtttttggcaattttatgcgacatcatgcgatgttttgtccgatgttttgtgcgatgtcatgagaaatctgaggttacggatgacatgattaattttggcaactttgtacgattattgtacgattttatgtgcgataatgatattttgcgatttgtgtgcgatatgttgtgcatcgttatgcgattttgttgactatgtgatattgtgcgactttatgcgatttctttcctttgttgtgcgattattgtgcgacatcataactggtttatattatgttagcttaaggcgatattgtgcgatattgtgtgggatatagtatggtgatttttaaatgtaagtttgtttgtatttctttgggacagattcatctgtatttgtgcctg

SEQ ID NO: 273672 - DNA, 742 bp, Cannabis indica
aaaaactctcttaaatatcaaaacaaataggaagatatcaaaacaccctttttaagaggtatacgcattataaatttattgtattatttttaaataattaattaagtatcctaattaagtagaatattcctaataaaaactttgaccttgattttcctagttcttctcttaaaattttgattatgtgttaattgtactcctttcaaaactctttcttatttatgtgaatatgtcttttatttaaagtatcaacttttattgttgaaataaatgttaattttttttatccatacttattttttaataattggtccccccaagaacttaatcttgactccgcccctgacgataagtagacccaatgaaaaatattgcactattttacagtcatccaaaactagaaaccttttattttatttcgttcttgttcttcaattcttcgttcttgcattcaaaggaaaatttttgtattcaaaatttggcgaaaacttttttgaatgaagcatatttttttcctgtaaatgcaatctcaaattttgtttgcttccttatgagtagctataaaatttatattttgcttttttgataataacacctgttaagagttagttaagcaactctaattctgttataagttgttagtagcttagagttatgtaagttaattttgtatagataatctttgtaagtattttgtaaaattagcctatgaagttttctattagcaaaataactttataaa

SEQ ID NO: 273673 - DNA, 875 bp, Cannabis indica
caacagtggattaggcaggccaagcccgaagctcctactgaaccactatacttttctgtgtctattttatactatttacaatactcacactatattctttgagtacccgccattctaagtgagtactcgcatatctattttttggtatccaagcaacccttgaatactcgcacaaaattggtgttgtcaaaattcctgtgacaacatttggcgccgtctgtgggaaacgatattttataatatttctatgatttttggaggaaaatcatgacgcgatgaaccaagtatacacagaatcaacctctgtttaatcagaaaaaatgtgagcaatctcagccccgacactcagagatcaaccaaaatcaaaatcaagagatcatcaacaacactgttcaaagcaacataaaagatcccagaagaaagaaaattcacatcagcaaagtcaaatgaacatctccgtttgagattatccacaaatccaacgcgtagaaataaacaaaacctgaagaaaaactccaatgtcagcaaacagagagaattaaagattatataatatattttgcaaggaaggaatgactcttaccgctatctcggactttaaagccgccttgacctcgaggaagctcagattctagaaccgctcaagtccaagagcctgccgagcgttatccctccgttcttggagctgcctaaactctcattgttcttggatattggaaccgctcaggcatcaaagcacctcgacatttgaatttccttcaaagagatcgtaaatatcaaagaacaaaaccttattctcacaataagagttctcagatgacaacataaaggctataaattcttaccgagaaagagcccccaataccaaagattac

SEQ ID NO: 273674 - DNA, 3143 bp, Cannabis indica
ttttttttgtgtaaaaaaccgaccaaaccaacctcatccctagtataaaatcaaaaaatatacatagtaaaaataaaaaaaaatagggaaatttacatggtatactaacttttgctaattttttacaaaagtactgccagacggtattttttactttattactgtgtttttttataagttccatactgcagtatactgtgttaagttttcactggtaatctactagtgttttgtagttgttctactatttttttgagttgttctgctttgtgttttacaggtgttttataaaaacacagtatttttgaaaacttttttgtgtgacagtatttttgtaaaagttaactcaaattacagtatttttgtaaatttcccaaaaaataccgacaatatttacgtaataaattggaaaaaatagtgtatgatgtaaattttacaactctatacaacgtcggattcggcccaatgggaccgacttatttatttatttattttttttttatttttttgagatagggaccgactcatttgaatttggttttattttattttttttattatatagatgtcgcaaagagaaaaaacctggattgaggtttgtgtggtttcctccattaccacattcaaatataaatctccaattgactacaaaaggaaaatacccatcttcatttcaatcgttgccttcgatcacataagtagaacaagttcatccaacaatctgccaagtatttctttttcttttattatgttaatcgtgctgtgttaaatatatatataatctatatttttatcatcaatggataatttctcgttttgtatcgttggtatgttaatcttttcgaattgggggtttccgattcgaatgttataaatttagattgagagttttacattgctagcttcgattagcctgattctcccttttatccaaaattagggttttaaaatgcgattaattagaatcatatctttttatcaagatttcatactatttgagttgatttgatttaatttaatttggtatggttttgatttgggtctgtggattttcagtatgccggctacagcaggaagggttcgcatgcccgcgaacaatagggtgcacagtagtgctgccctacagacgcacggaatatggcaaagtgcaattgggtatgatccatatgctccaaacaaggaggaggataagagctctacacagcacaaatcggccaactccgagccagagggcgagaatccttatgccaactttcaaggacttcttgcccttgctcgcattactgggtcgaacaccgatgttgctcgtggtgcctgcaagagatgtggccgtgttgggcatctaaggtttcagtgtaggaactttttgatcaaggagaaagacccagcagctattcaggctgatgttatgtctgagttggataagttgaagggaaagggtggtaaggtgaagggaaaagccggtgctgagagcgaggatagtgaggatgaggatgaggatgatgaaagtgaggaatcagattctgatcgtgattcagagattgagaggattatttctcagaggactgggagaagggctagaaagaaagataggtcagtaaagaagaaaaatttggatgctgacgatgatgatgatgatgatgaagacagcttggattcagactctgggaaaaggagaaagagaggaaggtcgaagaagaagaggagtgggaagagggaaagtgatgattctggtagttctgatgatggtaggaggaagagaaagaaggagaagagggtaaagaaagatgactcttcagatgaggaaggcaagcatcgacgtagacggcataggaagagtaggaaggaaaagaggaggcgaagaagtcatcgttactcagatgattctgcgtccgattcatctgaggatgatagacaccggaagaggaagagcaggcgatcaccatcaccatctcgttcagatggaggtgactctgatgattcacaccgtggtcggaaacatgtgaagcggtctgcaaagaagagcctgaagcaccatgatgtatagaaccttgagtaagagattctattatactgtataactatattagcttgctatgattgtgatgaagattctaacagaacttggtcgttgtgtgcttcattttcttggagatattttgtttgacatatttatttctgcaattggaggtgaagaaactattttttatgttggagtttgaatttgataatttgtctctgaattgttttattattttcttatgttttatctgttttttctttttattgaaaatgatatggttttatctttattagttgaaatatcactgattatcatgactagtcataaaaatctaagatagtatagattccctttctaaaacaaaagttcagaatcatctctccaatgtctggatttgttgatttatttaagccagtttctgacatggaataaaccattaaggctatatatgtattttaaatttcctacttatactactttttggaattttttaaataatgagcttctttgtgatgacaatttgactgcttacgcttaagaactcatctctaatctctattgtactatttaattagtaagttttctgagaaaggtacaaataaaatggttccaattgaagagaactgaaacgtttgtgttattaccggccaaccaagtacgttgcgttgattcttatgatgaacatttgagaaagctatcataaggaaactagtgaagtttagtgattttcgttttgagttagtttgatgttgaagtattctagagtttttgggtccaagattctaaagtatctgcgaaaatgctaatttgagagttaatgaggtttataacatatggtaatgctaaggaaaggcaacggtttagaagtatgctttggcggtcccgactttttttatggcgtttgattagaaggaataaaaatataaaaattctataattaggagtgggatgaaaattggatgggtaataattagggtacttttatttgcaccccataaaattataaatacacaccattattaaaaaaaaaatataaacttaaataatttttaaaaattactcttaatatgtttttttttaaatttttttctcacattattttatgttaattttaatattt

SEQ ID NO: 273675 - DNA, 838 bp, Cannabis indica
aggaaccgacgccataggggtccatatggcgtcggttcatatggaccctttagcgtcgccctgatcagcgtcggtagcgaatttcgcgaaaaccgacgctgaaagggcttaaaaactgcctctaaagggggtttttgtagtagtattcatactggactcaaataatgattatcgaagatggctctaaggaaggtcaattcaatttgtagatcctttctatgaaaagatgaagctgatttctcaacacctggaaatataacttgagatcatgtttgttttaggatttctaaaggtggaacaatggaacctaaatctactcaatacaccattgccttctgttaattggcaatatgaagtttggagaagattgagtattcctaaacatcactttatactctggatggcaatgctaaaatggctaaaaaaaaaaggcaaattgtgcagaagatgaacatatatctgtagatgagaaggtaatgaagcaataaatcatttgttttttactttgtccatatagccacaggtgtctaactcagatcaaagaaaactccagcaataacgatcaaagctatattcaggggtattcataattaagattaatagaatacaattcatggtataattagaaatgtacagattataaaacaaaagttaaaaatagagtcattagcgtattactaggggaataagtttctctgatagatatatagaatatgcgtagggactatttaaatgagatgtaaatatagaagattaaacaaaccttttttaagaggtgctaatagtttgtaattcaattgaaagttgaagtaatatgtacatatgttgctgatttata

SEQ ID NO: 273676 - DNA, 848 bp, Cannabis indica
gactttgatcaagaaaatgatctaagtgtcaatctcacaaccactgatattgatcagtttgctgaagctaatatcgcataccagaatggtcaaaatcgcaccagcaggttctcaaacacaaatcgattttcaccttctagtttaacacgaggaactggtcgaggctttccaaatcgaggcacaactactggaggtaactatcctaattcatctccttatttcaacactaatggccgtggcatgactggttacagcagagggggcagattcactccttcctcaaatcgagttcaatgccaactatgccacaagcttgggcatactgtccttgactgtttttacaggtttgacaagagtttcacaggagtatttccccccaccaatccccccaatgctcaagccaacatagcagccaccaccactgttgatgatagtaactggtatccggattctggagcatcgaatcattgcactcctaatgtgcaaaacctgaatataagcactgagtatgaaggagcagatcaactatatgtcggagatggctcaggtctgtccattaaacacataggcaaatcttttattcatacacataattctcatcctcttgttttaaacaaccttttacatgtcccagaaattaccaagaatttgcttagtgtttctaaattttctcatgataataatgtattctttgagtttcatgctgataaatgttttgttaaggatcaggaaactcaagcaatccttctcactgggatacaccagaatggcctctatatttttaaagtccatctcaaatttcatgtgcaagcctctgccccagccactgttccatgtgctttcactct

SEQ ID NO: 273677 - DNA, 664 bp, Cannabis indica
agagccagatgaaaattcggaaagtcatgaaataaagaccctaaattatccaccacagctatatctgagtcggtaaaaatgtagtgtttgacatagtctggtctccgagaaagctcctggagtcttgtttccaagaaagcctgaattacaaagttgatactcgatattaaaattcagtactgccataaaacaattatatcacaagaattgaagaagtacatagtcatggattggctcgaatataaacatttcacataatttaaagaaccaaataagaaaaaaaagtggaactcaattaccacagaaagttattagtgagaaaagagtaacaatgagaacatataaattaactgagaaacatgctagtcctcaaaagaaatcttctacaaacaatttatgatgcaaaataatcttacaatgtaagacctgattctttgaagcatcaacttgtctcgcgaatattcaccttggattggatatacagtgaccccatttctgcttattgaaagatcagatgctgggtcagtaagaataactacattgctctgaggcattgttacctgcacaatatgcaatatgtaaagacaaatacacatttcttcactttctaaacaatcctttgaaatattctgacaactcaataggtatttcacaaagctcaagt

SEQ ID NO: 273678 - DNA, 599 bp, Cannabis indica
ataataataataataaaaaatccttcatgtgaaatcaatataaatatagtttatccttacaaaaaaaaaaatataagtttgtatatacattggttaaaactatatttattatgcatgttgcatggtgaagagaggtgactgacaatatagaattttatataatatagtatgaatttagggtgcaaagcgctatttatgtaatttatatatttttatggagttcgataactttattatttaataaataaatggttttataacaaaagaagcaaaaggatgaatgatgagagaggctgctgaaggcttaagctgcgtaatggaagggtcaaatgagagcatatcacatgtttttattcttttttatttgtaataataataatattattattatttcattacattatattatgaaaaggtgtaccagttttatttgccaaaaccttaacctacttcaatctttttgtgtggatataattgtgtggacatttatgactcacaccatttcttctctttacactcgtgttattttatatgtttgtagacgtatatgtatacgtatgtcctttaaagttatttttcagttttttaagattaaaaaa

SEQ ID NO: 273679 - DNA, 735 bp, Cannabis indica
ccactttctcgctttgatggtctgcgctagccaaccaggaaagtgcccaaacttgttgattttagttgtcagcccacgttcaatgtagaactctttattctgaataaattggttgtacttggtttcagcttcaggagtcaaaaagtgtttgttttcatctagctccagcagcttcttgtaagccatttgcttggttctcgacatcttcgttttctgctcaataatattcagccacaatattcttcccaaaaatattcaaaattcgcacccgtgcaactcacagattgagacaaatccaacactaattcaccacaaaaaatattcagatagcacaaaccaacaatgatcacccaatatgcatttaaaccaaatagattttcaatataactcacaaaccagaaattggctcggcagtggtgaacgaaaccagtgatggtgctggcttgttgcttgtgaatgttgatgttgaagcttggagcttgaaatgcgcaaggatgaattggaggtgtgtttggctgtgcgacgaagctggagatgatgcacggctagtggtacggggaaggttggagcttaatggtggtgttttgggttctcggagtgatggaaatggtgactgtgggcaaaatagaggtggtgatgcgtctgattgagatgatggacggtgatttcaggttggtgtttctggtgcacaaaagtagtgatttgagtgttgggttatgcgatgagacggatgtg

SEQ ID NO: 273680 - DNA, 540 bp, Cannabis indica
tatagcataatcaatactcattttttaaattttgtgtcgaaatgataaccatacaattaaaagaagagcattgctattaggcaccagtggtgcctagcaccttctcgatatgtcgtgttgcgattggttagcgataccccatgaaagctattatattaaattatatgagacttaattaattggaccaatagcgatattgacacataggaaggtgataggcaccactggtgccctttagcatttctctcaaaagaactattttaattcggtaaactcaactcaaactttaattcggtaactcgttttttttttatattttctgcaacaactgtttttaacaattttaagatgttatgtttatgcgatgactaccaatgaaaattttgtgttgttgatattaataaatcttgttgttttgagagaaataattttaaaaaatggaaacagaaatattaattttctcactaagaaaaaggttgttatgttttaacgagaataaactattgtgtatgattattattagatttttttaacttacgt

SEQ ID NO: 273681 - DNA, 719 bp, Cannabis indica
cttgtaaccaatcaattttcactacaatgtcaatgaatacaatttggtttattgcagattagatatcgtccaaatgcaccagtagttctcaagggaattacatgcacattcgaagaaaggactagagtaggagttgttggaagaacaggaagtggaaaaacaacactaattagtgctttgtttcgtttagtagagccagcaagtgggaaaattatcatagacggacttgacatatgctctattggcctaaaagatttgaggatgaacctcagtattatcccccaagaaccaactcttttcaggggtagcattagaactaacttggaccctcttggcctttactctgatgatgaaatatggcaggtgagccacttgattcatttctcattttgtcagaaatacacaaaaagagatttgccaacatcaattaagttccatgttcaatgttcttttttttcatacttcaggctcttgataagtgtcagcttagagcaacagttagcaacctacccaatctactggattcatcaggtgagtccaaatatattaattgggtctctcttttttctaattacaaaaatattaatgtttggtttgggttcaatagtgagtgatgaaggggaaaactggagtgccggtcaacgacagctgttttgtcttggcagagttctattaaagaggaatagaattctagttcttgatgaggccactgcttccat

SEQ ID NO: 273682 - DNA, 901 bp, Cannabis indica
aacacccaacgtcatcatcaacagctacaagaacatcatttttcctcagttttcttttttttttcttcaataaatgaaaagaaagagtaccctttcacctttaggggaataaggatgaattagtcctccagaaattccagaagcacctcccccaatcccaatttcatcataaatatctattcgtatgttcaagtcctttgcactctcctgcatatatataacaaaaaccttctttgaaaattcaaaaccacagagacaccataagagagagaaagaagaatgcatactcggagcaaatgccaggcaacagaaagaccagcaaaaccagcacccagaactgcgtacctaccaccataatcaatgcgccatcaacaacaacactgggaagataatagaatgtgaatttttaatgaaaaagaagagtgtaatggacctgagagagggccgagatagggaagaagaaggtgaagagaaagtcagaaatggtgaagaatgcgttgcacttgttaccaccatgaccatccttctctttgttttgtagctcttttagctgcgaaactattttatgtttaactttttgggtggcttcccaaaatggcctaattttataggtcaatttggagtgacttactctcaaaattatttagttaaatggtttatctctctaatgaatttatgttattacctcttctactcctaaatgaataaaaaataaataaataaaacctaattttatcatcttcttcctcatcttattctacaaataactatcatcctcacccacactaagattatccttattaagaataacttgttaataaattatccatttaagagcattataattagtgactacaataatatagaaaataaatcaaaatctaagtatttatttagagca

SEQ ID NO: 273683 - DNA, 951 bp, Cannabis indica
cagtaagatatgcataacatatatataaacaatgttagaccgactttatgcttaagcccgccccaagcttaacaatgagctcacaaaatggttaagaacgttcttaagggaagtacgacccctgtaccaaatgcactaaagtaccaatcctgtactcatgttggtagagccattattgtactcccaggaattactaagtgttgtaccacatgcactacgtaccccctggtactcgtgttggtaacaccgtaaccacaccgatatcctacactatactaacacctttaaaatcacataaacaattagtgttagtagtgtaactagttaaaaaaaagcatatattcatatatacgttattatgctatcttacctcgttccgtgctcaagtgtgtcggtcagcctgagtggaaacacagctcaacgctttacagggccctaaaccataatattcaaaattggatgagagacacgctaaaacatctatcggggattgataattgaaactaacgataaccgtatcaataaatatgatgctaacaccattagcaacccaaaaattggaaaaactaggtatctagaaaaagcctcaaccggcagaccggttcccaaccagaagtccggttcctgggcaccaaccggaccaccggttgctacaggtccccagaaccagaactccggttctgtgctgggaacccgaaaatttctcccctaattccaaatcaaatccaaactttaccaaactctccagtatacctgtaagcactataatgaagcataatcaagcaataaaactcatcaacaatcacagaaattcaatccaccattaaagggcatggcttgagttcttaaactcaaaccttagccaaacctcatcaaagcttaccaaaacaactcaaatcaaacaacataaacctaacctaaccccaaaacacgaaatcaaaccaccccaaa

SEQ ID NO: 273684 - DNA, 1196 bp, Cannabis indica
acatttttatcatttttaaactttataattatatttttacaaataaaaattttatgctgtaaatagtaaataaaacatttaagaaagtcaaaaaaatatttttaaaaattcaaattaaattaatgagtgcaaattatgagtagtttgattattttattaatttaggattacacgaggtaataatgaaaacttacaagtcaacgatgttgcataggcacgtatatactcatttgtgtgcttcgtgtcaaacaagaacagccttacattttacacgtgttttgttttgccacttagtaatattttatttatttattatttttgtttttgacaaaacctagtaatatatatatttttttattctttcctattctaataatgcttcataccaaatggaaatatatatttgttttttctgaacaatccaaatgaaaatattttgctagtaaaaacatagattttagtgtatcaaacaaaatagctatttttgtttaaaagaaaaaggcataaatcggtactgaaacaaacaagagaaatatcattctccaaaatccaaatgtataaatgtattcaaatacaaatcttttccacatctaacttatcgaatggatagggttggataacgggttgttaatttttattataatatgtaattataatacaagtataatcactatgacaatgttattatttgaaaataaaatgaaactataaatataattttactatattataatttcaaagtcaatggatagcatacaacagaaaaattaaagaataaattgggtacacggttcttattcctgttttaataagtgtataataatgtcatatattattatgtcaacaaaatacaactgcttatatttctataataacattggtgtattcatgtattagattcattgggtacgtaattgagtgaagactagttagaatattcaattgattaagctcaactagtatatacattcacatagaaagcaaaatatataaataaaagaaaactaaaaaaaatattaaaaatgggctgtgtttggataaatataatcacgggactcttgccaattattaggttctataatagcgagcaaattaatagcatatagataaagctattatcaaacctatacgttttgacttgatacatttgtttggatcattacatgtacagaaatagaatatgtatagttcaacaa

SEQ ID NO: 273685 - DNA, 828 bp, Cannabis indica
tatatctaagtccaaagaatttttagagcgatagtttagatatattattacttttttttttgagtgtagcgtaatggtattttacaatcagttaatagcttaatagcttcaaggtcttaggttcgaacccatgacctctccctatttctcacccctccctcaccactaagctagccttagtgggttagatatattattacttaaacaaaatataatttggttgataaattcttctaaaaaaatgagattattgtcgttaaataattagtaattttatctgaagccaaatttttaccaccatcaaattcgtctataagcatcatacctactacgaccaataatttgttatctagtaacatataatattgtactaatcaagaatatttttcaaaatattgaatagatgtctttttaaaatatatcttaaatagttaagctatatacaaacaatattcaattaatacaacatacatacatatatatacaatcacaaaagacaaattgaagacgtgggtttttggaatatatataggtataaaaaaaataattggaaaggcatgaatcatattagtccataatttttttcattacaaccatattagtcttcttagctatggcatgaaacttgttatgtatataaactctactaaaatatagagtagagaatatataatgttgtcacatgattaatgaaagctccccaaagtaaaggaggaagagttgaattttttatttatttaattatttatttatttattttatcttaatgctattattatgagaaaatttatataaattattatttttggtaaattctttatattttta

SEQ ID NO: 273686 - DNA, 612 bp, Cannabis indica
aaaattaccaagaaagtggtttcttcatcaagaaaccagtttcttcatcaagaaatcagttcttggtatttttcgatgatttttccagcgacaatgctaattttgatgatttttttagcatcggtagtaacttcaacgacttttttgacaccgacaactactccggtgatttttttacactactacaaaaatagtttttctcgatatttttaaacagttatttaatgtattcttgtcggtttctacaacaatcgcctatacgactatcgcaaaaaggacaaaataggcgacggttaaaaatcgtcgctaatgtggacttcccgacggttttgaaccgttgcctataacagggtataggcaacgattttaaaccgtcgagaatgtaaaaaaaaagagagagaaaaatatagatttttctgtattttcccctatttttttcttgcattagttttataattttacctaaattaaaataaaataactaattaattttattacaataaaaacaaactttaaaacacattaaatttatacaataacaaaataaatatataataaataaaaaagtatataaataaatgtatttatcccgagctcggagagagagagaga

SEQ ID NO: 273687 - DNA, 1069 bp, Cannabis indica
ttcggtttgtaatttttatcggttttttcggtttggtttggacgggttattcggtttgggcggtttacgaatttttttgtacagcctaccaaatcatgccatttgaacttttaagacgttaaaaatgaatcgggtgcgtaccaaccggtttcatagggagaattttgatggtattgttggctgcaacaatataccatttgtggaggaatagaaatagctatatctttttaaatttttcaaaaactgtaaatagtatagttaaggatataaagaaggatgtcaagtatatattgttcttgctcaaaaatggagttgattactcttgagagattgatatgtaattaattgttgtgagttgagtctatccattggaaggggcttgagggtgtatttgcttggttcgattaatgaagttttctttttgattaaaaaaaaaataaccccctgaacaactgagattgttggatttaaggtttatctaattttagtaaaaaaaaaatctaacatggatgacagttcagtgggcatgatttagtatatgtcaaagttcgagaggcatgatttggtagatatcaaagtcaggggagcatgatttagtaaaattgaatgaaattaaataaaaaaaattaaataaaaagtccttaaatctaacaatctcaatagttcaggaagaattttaaacgtccaaaaaagttcacggtgtatgatttagtacatgctaaagtttagggagtaaaaatcttaattaacctttatataataaaaggtaagaaaattaggggtgttcatataattcgcaatctgtaattttaaattttaattaatccagaccaaaccatttgagatcggacaaaatgaattcattgtgaatgatttgatcaatttggaccgttttaaattctctagttcagtcacggttttagaaacctcgatagtagttcaaaccaaactaattctaataattattttatatatacttagtatgtattttttttgacgaaatgttaatatttgggaacaactgtagctagaattttttatattacctttatattgttatgataataat

SEQ ID NO: 273688 - DNA, 1236 bp, Cannabis indica
ctctacttgaatccatcacaactacttggctagaatatcttctctctacgaaaaaggttcttctcgaaagttaagtagaaaaggttattaggatttgagaagaactaggctcaaatttgtttctatattggtgtttagaattggggaaaactatcttgcttttatagatgaagttttgagattagatgcataattttggtgtgaaaaaagtaaaaagaaagtcaagagtaaaatgaaaaggaagctaagttatatgcttgtactcatcaaaagcaaaaagagcataatgatttttttgattgatgagtagaaaaggaaaggctaagagtataatacattatattattgccaactttgtgaacattgttactattattgttatggctttttggattagttattgattcccttatctaagtgaatatttttgttcctccatcattgggttattattattagtataagtgatatatactctctaatcatatatatattttgaatctagataagatgtatccaaatgatgcctatattacgtgtatatatatccatgaaaattgattatttttatgtaagattatatgcttgggaaggatttgttttagcttaattatgtgttgtagatagagttttacttttatggacactttagtctaataatatggcttttgtgtctaacaagatgcatgttttttaatggcaaattaaattggctagaaaacacaaaaggatctcaaaagacaaatctatctagttttgactttattaatttgtctaccatttttttctttgttctattttaacttgtaaattataacacagtgtgaacattaattttaactaactatgattatctccaatgtaaaatataaaatttgtgttaaatttagtataaaaaatagtgtactatatttgattaactatttataattatatttcaatacacaagatataaaataaatacaaaaaaataattattattgatcattatttatattattttattaaaaatataatttttttttattttttatatttaaataataataatatggtaaataaagaaattgaagttatgtaaaagtcaataaactataataattagtggcactatacagtaaataaaaaagaagaatttattgtgggccaaatttataatacaatataatatcttatgccaaatttagcacaagaagttttttttttcataagtgtgttaaaatattaacaatatac

SEQ ID NO: 273689 - DNA, 2846 bp, Cannabis indica
tacactactacaaaaagagtttttagtcactaaaatctccatcgtgaaggcttgttgtatgcatttttcgatgttagcacctcttactatctaatcttggcttcataatcatccctaccttaccaaacaaatattaaaaaaatgtgctcaatataatttgcggtattatatcgttattaatccaatttaacatctagtcttattaagatctatccatacctatttctatcatgcttgttgcttacccaaatgattcagtttttagacttttggtacaccaagttgaaaaaatggtaatgcatctatctacatacttccaattttggtacaagattaagcaaaatgaaaatctcaaaatgaagccattttgctaaatcggattttaaaaaaaaaaaaaatgcaaaaagaaaacctcaatattgagccattttgctaagagcacctccattcttctcttctataagagaaatttacaccatgtttggtagaggggagagaaggagggagggagggagagggatagaggaattgaagaattcttatgtttagcaaaagggaaataggaaaggagagaaggaaacgagagggtctccctccaaacacaatttttaatccctcctaacacgagagaattcaagagaaaatagaaaaaaaagatataaaatatattttctactcttgaaaaaataagatataattatattaaaaataataaaataaaaaattttcatatttatttcactctccatttttccacatatacacttaataccaaacctaccaaacataaccttaaataaacgatggcttttaagttttcaatgctcattgatccatggaatttgttgacaaactaagtcgacgtttaataagtcattcttataatttaataaaatcaataaacatgatcattttcaaatcaaattaataaatttcatgaatttccaaaaaccgatcacttcctcactgtataaaaaagggctttttgatggagtgatttgctgaaaggtaacagaaccaggaatggaaaagcacactaaacaatatactgatatagtttatagttaaataataaatcagagagattcttcattaagagatttcgaatatgtaatctcgatgatgcaattatacaagagaaacacacaaagaaatatgttctacattggttagcaaacaaggttttggaaaaacaatgcattaatcatctgagctataatcactagattctgcaagtacaggtactgcagcacagcaaaatgtctccttatcttttaagaaaagacaactcccatctgaattccatttcagatcaataatggtaaactgtggaagcggaatacttacacagtaagcgcctcctggagtccacatatacagatgagaactcccggtgcaaaggacaagacgagtgcatgtcgggtcccaagctgctgctcggattggatctttctgaactaaaatggcagcaagttcaaggtggcaaatgtcccatatccagagaatggtaggcatgctatcattgcgggtacatatatattggctatcatggctccatgacaaaagacctgggtggtaaaacttgataggttgagccatatgatcatagcatttgtattaagcataccatttgaatttagcattttaaaagaaactataaaacttgaacaagcatagtgtttgataaatcatgagtcaaaaaagtacataagagtagaaatttgttgctcagcctatgagaaacaatttgtattgagggtatcaaaagatccagatctgaggaaccaacatacaatctcattcttcaagtctacctgttttccaaaaccacttatatgttatatgggaacctccatttggaacttagataatggctggtattcaagtacacatcgctaatgcagcattaaatgaaaacttcaactaatgaattgaagttaacattccttagttgcaaatgtattatcttactaaaaatattggaacaatcattcgccttaaatgggggtcaaacaatcagcttagtgaaagtagtataaacaagaaaaagcaaggacttaccgattccttgtttcgggttaggtttatcaacaggaggcttctgagaaggcagattgattggagcttcagtaacctcgtacctgactctaaagggttcgtctggggaatcttcttcaatggagaaaaaaaaaacaaataaaatgggggcagcaaacgaagaagaatccaatcaaaataaatagtcaatcacttttccttgcacataatcatcatttaaacgccttcatttaatgactctagtctaatgtataaaaatattttcggagtgatataacctcccattttaatatctttctcaacctcagtccccaaaaatatatgccggagtatttttttttttcatgacagtgtttcgtagttacaacaacctttctgtaaatcttttaatttttttaaatagttaacagtaacgacaacaaaaattttgatatttcggttcaccacatgttcaaaaacttccaaacttgtttttgacactataaattattaggagttttttgaaaaaaattataagaagaatgtcgtaactacaacgaacaccattatgaaaaaataattgtaaaaaaaaaaatccagtatgtatttttgagagtagacgttggaaacttaaaataggaggttgactagcacttacacaggataactacaaccaggcttaccactatttccctgtctaagatcatcacttaaacataactcagacatgtcaagttgtaatggttcatctacttcctggaaatacaagatataaaaattagttttctttttaaaagatacaacatata

SEQ ID NO: 273690 - DNA, 714 bp, Cannabis indica
accaatcccgacattcccaatgtctaaataaccgtcccaataaactaacatactatgttgtgattttactgagccaaacactgagttccatgttaccgggcaccggaatgcaagattatgaaatttcactatatgacataaaaatgcattcttaattaaaaaataacagtataaataattatttaaatatctataaataattttcataattaaacataattaactgctaatttctaaattaaactaagtggtctttacaggaggaggggtgggtggagatcgatggacaagaggacgagaagaaaaggagaccgccacgggcctcaaagaatcactaatgaaataccacatctagaagctcatttactccgaaatttagacaaaaaaggcgttgtgatgcagaggcgtgggtggggttttggagagttaagatttttgttttagagtgtggaaaatggagaagaaataggtgaaaaaataggtaagcatttgtgaaatagaaaagaagtaggtgggcatgtgggaaatgtggcgacagtttacggttttgggtataagggtataggcaacggttttaaatcatcgggtataagggcccaatagatttacgaattccaattaaaactgttgcctattcctgtaattactgttgttgaccgaggtttttggaaaccaataaaatattataaagttagagagctgtaagaaaattag

SEQ ID NO: 273691 - DNA, 630 bp, Cannabis indica
gccctaactccccctgagcaacaaacccaggaggttgctccatatacatttcttactcaagatctccatgaagaaaagtatttttaatatcaagctaatgcaaaggccaatgaagagtagctgccatagaaaagaacagtcgaacatatgtgagtttagcaacaggagaaaaagtagcacaatagttcactccataggtttgagcataacccttagcaacaagacgtgcctttaagcgagcaattgcttcatcttgattgaatttaactgtaaacacccatttgcactgtatgacctagtttacactataggaggccgagagagtggtggaggtgtagacattgtaggagttatgaccgaggcaggtgaaggaataagagactcgtcagaacatgtattaggcgtaaaggatgtgacagaatataccaacaaattatcatcctctcctgacgagtaggagtagttgaagatgaaaaataaagtgtattttctacaaaggtaacatcaatagaaacaagatatttgttgagatcaagacaataacacctataccctttctgaagacgagagtaaccatgaaagacactttagtgacttacggtctaacagtctaatttggtgacagatgga

SEQ ID NO: 273692 - DNA, 597 bp, Cannabis indica
tttccatctcggttacccgcgagactttggtcgcttccgtcatggatgtgctgatgtatgcccggagtggctcgcctagtcgttgctttacttcgaccaaatcttccagatgcaatgggagctgatgtgaggaagagaattgtgcatggaattccaaagagaaggttttccacgaactaaactttccaggagccaacttgaaataccattgttgtgcggcttctgacaaagtggcaaggaagattctgcagcatacgtcccctcgtactccttgtaaatccatttgcatctcgaagtacttgagatgggaaagaggatcttctctcccagtgtacatcttccacgttggcattttaaacttgtgaggaagtggcaggagattgatctctagtgagaaaggagttccgcgagcacggtccaactcaagatcattgttacgctgtacggctgtgcctgtaccgctaggctgactcgtcaagctgtgcctgtacggctaggctgacttgtttggcattttgatcggtttggattacgtcagcgtctttctgagccaggatgtgagtatgggctccgcgctggaagatcgttgcaatattc

SEQ ID NO: 273693 - DNA, 1380 bp, Cannabis indica
tatgttcattgtcatcattattgttttaatcttttttttttatgaatcagtgagtgttattacaaataaactatttttgtacaatctaaaagcaccatgacaatcatgccataaccttcaattttctatacaattcacaaagaataaaaccactcttcctcttttttgctaaccttcttaggccacactaatacaactctttgctttacattttcttttatacaattcactatgctattccaattatgttctttaccttgccatgaggccttatttctgatcctccatagattgtacactaggctagcaagacaagcaaccatgattttcttcttaagtttcccttcctttgctctttgtatcaatcaggtgactcgggaaagagtggtatcagctgatttccatccaatccaggctgcaatttcaccaaaacaccctgctattttgctgcaattaaaaacaagtgttcatgtgtttcttcctgcatgttgcgaaaaacacaggtagcattttcacagattccaaacttgtgtaatctgtccttggtccttaaccttccctgcacagcaatccataaaataaagttatgtttggggggtgttaaatctccccaaacttgctcactccacctctgcttttgttgaactaaacacaccagtttgtacccttctgctatttgatatttttttgttacaaacctgtgtgcatcaataagaggccaaatctggttttttagagctacaagttgcctccaataccagctaccttgagtaggaacattatagctgtagcagttttcttcctttatgtaaacaatatgtatccacttcacccacaggttttcctcttttttagccactgcccatatgtatttgatcattgcatcttggttccattccctaacttttttgaaaccaataccccctgctgtctttgattggcaaacattgtcccaggaaatggctcctgctccttaaaacatggattgcccccccttccacaaataagccctacagatagattcaagttcttttattactttcttaggcaatagcataacttggcttgaataagcatggattgttaacaaaatagagtttattaacactgctctgccagcaaatgagacatgcctagaactccaagttcttatgcgtgcagtcatttttcagcaagtatgcaacactccttgctagaaatctttttagcacatattggcacacctaggtaagtgaaaggcaattgttgttaggagaatccaaatgcatcaagtctctagaacatcctctcttggctatgttgctacaatcaaagaagactttgatggattacggaaacaaccctgatgtttgagagaagtagcttcagaccctgaaagag

SEQ ID NO: 273694 - DNA, 597 bp, Cannabis indica
agatagagattggtttggtggtttgtaattgttttgtaaagaggaaaatctccttgtatatagaagttaggcccttgattgggtgctattagtttgtaaataccattttgtgcaatacaattcattaatcttgaaaaaaaaaaaaacaaactgtattttaataaaatataaaataactcaaaaataatttgataacaactaagtaaacaacttaaaaattaaataaaaaaaaaaaattaacaaaaaaaacaaaaaaataacaaaatattaatctaatttcaataaacaaaataatatcaattcctcaatatatttttctattacgatttttttgatttagttttgaatgttagattaaaatcctcaatatgtgctcatatgtattgatgtaatgctatttaaaatttgacctaaataatgtgctcattttggtaattgtgaatcattggctattaaagaattatgggctaaatatgtagatatctcaaaagacatttctgatttattacgagattatataatattagtggtcctcaagaaacaagagctaatttattctcatcttcccccatcaagagagaaaattagaaaatccta

SEQ ID NO: 273695 - DNA, 1049 bp, Cannabis indica
gtaagcttgatatttttggcattcgtagaccaagccatgaagactccatcgtcgaagcgctttgggcaccggccgcaggaaacaggagaaaggagctcagctctttttgccttcttggtggtttgctccttaaagtcccggagctccttcaattccgcggctaaagcggccttggactctaagtttgcttggtgagtttcctctaaggatctcaccttggcaaccatctcgtccaaggcttctctggcctctcggagctcccgcttggcctttgcagcagcctcactttccgccctcagctcctcttgatgctgggcctccagcctgtccctccgctgggcctcatcccggatcatggcctccgcctgggcttccctccgcttggcctcctcctcattggccttggcagcagcctcctggtagagctgcctctccgcagtaagatcctgaaggaccttcctgacgtcgttcatgtccccaaaatcagacagaacgaagccatggttaataatgttcttggagaggcggccagcctcagcagcaagctgaacaataacacaagtgtaagaaagaatccccaaaaagaaaaataaagggaaaagcaaaactacaaagcacttaccacggtgagggagtggcagaggtcctggacctggaagatagagttcagggaggcgcaagttgcgaaccgcttaggcgcgcaccgggtaagctgagaagcgaactcgccagtcatctccgcggcgaagggagccaaggtgggcccaaggaagcgacggaaccagtccgatagggggtccaagtttaggtcccacggatcctggtactccgggttgttgatggtttcctgcacctcaacccgaaggaccctcctaagggcctccacctcggcatacccccgggagtattcgtccatggcatagttatgcttggctatccggagctcttgcctcacctcatctccaggaactggagtcagcacaatgttgggaggagcaggatgctcttccatgggagagacccccaccatcaagaccatgggccagagt

SEQ ID NO: 273696 - DNA, 682 bp, Cannabis indica
aaccaaccggttcatctagtgggcgagcatctccttgcctttcttggcctctggaagaattgtcaaaggaggagtaggagcccgcatcacctcaaatccacctttggattgctcaggcctgtccgaacttcctccccgagaatctttggacttagcagcttttgaattagaggggttttgcaacagttagttcctcaaaaaggtcgacaacctccccggcaggcgccttttccttggagggagtcccttcaccgcccttggacttcttggccggagtagatgcgctcgagcttcctccaactatcttctttaaaacatcgagcaccgtctgagacatgtctacatgaaacaaaaacaacacggttagagaaaacagacaccagaagcataaagcataatagtcaggaagctcaaaaacaagacggagtagtctgcaaaatgatttcccgagcaaggcccgaaagtccatcatcacttgacaagcctcttatgtcagacatgatggctttcccttttctgggcataggaggagatggccgagcaggcgaactaggctccctaatgtgaattgtatgttcaatagaagtaccccgacctaccttgcttaggggtggacttcaaatcaaagaaccagctaacctcatggggagaaggcatatcccacttctgggaggcataaagg

SEQ ID NO: 273697 - DNA, 982 bp, Cannabis indica
aatatatgaaccttttacgtaataaatatactatagagttaatgataacaataaatgaacgccagatatttttacatggttttgtagttaaagtttacatactccacgagcccatcttattatgaatggtaatctagatatagagtacaaattctctctatcaatctaatagatagttttttccctcaaatttgtcgttccttttactcttagattctgccattatatataggtgtatagggtgacaactattttctttgggatttattcattcataactgctcatgaaatgtggacattcctcacgttttatttttatgcacatgggataatatttataactacccaactgctcttttgtctttatccttaaacggttatattgattatgcaggttttttcttgctaagtatgagttgtccttctttaccgtctttgtaggaaaaaatgctaactatagctatgttatattatttgatataatataatatagattaaaatatttaaatgtgagaaattatatattaataggagattaatatatattatgtgttggaggttatattatatcatatatagtataataatacacataaaattgtaacatatgatgagttacaaatttgttaatagattgtaacttaaggatcacaattgataaatatgtaattatgtgagttgttacatataggagttatggaattaatgagataagtttctagttgttagaaactgttacaatactcaattatatcatttaaatgggtattgggacgttgggaaaaaatttaactcggagaggagttacattttgagttctctgggaacagttgtttaatagttgtttttatgttgttttatggttgttttcgaacatctagaaccagatttttgaaaatgttcataaacgtatataaattaattgagcatgtttccagctctcttgtccaacgtttttatcccattaaacacaaattaaagt

SEQ ID NO: 273698 - DNA, 3307 bp, Cannabis indica
tttttttcttcttcttcttctcaaaaaagtacttaataccattttaaattttgtattttgtaaagttaccgatttaaactttttattttgttaaatgataaaatagactctatatttttcaaagtagtataaataggatcctaagcttaatttttaacattttttttaatataatcaacttgaagataattcctatacgaagagatataaaaaatgtaagctaatttatcataacacctttagatcgtgttaaaatttaggacaaatattctaaattaacctatattaaactataaaacaaataatactaattatcacatatattccaacttatttttacccattatatatatatatatgtatataatactttagctataaagtaaaaaattaattttagtttattttttctagtagaaaccctcaagataattttaattagttgaccaactcataattaaaaatagtaaaatagaagtatttacttacaagttactcaaattttttcaacactccatgctactctttttttttaattatataatgttggataaatcaataaaagcattactaaaaataatatcatttttttcttaacaataaacgtcaacatataataatgaataatactaatgacatttttcaaggaaaaaaaaacgttttagaaaactcaattcacgatactgatcaatgatttcaactactatgtttcaaaaaaagaaaaaaatcattgacaaactaaaaaaaaaatatatatatatatttcatcatcatcatcatcattattattattattattattattattattattattattaataatgtgaagttatcttttctaatgtattttttgtgcgcaataaaaaaaagtgtaattagatatagaaaaagggtgtcaaatttacccttgcgcacttttcttttattgcgcacaaagaaatatctggtaaaaaaagtgtaatcaaatataatccagagaaagggtgatttcttccctaagcccaatcataatccccagaggggagcctgaacttgtggaagatttactcttaattgatgggaactgggatatctggaagcttaatgatctctttgacaaggaaacagttgatagtatctaaaagggcagtaaaccaaattgtcagggtaaggatagataggtttgaacaaaagactctaagggagtgttctcaactaagtctgcctacctcatccaagccttgggaagagttcccttgtgtaatgttgctcctgccatgtggaacaaattgtggaattcaaaaatattggatcgtacgtatcacaaagtcctttggtagaatattctctcgaatgctctacccttaaggatcctgcttgctaagagaatgaccattgatgaggtctcttgccccatttgcggggatggtgatgagactatggagcacctatttctctactgaaattttgcatcccacttaataaattaaatatttaaatagtgttaggtaattttatgcatttatatgcatattattatatatgataagagaatgattttttgcatgaattatatggtaggttaaaaattttgagtacgtacgtctttttattagaaattatacaaaaatttatttgtaatttttttattcaatgtaattttctcaaaccatcattgatgaatgagtttgggtttaaggtcgaacccggccttatcaagaagacaagaccgagaatcacgacgagcaagtgcaccgaaagaaggaccttgggtccctatgcttcagaccaaactaaaaccaggacggtttcactgtcaacgaaaaagacaaggaccttcggtccaatggctgccatgaacggcagttctatgggccgggtcccgactgaacctgagagacgaactgcatgcccgcctctcgacataaataatacacagccatgcatgtggcatccgtgccgccggctgtatatcgtcctcataatttggtaccaataccaccatggccacagtaggtggctggccctatcaattaagcaaaataacttttttttttatttaattattattaccattattattatttaaaaataaacgtaaaagttcatcaaaatgtgaaataaatggcgaagccaatagaagcataattaacaacttacaaattaacgtttggccatgatctgccactaaaattattttagcaagagaacgaacaacaacaatagcaattttaagattctcttttgattatattagattgtattatattaaatttcctaaaaaaaaatttgaaatgtaaaaataaaaaatgccctttaattttatatgagaagattacatatttatactcacatacaaattaatactaaacataaatatagtaatacagaaaattaagaaaaatacaatttaatataatattacacaatacaatacaatattacacaatacaatatatcaataacagaataaacaatccttcaaaaaaaaaaaaataacagaataaacaaaggcaatacacacccacacacacaatatcttcatatgaatagattaattattagcggccatgatggggcgtggtttacacatagcctctaatggcacagctttaatcatagtaagtccattagtttcagccatatcaattttatctttactaattctctcccattcaaagcactgaatcaatgatccaatcgtccatccaagaacacgttcgactaatccaacacctggacaagctcgcctcccaaatccaaatggcatgaatttattatgtgcttcattttccacattattattattataattttcaaatctttctggcttgaaactctcagcatcttcccatagttcaggatctctttgtatggcccatacattcacaagtaccattgtgttacgtggtacatcaaatccactaatagtacaatcactagatgaataatgtggtacgaggagtggagctactggatacaatcgtaaagtttcagatatgatattttgaaggtatggtagtttagagagatccgattcttccaaccattttcgttgaccaattttaatatcgagttcttctctcgctttttgtaaaacacgaggatgatttaataaattcgccattgcccattctaatgttacaaatatttctgttcctccaatcagtaatatctaaaaagaaaaaaaaatttattattagtaataataaattatttaaaagaataacaaataaagaatttattgtgacagtcagtagtcccgtgatccgtaaggggaaacaccgggtaagctgtgcaatcccacaccgcctggggaaggtca

SEQ ID NO: 273699 - DNA, 1138 bp, Cannabis indica
tctctattgggttatggtgagatatatatatatatacacaatatttactatatacaatacaattcttgggtattatttattactaatgaaattaatgttgactatataaataatttacaggtatcacagatatggaaatacactttcttcaaatcaagttcacagcaattggagtgtacttagaccccgatgttgtgaaacatgtacaacaatggaaaggaaaaaaggggaatgaacttgctgaagacgatgacttctttgatggtcttatctcaggtgattaattaattattagtactaaaacttagtatataaccaaaagaaaattaggagtaaaaaaaaataattataactgatctgtgctgacttttgtttcatatatatataaagctcctgtggagaaatacctaaggattgtagtgatcaaggagatcaaagggtcccaatacggagttcagctagagagttcagtgagggatcggttggctgcagatgacaagtatgaagaagaagaagaagctgccttggagaaaatagttgagttttttcagtccaaatatttcaagaaagacactcttattacattccatttcccagctacttctcccactgctgaggtaatatataataaataaaatatatatatgtatatatatgtgtgtgtgtgacatgtggtagcttattagaaatataggaggattatcattatgctatgtatgtataactacttaattacatgttgggtttatatatatgaatgactatcagattgtggtgacgatcgaagggaaagaagagttcaagctagacgtggagaatgaaaatgtggtagagatgatcaaaaaatggtatcttggagggaccacaggagcttctccatctaccatttcttccttagctgataacctctctgctcaattatctaaataaatgtgctttttctttattacccgtggaaaacgggacacgtagtcactgtatcttgcatttggttattatgaataaactttaagaatttttttttctttcatttttatagaatttcactatgaaacccatgtagcaattaacggagcagattaaatcgcacctaaaattcatatagaaactatcgaagtaacccaaccgtaaatttaaa

SEQ ID NO: 273700 - DNA, 1855 bp, Cannabis indica
aaaacagatggtccgattggtaacttttgcaaaacacaggattcaaaatagtatttaccaaaaaatattgactaagtttctcaattgtgtgtgtatatagccagatattacagcaccaggagtccttattattgctgcatacagtgaatctgcttcacctacaagtgaatcatttgataagcgtcaagtcaaattcaatgcaatctcaggaacttcaatgtcatgccctcaagtttctgggatagctggccttttgaaatctctatacccaaattggagttcagcagcaatttattcagctataatgactacaggtatagatagaatattatctgtatatatagacacaattttgtagaatgtgaaagtatgatttagaaagtagaatagtgagatgtatagtcaccacaaaaaaatgttatttttagtgataacttcttagtcacaacaaaaaaattccttgtgactaaacatagtatttagacacaaataattgtcactaatttaattttagtcataacaagtactctgactgaaaatatgtttagtcacaataaattataatttttgtgactattacttttagtcagactttttagtcacaacgtaagaatgataatttataattaatcacaattttttcacttttagtcactgtagtgttcaagaagtacgaggtttatacttcttataatgcccatcaccttatcatattttctaaagagcataatttccatctacaaatactattatcatttacttctcattatattaatatatttgtagcaagagttcgtgataacaacaatgaggcaatgttggattgggacatgaaaaaagcaacaccctttcaatatggttcgggtcacattcaacctaatcgagctatggatcctggacttgtgtatgatcgaacaatcgatgattacatgaactttttgtgtgctcatggctacaatgaaacaatgctcaagaagttctacaataaatcatataaatgccctaaatcattcactttagccaacttcaactacccttccattgcagttactaatctaagttctaaatcggttacaatcgttactagaaaagttaagaatgttggatcgccaggcacctacaaagcatatgtgagagctccaccgggagtttcgatttatgttagacccaataatttacaatttaccaaagttggtgaagagaagaaatttgagataattttgaagccaaaggttgttgggaagtctaaagattatgtgtttggacaattgaaatggtctgatggaaagcattatgtaaggagtcctattgcagtgaagtactaaaattaataaggaataatgcaaaatattgatcaaatattatgatcatattatgaataatattttgtcaacaattcaaagagtatttggttatatatccatttatttattatttttctgtgtttatatttatatatatatatagtcacatgcaatttccccaatattattgtacctaaaaccctaatggatcaaatatgtctatcattagtcctaaaaatattcttcttagccaaagatttgtcacttgtcaataatgcttatattgtttaaaaattaaagaaattcatagcaacaagatcataggatatgttttgttttgtatataggagttgcattaatttttcttttctcttgttttgcttttttgaaaaaattaatattctatttattatgatccacacactataaaatgggaatgaaatttgcttataataaaacatttacttttgttaaatgaaaggctttcattacaatattgttgaagtatatcttgtacatgtttataatagttacattccccaataactctt

SEQ ID NO: 273701 - DNA, 1750 bp, Cannabis indica
aaagagactttcttgctatgtatgaaagtcacgttgaaggatagaataatggttgggtattcattttggctttcattctactttatattgttattgattttgttttttcttttttttgttttcttttccttctctgtttttataaatgtaatcgttgaattaaataaatatatatatttttttggcttcatatacactccagggtgacataagacctgtaatctctttcttatatatctctcatacgttaggttgccccatctccactcaactgtttctatctttaatggttttcttttaaaatctaagctacagatagtgagccacacacatttcatatatgtgttgtttttaacaaaaaaatatataataataataaataaaaatctaaataaactttgcctttggtcagtgttaaagaaggaagccagaactactacatttatccttctacaagctaagttttcccatattattatacatttacaaactaaaagctcaaccaaatagctttagatccaagcaattaagctctttttgtttttatctatgatcaaccgcatattctctctcgctctctctctctctcaccaaaactcattggtatttcttcatgttccaacttctcaattttgatttttttagcttctattctcttcttctctcttctctatagagcaatagatcttcatctctagaataactacgtcaaaaatgagaaactcattttcgagaggaatatgcatgagtcatgcctgcaatgcaaagtactctactaggactaaaaaagtgaagagaggaattcaattcctttctcccaattccaaatcatataattgggctagaaaggaacaacattattatatatttatatatgattgtgttatgaataataagcttcaataatagagactacagctagctcctctatcttatcataactatattcttttttctaatttcttcgatatatctatacttctttattatatatatttccttttaatgatgcgaatcatgcataatgcacttttttgatctcactgtctgtcttattatagagtagaaaacatgacattgtgaaaagaatgaccataagtggaaaatattattaaacaataatatatatatatatatagctatataggaaatgaccaggtgcaatgttgaagagcgtggtggagtactactcgaccaaacaatcattaatgcgtctgatcatcatcatcatcatatggatgatgatgatgatgaaggtcgcaaagatcataacctaatcatcagaacttgtccttcatgcggtcatcagatcaaatgtcaagacaaggttgttctttatatattataaattacctcttagttattaattgctcatcaatttattcatcggttcataattctctctctagatattatgtgtttatattttaacatataaaatgttatgtgcgtatatatatatatatatatatatatatatataggctggaattcatgatttgccgggtctaccagctggggtaaagtttgatccgacagatcaagagcttctacaacatttggaagggaaggtacgttctgagacatgcaaggttcaccctctcatagatgagttcatccccactattgatggcgagaatgggatttgctatactcatccacagaagctgccaggtcatcatatcatcatcatcttaattattattactctcatgcattgcacacatcaaatatataaatatatatatat

SEQ ID NO: 273702 - DNA, 797 bp, Cannabis indica
gcaagattcttgacagcacagctgacttagctcgagagtaggcataggccatcttcacaccagcttgtacggaaaatgttttaaaatccaaactattcaaagaagaatgaaagaaaaaggatagagagaacttactcaagaaatctccttcaggactcctcctacgaccaactccaaggaaaattcactgttcgctccggtcagatgttcactcacttcaggaagcgaccaagccatgaagtgatgaagcatatctttgcccctctaggcttccatgcacaacgccagggttgtagaagccctaacctgctcggatccacctctgacctgctcagatccaattttagcttgctcaagcccgtccgaactccctccccaggaacttttggactttgagaccttctgggttgaagggtctatagtacgttgctccttaaagagatcaatggccacattagtcgacattttctccttcgacgggatctcaccacccctagactttttggccagagaacacaggcccgagctatctcctactctcttcttcagagcctgaatcatcttctgagatatttctgcatgaataaagcaacgaagtcagaataagacataaaatatgtgaagacataaaaatcaagaaaaataaatgcaagttgaggtactttgcacgctgacgggggcgttctctcaaacaattatagatggagcgtcgtcatccgaagagtcttcttgctcctctaggacggcttttccttttccctccataggggtcgttggccgagcaggcacaccaggtt

SEQ ID NO: 273703 - DNA, 2484 bp, Cannabis indica
cctggtaaaatatttccaatatcctgctggtgtggctattgagaatatgaatgagaaaggaaacagggagatagtcgtggatggtgaaataattggtggcgagatggtggtgggacaagaaaacgggggtggtgcgatggttgttttccaggagatatcgctgtccccggtactggagaaaggagcgactcctctgtctaggggtgcgggtctgttaacccgagttgaggcctcgagatctatgcgtggccggtcttcgaggggacgaggaggagccttagtacgaacggcgtggcgttcgaaggctgctggtgaagagtttcaggtcgttccttctttgggcgttgattccctttcacccaagctgaccattggaaagcatcctgagcctttgcttttttcagagactcttttaaattgtgatgtgaatcacgaggtaggttttgagcctgggttgatgtgtaggaaaaatagggtcaaacggttcactcctattgtggaacacgtggaaggtgagaaaggtgggccgaattctttaagtaatttgaatattacttgtgggcctccagtgttagcacgtgatgggcctcttggatcaagtagtgggctgggaaacaacaacaacttaatttctaaggcccagtttttttctgggatttgtgaaaaggacagcgggagtggattaaataccaaaaaaatgaacatggttgggcagggccctattggtgttgggccgatacccagtagggaattgctaaatcaggccgtggtaattcttggaaatgaaagagagtgtgataacgattcaaaattctctgttttgggacaggattattctaagcatattgatgaaaggagatctcttacaaaaaatttccaagctcgagaaggatatctccaagaactggctgagttcacctctcacggcccaattaaaagaaaagcaggtctatgtgacattggtgtacaaccaacttctccaaccaatgagagaaccacaccagtgaagaagagaagacttgatgttgagtctcactcattaaagatcgtgcctaaatagaatatgagaagagtaaagtgtgtggttagggattttcctcgtggtgtcggccccaggggcagtgagctggatgtgtctggtgaatttcctggctctggtgattcgaaggagccatctttgaatgatgggagctctccagtggtcgtctctactggttactcccatcacgtggacaaaccaatctctgccgattaatcctcgagactactgcttggaaggcaagggccaggatgacgaatattgctattccaaggaaggatcttggcattattgaagatgtgggatcgatggtgggttctcccttcaacattattacccctgtggaggaggtggacagccctcctccacaggcgccatgagaggcgttgcttagaactgtagagggttggcgcagacctctacagttctggaagttacagccctatttcagtcgtgctcgcctgacttcttattcatttccaaactcaaaagcgaccccgctcacttggtatgttctctaaaaagcttgcacttttattttaatattattgttcctacagttggtggcacaggtggcctcctcctggcttggaatgcggggtttgagtttgaaactgtctgtatatcaaagaatcacatctctggtcttgtgtactcggaccctgcgcatcatcccttgtttttttcatgtgtttatggtctgccttacgtcaatgaaaagaaaatattctggacgaatttgatggagcttggtctcaattttggggggccttggttgatctttggggacgttaactttgtgttaaagagctctgaaagcatgggctcaagggggagagattaatttttgcccttcatttctgagttggtcaatagtgctggcttaattgatatgccagtcaaaggcgattgtctcacctgggataaccatcttgatggcgatgctcatgtcaaatcgaccttggacaaggcgttgaccaatgttcagtggctgggcctatttctgaaggcggttgttcaatctagccacacgtgcaactcggatcacttcccctttttcatcagtactttggacctggactctaaacctcggaagccttttcggtttgaagcctggtggaccagagaccctcgtagtgacttagttgtggagagtgcttgaggctcactgtcccatagatgggccccggcaaggattttcaaaaaggtgggggccactcgcctggcacttagtaagtggagtagaaatcaatttgggaaattagacaatcgcattgctcaacttgagcgccatctgaaccttattcagggtcagtcagctgggaccaggttttgggctgaggagttggaaacctgaaaatctcttaatgaggctttaagacataaagctgtttactggcaaaaaagatctcgggtgtcttcgatcaaggatggtgataagtgct

SEQ ID NO: 273704 - DNA, 728 bp, Cannabis indica
tggttagatttactttctcagctatgttctaaggttcctatcatgatcatatcatagtaatttatcactagtgtcatccaaataaagatgggctagaattttaaaattctcccactcagataaggtagtgtgatactatgtccaagaacttcattggtatcaatttctattactacagtaacatgttaattggaacaattataggatcaagaataagttctaataatttgctaatttatttattaccttacatccatgtctaatcaaaatatgtgtgccatagagatactttggtgtattgagtatagtgtatatatgacaacactattctgactgaagatttagaaagtgtatatatgacaacccagtcgttggctccgtacaagaagcccggacccatgaagaaagataccaacaaaagagacatgacaaagttttgtcggttccacggagactacgaccacgacactaacgaatgctacaacttgaagcgggaaattgaattcctaataaggaaaaacaatccacacctgcagaagtatgtcaagaccgaccaaggtcagaacaaccaagatttgctacctccaatggtagatggacacttgcaagtcattattggaggacctcacattgctaaagattcaggcaaagctcgggagaggtatgcccaaacagtgcaacacgaacaagaagaagttatcttggccgtagaagaaaggaagcccaaa

SEQ ID NO: 273705 - DNA, 532 bp, Cannabis indica
tttataaatttatgctctaataaaatattaaaaaattaagagaattaaggagaaaaaaaataattcagagagattttagaccgtcacgtcaccgcctcatacttctcctttatatatatatagatattgattttttatatatatatatatatatttatagattttactgtatgtgattatgctttataaattattatatatttaacattaaattatttttatggtttgatatctcaatttaagtataatatgaaattaaacaaaaaaaaataataaaatatttttatgtaatatctaatgttggtgaataaaaaaaaaaagaaaaataaggattactttttaaaagtgaaaaataagagaatagatatagggaaaaaaacagaaaaatacaaaaaaagaaaaaaattacaaaaatactttgggccggcccattaaatatttatacagttcacatacaaatatttacaaaagtaccacatgcaccaagccttcagatgtacagagcgaaccatgaagatgaaaataccttgat

SEQ ID NO: 273706 - DNA, 2208 bp, Cannabis indica
taatcatgatttatattccactgtgctgaaaaacactataatcatgaaacaaatacatatgttctggacttaatggaatttatacattaaacataatcaataaaataaatcatgtgaaccatgcaacataaaatgatttctgatctctattaattagtaaatctgattatattgaaatgagttttatttagggcacaaaacccaacagtaccactattgtacgagtgtaggtagggtttgccccgtaccccgacgtacccctaagtgttataccacataaactctgtacctgtccatactagtgttggtaacaaccgtaatttactctttaaatatcgtacattataccaatgtactcaatatcgctaccgtactagtgctggtagtgtatgaatcaacaatgagcatgcatatatcacacatacacataattacatatatcacatgttttatgctattcttgtttccaaattcaagtgagttggccgacctgaactacttcgtgctggatggatgccctaagtcacatttacgtaaacaggtaaataacatactaaaaactaatttgggaatcaaaactcacaattataggtttcactatcgataattaacttgactataacctatttatcaaggaaacaacaaactaaggctctgaaaataatacgatttgacaaaatggaattttttggaatctttcccctaattcagttaaccagttttacagggttattaaaatcggttaaccgattttacatcaagttccctaaataataacaaaattccctcaaatcaatcccaaacttcatcaaactttccagaacacctgcactaacatccaataacagagtcaaaccaaaaacagtagccagaaagcacaaaaactcagtatgccattattgagccaagtttgagttccaagaactcaaagttgctcaaccttaaaattattcaacagcttaaacaaccctagaatatcaataccaaattgctaaagcaatttcaaacaaaaccctaacaaattagagcctaaatcaatacatccatacataacttcaaaccttcaaaactcaatggaaataagttttagagcttacctcagcttctcctttccaaaagctttaagctaaaccttgaattcccaggaacaatcatcaaaaagagtagaatgaatccttggttccatggctgatagaaggaaacgagagagagagaaagttagaaattgggttttctcttgaattttctatttacataaattaaaagtaataaaatattgtattattattcttttacttagaagaaggccacctgccacctattcttcttatgtaaattatcaaaatgcccttttattagaacttaagccattaataggcctagaggtaaaatagtctaaaactataaccctacctaaccttggtattctaaatatccaaaatgtttatcccactaaaaaaataggttctaaacttacccttgtgactcaaacgaccatccatcatattttttgtcgtcgcgagcaaaaatcatagaaaatacataattcatatttagcataattaatactcttagagtttaataaaatctctagaattgagaaattataactctaatgaccatttctaaaaaatgatacccacaacaatataaaatcataaataatcataaaaatgtcaataattaatgataattgcctttactaatatgtaatctaacatgcggtcattacatctgctgtcgtgacccttaaattagtcgcaagtatggcatttgatagtcacgaccactgtagggtcgacacaatttttttttttttacttttcacgctttgcacgattcaaaataaaaacaaacgtctgaaaattctaaaaaaacaacaattaaaatgctaaaaaataaatattgcaaatgtctcaaaaataattaatgtaaataataacttgggttgcctcccaaaagcgctgtctttatgatcatatagtcagacgctaaacttcttcttaaaagaggtgccaatgtgatggcggtacttgggttgggtcaatttgacctcccagtaaagctttattctttcccattaactttgtaaagtttttatttctcgcctttcagttcaacaactccatatggatacaccttgaccacagcaaacggtctgggccatcttgacttcaatttgccaggaaaaccttgagttaaaaaacg

SEQ ID NO: 273707 - DNA, 699 bp, Cannabis indica
gcatccccctggttgattcatgtgagccacatgttttgagtggacgctggtcggatgtctatgcatactctgcttggatgtcacaacttctatttagtgaccttaagcattaaatcttcctatacgattcactaggagtagaatttctatccaggttatgaaatgtgttccacgtgtcaccagatggatgccatgtcaccttgaggcaaaatttggataccaggaagaagctaggatttgtagcttctcccgaaggatttttgagaaactattttcaaatttaaataatttacataattcctaattaactcacaaagatctttttaatgatatccaaacacttagaaaaagtactttttaattaaaaaaaaaaaaagatctttatgtaatagttatcgaaacagtaaaaacaagacaaaacttatttttatcttacacttctagctataagcaaaagtagaagcttagccaaattgggttgtggtatagtttctctaaatgaaaagatctttaaaaagttgttctagttatggaaaattaaatgtcattcggatgggaaatctggaagtctaacttgtccatccggaagaagtctcatggaatgatagatgtcagttcccgaatgtctatcaggtccacctggaaggagtcatcaagatagctagcctccctccgaaaaggtgttctggatggccagtt

SEQ ID NO: 273708 - DNA, 1494 bp, Cannabis indica
tataatattttataaaaaaataaaaaaaaattaacataaaaataatatgaaaaaaatccgaatattataaaaaaataatatacaaataacaacaaaataataagagtacaacatatgttatgtctaaaaattctcccaaaatacgcgacagttcaagagaaagccaggtagcaacagggtccacgctacaggacacgtcgccttaattactcccggggtccattgtttaaaagtagtaatcacagattggtcatctccgggaggatcaatatggaccgcgagcatctctcggttgttcctctataggagtgaactataatcggaggatggtatggaaggactaatgaaagatgacatgtcactcaaggaccaagacaatatatatacatttaatgcatcatgggaagaacatcagatgccttactccgataagcgtgtttaagggtttaagcctattattcccagatttcacgagctcccatacatcaattgaaggctgcataaataagctatcaagtcataaataagtgataaatcacatctcaccaaatagccatagacaacctaaaacccatcataaaattggcaattatgtcctaaattagatttgaaaaattatgccaagtatggtgaaaacaaacacgacaatagtggccttttaccaccattatgagcctataaataccccaataacaaataaaaatggggatcagtcagaaaagctctgtaataaatactctcacaaacacagtgacttgtggactaagacttattaatcgcccaaactacgtaaaaatctttgcttcgaacttccattaaatacttcatataactttaattatttgttgctaaaaatctcattcaatagttttggtgctttcattgagagttgtagtatgtttgccaaaaaaggaagtcttctaaggtgaaacccatactgagtagggcttgctagaactagatgtttgatgatgctcctttgtcgatcattatcatgcctaccatcatattagctacttaaacctcaacaactggatgattgttgtgagtgttggaaatattttaccaagatatagatttactaacaagtatgtttcattaacatcctaatatgaatttctaaaacaatgaaataaacacataagggttcggctatatgaaaagaataggaggctcaattttctgaagacaagaaaaatcatcaatctttaagtgtgagccatcactatctatttataggtaaccacctaggtttaggttagatttaattagcattaaaataatagaaaaaataaatggtaaaattgcacactaagtggccagccatgggatgtggattgggccccactttgcaattttgccattttgtcatttttccatcccattttctcaaaaaataccaattttccaatttaaccacttaaatgccaattccaattatttaataactaaaattaattgttaaataatattgtcatttaatatatttattaa

SEQ ID NO: 273709 - DNA, 572 bp, Cannabis indica
ttaaacttttatccacatgagatgttggttagtaaaattgaacaagaatccttaaattcaacaatgttcataatttggaataatttttaacgatctaaaaatttcgataagatatatattaaaatttggaagataaaaatcataattagctataaatatattatatttgatattattattattattttgagtgagtgagtggactgaaacaattttctaaaaataaaataaaaactataatttgattggttcatttattcataattttcatgttattctctcattgtctttgaaggtgtgagaaagatgtatcctcttttaaaatgagtggctcaatataatttgtaatagtatttgcccattatgttactattcatgtagattaagattagaaactctagttgatcattgttaattatttaatgaattatgattaattaacatgaggacccataagtaagtacatggttaattataatcaaaaagagtttgggaaaagtattgcctataagaaataaaaaaaaaaaacatgtcttagttatttttttaataatatgtctcatagttcttaa

SEQ ID NO: 273710 - DNA, 962 bp, Cannabis indica
aagtatttttgtaattttttttctttttttttcctttttttgtttttttccctagatactataacaaaaataaatactaaaaaaatttccaaactattaccaaattaacttgttaaaaaaaaaattaacttgagaactgctattgagcgaaacctgcctcactcgcactcgcactcgcactcgcactcgcacgtgataagtcgatatacgacaattaaattagcaaataataaaatgtactcaacacttattttttttttctaacgaattaaattcattgttcaaaataataataataattaataaagcaaaaagctatttacacacgtacaaaaatggagctggtaaaggaaatagtacccactactgaagtagtcggagtaggacgatcctggattttccaactaagacactataaatattcgcatccaagactttatccctctgcaatatctgatcgtacgaagacgcccatcttgtgcttgaggtccaggaagcttcctccaaatcctcagggcttctttgttccatccatatcgctttcacctttcgggttggtcatattcttgattctttgcttatgttgttggtattaagttgtttgtggttcctgatttgtgagacgttgaaagaaaatggacttgaatttgattgcttttgtataaatgtatgcataggagactgattcaagttttcctgattgcacagaaccatgaagaactgtatcgctctatcctttagtgttttcaattgacttgtgttgttcatcataattgtgttcctccatttgatttttaagcgcaaaaatttaaagtgttaatttgggtttcatctgcaaaatgttaaggatttgtaatttgagttaagttgatgcaactttgagaatctttccttcttatatctatgtaggaaagggagtctgctgatgtaaaagcctgatagtttgttttgttctggatttt

SEQ ID NO: 273711 - DNA, 1070 bp, Cannabis indica
atgaagttttagtgatgatttttgcgatattttagcgatattttcgcgatgtttcgcgtatgtttagcgatgatattcgcgatgtgtttcgcgatatagtgaattggagatgtttttcacgatttcgcgatgtttcgcgacatgttcgcgacatctagcgatgtttcgcgacatcgtcaaaaatcaagaaaaaaaaaaatgtagaaaacaagcgctgttgtgaattaaagacatttagagatgtttcatgatttcgcgatgtttcgcgacatttagcgatgtttcgcgacatcgtcaaaaaaccagaaaaaaaaaaatgcagaaaacaagcgaatgggtttcgccggaagtggtgcggtggtcgtgggttgtcgggtgcttctcgtggatggtccggtggggttttgttgggaatgggtttggagagttagagaaagagagagaaaaacgagagagttagagagagagtgggggtttgaaatgaggagggtattgttaggattaaagatgtttggagggtattatttttacaattttttaagaagcatataaaaacaatttatgctttttttaagtatataatgtcaaatttcccatttgaatttctccattagagatgccctaaaaattacactaaaattatactttttattattatattattttattatattataaataaaaacaaataatataaatacaaaaagtttaattataaatatattatataaatattaaaaagtaataaaaatatatatatatattaatattaatgggaaattatagacaatgttatatatagaataagttttagagtttggttggaatgaatttggtgtaaaattttaacaaatttagtattttagtgttccattggagttggcctcacatacttattttttcttaactgttacatttatggaaaacttattacttacgtttcatctcactttatcatttaaatgtatttttataaattaataattttactcttaaaatttaacaacagttaaaagttatgcccctttaaataaaaatacgtcaaaaaaataaaataaaaatagaaaaaa

SEQ ID NO: 273712 - DNA, 998 bp, Cannabis indica
acaatttaaataagtacaaccatcatttaaccacgaaactctagtcaaatggccatgagcaacacgattagcatatcacttgacaaaaattaaaaagatattatttaaaggaattatttcacaaatacacaaaaacaataaataattaaaaaatatatattatttttatgtagttttcttatcgttttagtattatttttatagaacactgtaaaaatatatatttataaaaaaatcttttaacgtaaaaatatataaaaaaaaaataatatattatgataattatctcttttttttttttttttgagaaatagaactgttattataaaataagtgagtcttttacaacaacagaaagaatagccgagggaaagtcctcaagccatatacaaacattatccaacactagagcctgtttagccaaaccgtgagcggcttggttaccatcacgataaacatgattaacacaaactgtagggagataggataattcagtttgaacatcaaatattaaatcttgaaaagatgaacgatttgatgctgttttgcggagagcattggcaaggattaaagaatccgtttctaccatatccaccttaaaattgagttgtcttgcccatttgagactataaaaaagtcccttagcttccatctcttgtggtagacagcaaccattaattgggtgagacattgcagccttgacattgccatttgaatccctgattatagcaccaaaaccaattttattacaagcttcatcaaaggcggcatcaacattcaatttcaggcaggtgggaggaggaggcgaccaagctttcgaaatggatggtgtagcaggcggtgacaaaccagcaggaagagataactgctgtgtagacttataattgtttagaaaattctgagcttttgcagaaataacagtcggctgttgaggggatttaccatgaatgacattgtttcgatcagaccaaatagaccacattgtgcaaaagatcgtt

SEQ ID NO: 273713 - DNA, 1113 bp, Cannabis indica
ttactttgaaagaaagcaaattagggaaattagaaaaataccaaaatttgaaggagaagctttttcttctctctctctcttcgaagccagcaagatcaaggggaagggctgtgatttttgagtttacagcaaggaattcaaggggtctttgaagctaaggtaagctctagtcatatccctctttatttcttaagttcatggatgattgaatatgagatttctaggtttagtggctgttaggttttgatatgcttagggttcgaattttagggtccttttgagttgatttcaagtcctagtagctggttttaatgggtgttgttggttttgtgcaactttgaacattgagttcaaagctttaagctttaatggcaagttgagtttctttggtttattctgtgaaattctggttggaaatggttgtttatgcattgtataggtaccctggagagtttggttaagtttgggattgaattgagttaagggggttggtttttgtgttcccagcacagaaccggtcgaccggttctgggggacctgtaccaaccggtcgaccggttggtgtccagtttttggacttccggttgggaccggtctgccggttgggagaatttttcgaaccctagtttttcccaattttgagatatttagggtattgccatgtggtttatcgatagggaaacttttagtttcaagtttaagtccccggaaagtgatttagcgagtcactcatctgtgttacaattattgtgattagggcatccatctagcacgagatttccgttcaggtcggccagcacacttgaattcggaaaacaggtaagaactgaatataatatgtgatgtgattatctgaatgtatgtataagtgtgtgtgtatatgcatgcttagattgttatttacactaccaacacttgtatggttatgatacagagtgcattagtatagtgagtgttgtttgtgagtacaatacagtgataccaacactagtacggtaaagtgctaaggtgtgtgtgttgggttttatgccctaaataaaattctatttcaatgtaatccagaatattcaatatcaataaagtaacagaagtattttttcatttcatttgtgt

SEQ ID NO: 273714 - DNA, 1498 bp, Cannabis indica
aaataaaaatagacaagcactactcattgaattaattttttgaataagacaagagattttaatcaatcctaatttaaatatattgcattcatgaccatggtattataataaaattgtccaattagaacaaactattaaatacattataaatatgctattttttaaatttcccaccctaaaaaaatccaatatatatgggagacaattataatagtaatgtcatttttttaactaaggataggagctaagggtgtatgtttaggtggattgtaatatatttttaccaacccaatataaatgtcgggttataaatatttaattataacctatccaattaaatttttttttaaaaaaaaagtttatttatttttttattattattgttgtaattttttatgttcacataattagatttagaactttttcaaaaaagaataaataaataattagatttagaaaaaaaaaatgtattatatatttatatatattaaaatttaaagcgttatactctaaactaaatattaaaaacttaaactaacataactataaattgatattataaacaacattctttaaaaggaaatagaaaatacatatatatctattaatgtagtgaagattctaagtgtgaatttcaatattcaaatataatcaaattatcaactataaatataaaataatttaactattaaatataatttatattacatattataaaaaattttagtcaaaatatataaattagtttaaatcaggttatttgaatagattagaataatatttaacctactcaatatatttattagacggtttagctttttcgtttaattattcgaattgtattttttatcaattttttcaattaaatttgaacaatttatttatgttgccggatcatttaattttttttttttacctatttttaaagtttattaaaatatttaatttttttaatataataattaaataagcatatgcaactgaatatatatttaaaaccctgttataaagatatgtttgccatgaactcatgactagaatattgtacatatatatatagtatattatacaaataagtacaaaaataacatcactaatatatattatgtaatttgaatttgtgtaatatgccaatatatatatatggtagcagccgaagtatctgaaccaaaaaaaaaaaaaaaactaacaagtctttacttacttgattggttcaattcaagagtcaagatctctacagctaacaatttttatttttagatgacaatatttacttgacctgacttaatcatataattacatatatatggttttttattattaattataatttattttcctatcattatatttatttccaaataaattaaacaaatgtctttgtagactttgctgagttgactcactgaatatggcctatcaactcggtaacttttcttgactatctaatcaatttcaacaaaagtgaaaactttttgtccttctcaaataaaaatac

SEQ ID NO: 273715 - DNA, 784 bp, Cannabis indica
tttacaaaaagagttatatacaacagtaagtcaaaacacatatcaggcacagcccaaaagaactcctgacaacttgaccatacacgctagataagtcgatatgtacatttgtcggagaaggctatcgtctcacggttgccgtagttttccttgcccttacctgtaccacaaagcgctcgtgagtcacaaagagtagtaaaaaaaataatggaagtatataacaattaaatatataaatcaggataataacataattacacattaatattcaagtagtggttctataagataagccatatttttttttttgaaaaaagaagatctttattcaaaacaagcaaagcaaccaagctatagccaaagaggcagttgttgaaagactacaacagccccaaaacaccactaccaccctttaattacattcattaaatattcatttttcaaacaatctttaaagggccctttattcaaaatccttagcctaactatacctctcacaaccaaaatagtagaacatgtcatctcaaagatacatctatttctattcttccaaatttcgtaaaacgctgatgccataacaacatttacaattctattttggagatcatcataccagccacaacacctgctatatatctcagccaaagaaccaggccaacaaaaggaccccagccacttgttaatttcagctcccacctgctttgtgaaggtacagtttcaaaacaaatgatcatgagtttcaatttcttgatcacacaccaggcatagctccacctgaatattt

SEQ ID NO: 273716 - DNA, 1077 bp, Cannabis indica
tcgatctatgacgaagatggcagctcgaagaacaccgaaagcgaaggagatcggcgtggcttcatcagatgtcgtggattctcgatctgcaccaacgaaggcagctcgaagaactccaacgtcggagaagacagagatggcattagatcttcgagcacaagatcggaggaggattttcgatcgtggacgacggtggatatttgatcggcgacgactgtggatatttaacagcgaggggcggcacgaagtggtcactagaggacgatcggaagcttggtcacgccggattgcagaacatcagagcaaaaacgacgactatcgtcttatctttactggtttgctaaaagatatatgtatatatactgttttcatttgttgttcaaggaaaaaaaatatatatatacatatataatgttacgaaatagtatgaccatgaacagtaaaaaaggatgagagagatcacgatgtttgggcaatgctaaaaaacaaaaaattaaatatacatgttgaagaagctggcagcttggatcgagaagaggaagaaggttgattgccctagtactttgggcttgggctttgttgaaaagtctactacaccaaaataataataattgggctgtaattagtttttatcttttatattggtgcttgtttttagttgtatttttttttatttctaccaccttgaggacaaggtgattttgaagggtgggaaagtgttacactatgaaatagtgtaggggcttattagtaatttgtaaagaatgtgaatcactataaatatgtaattgtgtagctattatgagatatggattgagtaaatagaactttgcttcaattgggagtttggcaccgactcgaaaagtgcattttaggagatttgtcctgtctcgaagaggactattatctaacataaaatacatacaaaataatattttagaacaatattatcttgattacaacaaaaataggatcagtgaagaattaaatacataacaatttatatttagaattaaatagcaataaatttgtataaattaaaatttatctacacaacctcaaattttgtggctgttc

SEQ ID NO: 273717 - DNA, 656 bp, Cannabis indica
caaaacaatcttcccaaaaatattcgcctaagatctgttgtgctcataaaccttagacctgcagcaggaattcaggtcagttctaataatgcttattttattaatttgtaacattttattacatactataaagaaatgcattagttcttaattgataatatgcattgaccatcctaataatataggatctagctaatatgatggagaagaatactgaagcaaagtgggggaattggattggttacgtgctccttccatttgatatttctttaagggatgaccccatagattacattcttaaagctaaagctatcattgatcgaaaaaagcattctcttgaggctctctttacttcttccatggccaaattagttcttaaactctttggcatcaaggtatatatataatatgtgtacataaatgtaaaaataatgacacaaaatgtccatatatctaacaagtaaacatatttttgtgatatgttattcaatttaacagatagcaagtgctatatcccacaaagttttctgcaacaccacaatggcattctccaatttggtcggaccacttgaggaaattggtatctacggccatacaatgagttaccttgcttcaagttcttatggccaaccacatgtaataaagccatatatata

SEQ ID NO: 273718 - DNA, 1367 bp, Cannabis indica
acgacatgtaacggtacatgtttttttcaattttatttttctttagcttagaaatgtttttttcttccattgtgttttcattctttgcttaacttgtagcaattggtgggattactgtagtagtgattagaagcctctctcttgtcttagaagcagcagttacctcgtctctatgtttagtttgtgatttttctgtattaacatttataatttactatatgactgcattgattgttagctggttctttatctacgagggagcattttgagaatggacttgaaggaaaacaccacctctagcctctgagctttagcaggaccagtaaactttattcactattgctaatatgtcactcctttttctagcagctttaggatgtagagatgtggttggtaatgactggagttctatttctattggtgtcattttgttttgtttgaatctgtcaagagtcaagactttgtttgcttattttagcttgacaagtttctcttaaacatctttgctgccagctttaattaattagttagatcacactatccttattctagcctgactaagtttcttttgagaccaaattgaccactaactatcatttttcgatggagtgaatcttattgtcttacaagaaatattatatatccgagactgtattcctaaaagaatgtcagctgcatgttcatctattgagacagatacaaataatactcaaatataagataagggacactcacaatataatagtattccctgatagatatatgtatgaactatatgttaactcagtcaaacatgttccacacggttttatttcgttatgtagtcttggactgttaggggcaaggtagtgtagagggagctgcaacaatgcaataaatggttgcaaaaattcataaaaaactaccgtcatggcttgttcacaactcttcttttttctcagaatattttctgctttactgtatggaatatgacatttttactactctagctttcacttaaacttttgtgtaaataacctaagtgccaatttctttattgatggtttatttttgttcttaattttttctaagctcctcattcttttatttttatttccagttagtccctagctattgttcaggaagaaaaatcaagagaaaattacactatattcctcttttaatttgttatttttaacttttacctttttaaaatttattatgtttaactctttttttaatcattttatcaattttacccatatcacttcacaatagttttcattcttttctaatcaaaagtttgccctaattttcccacaaacatatacatccatctacaaagaatacaaatttattatatttgaatttatgtcttagttatgtga

SEQ ID NO: 273719 - DNA, 755 bp, Cannabis indica
caggtaatagggttccaaaccctgattcataactatatcatgtggtctatccaattactaaagattctggctgccacataagaatgtgtggcccctaagtcaaacaatacggagtaaaaagagttgttgaccgagagctgacctgtcaccactgaaggactggcttctacatcagcttgagtaatggcaaacaccctagctggagtgggtttcgctagagcctttggtgcttcagttctaagttgagggcaatccctcttgtaatgtcctagcatgcctcactgaaagcacccatgccctctacactcacccagatggtgccttttacaactggggcactctaggtagggtctcagaactaccctgacgactgcctcgaccctggttcccctgaaacctcttgttttgacctgagccaccggtcgcagtggatgccttccttttctgatccatggccaaaccattacctcccctgttaaagcctgatgcaagaggggtaggaggcctgccaaccactggagtcctagcagactcagtcatacacccaactacgccctcagctcgcaatgccttttccaccatttcagtataggtggttttgtcatctgtgctaatcatcaggtcatgtcgaatcttcgcactcagtccatctaagtaattttcctttttactgaaatcggttggcacaattcccgaggccaacctcgccaaccgatcaaactgcgttgtgtactcagtaacactcatattttctt

SEQ ID NO: 273720 - DNA, 637 bp, Cannabis indica
atttattctcaaaatttttatatgatattttatattttaatgaataattactaatttttattctattccctaaaatatataggttgttaaaaattttcaaaacttttacatttaaagaaatttagtcattctgttaagttctgttctattattctgttacatttaaaaggtctgtttctaacagacgtgtctttataaattaacaaattttcctcctaaattttaaaaactgtcaaatcgtacctcttacaaataaaatgacaaagattcaattcttcttttagtaaatcttaaaaaaattgaaatagatcttaagaaattaaaaaggaatttaaattaattaagtggtctaaaaagttatttattttttattaaaaaatccatttagatataaaaaaatatattaaaaattcaattttaataaaaaataaatttaaggggaacaagtttaagtttgtttttttttccttcaaaaaatctaaatttgtttaattaaacataacatttttagtttaatttttattttaacatttttagaattttttttttattatttttattttaatttttagtctatttttttaattttttctagatgagtttataaatataaataagtttgattttttcttaaaaa

SEQ ID NO: 273721 - DNA, 621 bp, Cannabis indica
atctcgactcatcgccatgagcaggagcttcaagtcgtcgccgaagattgtggaaccaagaaggtatttatgaatttttatttatagatatacatatatatttatcttgtgtgtgaattttcatgttttcattgaatatttgaagtttttgatgatttgaatcagaagcctgtacaagaaaaagatgtgatgaacgaaatttacaagacccataaatcaattcagtgagttaaaacttgagctatctggtctactttcaatacaattcatcaaaatgtgttattttatttgttctttttatggctggttctgaatgtggaatcgttccagatctctagacaagcaaatggcaatgattcagatggaattggctgccactcggagtaatatggagatgggtttgtctgagggtttgaataccaaacctacattgtctcatgaaggaactccgaggaagaaaatgtttatagtaattggaatcaatactgcttttagtagtaggaagcgtcgtgattcggttagagagacatggatgcctcaaggtattgtacttattttattttttatttccaatttttcctttgattttaaagttgtaatggtcttttggctgaattttca

SEQ ID NO: 273722 - DNA, 575 bp, Cannabis indica
aaaattgtgtattttagacaaaaaataattttgtggtaaatttatactaaattttagttttgtgttctaatttataattataaaattttgatgtaaaatttagagaaaattacactctatattctttttatattgtccttttttatttttatcctcttttttaaagtctattatttttacttcttttttaaacattgtaccaattttgccactgtcacttcaacattgtaccaataaatggaggtatatacacatacagatattttatttcatacatataaagtctaacatattgaagatattcaaactccactaagcatgcattgataatcaattaaaaacaaaaagttagtaaatgtatacataccctatcccttcggttattagaaaatagtcgacgacataggatacacatgtcaattattgcgtgtaccctatgtcaacagttatttcttaataaccgacgggatagggttacataaaaaccttcagaaataaaattcctccaaccgactctaaatggtatagtctaattctatacctataatttttagaggaaattacacatgatatgg

SEQ ID NO: 273723 - DNA, 1124 bp, Cannabis indica
tagctaagctctcttatttgcaagcatcacattggtaaaaaaactctggaaatcaaaataccattctttgttttttatggtttcaaccaagttgctaagagttaaatttcttttatctgtgccgtttgttttttagtatttcaaactagaaatgtaaagtcatgggttttttggctcattccagcaaaagtatttttatttataagaaataggttctttaataaccaatatgttttcattttaaagacaacagtttctagtgttttgttctttgcttttatgttagtgctttatgtccaggtacctaattacaacatttaagccagttccaagaggtactgaaggggctgttagtgttgaaggaacctttgctggacttttagcgtcaattcttcttgcatttgttagttgttgcattggtgaggtacttgtactttattcaaacttctatctgtacaaagctgtttgtttttcaccttgtatgtgttattttgacgttttctcatacatcggcatatttttttcatctctgttatactgttatattttacttttgtcaaacagataaatgcacctgaagctgttatatgcgtaatagcatcccaaattgctaattttggcgagagcataattggtgctgcacttcaagagaaggaaggatttcgatgggtaagtaaccatgtcaaagactcttgctttctattggccctatcactttttgattcagttcacatacagtggaattagttgttttttgcttggatttgtatattttggggttgcataattgtttgacatgggcagcctaaatcaggaatactaaacatgttgctggtttgaattgaaatatggaaacattgacactgaggtaaccgagtgccagtactgcaaattgttgaatctctttttgctggctgacaagagggattaggatctgatgataatctttacttttgtggtgtgcctctgttagagtgttttacttacgttaagctgcttgtatttatcttttctttgcagctcaacaacgatgctgtgaatgtcataaacatatcaatgggcagcattttggcagtgttgatgcagcaatttgtgcttcaaaactggcggatgtaacctttatt

SEQ ID NO: 273724 - DNA, 993 bp, Cannabis indica
catatacctatagctattaggttaatgcaatttttcaaatatccttagatttgaaaaataaaagttatataatatatatttatatataaaaatatatatagcagtgaggcacgcatgtcatccaattaattaatttatgaaacttgtgtactgatgtcctactgcaacacacaagttaccatgcaattagatagatctaccaatttagaaatgtgtatttatagagaaattaattatcggatcacttatattttgatgtaataatttttatgggatactatcactaaataattgtaagtaacacatgtagaatatgttagacaccactagtgccctataatagcaataatctaatatatatatatatatatatatgtaacaccactcaaagtgatgccttgtaaatagttaatcttgtgaatagttaatgatattttataatattataaataatgtgggattcaatacttaattactccaataataatataacatactattaatatagtactagacaccactggttacctttagcatttctctaatgaattaatagctataggtatacaatttcaattttcaattttcctaatatatatgattattttgtatataggtaaatactattttagaccttgtgttttgtaaaagttatactattttgttaaatgagaaaatttaccttttattttctaaaatggtacaaatatataggaccctcaatttattttttgtcaaaataaaacttaataataatccgacctagaggtgttatgacaagactggtaaaatttcattgttcgtgttaagaattgtcttcaagtttgttatattaaaaaaaattcgaaaattgagctcaaggtcctagttataccattttaacaaatatagggttttgtcatttaacaaaatagagaatctaatttataaattttataaaatacagtgtctaaaatagtatttatcctagtattgaatcatcctcaattatgt

SEQ ID NO: 273725 - DNA, 421 bp, Cannabis indica
gacatgattaatcccttaatgaaataatagggttaaactcttcaacctatagaattgtttttgatctctactactccataaatatgtcatgatgtacaagtggcaagatttcattactccacgttatttatttatttaaatattataaaaataaaaataagttaattttttttttttactttctttttcttcttcctcctacaacaccatcatcatagccaactaccactattgccaccaccacccactgaagccactactggccgtaatgttgggattttatgctctaaataaaacccatttcaatataatctgatttgttatcattaaaaaaaattagaagtcatttatgtttgcatgtagttttcatgtttatggtttaatgtgtacaaaatctgttaagtctagaacatatagttat

SEQ ID NO: 273726 - DNA, 832 bp, Cannabis indica
gagaagtgcattaacaaataaaagattgaatttaaaatttggtacagacaaaacattggtgacaataatgtgggaattaaggatgataataccaatttttttcaattttgactttagtaccattaggtgatgtgacagagttagctttggcattggaattaattgaagaaaaactatgaagatggcaatagacatgatgagttgcatcactatctacaatccatgaaatagggttagtaatacctgaaagattgttcacaacaacattgtcattagatgtggatgcatctagagaaggctgcaattattgtgtcaacatggaaattagttgttgtcactgagctggagtgagttgtgaattggttggatcaagcatggtgctggaaatttgtgatgcatgtgggagatttgtgttctgtgaaccagactctggtatgcgagtattgacagtatgagtgtcattagactttagagtaccataaccaggggaaaaccaatttgaagattgcgtttgtctctctaatggcttgatttttgacaattggtataatggggatgaggcattttatttcttgagattgcattagctgcatgagttgaatcttgaggcacgaaaggagtattggttgctgcaggaattgggggaatggtttgatttcccaaggttctttgtcgttcttagttgatgaccataaagaaaactttgctgactggaggacatggattgaaaagaaagatttggtcacgaatagcatgataggaatcatttaagcctttgagtaattgaagaacctggtcatgattttgatgatcattgttttgggcagcagca

SEQ ID NO: 273727 - DNA, 1259 bp, Cannabis indica
taagagccattcattccgtgggtgtaaggacccaatggaggcttgtagcggggacgttacaccttcgacctcaatgactcgtttactgatgtaatagactgggtgatgtatgctattctcttctctgattagcacgacactcacaacatgctccgtgacagctaagtatattccaagctcttctccgtccagagattttgagagtacgggaggttttgcaagttgtgcttttagctcttggaaagctttttcacattcctccgtccactcgaattgcttgtttcctcgcaggatacccagatcgtcgtgacaatctgatcgtcgacatcctctcattctgttcagattgcttcttaggtcatgagttatccccaacctatcaaatacggaagcgcttggctgtctcagcgattgatttgcttggttgacaatggcaccgttaacctagttggaactatcaggtatgacctctcctgatgaattactagacaaggtctgcccgcctaccgctaggcccacaaggcatttggcggctgaccatttatagtctgggaagtattcatcgctggatctttgttcgtctcacccaggggatgacactcggaggttgctgtcctacagtttggtaggcttttcatatcagtatagtagcttgccgactacgatttcaaacgcgagatttactgcagcgtggagttcctcctgatcatgatgtagggtattggtatgaccttgcatgagtccaagagtagcgcagaggttttatatctccgtatcatttccaatggtcgctcgaacgttggtactaggtgggaggactgtgttatgaatgccctagctgggtgcttaactggtattccagcctcttgcacaccaggcccgatttcatctacaggagtcgtcacaccatgacctacgtttgacggcttatcaaaattaacaactgggggaacccttgcatttcttgggttctgtaatgcaggatccactgcctgtggattagttgaatcaactagtcccctacgagtctgtcccaccatcattcttgtggttagattttgaacgaagagcgattcttgatccatctctcaatgaaacaccaaaatgttgacctcgattttagccaacgacatggagtcttatttagtaagcgataagtaatttatagtgatagagatatagtaaagcaacgtaaatacacaagaattttatagaggttcagccctaaatagttccgtaatagcctagtcctcgttatt

SEQ ID NO: 273728 - DNA, 1301 bp, Cannabis indica
tccactgctgcgtcgacgttaagctttagagcacttaaaattggcggctgccatggaggaggagattcagtaggagaaggcattctatcagcaatagtatttggcgagtgatatttacttctggcagcttgaaaattatggatgtaactgctaccaaaagctgcaacatccatggctagtttggctttatggccatgaattacctagtttcgttctgtccaaatcgaccatagggtacaaatgatgtgttccattttagatttcgaataaatggatgataggtgaaccaaataatcgcatttcctcattgtaactgattgttgccaattaaagtcctgatttgaatgttttcaaactactctggcataccgacgccctaaagagagaatgtccaatggattcccatgcctgacgacaaattgaacatgttgaatcagtaataatcgtttgtcttaccaaagatgtagcaaccagtagagcatcatggtaaatacgccagacaaagattttgatttttggcagtagatgaagagaccaaaagaatttccaccaatacttggccaaatttgaggatgaacttagatcaaaattttcatttgatgatgctaaatgataacctgattgaactgtgtaggtacatgagttttggtgatgccaaataagagtgtctttgtttgggaagagactcaaaggtatagtgagaatcatgtcgacatctatagataaaaatgattgttgcagtaaagatatatcccattgcctttcctctgtgatgaagtttgacaccacaccataaggagaactcgagtaaaaaactagtaagaaagagctatgactagggatccaagggtcatagccgcagttaatgccccatccttcaccaattttccatcttaatccttttgaaagtaaatcctttccccaatgaatagctttccatgttaaagaaggagaatgaccaaggattgcatcaaaaaaggagctttgaggataataacggcttttgagcacttttcctgaaagagagccgggattctctaataactttcaagcttgcttagcaagtagagctttgttaagatttttcaaaggatcaaaaactcacccttctttcaccctttctttgacaaagcagattccaagaacgccaatgaatttttgagcccttttcatataaaccccagcaaaagtttgccatcattgactcgagttgattgcaaaagtaagttgacagccggaagtaactcatggcataagtaggaatagattgaaccactgttttgagatgtacttctcggcct

SEQ ID NO: 273729 - DNA, 717 bp, Cannabis indica
ctgtaagtgcgtgttatgatactggtagaggacctcacaactttctcactacatagggaacgtcatcgccattaatggagcaatgatgcttctcaagttccgagagaaagatatgattgtgatatttatcacataagttcagcaagttcacaatagaatcaactactcttaacactgaaacaaaatatcacaattgtaatgtacaatcaatgtcctcgtaacacgccacacattctacctttacaaatgaggatgctgtaaatgtccatacaacacctagtcacatataacttcccatatcattacactttctttgtataaaagaggaagttgtaggtgttcatatgacacttaattacaaaatagctcctcctagaatcataaatgcttataagtggattttatcatccatgcagcctatccaatcgatatcagtaaaaccaacttttatatgtcacaatattggtttgtcgattgttaacaaatccttggtaccataagaatgatagctcaagtaccaatccagcatgcctgcaacaaatatcccaataggaatgcatgtacttgagcgaaccctaggctgccttcaataagcatatatatgcatgggacaatttcaatactaatctctcgttattactaatatacatggactttaggcctttcataacaaatcatactttagactatttaaaaattctcaatgaaatcaaaaca

SEQ ID NO: 273730 - DNA, 843 bp, Cannabis indica
aaaacatgtggtaagagattcaagccatccatgagtaagaagggggaattaatttgtgatatactatttatttaatagtaatatattaacatattcatgtgatgagatatgatattttggtgtaaattttttacatgttaatacatttgatatgtgtatatattatattattatatatagtgatatataatattataattgagattatatataacatattattatatgtatatatgtgagagagatatatatcatataacatgtgacacatgtgagttatatgtatattatatgatgagcatgagatataattacatatatatatttgtgaggataaatatgtacagaaatagtgatttctatatatatacatgcatatatgatatattatgtgtatatgatatatatattgtgtatatgtatattaatgtatttgtatgttatatataggatatgtaaaacatatatatatttaattgtaaaattaatattaatattttgtgtatgttatttatgatagtatgataacatatatgcaatattaattaacataaaattatctgagagttataattttatgggagttatatattaattttgtgtattatatatatataaattatcatattaatatatgtactatatggtatgataatagagatgatgataagaaaaatgtgttcattctatcattataattattatgagactacattatgattaaagacaattacttggaaatgaagttccattttggtgaaaatcatcacattttatgagataagaaaagtgaactatatgtgagttacacttttttgtagtttttcttgtcatagcaagagc

SEQ ID NO: 273731 - DNA, 1656 bp, Cannabis indica
attttagggtttttgtttgagaaaatttgttcttagcttttatcaggtctttggatttaatttttcaaattggttttgggtttaatatctggtatgaaattttgttgtttaatttccaaaaaaaaaaaataataaaaaataatgggatttgagtatgtgagtgatttttgtctttggttgattcgattggttttgtggtagaaattatttagctaacatatccttagatgttcattagtctctctcagatagtgttatacatatcaaagtttgaagggtttgatcataatatataatggctttatatatatgtgcatataatatatgcttgtatatatgtgggctacatgcatacaagcactaatcaagcttgtatgtttaatcccatggtccctagatactaataattatatcataatctgtttttaatgaaggagcccattaaacatgcaaatgtagatagaaaacagtagtactattatatggtacaaacaatgatgctctatttgtttttgttattttttttttatagagttcccctgatcagagttttcaattttggaattaatcaaaggtaaactggaaaggagtcaagttgagatgatcggttgtagtagtgctattattagtagtctcattactattagcgcttcttgccaataattatttcttcaactaggtgttccagtagtttttcacatcattatctgttcttcctagcagttgtgatgctataacagaccacctaataaatttaagttgaaaattaccatagttatatacatgaaaagctatccatacatacataaaaacaaagatgtgatgctatccaatgttactataaagagtccaaatgacattgtcttcctccatagtaaaacctccatgcttgatataatttccaagttttttttcctgaaaacttagggagatcaatacaagactttttccagtgcttaaaattttagcattatttatactttgccttaaaatgaccaactaaaaaagaagaataaagcaacttctaagcaagctcaaaaaattgtatgtgtacttgaacttttctctatttttgtttttttttttttcttgttttgtttaaatgatatttgaatttgagctccagtggttgggtcatgggtgtgggagtttgagagtaatgtaagattcaaataatggtctatagttttcagtattggagtaagattataattcattaaagggattaccttttgggttgattaaagagattcaggtcatgaaaggtgataatagtacaattagaaatgatctgctatctatcctttggtacttttaactttatttcattttgtgcccgagtgtaccattatcgattttcatggttgagcctatgttatttctgctccttttatttttaattgccgagtgtacaattaaattgtgtgtgtagaaaacaagtaaaattttcttaaaacttgattttctttagtgcatatgagagaaactagaattctagttgttctgagattatttatatttgtttgatgtttatcatgtacacagtgatcttatcaagttttctttttctaaaaattatttggtgggagagactcactagaagaaaggctctctgctatgaataaaatgccagcagagctttttgcatcagctctg

SEQ ID NO: 273732 - DNA, 1059 bp, Cannabis indica
tttgtatttacatcacttatttacattatcatactctaataattaattatattatggttgatttcttttcacatagttttgatttttatagttggggattactagactagctagctgctagctagggtagaatgaatgaaaagtggaaagttgatcaaaacataattcgagcccatgattaaagttgagagaggacgaacttttttttcataaattaagaaaggtaatttaatgttctaggtaatatatatatatatttatatatataatatataaaaaaattgatacaaatttatatttatataatattaaatataatttaaagtaaaaaagtgacaatgaaattgttagttttaatggttaagacattaagtaagagttcaaatcttaagactatatttccaaaaaataaattttcagaattaaaaataaaaatatctaagttggaatttgaatctttaaggaaggtacattaatcattgaaacttaaagttaatgttttattaataattataaatatatattgtaactaattaaaatatatacataatttttttttttattttttttagagggtgagagatcttcgcctttggtccgccccacactataaatttaattaatcgacttgcaaaacaaatgtaatagagatacgtacgcatcgtcaatttgaagcaaaataaacttttcattggttcgttttatattttatttcaaactctcgtgcatgaggaatatttctttagtatcacaacacaagtagtgataattcactaaagatcacgatcagctaacatttacattgattggctataaatatagccatgcatgcataaattattaacacacacatacctaatattggatgtagatttatataattgtatataatccataagacaacccagtcactcattctaaagtatcatgcattttgcttaatatatattgaaagtacttgtcatgtgtatagtttagggtcctaccttatatatacaaatgtacatatatatatataattacaattatacagctaaagtagtagtgcaccatgcactg

SEQ ID NO: 273733 - DNA, 586 bp, Cannabis indica
aaaaggttgttttaactggtagaaaatgtgcagacttcgtgaatcgatctaccacaacccaaatagaatcaaataaactcgtggttctaggtaatccaaccacaaagtccatcgtgatatcttcccatttccactcaggtagggttaaaggctgtagcaaccctgccggtctatgatgttcagccttaatctgctgacaagttaagcatatcgatatgaattctaccacattcttctttattccgctccacaaaaagtaaggcttaagatcttgatacatcttggtggtgccgtgatgtagggaacatggagtggtatgagcttcttagagaatttcatttctgagttccgcattactaggaaaacaaaccctggtttcgaactgttggattttatttttccaggatcttagatctactcacaagtattttgtttaacaacctaaatatgaactttctaaaatgataatttaaacacatataaagttgagaaaaccttacattggtagcagcggaataatgtctccttccaccccagatctctaacctttgtatcctttctgtcgcagtgtattatcaagatctga

SEQ ID NO: 273734 - DNA, 798 bp, Cannabis indica
cttcatcttcttcatcatcatcatcttcttcttcttgctcttctcattcttcaatcattaccaacaagtcttttccaagaagagctttgatcataaggaattctcaaactgaaggtcctataagaagacctgttgctccttctattagggagccttctccaccttcttcaactccccttaagcccaccactcctcctccctctccggtggtcgccggtggaggaattggggtggaggataagaatgctgtgactttggagtttcagagacagaaggccaaggagcttcaggagtattttaagaagaagaagcttgaggaggctagtcaaggccctttctttggctttgttggaaagaatgaaatcaacaatggaaggtaaaagttacacaaataaataaaaaagatttcttttttgacttacaaaattcttgattttgatgtttctttttctgggttttctttctttttccttgttgatttgttaatcatttgcaaatttatgaaaatcaatggtttgagtaggtttttgatactgtgttataagctttttagataatagaaccaaataggtaagctttttatatataggtgagtttggaaaacataaattatataatttagtttagtttgtctataattaaagggaattgaaaatttctaactaaattctccgattctcatgaaaatttgagtgtaattactaaaaaaatttctatttaaaaattaacaactaaaaaatatagggtgttttttgaattttacacttcaagatagttttattttgtatttttacaaaa

SEQ ID NO: 273735 - DNA, 1191 bp, Cannabis indica
ttagagccgtgcaaaccatcccccacacacatttcaaccaatagatataatttcttcatatgaaattaattagtactatatagtgtttgattaatgtatattaatctagttaagttatatatatactatacagcttgataactgggctactaagtctagttgagagtgtgtggttcataacatataatatatattagtgacaaacaagtactatatatatgtgttgtataagaaaggtcaccttaatattaatcaaatgattttttgagaatgagatttatttgttttttatcttttgagaaaacgacctgatgccaactccattcaagttggtatagcaagggatctcatactttctttgctaatgaagatttaggacgtgtttggaataacttttattttatccaaccaaattatatatcattgtgtatcactttatattactagcttggttatttgcaattaattccttgttttattaaataatttggggacggtggtgactgcattttatgggattagtacaagaagtgaatagtacttgacctaataatcaatggacaatgaatatgtatatgttggtcatgacgacaggtgacgactagtttagtgtagattttaagtctactgaccaattaacagaagtaatcttcaaatcttaatatcttattatatataaaaaataaaccccccaagaaaaagaaaaaattatctaaatctgctgaagcttacagatcctatataaaattgatttaagtgtaacgaactagtttgaccttttttttaaccagaccaatattatgttttttttttgaaaaaattaaaactaaaccaaatcaattaaatgctcaaatcaaaccaaaaaaacacacttaaaaactggttggttggtcatcaaaactatatatggtttgtttttcatttagtttttttttttttttttttttattttttttttttttattggtaattgttctattttttgggttgtatttgtttacttttaattagtatgtaatacataaataataatgataaaaaaattttcaaaacattattaagttattactaatattgtacttgaactttgtccaaatattaatattttatacaaaaaaaaaatatatatacatatcaagtaaaataaaaaaaaattaaacccatttatttggtttgaacttctaagaattc

SEQ ID NO: 273736 - DNA, 810 bp, Cannabis indica
tatattggtggccaggtatgaagagtgacattgttgagtacgtatcgaaatgcttaacttgtcaatgtcagcaaaccaaggcaaagcatcagagatcggcgggtttgcttcagcctctaaagattcctgagtggaagtgggaagacatcaccatggattttgtggtgggattgccaagaacgatagggtactatcactctatttgggtgattgtggatcggtatacaaagttagcacactttttaccagtacggacaacgtatacagtggatcaatatattgatttatacatcaaggagatagttcaacttcataatgccctgaagtcgatagttttagattgagatccaaagtttacatcttagttctgggaaagcctgcaacgaataatgggtaccaagttaaagttcaatacagcatttcatcctcaaactaatgaacaatcaaaaatgagtattcagataataattatttaccttcaaatcagataatatctcataagttaaaattaatttttgagaataatattaaaatacgaaggatttaaaatattttttaattttaatttaacttaaatttgaattaccgcttatgatatgttttttgctacttccttaaatatgatatacgtgagtaatcactcaacttgaattgcgcaagattagatccaattaaaatctcaaaaaattgttttggttcgtatatgctgaaggtagcacaagaaacctaccttcttactttcaaatcaagccatacatatatatacctctcagaatttatatctatgctgtaatatatatgctatttttt

SEQ ID NO: 273737 - DNA, 614 bp, Cannabis indica
ctaatccaaataattaaacaataaattggtatgttaaaaataatataatcgaaatgagaattatatatgtgtatgtgtatatatagtatgagattgcattagtatataataaaccattttaattagcaaaacataaccaaaattgactttattataaattaatgcagaatcactacaccaacgtttgatccactacttataactttgaacatttgagtcactactattagtgacaaatctccaaatgtaattagcaaaaggaattatgtatataaaaaaaaagcttagtttatctaaaaaaccaaacaaaaactgcatttattattgagctttttgaggaaaaatctttttaacgattgtttcacttgcatttaattctttaagttataattttaactgtaaaactctcaaaactattaaactagtagcaaatctaaagggtcattcggttacatgtcacttataagctgtttatgtgtacactcttatacacatgacacatttatattggtacacctaatattactatttaaaaatcatttttaaaatttattttaaaattaaataaaattataaaaataaaaatattacaaattttaaaataatttttatat

SEQ ID NO: 273738 - DNA, 812 bp, Cannabis indica
tttaaaatttcgtgaaaccgtatttttgttatttttttattgtttttgtgcatttgtgaaattaaccctaaaaattaatagttggccccctagtaattagggtctggctccgcccctgattatttagcccccaaaaattctaaacttaattatttttgcgctagtgattgacccgaagactaaaacagaatgttaattatacattttacttcatttgtgtttaataataatattcatgcatgtatgagtttgagaagtccataaagaatttattctataattatatatatgttataatattctcaaagatcataaaacggctgcgcatgagttagtcgcaattataaataaagtagacttatttaaatataaacaattgttatttgtatttaaatttgattaataaaattttataaatatgatcaaataatataagtttcaatttcaaattaactatttacttaggtaagtgaatatgtatcggtcatatatattgaaaaaaaagaagttctgaatttaatcccacatactaaatagtataattttcaaattactcagagtattaaatgagtattgaacataattataaattcaaaaaacaaaatcaaacaaatttcaatatatatatatatataaatactgtgtttggtacatttaaatttactaaatatatataattaaaatatatagtatacatcagtttagtacaccatattatattatattgtgttgtaatatactattttattttttaatgtaatactatgtttagtagtatagacttgtagtaataagttgtgtacaactatgag

SEQ ID NO: 273739 - DNA, 577 bp, Cannabis indica
atatatagaatatcaattattaattaattgtgtccaaattcaataaaatataaaatataaaatattcatatatcttaaattaatttgttgattctattcttaaaatagaaattattctaatattctccccacttggttagcatttagatttatcacttaaactcaacgattatccttgctatataacaaacacatgaatcatggcgatatgtcctcattttatggtgagtattatctttcatgtattacgatatttttgttacataacaatgtggcaatgtacttaagcgaattctcttacgataattttcttagatgaaattaaagtacacataaatatgagaaaatattgaaattagaattttattgaataagtttagctgtacaacaacaaaaaaaaaaactagcataaggggtaactgaatcccatatttactttatattatccttgaatttgtgttgtggcatgcctttaatcaaggatactgcgatcacccaattcagtatcgcgtgctttgtgacagtcagggccccgtgatccgaaggaaaaagaccgggagctgtacaatcccacatc

SEQ ID NO: 273740 - DNA, 742 bp, Cannabis indica
cttcattgaatcccttttttattagttacataagattttgaaaaagtattaccttgggagaattttgaaaaattctatttgtcacttatctttttcatgtttttctaaaagtttctagttaaaacaactatctcatcatcttcttcatatctgaactttttttttttcattaacattaaaagcaatacttttacctttatcaattgtaggcttggattcgttattttgcttaattttttgatttagttcaaaagtacgcaaggacccccatcaactcaccccctttcttcttgctaaattttttgcttcttttatagccaatagcttagcgtcgaatcaattaggaagaactttgacaaattttttgactatcacttattcatcaagtttttctcccaaggtaaaaaattcattagtaatatcagataatctttcataaaatttagacaaaaatttattatcagacattctaagatcaacaaacctagtttgaaccattataaatctagatcgcttaacaccaattgtttcttcaaattgggtttgaagaattttttaagcatctttaacagttcataagaagatataagcttaataaaaccttcaccaactccattaaatatagcatataaagcattactattgtaagcatataacttatcatcttcagtagaccattaaagtccaggttttaacttagaattatcttcgaaatctaccacaacaggatgagaccatcttg

SEQ ID NO: 273741 - DNA, 1625 bp, Cannabis indica
ctcgaaggtgtcccgattggtctgtgtctaatgtagttttctccatcttcaaatgttgtcttgcttttgttaatgttgagttcatttggattcctagaagttataacaagtctgcccaccatgttgcttcttgggctgcagactttaactttactggtttggttcctttaagggaggtaaaaccctttgtttccaccattgttttcttttgaatagatgttttcttcatagcaaaagaaaaagaaaaaaactacactatgcttctacaaatattgtagggtttagaccgggaccctaaataactttacttcgcatctacaaaagtcatttattagattgaacaaaataaaaggcaacgaaatataagaaattgtgtgatcattttcaattggacaagaaggaaacaatgagtgtaaataaacacatgaaaagcaaaagaaaacactgttttctgtttctaattatgcattcattaaattagtaaacgtgacctttaaattgggttcttctttgcctacctccaaaagaaatctaaactaactaatatctattgcaaacaatggaagataaaatgaaactaaattggccattttttatacacaaataacaataatatatacatatatgtacctggtttgcaggacagcgatagaattgctgaccaacattgttgccagtttttgcagtcaaaattaagcataaaccagctccacaaggacattgaatgcccgggtaattagaatcactagtataactcccacccgccatagaattagctccagatgcattatcacaccattcaaagaaaccacaacctccattctcctgcaccaaaaattagcatgaaaataaaatccaaaaaataggaaaagattaaactaacaatcaatcactacctgtcgaacaggacatttgtaaaactttcggccccgattcttctcagtatttgcggtaagaaccatacaaattcccattccacaggcgcagcttttttccggaatcgaagggtcggatcctccataattactatactgacccgctccgccaccaccgcctcctccaggtgcagcatcacaatcgcgagcccagtgcccagatttgccgcatttgaagcaagaatcagcgccagagacagcgccgttgggggctactctcccacggagaggatcggggaccgtagtctggtggaggaggctctgattgcctttgagagcggccatatataaaccatcgtcgtgagaaggtggttttggggaaatgacattggttgcagtgggagtgatcctttggcgcttggaggcgagagcagtggcctcagcggccgcaacctgagacaggaaatcgtcgtcgtcgtcgtcttcatcgaattcaatgaaggacttgcgtctttccattttcaattctctaactccatactctcctcatttcattttgttactttcaatttaggccccccttttccattcctctttcccgcctaataataatagactactctaatctaatccaacattttttttataaaatttttgcatgcaccttcaattttgaattttgaaagacttttgtgggaagcatgatttcactcacgttaaagttgcaatttaataaatatcaaagttcag

SEQ ID NO: 273742 - DNA, 529 bp, Cannabis indica
cttggtcagaaaagagattcaactcggacaagaagtgttattatttaattcgagattaaaactgtttcctggtaagttgaagtcaaggtggttcggaccttttacggtggtcagagtattcccatatggagcggtggaactcaaaggcgagaagataaagactttcaaacttaatgatcaacggttaaagctctacttgggtggtcaaattgaccaagccaagtctatatgatgataacaacaacgctcttgggaggcacccgaagttgtttattactttaattaagtttgagacatttgcaattaattcatttttagctttttaattttgttctttgaatttgtagaagtttttttgtaaatttagaaccatgcaaagcgtgaaaagtcgaaaaaatattttttttcgaccactatagtggtcgcgactagcaaattctatggtcgtgaccctagaggttacagagaaacaaggaaaattttgaccttccagtggtcgcgaccaaactaatccatggttgtgacaaat

SEQ ID NO: 273743 - DNA, 643 bp, Cannabis indica
gaaaaggttgtagatgctgagaagaaagtcaatgaactggagaaaaattaaccaccgattttggactacaatagccagactgaggcccttaacgacaagatcattatagttgtcaatttggagaagaagttgaaacaccatcaagacctctagcagcagacagaaacttttgaaaaggcagtcctggacaaactcaagatctctgaggctgatctcttggccaaacttaaagaagctgagaaggttgttgatgaatctaaaaagtaggccaagaaaaaggctactgttgcaaaggttgagtcttacgctaaggagctcgaggagaaaaattcccttctagagaaggaaaaagctgactctaaggtggagcaccaagaagatctaaagaaatcattggttgtcaccttgtttcatctttggaactcgatgttgcaaagcaagctgccaaggatgttgttgaagaagatcctgagaccgttctcctgaatgatgtaaacccaaaagaatctttcattttgtcgttagagactgctctagccagtgatgttctaggtgatgatcagcctgactcaactatgcaaactgctagggctgaacatttagacccgcagacctggaaaacccgaccacccgccccgacccg

SEQ ID NO: 273744 - DNA, 814 bp, Cannabis indica
atatttattggaaattattactaagatggaaataattcatgttaacatctatcaatgtatcatattataaatattaaattaaatttatatttagaatttttttatgctaaattagaaattttaattaaataaatatgtatttaaaataaattgattaaaataaatattagaagaaaatacattttaaataatgagctttattaatattaggacattcgatctccattattggttctacacagtggtaatagggtatagccactataccacgtacacttcgtacctcactgtacgagtgttggtagggtttgtttcataccctgagtaccactgagtgatataccacacacactcagtacttttccgtacttgtgctggtatcactataatgtactctcaaataacattcactataccaatgcactctataccttaactgttcaagtgttggtagtgcaactaacactttaagcatgcatatacacataacatatacatacattaagatattgatatcacacattatatacagttcttaccttctttacattatatactgaaagtctcgtgctagatggatgccctaatcacattatgaaatctaggttctgttatacaacctaggggttacacaaactctggaaatagggaagcacccaaccacgacactgaaatggacaaaaattgagaaaacagagcatttggggaccctgtcaagaggtctgataaaaccggctagccggtttgtgttgggttttatgccctaaataaaactccatttcaatgtaatctattttattcaacatcaataaag

SEQ ID NO: 273745 - DNA, 1236 bp, Cannabis indica
tatatttcttctcacataaacttggaatcaaacccgaagtcggacccggatcccgaaccctaaccccggacttggacctcgacctagaccctggacaccaaaccagaatgctgacacaaacccggaccccgacctcaaactccgaaccccaacctcgacccagacctggacccaaacttggacactgaaccccaaaccttaactcgaacctcaacctgaacccgaacctgacccagaccctagaccctgaacaccgactcgaacccggacccgagacttggaccctagacccagaccctaaactcgaacacgagacccagaccgggacctggacctgagacccgaacctggactcagaccctgactctaaacctggacttggaccccaatctcaaaccctgaccccagacccgaacttggacccagaccccgaccccgaccccaacccaaatcgcagacctcgacctgaactcgaatttgaaacctcgacccagactccaaaccccaaacccaaacctaactaaggaccttggacctagtcttgggttttggatttgagttcgggttcaagttcatgtccgtggttaaggtttggagttcgagtcggggtctgaattcgaggttcgggtctggggtctggtgttcgtgtttgggtttgggtccgggttcaaggtaggtccaggttcaagttgggtgtggggtaaattgggttcatgtcggtacggtattaaaatattcattttttcagtaagaaaaaatccaaaaatagttttaacaaatttatgtcaatcaccatttaaattttaaaaatgacaaatcttgttttctattctcacttttaaaaataaaattctaaaaataaaaactgaaaatacagccaaacagactctaaagtttcaaaagtacttttacccttgatttggtaacaaataaattttagtgatttttagcaaaaattatagcatcttataaatagaaatgcaaatgtaaaataaaattcactttgtcaaaagtttactccaatagtctggtaaattgtgatgtaaatatttcacataataaaaagtgatccaaatttagatcataatataatataatgtaaaatttacatcacacagttttatatttgctattatgtcatttttaatattttattattaaagtttagttagtatgtttatttgtattaaatgactttcataattattattattttattattaaattttaaattta

SEQ ID NO: 273746 - DNA, 1000 bp, Cannabis indica
caatctcaatagttcgaggggaatttttaacgataaaaaaagttcagggggcacgatttggtacatgtcaaagttcagggagaaaaattactaattagccttttacaaaagttactaattgaactttctattttgttaaataacaaattagattatacattttctaaaatagtacaaaatagtaccatgaactaattcttttgtcaaaataaaaataataacatgatctattatgataaaattaggcatattttctctatctgttcatgctaaaaaatttctccaacatagttatttttaaaaaaaaattatcaaaaaattgagctcaaaccttagggtgctattttgtactttttggaaaatataaaatttaatttgtcattttataaaatagagagttgaatcaatcatttttaccaaatacatatccaaaatagtattaaattataattaaataattaacaaagaagaggtattagacataataataattaaaaaaaatctccaaagtaactattattaattattgatttatatcacatgtgactatgtaatgatgaaggtttttttttttttaaatggtaatgtaatgtaatgaagtttaaagtttagtaatcaactctctctaaataaatattaaaaaataatcttatgtatatggttcaaaaatcaacaatcaaacaactccaaagaaaaataattaataattaacttattgtatacaagaaaaacatgcaatttgcaatttttttttaatttttaaataataataataataatttttaaattaaaaaaattgaccattccaaaatggttgggatattatatgcggaattataaaatccgtccaaggtagatgagataattttaggagtatattatatatttttattattaataaatatatatatattatgattgtgaatttatgactcacttatttccacttgtagtaaggatatgcttcaaacaaatacattataatatatccacacaaaaa

SEQ ID NO: 273747 - DNA, 609 bp, Cannabis indica
aacattaaatgttatttctgatctatattaataagtagatctgattatattgaaatgagttttatttagggcataaaacccaacaatattctcattggcacaatctgagatgggaattatctcaaatcgatccgaattaaatataacttttacttgtctagtagggttaccctgttagttatattcttgcatcttagctcttgatcttgatcttcctagtctttcatgacttgaccagtattcgtttattgggcctttcctatgtttttagcactatgggcctttcattgacccattgatttttctcctaaacactactctcctaatttcttataaaagtatttataagaaactattaagagtatttttttgtctgaacactacataatgtactcaagtggtgaggatgttgttatgccttacctgacctgattcaaagggtttaaccaatgtaggttgtgtaatgtctgagtttgatgaattcgcttgattcatagaatttgatttgtcttatacatgtattttaggatttcacaagtaccctaatctggtttgatcccttgggttttagttggccataccaatatgtgtactatctcggcttgattg

SEQ ID NO: 273748 - DNA, 1202 bp, Cannabis indica
gggcacaaaacccaacaggaaccaaccggttcatgtagtgggccagcatctccttgccctttttggtctcagtaagcacgggcaaaggctgtgttggtgcctgcagccgctcaggagtactcctgaccagttcagacccagctgttggtggtccagactccttggacttggcagacttgggggttgaagggtttgcagcaatcagctcctcggacaggtcaatgacctctccagaaggtctcttatccgaggacccctcaccgcccttggacttcttggccgaaggagaggcgctagagcttccgcccattctctacctcagagcatcgatcatctgccgagacatgtttgcacggaacaaaaacagtatcgttagaaaatagccatcagaaaacacaaggcatgaaagtcaagaagctcaagagtaaagtaaaatgcaaggtgaccgcccgcatagagattcagaagtccatcatcacctgacattgatcttatctcatacatgatagccttcccttttccggcaaaggggtgagatggccgaacaggtgaaatgggctcccttatgcgaattgcatgttcaacgggcctgggcgtggctgggagtttcttcttcctcttcactggggtcacttgctcgtcctcagtttcatctttaggattcaaaggctcctgagcatactacttgtccctaacacctcccttcaacttagcttcacgcttaagttgaatgagctcatcctccttattagcttgttcaggccggccagcatcagaattcctcttcttccccgccacagactaaggagaaaattcctcggggtaaagcccgtacttcaccagattatcaccagaggtcaactggataatatccctgtcttcctccagcaaccgggcaagtttctgagctctatccctaagagcaagagtgaggggaggacggtgatatgtcagaatctgctgaaattgagtccgagtaatgctcagatccttcaccatgaagtactcatcagcaaaacaccatattttgctgatggccttggcatccgtgccggtcaaccacttgaagcctggttgagagaagtagaagtaccctgacctgcctttcttgggggtagacttcaagtcaaagaacgaggcgaccttgtggggagaaggagcatcccatccttgggaagcgtagagaacgaagagggcagata

SEQ ID NO: 273749 - DNA, 548 bp, Cannabis indica
ccgagatcgacgtccttgagctacccctaaagttcaaaatgccgacctggaagatatacactagagaaagaagatcccttatcacatcttaaatattttgagatgcaaatggatctgcaaggagtacggggtgatgtgcgatgtagggtattccctgccacacttacagaagccgcacaacagtggtacttcaagctaccaccagggagatttaattcatggaaggctttttcctcaaaattccatgcgcagttctcctcctctcgtcaactcccattacatctaaaagacctggtcgaagtaaaacaaagactaggagagcccctcagagcctacataagcaagttcatgacagaggctacaaaagtcacaagattaactgaagaggggaggctggccgccattttgggagtcatcgaggtactcggagaactgtggaaggacattaaaagatgtggccctatgtggtctatggtagagtttctagaccgagcagatgggtttatcaagctcgaagaggtagtcagcgagcagacgtcgagcctaag

SEQ ID NO: 273750 - DNA, 2062 bp, Cannabis indica
gggttaaaaattaaggaagctgcaaggataaatccgtacaagctacatttcaagcattttaagattcaaagcaaccaagctagtctaacaatgaataaatggcagatgcattcttcataaacaataaggaactatgaaataacaaagtcacaccttctgttccggtggtccagtacatcttgtcttcttgttccataaatcctgggcagctactgaattagcatttttgttctcagaatcatctgattgtttaaaattttccttattccatctggatcctttgttattcctcgaagaattagacccagaaaatttatgatgttgaccaacagatgaatgtcttctcaaagcagataaaacctcagttgatgtactcctaacttcagaaccatatacacaagaatcccattgtttcaaccacagaagaacctgaagtggaattttttctctaagagttcaagtaatctttaacataatcctcacatatttagaaagctggcaaagcagtaaaatacctcacgatttgtatgctcatcacttagaagctcagtaaacgaaaatggtgcatatttatccacccaaagttgttcatgaacaactggtgtttcactaaggaccatttcactctggcttccagaactagcttgtagggactgcagcatcaaaatgacagacatcttgagagacatgttcattgcaacaaatagtagaccctttttacattatctttttctctttttcagtattaaaaatagtataaattgccaacgcttatcatttttcaataatggattgaatacacttagcacttggcatgtcttaaaaatatgtcaccttagcgatccttctaaagacaagacattgtaagaagttactgaatagtgaataccgcattatctctacaattggtcttaaaaaagaatagcaagacaatgttaaaagttactgaatagtgcatctacctacaaatgtgctccattacccttttgccatttgattcccgcgaagtaaacccaatgtgatcttgataattctatttttgaacaggtttttacgattatgttgaagtgattgtgtggtttcaaattgctaggaacgtgatgagcatcaaaatactatgggaattctttccaaaacattgagtcttaaatactacaacataagtttgattatgaactgataatattactttgtagtaccttagtaaaagcctcttgttccactttatgcaatagaacatcaattgattcaccaataagacctgcaacaataaactgaattcaactcacaaattcacctcgaatgctcaagtctcactcagaattcccaaagttctccacattttctcagaagccaaacaaacaactaaaaattgacaaagtaagaaaattgaaaaccaacctgcggaaggggttttcaaatacaatttctcccggcgctcattcatctcctccgtagttactttcgcatagaccctatcaccaccgctaggagccgtgatgggaataaaatctccatcaatctccgacgcaaacctccataaaaccttctcatcctcaacattctctactatttcttccacaataggctcggttacctcaggcggcaagtaccgaagcaaaccctcatcttcatcgaggactatgtcttcatcgattctactccgtttctcatcggacggtctgaatactccctcagcagacgcatcggggccgtctgatggcctagtacgcttgtggtcgttgatttgagcttctggaaaaggtgatttagcttttgaggtggattgttgctgttgttgtaagtgttcatcttcttcttcttcttcgtaaggatagggttccgtagtagggtcaaaatgtgagtattcttcgttgatgcggtagctctcttcgagcaattcaagctcatccggaaggagatcgaagtccatatccatggcggcagaatcaaacgggtgagaagagaaggaaaatggggaaaattatgattctgccgttttggcgggaaagctattgcaaacaaagcggtaaagtcggttttatttgttttttttattttt

SEQ ID NO: 273751 - DNA, 4645 bp, Cannabis indica
ttttttttcttaaagcacacacgttactgactcctttgggtagaaaaaattaatgattgatcaaggaagttaacttattaatttttattcttaatcatgaatgcctgagaagattgtagcaattattaagcttttcaaatccatgaaatattgtttatttgatactaaaaaccaaaagcataaaagtggttccttaaaaaaagatcattttgtatttacagttgtctacaatttttttataatctcatgtaaaacaatgagagccatgtattattaacctggacataaaattcaaaaaatgtagctgaggtaatgtgtttacttttcaagacaagccttttcagtagcttcagcaaagttgttgtaggcagaagcaacgcgtctgataaacaattcatggccacttagatattcaccctctttctgtagaatttcacataaagtaatataatcaaaattgtaactaaaagacattcagaaggccttataaagactagtaataaatggcatcaaacagccccaagatacaggccaaacctttaaaagatagaccgatatgggaagtaatctctttagaatgtgcaagagtctagaacctaactgcagcaaggaattaatgaatatcagtttttcaatattcccctacaaactttataatttgtataaaaggaggtaaatagtacaatcctttacaaaaaaataaagagaatccaatccaaaaaaaaaattgtaaaaaggtaagcatgatgtgataatcatcattccaaattacctgacaaagaaaaggttcaaatgtatcacgagctttcgcaacagctataacacaggctgttctgattcccaagaaatcaaaaaataagtgtcaaccgaaattcaagaaactaagtgttattacgtgaaaatgacaagtacctcgagtaatttgtcccatcgtgtatatcttcaactccacaagcatttacaatttcttctcgtgtaattggagggcatttcgttcccccaacaacaaaacggaactcagccatggcacgatgatactgtgctcctccatataaacgcattccagcattctacattattggggagcaaaacaaaatgtctcttattattcatcaaaagtctgagaaagctagatcactcagttttacttgtgaagtctagtgttagatgtaatgtaactaaataaatattgcctacatttataactacagcaagataaacaatgacaagttattaacagaaatgaaaacacaaacacttgaaaatataaatatatatatatttataaataaataagtaaaagaacagcattcaggcataggcatatccacctttttagatgaagagaaaaagaaaaatccctaaatatactaataacataataacttacaggtataagcttgtgaggaatctgaagaccatcaataccaatgaatgctcccccattacttctctcatcttgcagtgtttcaccttcaaaaagtaaaaatgtgttataaatatctttaccaatacagcaaggctagaacaaaaataataacacgcttccaatagtgacaaacatccaaaaacagaatggcaaatggtgagaattaattcaagataatttaccaaacttatctggaggcgcaacaactgtccctttcaatagcaatgacagctgagtagcaaataacttttgttcagctcatgtaaaggtgaaattagcagtaatctataaataaaatataaacaagatttgtctcccaaaaaagagaaaaagatataattataaatgaaatagttaaaaaatatattgatcgccttagtttataaaaacctttgtcaagatagatcatgaaaggctcttcctttttccttgagttttacttcatccactgaactgcaagtacaaaaatataggaatacaatcagatacagtaaagaagagaataacatctaactatgataacaatgttggggaaaaaaagccaacatagacataatacttactgtccaacctaccccatgggccacagctgtctagttcaacaatgtttatatacttcaacccgacaaaactgcctagatagaaacctttttaaaaaaaatgaaaatgaagaatcaaacctaagctcttgatttatttcattcatcctccttgttgtgctcctgtattccttttcaagcagaggaatgatcagtggaacactatccatgtacctgcaaagataacctttcaaaattgtaatataaaatatggtaggttaaaattaaagcataacatcacatgaattgggaggcaaatataaagtatggaaatttcataccttttctgcagcaattcttccagaaatgccctgagtttgctaacccctattctacttctttctttctcagaaagtgatctgcccaatttgttttccaaagaagcaacatcttccatctccctcaaggaaatcgcctacatttaagaaaatagagatataatctacaggtttcaggaatagcttatcagacaggaagctaaatcaacaaacagttatttaagtcttaatctaattactttataaaaaaatacaaagaagaaaaagaagtagagaactgaaaggagttccattggagttctaatggaagggatcacttcttcgaccctcaactggaaaacaaagagaaaactgtacattgctgatacatgcttcctcttcaatcacactcattttttctcttttctagtttcactttaagatcataattttaacatttatctacagtacatgacaagcctacagattagggtcatcctgtcagctcttttactccatcaaggagttgaaatcagatctggttagagttaccattttgcaacagagacaagacaacccaagtatttcaagaagtttccaaagggaccaagtgctcaatgcatgactttcatcaagttcagttgtttaaaatgctttctgatacttgaaaaccaatatctctatgatgcacatagccatttacaacaagttttctcccttaattcaccatagaaatagaatatgtatatttgaggtcacactacccataacttcaaataggaggatttgaagtagtcatgaaaagtacataaaattcctaaaagcctatcatcgctacataaatatatgaacaaattaattataggaatcaacctgcttaaactcgtcatttgatctataaactgtatcaggtccagaaccaactcttccagaaggaacagatgtaaaaaaaggagagtcacccaatatgaagccgtctaatgcgcaagcaggaggtgaaagaaaaacttcaacatctgatgagcgagcaaactggggtattttggtatcaagcttggttgagacaataacagtccttgaaagctcaggatcaatctgcacatcatcaatgaataaaagtaaaaacaattattaagtaagatacaactatcatatttcactttaaagataatatttttacggaatgtccttggctcaggactatagcacatagagcttcaatgcagctacagcctacagcacttggctaaaactcaaagcgccaattattttccatgcagaaaagtagaagttgtccacaaaaaagcaggaaatgatagtaataacagcatataacattgttgcttgagtcacaaaaagcagaactattggcactaaacaaaatgacttacttgcataaccactcttcgagtagttgcattactccagtcactgcaatcttcaaggcataatataataaattctttatgctgcattttagttcgtacaagcgactccactgcacgagcttgagcctgacatgaatttaatagaaaacaattgtgaccaccatcacaacactggtgaggaataatgaaatctatgttataaggggttcaccaattggatatttgacctgtaattcacgattctttcgtcctggagcaggagcaatgagtccaggggtgtctataatggtaagatttgggcaatacttgtactcaatattaataattatttcctttgcagagaattgacaaggctcgctttccaatctcttgttttcagcttcaatataagcctgcaggacactaaaaattatggaaagggactcatgggataatatattattactgaattaattgacctttaaaattaaaagcataagatagaatctagagtgtttcaccatattaggcatacattgaaatatttgaaagcctactattttacagtataagccacaaaaagtgacgtgaaaacagtcataagttagagaaacaatctgcatgaatactaaaaaattggcatagaatgcagatttcatccatgtaaatccaacaagcatgaatgcaagtagtccattactagtcttcatgtcttgttgtagtgtttttttctcttttctcattttagaaaaaaaaataaagaaaataaatagttatcagtgtcacataacatagaatacaatcctcaattcgtaaagttttttacttcattttagtcaaaagaaaaataaagatttgtatttttcaggacagagtaatatgtttctaactttctattttaatcttctataaacagcaaccaagtaaagtaaactgtttttcttcccttttaaataaaaacaaaaagtttcaattttttaaaaaaataaaaaa

SEQ ID NO: 273752 - DNA, 723 bp, Cannabis indica
taatatataatattattttaatgattagttttagttattattagaattaattgactccatgaatgaatttgttggtccttttaataggcttcaagaatattgaatgtggtgattgagaaatgggttcttcttggaaggctactttcagtattgttctgctctatttgtttgtttcgaaatgctgtggtagtgaatatggtggaagccaaatgggaactctaagagttgatgcttctgaatcttctggacaattaatacctcaaacattttttggaatattctttgaggttcgttctctcaccttaacacaattcaatattcactactacaaaaatagatttcaggaaagatagtatatttagtgaccctttaggatgggtcacttaattcttttacagtccctcatgtttttagagttgtgaaatttttactgtcttgggtcactaaaacttgattaaaacaattggtgacccacattttttggaatatcatttcctaaaactcttttactgcaggagattaaccatgctggtgctggtggcatttggtctgagcttgtaagcaacagaggtcagttttaaaaccactataaatgaaccgaatgacaccttaaatttgctaacagtttagtagtttggaaggttttatctccaaaatttgagcttggaggaacgataattaggagagtgtagccgctaaaaactcttatttaaaaacaacgct

SEQ ID NO: 273753 - DNA, 686 bp, Cannabis indica
atttttacgatatattaattttcaatgatacgatatatcaaatattattatagggataattacatcagacacaatcttttgtaaaaaaaaaaaatacatttttacgtttaaagaatttttttttacatttttacggttttccatagaaacaacataaaaacaacaagaaaactacataaaagtaacatgaaaataacatttaagtaacatcaaaataacaacaaaaaataacatgcagataacaaaaaaatcaacaacaaattaacaacaatacaacataaaagatcgtattttctgtaaataaaattaaaaaaattgtaaaatgtttaaaagttcgtgaaaccgtatttttgtactttttttttttattgtttttgtgtattgtgaaaatatccctatatagattatattttaataaataattaaatttagatattttaagcaaaataattaataaatttatataaaatatagtaattaactaataactttaacagtgttagtattaattattaactttaacaaaatgaataaaactataccaacatataaagatatccatgaatttcctttcttcttctttcgtagtagtattacgtacattcgtacaagtatgatattcttcactggtaccttgtattaaaagcttacaaaactaatcaaattaaggaaaacatatatatata

SEQ ID NO: 273754 - DNA, 782 bp, Cannabis indica
tctctctctctctagaaaaaactcaaaactaccaccactatctctctttcctctctctcttccctgtcaaatgtttgtttcttggtgggcggtggtggaaaaccagagcatacccccaatcactcaagagtcttacacccttataatgggtaagttgtgttttaagcattttgttagactttatgtagtttgctttcgttatatgtgtcgtatttgttggaactggtattttttggtctgaaatggtagagatgtggtagatctggttttctgtcgaaatctggattttccagatgttatcaacaattaatttatcgatagaataccaatgctatgtcgatattctgctaagaaaggtcagggacacccattatcgacatgttgtcgatattatgttgatattctacttagaaaggtcagggacacccattatcgacatgttgtcgaaagtttatcgatatcatgtcgattaaaaaacaaattaacatacataagttatttcagaatttgttgacattttgtcgatagtatgtcaacattaagttgaccaacagtatcaacaatataacgatgaaatgtcgatatattgtcgactttatgataaaaattgaaaaaaaaaaaaagcgtttgacataagatacattaaaaattttgaaacaaacataacattaaaaacatcaatatatataaagggaagcaccccaaatagtttaggtggtatcctttacattttttattctattttttctaatttttaacagcttaacatactttctcaataa

SEQ ID NO: 273755 - DNA, 1502 bp, Cannabis indica
tttgtggcatcctactcacatgatataatttctctcaaactgctacttttagtgacaactttttagtcacaacataatttttttgtgacttttagtcataataaaatgttacttatgactaaaacatagtatttagttacaagttgttactaatttagttttagtcacaacaaatattgtgattaaaaatacatttagtcacaacaaattataatttttgtgactaataactttagtcacggacattttaataataatttataattagtcacaatttctttacttttataagttttattttgactaaaagtaagattttttgtaatgtcacatggtaaaatattatccattgaatcaggatttagggttagggtgatgatataaaatcatgtaccggggtagggtacagtacccttccctataaccctaccttatcctacttaattagtaattatatatgtatttatatttatatgtatatttgactactattcatttaatttaaatttgaaaaatcgtaaaaaaaatgactttaaaattaattattaaaaaaatataaattctaataaaacaaatatttactatctttaatactttagtattattttaattgttagcaattatacttaattaattttacaaatactagaatatttaatacttaatatttaggtaattatatatatgggtaaaacttttttcatatggtagggtagtagaataagcatactttatctatattatccttacatttacataaatattattcaagaaaagttaaggggcaccttatggcaccaagaattacaagaaatgacatattattattggtgtaaattaatatcaagtctcacaaattaatttaataaataatataaaaaatcgctaactaatcacaacgcaccatattaatataatgttagccaacatataatactcaataataatgctcttatacattatatatgtagtttctttctccactctgaaaaaaccatattatcgtaatcctcataataattgatcctaatttgctatatataattgcaacaacaatattcagcgtatgttgtcgaggagtttgatacaatgctcattcaaggtgtggattattttaattaatttaaaataaaacaaattaattgacagctaataacaaaagaaaacatcatgaagatttagttcctattcacattttgatttatgaactaattaatcaataagtaggtcatataaaagccgcattaaataacaaataatattatgtttggataaaatattatattgtattaattagactataaatgtgagttgtattatttaatacataataaatgacctgtattagcttgtattataatatttacaaaggatctgggatcaactccgaccccaatcccacagcctcaggcctcgaacctggaccccacactacataatatcttacttttagtcacaactaaacttgtgactaattataaattattattcttatgttgtga

SEQ ID NO: 273756 - DNA, 618 bp, Cannabis indica
tatcaaatttaatatatcaatggagtcacccaatttgataaatggaacattcataattatcgagcgtcgcgagaactataatggagattggtttattgatatgataaattttcttttgaatctcaattgttcttggaatagtgtaagcctacatgttgattcagctaaggtatgtttattacttttcttattttatattttgctgttttacattatatttgatatttacattttcttaattttatgcatgaagggtctcatcttaccagaaaacttgaagaggttatcacattctcctttggttaattgggaacatcttagagtttttacagattatgaaccagaaaataaatcagatttgagagatgctctgatgtggatttctccttctttgaagacattgtctatagcaaaaaagggcatcttcttaaaaaccttttaacattttaaactatgattatgggtatagatcactgtctgtgtttcttttggagattgtatttactttataggtagttcaagtgacaagactaatgaatcctactttgcttaagaatgggatttttattctttcttatttttgcttgtgaatgagtatgaggagtacacttattcaca

SEQ ID NO: 273757 - DNA, 793 bp, Cannabis indica
tatctcttgattccttatgtaccattaattcaatgtgaacaattaatttataaacttattatagattttggatctaactgttagcactcctaaaattaacactagctataagggaactaatattgtataacaagttcccagccactcatgttataagctcctaaaaatagaagtcgtaagaatcatcttttctgagaaactttaacgagtgaatcaaagaactcaatgaagacaaacatgagttcatgtatactcaagattcaaactaatctactaatgatcatcgttgtgatatgaataactcttttatggtaaatggtgcgttaataaaagatgtttattacatatcggtccagtcatgcataatcgaattatacacaacacctttactacatgtctatccacatatgtgatccgaatcaaaatcacacacactagaagtatagtgtatagtaaatcgtataatctttattcatcttgtataatctcaattctcttgtacatccttacaagataatatcttttccatatgaataaagaattttcatatacttaataattctacttctataatttatgtattatttatcttataattgtatttcatatattttgtaatatattatccattaataacttgcttttagggcagaaatcccaaaaatctccaacttgcactaaatgtaagtgctatttattctattactcttatagacgttgtttgacaatatttataatcattaaatagataaagataatatttagataaataaattagataaatgataatttt

SEQ ID NO: 273758 - DNA, 1027 bp, Cannabis indica
ttttattttaaaatatatgtatatatatatatatatattatgtttattctcaatgtggttaatttttttataaacaaaaagttagtagaataacggtaaatagtggcataagtacttaaagttttaggtttgtaagcgacataaacccaatgattttttttagtggcataaatacccaatgtttataaaactgtaattttcttccagttttattagtatagactctgttattgtcttaaacatgacacatataagacccaaattttagattatttggtatggacgaaaaatatgtagtatcagttacttctaaatatttttttaataaacttaaaacagagcttgtattgacgaaaatagagaaaaattacagttttacaaacattgggtacttatgccactaaaaaaattattgggtttatgtcgcttacaaactcaaaactttaggtacttatgtcgctatttacccgtagaataattattttagatgtagtaatgacacaattgtaataacatgagaatatcataactaattattaagtaaaaataactcttactaaaaatatgatatttgtaattatattgaagagagaatgcaaaagagagtaggatagaaagttcccttaacactcagaaaatttagttttttttttttttgtacgtgagaaaatgttagttttattgtaaataagatttaattaaaattaatatagatattttttatataattattctattgcttctctctgtcatgtaagccgtaagcgttgtcgccgcctatttttttatttctatatctttcattttctttctctcatctgactcttttttttttttttctattgtcatatttttgggtccctcgtggtgctcttggcatggctctttagtatcaatttcgaattccacaaaactcacattctttgacttattctcatcgaacaaaaggtccaacgtcaacagctgcaaccatatacttttagttagattcaatgaacaatgaattcacatcaaacaatgacacttt

SEQ ID NO: 273759 - DNA, 960 bp, Cannabis indica
actaccgagtgacacgtcgggtgcgcgcgtgcgcgagggagtgactacccttccctaatttttttccaaaatttaaaaattcaaaactaattcaattaaatcaaaattagttaatgtaaaaaaaattcttaatttttttcatactatctaaataaaataattccagatcgtaaatccaattatttacgtaaaaaatttataaacatcaatcaatcatcaaataaatacatagatcaatataaatcacatccaaaacacacattcatcattttaaattcatatttcttgaaataaatcattaacatgactctgaggctagttgttggaatatattttaccaggatctagatttactaacaagtatgctgattatattttataatctaacaccctaaaatgaattcctaaataatgaaaataaacacatattaagttaagaaaactttagattggtggcagcagaatgttatggctccttctactcagatctctaacgcttgttcctttctgtcgtagagtattaacaagatttgagcttaattctccttcaggtgttggattgttcacaatctttcacattatgattgagtacttgacttgatatgagtgggcatgtactctatcactataggctcaaaaattatgaagaggaagagaagggattttgaaatagcaaggaaggaagctctcaaaattctaggtgtctgacaaagaatgaaaactaggctaaagggttggataagaatgagagcatcctattccttttatactatttcaactagggttaggatttaaattatatggaataaaaagctaaaataatagcaaaataaaccactaatggccagccatatgatgatgggccaccactagttataattttgctattttattcaaccatttatcttttctttcactgatgtcatattttctaattttaatcctataaatgtcaaaact

SEQ ID NO: 273760 - DNA, 2966 bp, Cannabis indica
aataatgaaaatccagaagggaagcctttaaaagggtcacatttggtgctttcggttgctttcatgactttgatttgttgttgctcaccggtgtatggatatagccccattttgagtgcttttatggctggaatttttatgccaagagaagggagagtgtcaaaatgggtggttagtaagattaattacttgttaactactttgttttacccaatatttttcttttggatggggtatgaggctactttggtggattttgaggttggtcatttgatgacttgggcaaggttgtttgtgctatttggtgtagctactattggtaaagtttctggtacaataatttctggtgctatgttgggattcaattggcctgagtctattgcaattggcttgcttttgaccactaaaggacattttcacatttacttggctattgctgcaaaaacagttagtttctataaccctttctctttttgttttggtaaatatagtatgtctcaataatattgttagttcttactgttcatgtgttatgatataattggtaaaaaatgcaggctgaagcaacatcaacatcaaccacaatagtaatgataattgcagtgtttttcactgttgttcatgcaccatcagtagtagcacaaatcatcaaacgcgcaagaaaacgcgcaccaacacaccgaatggcacttcaattgcttgatccatcaaacgaattaagaatcttgttatgccttcatggacctcacaatgtgcctagcacaataaatttcatggaaatatctcggggctcggctgatcctggcattgttgtgtatgtaaccgatatgattgagctcacaaacgaaatttcagccacattggtgaagggagatggaccggacactgtgactgtgaccgatgctggtgtggttgagaagagaaatcaagttactagcgcggttgaggcttatgtcaacgaaaatggcgatggtatcacgcttagacgaatgcttgcactctcaacatttagtggattgtctcaagatgtatgcattttggcagaggatttaatggttgctcttattatattgccttttcataagactttgaaagctgatggaacacttgatggtggcaattctggttttcgatatgtcaatcgaaaggtaacattttctttttcttagaatgatcacacaacacaagcatctgcatattaaatagacagctttgatctttgatatgttataatttgtcataacatatggagtaaagggtctcaattgaaattatgtaaagatataaactttgtataaactaacttaaaatcacaacttagaaatctttcatagactatggaatgaagggtctcaattgaactagtgtaaagatatgaactttctttaaactaaccaaaaatcatcacaacttagaatttgtcataaagtatggaataaagggtctttattaaagttatgtaaagatataaactttgtataaactaactgaaaatcatcacaacttagaatttgtcataaactatggaattaagggtctttattgaagttatgtaaagatataaactttgtataaactaactgaaaatcttcacaacttagaaattgtcataaactatggaataaaggttttttattgaacttgtgtaaagctataaactttgtataaaacaacttaaaatcacaacagaaatttgtcataaataatggaataaagggtcttaattgaagttatgtaaagatataaactttctataaactaacctaaaatcacaacttagaaattcataaaatatagaataaaggttctcaattaaagttatgtaaagacttttataaactaacctaaaatcacaacttagaaaattataatttgtcataaacaatggaataaagggtctcaatagaagttatgtaaagatataaactttgtataaactaacttaaaatcacaacttagaatgaacacacaatgcattggcatatagtcctatgttattatcatgtctaaaagaaatgaccaattaacatcttaatttacatcttaatattatggttgaaacttaaacaggtgttgaggagtgcaccatgctcagttgggattttaattgacagaggttttggattacaagacaaaatgtcaaaaccttatgtaacactcaatgtagctgtgatattcattggtggtaaagatgatagggaggcattagcctatgctagccgagtagcgcgccatccaggagtgaagctcacagtgataagattcttagtcgacgccaattcagaaaacgcgatgagaaggacaggaaactatagaatcaacatcgacgagcaacaagaggaaaccaaccttgacgacgaatgctttgctgatttctatgaaagatttgttgggagtggtcacgtttcatacatggaaaaacatcttgctaattcagctgagacatactcaactttgagatcatttgaaggacaatactcactcatcattgtagggagaggtggaagagtgaactcagttttgacatttggtatgaatgattggcaacaatgccccgaattaggccccattggagatgttctttcggggtcagatttttcggctacaacttcagttttaatcatccaacaacataatctaagaggagaattagatggtcttgatgatgatttctcaatcatgtaataatagagtcttttgatttttgaaattagacaaagaaacttagtttagagctactttaggcatataatgttatagtatcatataccataacacttgtaagaaagaaaagagttaagttagaggagagaaaagagttagaggtaaatatagtgtaaaatcaagtgtaggatttaagctatagaaaagtgtttgccttttaacaacttttttttaccaattcaaattcattcttcttattattattgcacaccataatgataagttataatcatccatgtttt

SEQ ID NO: 273761 - DNA, 554 bp, Cannabis indica
ataattttttttattttataaaataacaccaaacataatgcttaattaattactaaaattttatggttgaattatattatgtttagatgaatgggtttgtgggattttgattcaatgttttaagattgagcaagttgggggcatataataataaatctttgcatgataatcaaattggtaggtcccttcataaaacgacaatagagccaggccgccaccttttcttcctattaataagcctaactcctcctaattctttatattaataacttattattattattattattcttgttgttattatcatcattaatattattctttttgtggtgattttttttatttattttaattattatttatgaggttgactaacttattaaatatttattttagtataattttgcaagtcttctatgcaccaccccacatggagtcatagaaattattatgagccattttaagtgaagctcttatattaaatatatatatatagtatactcttcatcaatttttacaggtaaatcttctctggagattagtattattgctgt

SEQ ID NO: 273762 - DNA, 1463 bp, Cannabis indica
cattatttaattaatttgataaaataactttatttgaaatttaaaataagatatattttataaattgatctagaaaattttgaaaatctaaccagatattttatcaacttttcaaatttttgttatttttatttaaatttaattataaatttggataaatgatatttatttatcattttattttattagacatttaatttttattatcttttaaaaataacataaattttttaaaagttagttgatatttttgaatagatatttaggtttgttaaaaacctaattttttaaatttataggtttaattttaaaattaattatttaatttaattcaattatttcaaaaataagattttaattttttagatctttcgaaattaatttaattaattaattaattaaaattaaataaatcttatatcaaactatccaaaatgttgcatgtgtgtgttttatatattgtttattattcaaacttattttataaaacctattattgtttgatctaaattgcttaacttgctgatagatccaatgatatgattttaaccaatagttcaattgtcaacaggtcaaataaataatttgtaacatgtaaattttgtaatcttcttttatttgtgtataaacctagtaacatgataggatccatctaaattagtgtgtgcctgtgcctatatgtttgctttgggcctagatgcatatcgggagcccatttaattttgataattaaaatggattaggttgctaaaataaaaatgtcacttttgatatttttattcaggtccaattagtattgggcttattcaatgaataacagttgtgtaattaaggttaaattccaatccttttaggccttctgtgagagttagggggccatagtagtgggtacgacatattaaaccgaaccctccctcacatgaataaccccaattgtgaaggctcatttgtcttatttgaacaattgtataggtaaattacactagtttaacctaataaaattaattagcaacataattaattttcaaaatatatgaaatttattttttatgagattattttgaaattaatttaagaaaaatacacttagtttaatgaaatatattcaagataaactatatgtatttttctgtatttaattaaataaagaagttataactaattagatttttctagatacttaattatttgaattttcattgaaaatatatttaagttagtaatttttcaaattgattttggatcaaattaaattagagtattttgaaattaataattaagtagatttttctaggaaatagttattcagatattttttaaaaatatttttaagttgacaaattatcacagtatagtcaccatcgagtattttggctcgaaccgggttcgagatccaaaatttattaacttttttgttagggttacaatttgcaatatatatgatcatatgaatataagtgtgt

SEQ ID NO: 273763 - DNA, 680 bp, Cannabis indica
tgatatgtagggatctgctggaatcgactgtgggtggctcccattccatccaccatgaagtactcattaacaaaacgcccaattttgatgatggtcgaatccccagtgcccgtcaaccacttgaagcatggttgagagaaatagaagtaccccgacctgccttgcttaggggtggacatcaaatcaaaaaaccagctgacctcgtgcggcgagggcatatcccacttctgggaggcataaagaacgaagagggcagacagatacttaatgcccttgggagtgaactgggtcggacagaggtggaagaagtctgccacattcttaaagtacgggtgcaaaggcaacaatgccctttgctgggtatgagccctcgaccaggtgcacatccccctttcagggtttgtggctcggttattgtgggcgggaatgtaacagtccatttcgccaaggtagccatcctggtcgagagcccacaagcgcgccccagtaaccttggacggagggctcacccacctggcacccaaggtaccttgccttctatgaggaaccgcggcagtaagttcctcactgacatagtccatgccctcaaccaggacgtctccatcaacatcgactggctccccagcctcattatatcccccatagttggggtgcaacctcttcctcttcctccgcctcgg

SEQ ID NO: 273764 - DNA, 2266 bp, Cannabis indica
agcatagaaaattttatagcttagattttcaatccttatcaacagaaaatttgacacaaaaggaatagcaagtttacacacacacacatatatatataattgtttttataaattatatattcacaagatgaattaattaaaactatcatagcccaaaacttttatacattaaactcatgatagaacatgagatgagagatctacaaaaggaggggaaagccatgtaccaaccaccattaaaattatagattaacaaaaaaaaagccctaaagatgattatgtatgagaaaattaaaaacaaaagttatattttctttcttcttcttcttcttcttcttctctttctttaatttacacaaaacttaaattacaaatcccttctgcacaatgggcaagaaccatgccttaagagccacttatctatacaaggtaggtgaaacatgtgattacattgaggcaagcttctaactgtctctccaatctgaaagtcctgtaaaacaaaagaaaatacatttatatacacatatacatacatcaatatgagcctcaagaattgattaacactaatgaattgtgttctggaaacaagaaaatcagatgagaaaacaaaatatataagatgctgttgagatgaacctgaaggcaaacagaacaacaggctctttccccagagccatctacattgttgttgctactaattgtgattttagggatcttttcaactgaatcacaaggcaatcctttggagcctccggtgtcaaagatgttggtcacctcatcgaacccggtttcaacagcacccatctgttttttatttattttatttttttttgacaaaacaagttgttagtaaaataaacaaaagaacaagacatgtaataactctgtctctgttggtgtttttaacacaacattttactattttcatggagaattacctggctttgaactgcacttaacatggctggaccaatcctttctcgaactagtctaccactaagaaggcttgcaatgacatcaatctacacaatcacaagggaatagacatttaattgaagctattatgtgatatgaacttgaagataaaagttcttcaattgtcagctttgaattggagaaaaactatatgatataataacaatggggaatcaaagttagattactcaccaagtataagagacacccaattccagattcatctgattgccatagaacaagagaagattcaaacacctcaattgagaaaacagccccagagattgctccaacagcagcccctcttacaaatccactctctgtctcttgtcctattaaagccccagtcatggctcctaataaggtcccaactgcaaatatatatacatcccattttttccattagtaacaatgttaagaccttctaatctcaaactattaaaagatctaaagctggtaaggacaataattacaaaacccttatgtgtaaattcaaaaaccctttttcaaattggattcattctctttcatacagctcaattctgtgttgaaaagtcagaaattttgtaatttggtaaatggggtttcaatcaaattgcaaaatgggtgaaaagcattgcaaaatttgaacaaaaatccaattgggtagcaaaacacaagtcagcagaagacagaacaacacaacacaacacagatcaaggagtcacgtaagaaaacacaaatcatgtaaaccaaaaagacacgcaaataaaacaaaaaagctgaagcaatcaaaaaatcatgaagaagaagaagaagaagaaaagcacgaccaaacagagataggaaatacaaacctaaagcaaaaaagaaggtgaagatcgcagaaaagatgtttccaaggattgcagaaacagcaaaggtacaaaattccttaaccctttcgatgaaattcccgtccctttactttgttaataaggatgagagaagagaagagaagatagaaggaaaccaaatcaaccaactcgcatttaaagcttccattgcatttttcttctccctcccattttctatctttcttcccataaaaaatattttcttttttctttttctcaaaataaaaaaaaataaaaagagagagagagagagagctaactctaatattttattatgacgtcaattttgtgctttaaaatacctaccaaaatattatttttttttatttttttattggcagtgtttattattattacaaataatgtttaaaaaatttcaaaaaattgacttaatttttattgttatttttttgaaa

SEQ ID NO: 273765 - DNA, 837 bp, Cannabis indica
tgagagagaattacaagttgtttacaaggtgttcatgaacacatacactcacgaagcaaagcttcaattacaactcatctcaccagaactctctcactgttttacaacctaaaccagctctcaaagatctttctctcaacctgtcccaaaagattgtaactaatggctatatatagcctttggctttgagtcttgatcctaactgtcataactgacagttaggtaaattagttggtagttagttgccaacttcttagcctaaaaaagtagatctctattagtgacctaaactcaacaaaaattttattatctaattttcttaggatatttctctcatattagtcgcaactttactgttgcgactcatgaattagctaaacatgtctttaggataaataataaattttattgaatgaaagaggtgtctcatctttctatgtcctaacaaataaataaataaaatttattgtacgtacaactattttttcatacacgtattagtaaataaatgtatgaattttattttcagtattataaacaatttagaattttttaaaaaatttacaggtgaccttaaataactaatacgtgcacaatcattaaaaaaaataggagtactagtagtaagactttaatcttaacaaaaccattcacaagtaattttcgtttttttttttaataataataatagggtatgtctataatacatctcttaaaaaggagtttcggtagaccccctatttgttttggcatttaagagagcttttagttcaattttttttcatgatcgtgcatgttttacttatttagagccacctataaattttgagaaaattc

SEQ ID NO: 273766 - DNA, 539 bp, Cannabis indica
tttagttatttctcttttttttacttttcttttcaaatggttttctcaataaacaaactaggaaaacaactcggagagcttcttctaaaagagcaagactcttttcttcttgatattttcttgaatgaaagaggttatgaaaaaaggaataaaacaagagataagaggaccaaaatccctaaataaataagataatcatcaaaatacttagtaattttacacaaaatcaaataggcaacttcacaaaatctatagaaaaataaaagtttctcttacttccttgtaaaccaaatcaattaatttcacagaaccaggaaccagaagctcacaaagggatgcgaagaaagggaagagatagactaatatcaaaaggatcttaaagttaagctctttcaattcaacaaaaaaaacagacatgcaacactaaacttaccacacttatcattggatagttgacatgtgttatctcattaaaggttataaataaataaataaataataagagttattttgtatagggaaattttactttttgcccc

SEQ ID NO: 273767 - DNA, 2265 bp, Cannabis indica
tgaattgattttttatcaaaataaaacttaataataatctgatctagaaatgttatgacaaaattggttacattttctatatctgttcgtgttagaatttgtcttaaagttgtttatattattaaatagttttttgaaaaaataaactcagggtcctatatttactattttaaaaaatacagagtccattttgtcatataacaaaacagaggatccaattaataacttttgcaaaacacaggatccaaaatggtacttaccctaaattataactcatattccatttgagatcatgttgtgtataataatgtttaatttgtatgtttaattaggaggttagaggcagatcgtttcttcacatcaaatttcaacatggaaacatacacaaaagaagggtttgaatgggttaacaaaactgagtccttaaaagatgtgattgataggcattttcccaacatgacaaagaaatggatgtgctcttctagtgctttttcagtgtgggattctctctcaattcctaattacatacccttatatatgcgactacctacttagttttactcggttgttatgagaaatgttaaagagtatctatggtgcctagcacttaatcataattagttgaggatattctatatatttattaaagtaaaataagtaagactgatattgagttgcactgataactatattatcttacaagggtactaggtactatgtatgctctttagtaatttctcgtttaataagatattttttacgttatttagttaagtcaaattataattttatcattttgtataaattatttaaaattaaaatcataaatacacgatgaatacatattacatggaatatacattattagttaatctatagatgtgtaggtttgtgagaaagttgaggcaacatttcagttagagaataatggagactaatataaaatgataggtgtaaaattagtagaataattgaaaaaagaggtaagtataataaattttgaaagagggggtaaaaaattaaaaacatcaatttaaaagaagtatgtagtgtaatttctttgataacaagatgccccaattggccctcacattgaatggaccttaagaaaataaaaattattagaccttttattaaaaacaatatgtagtatttttaaaaaactaatatagtataggtaaattaatctttaaaatatttttgtaagcccacgagttgagtagactttaagatttttaggcataagattaacccgccttaattccgaaagttagaaagaacacaatatgatttttttttaatgaggtaaactttattgaaatgtataatatgaaaattttatctcataggattagttaataaaaataaaaataatatgtatcttaactctctttggagaaaaaattaaagtttttcgatcctaaatttatagttatcgaaggttgtcttttttctctggccaggcatgcggttgtattttgctagtgcaatttgatttttgctattgggattagccttgactatgtgacataattttgagcattttcatattgtctttgagatatagttttgagcgttttcacattgtctccatgatatatttttgagtgttttaatattgtctatgtgacacgattttgatttgttttatttcgttgttggttcttatttgttcttcgatatcttgtcatcaaatcgttattagtagttggaaataataagttctctgcgactgaaagtattgttagtagtacagttacgtattttacacaatagttaagtgctcaaattatgagattaaataaacctgttgtaataatttctgttgtaacttttgagcgatggataaaataaaatataaatatttttaaggttatgctataatttctttcattttattctaaaagatctgagaattagtagactattattttagttgattttcattaataaaatttcattatttattaaaagaaaaaaatctgagtgtagaatgactgttttatccttcagcaatctcaaaaaccaaaaatggtatgaggcagctgataaagtacacgtggccgtttcccattggttaacaacagagcacctgttactgttctcttgtcttttttagccttctccgccaatttctattcttcccgccattttctctaatcaaaaccttctctctctttctccattcccaaatcagtagcagcaaagcatccaaagccaaaaatgggtatcaaagatcttctcagattcatgaaaccttacatt

SEQ ID NO: 273768 - DNA, 683 bp, Cannabis indica
ccaaccgatgttcaatatgcttgcatgacctacctctctccactaatgtcgacaacccctgctcggaatcaaaaggtctttctcggttgaaatatcatggcttaggtgaaaggtagataaaaggtcatttaggctctattataccataagcaaaacataccaaacaaacacccacaattttccatacttttatcccaaagaaatttgtaaaagattgagaacttccactttatgtgcctaccatcatgttttttctctttcttctttaaattgatgctttttttttcttcttttcttttctttttggtatattcttttttttttcaatgatgagtaagacactttcacattacataacttcctcaatctcccatttctaaaatagtacccactcataacacttaattccctcaaacttatttaaaaacttatggcataataaggtacattgggaattaaaataaataatggaaaaaaaataggctcaatgaaatggttaaaattttgaaacaggctaaggttcaactttggttatactaaggacaaaatttttacaggtaagcttgaaaggcccagtcggtccaaagaaaattgcctaaatcattttccaagcaacaatcatcaaggatttcgcttcaagagattatgtcacacaagttctatttcatgtcaagcaaacattc

SEQ ID NO: 273769 - DNA, 2806 bp, Cannabis indica
agagagagagagaagggcactggatggttctttgggattaaggaggtgttgagttggttgatgctatttgaagttcattagatatgacttttgtttctgagttctgcattttagggtgcagacaacttttttttaatttgaatattgtgtttttgatttttgtcaagccatctgtgctaatcgtgttgttaaccatttagttagagctaacataattaaatattaacatgatacatccattttttatatggcaccggttaacctaattaacatgacaaatttataatttataatactagtcacaattgtgtttgtagagataagctaggaaagtgagtgtgaaatgacgttgtttcaaatttcaaatggtatccctttcaaaataaactaaaacacctctttttattaagaccaacaactatgccttattttaaaaaaaaaaagaaaagtaagggaaactttctcagaaattatccaaaaggccgcgcctacctttatgtctagtctttttatatctttcgatttaggagacacaatttgttgaccataagtacctacaaataaataatattcatcataaaaaaaaataaagaataaagaaataattctgttaatttgtagaaagaaatctgtataggtatatgttttaaataagtcaaaaaccacaagtcggaatagttgtatgatataaatacaaatctaataaatataaatataattaactaagacttataaatacaaatctaataataattaactaagacttataaatataaatttgttttacataaatgagaaatatataaagttatgtgatatattggagtcaattaagtcaattcaaataaagaaatgtagcacgccacacaaacaagaacccaccaaccaaaggcaaaatcacacgtgcaagaatctatactataaatacgagacacctccacttcaaattcattcatcactaactagctactacgatcacaccttcattcagtagtattatatataatcccctcaagctacgtaccacccttattaagcttagcttgttcttaaataatcatcaaattcatttcaatactacgtacttactgcaattaatatggctcctacactaaacacaactgaatttactgttatgaagaaggaagttgagcttgtgaagcccgccaaatctacaccttctgaagttctctccttgtccactcttgacaacgaggccaacctcgaatgcttttccaaagcaatctacgtatacaaggcccaacatgagactaatggagtcgacccagctgagatgatcaagcaagctctctccgacgcactcgtctattactaccctctagccgggagactcaaacggctagatcacgatggaaggctccagctcacttgcgacgctactggtgttccttttttggtcgccaccgccaactgtcgtctttcctcacttaattacttggacgatatcgattttgagatggccaagaacttcgtctttccttctcccacgagtgactgccctttcgtcctacaagtcacccgatttgcatgtggaggttttaccattgggttcggaatatctcacatggtctccgatggtttcggggctgctcagatcttcaaggctttggctgagctctccaaaggcaaagatctctcggtgaagcccgtatgggaaagagagagacttgtggggacacccatcaaggagcctttgaagctcaacacatgtcctcctgccaagtcaccttacatgccctcttctgacattgtagatgagattttttacttaaagagtgataccatgaagaaactaaaagaggagatcatcaatggtggttctcccagtaatgtcactacgtttgagatacttgcagccttcgtttggaaagcacggttgagagccttagagctcaaccatgatgggaaaacatgtttgtatttcgctactgggctaagaaaactcatagaccctcctctgcctgaagggtattatggcaatgcatttttgacatctgcagtggaactcactggcagagaactcgaagagaaatctctgtctgaaatcgtgaatatgataaaagagaagaagaaggacgttttggacaacaactacatcaaaaagtctattgatatttgtgagacaaaattagctcacggtgataatccaaagattaaagctacgggagcactcatggcgttgactgactggaggaatttgggattggtttcagatgagtttggatcaggatggaatatagagaatgtgacatcattgccatgggattgttttgggtctgtggatttgtgtacctttttgcctgctccaaaatctgacccttcattaaaaggtggggttgggatattggtctctcttcccagacaagccatgcctaagttcaaactagaaatcgattctcttcactaattagcttgtatatattattatttttatattttcttttttcttattatttaattaatatattaaatgaatgtaattttttttcccaatatattctctgctcgatcattaactttgtaagttgtatcaatattaataaaatattcatatttcaatcgtaaatgatatgcctatttttttctcttcaactacgactgtgctataattttcttatattttgttaagatttataggccagattatgtagtcttgttgctgctcctttaaatacatcttttaaatgtatttgctctccttttactttctgtttccttggcgcttgttacaaatgtctaagtatgtagctcaactaatcagtattgtgtaatttatatgttctta

SEQ ID NO: 273770 - DNA, 520 bp, Cannabis indica
ctcgtgtgttgtcttttgtagatgaacctaggtgatttttgggagagcaaacatcgaatcgaccaggacctgcttcaacttttgcacgaggatcatcctcgtctttttactagcccacctttctagtgaaggacattctcccccaaatattatacccatccatagaatgatggctcatacaaagaaaacaacgcatttggtttcggcacgccactttgcccagcgccaaacaggattcaaccgtccaggaggaagaagatcaggaaggggatgctgaggtcctagagattgaggggcaggacgacattcatcctagcagttctgcctaggaggaagaggaggaggttgaacccccaaactacagggagtataatgaggctggggagccagtcgatgctgacggagacgtcctggttgagggtgtggactacgtcagtgaggagcttactgttgcggttcctcacaggaggcaaagtgccttgggcaccaggcgggttagtcctccgtccagggttactga

SEQ ID NO: 273771 - DNA, 1248 bp, Cannabis indica
gcctactaatagaaacaaaactgaggtgtttaccattaccatagacatgcatatcttatatatattatttttttatatataaataagaaaattatattgctccaaccaattctttacaagctattagtacctatcaaaagggcctaactaaatcgattatacaatctgtacaattttcctcccaattttgagtttttttttacatgacattataatgcgagaaaccatgctttgctaggccaaatcaaatcgagtctctaaaccaaacttgctttaacatcactgataagcttggtaggttcctttaattagttcatccctccatatcttggcattttgaattccccgtatgttgtacatcagactagcaaaagcagctaccattacctatttttaaaatttgctagtctttgctctgtcaatccatcaaattagactaggcaaagaaatagaagctgctctctaatgcatgcagtcaattctttatctcctgcaaactacattggacggtatattcatattcaaagaacaaatgcagtgttgtttatttctgctggttacacattataattaattatacatgtctcataccaaatttgagaagtcaatctttttgtttttaagtctaagttgcacaaccatccatagcacaaactatatttagaggtattaaatctcccccaaacttcatagttccactgagctttgttttgtgggggacaaaatatttatagcttttagtcactgtgtttgtgttctgcagcaaatgctggccatccaacaaggatatatatgactattaaaagcttgaaaatattgtaaaaacataataataataactaaattaggtgtataaaatatattacttgtctcttaatgctttctttttattttatatatgaaaagataaaaattattaattcaaataataataataaaaaaacaaatcaaatccaacaaaaatttttttaaaatataaatttaatttaaatttctacttatataaatatatataaatatatatatatactatataacataagctttattaacaataaaagaaaatttagaaaaaatatttaataaatttgtttaaaaagataattaataattgatgtaacggtattattaatttttaattgttaaacataataaaaaatatttctaaaaacaataattctcgttaaatagttacattttaatgtatataaatgttatataacagaaaatattattctttttttaaaa

SEQ ID NO: 273772 - DNA, 1451 bp, Cannabis indica
tttttgtaaaaaaatagtaaaagttaatataccatgtaaatttccctattcctaacctcctccacgtggtcaccttgtgggtccatatccacatttatcactccttcaacctaatgtaatgggctagtatcttcccctccttttacacatatatcatttcagcccaatatctccctctcactttcttaacccaacaaactttcctccagttggcatataccctcttccacacgcctcctcttagtataataaacaactaacccctctttttgaaatttaaaattatatcctgatataggctcattaacatcaatcctactttttccctcttgattttcgaccagcccataaccacctgtaactctgagatttcagtctctttggtacgtgcgattccccattgtcccctctctgaagcccgaccctagttgctggttgttatttatcatactttttagaacactattaaaacaataattaagtatgctaaaatataatttattggaaatgctctaaaaaaaatgggtagagttgagtttatagttcaaattcaatgaaagttgcattaattgatgctattcctgttccgtatggctggtcaataagtaccgtgcaccttctctgaaccctgagacatgtctggtctcttgaatgaatagttaggcatgtgaactaatctgttatctgaactgaacctcataatggttctcaatgaccaaattgaagacgatcaatatgactttgttgggtttcaataagagagtctgaattctttcatgtgactaggcaggcagcctaggaataataatgaacctttacctacctacttggcagtctaccacagaactttctaccgttcacgccatgaaacgtgtaaatattcggcttcggtcacgacatgaaatattaattagacattataaaatagaaagatttattataatatataacattaacttcggccacgacacaaaatattctataaaataaaagcatatttgacatttctaattggaaaaaataaaatgaactgggtcccacaagttgttgacaataggattcgtcaccttgcccgaatcacaacatcaaaaaagcccgtgagcctgggtgagctggaactctaacatcaaaacatttggcttctaattctcctccattcaactttattgatttttcatttattttcttcaataaacataatacttatctttgcttccaatccttgtcaaaatgtaatcagttttctctttaaagaaaaaataaaaatataatcaattttaattaataataccttttgctaaagagactctcttttacgaaaaaaaccaaaatagaaacaatagcaatacgacaccaaatataagcactttgtctatctactcattagctttaccattattttaaaacagattaaactaaatagcaatagaattagaaagtatagaaggggg

SEQ ID NO: 273773 - DNA, 438 bp, Cannabis indica
taaataggtagtggtttccaagaaacaagagccaaatttttattgaaaattaaaaaaccttaagtcttattttcttgaaagatcattacctaaaatcaccacaaagattacctctacaagatgaattaagattatcactatctatgaattaaaattatcactatctatagattaaggtacgctttctctatttggcttcttctgtttgaatcaacaaatgtattatttaaatctatggttatagacttataattatatgtaatatggttatctataaaaaattgaatattattaatgcatatattaacctaactttttgtataataatatataatgaagtaaacacaaacaaaggagcgaagataaattcaatgatagatttatgtggtggtaatcaccatataatgtcttgtttttcacaagataagatgcagaaac

SEQ ID NO: 273774 - DNA, 1310 bp, Cannabis indica
attactgccacaacatgctaattaccattattaatatacttgtttatatatattctttacatttattctatatatgtttctagatgcctcaaaatctggtgttgctcaagaaacattgcaaaataccattcgcagaggaagcaaggccatgacagagcaagaagctaggcagattcttggcgtcactgaggaaactgcttgggaggaagtgatgaaggtgagtacaattcaattagaatctgtctgcttttctatcggtttttgctcatgtttaaaaacctttacttaattgtgtatctgttttctacctattcagaaatacgatgccctatttgagaggaatgccacaaatggaagtttttacattcagtcaaaggttcatagggctaaggaatgtttagaggcaacctatcgagaaaaaggcccgagtactcctagttgagggtgaagtgaaacgaaagccctacttgcaatctctgtcccttgccttgttcaattatttttatatgggaatgaatgtcctggagatagatattgtaaaacagttttgttttctaatatatgtggtcatgagttgttcgacaagacattttagctgctgatgcttattagtcctgtcgttacaaagtgatataaaatattgacatgtacagataccatccttcttggttaactgtctttgttgaaaatggcatgaataaataatatcacagatttgatatttgcaattatagtgtccgtgtgtctcattgactattttatactgtaatattaccaacgcagtgtattggtcattttacttgaaacaaagagccaatagtttgaaaattaaaaaaaaaagttggagtttatgccagcttcccgaacagcaaatagggaatagaagcaagcacagcaacacccgtgtctagattactcgcgcaactgtctcacattacacccttaaccaaattggaatcggattagaatcgtggagtatccaatttcatgatagaccaacaaaatgggctcctaaacttattgatcttgttgctacggtatgaatctcctgtctcaattctgtatggtccaaggaacaaaggacaacaaacaactaacttgaattgtccttacctctccttcctgcaaccacaaatgcaattcaagttaaatgttgtgagggagatggagcaattatccgaaactgcaatgaccaagtaattattttctggccatgtctaagccttttgatggtagattacagtcaaagaaatggaaccaaaagcagtgttctttggttcggtctggaaaccagtggtatcactttttct

SEQ ID NO: 273775 - DNA, 1265 bp, Cannabis indica
agaccatgaagcccttcatgtggttcagcaacatgtcaaggcatattatctggaaaaattgatgaggttaatagttttttttttcaagtcttttatggactgaccttgttccaaattaatgggttttgcacttagggagtttctgattatttcttggttttgagtacacttttgcgtttagtaatcttttcttcttcttccacattgttttgtttagttttctacatttcatttacttttatgcctaattatttataacaaagctaatatgttttgacttaaaatgcccaccaatgcaacactcactcaactatttactagaaataatctcttgagaaaaaaaaatgcaaaagaattgagtgtttcattaatcgatatatttgatatacataacaaagtttcgagtttgtaagcaatataaacttaattttaattagttttttaggggtaagtacatttaatgttaatttttttttttttttggtatagaagtacctaatgttagttaatgtttaatttttgtctaattttggtaaccccatactctagtcattgagtcaacatattgcatgagttatttttaaattttcttttaataaatttaaaaaggtgtcagatattggtgaaacaggaattttacttaaaagttgatatttatgccaccaaaaaaaaataattggatttataacaaaattttggatattaatgttgcagtaatattattttatttatttattcagaaaaaatgtcattattgaaaaccaacataaatcattatgtaaacgacattatttacgagaaacggcattatttgaggaattgaattatttcaaaaatgtagaaaaataataaaaaaatttataaaaatataattgtacgaaatttattaaattttacggtttttaaaattttatttacataaaaatatattttgttgatgtattttttatgttatttttgctattttgttgttagtattctgttatttgtatttgtatgttgtttagattttttataataaataattttattatttttgtgttatttttatggtgtaaaaaaatctttaaactaaaatttttattaaaagtagtaatttatgtaaatttttcaatatatatttaccgtgttgttcatctttttgctcgagagagtatactgctgtttgtttctactcggctgctattgtttcgaggggattctttgatgttattttgaatgatttggcttaataaaatttagagttttttattattattttttta

SEQ ID NO: 273776 - DNA, 540 bp, Cannabis indica
ttatttccaattttataaaaaaataaatataaattttttttaaataattgttaaaaacttgccataaaaggttattagattgttaccttattaattttttttagttcccatcaatgggtattacccattaagaagtgtcccatacatatatattttaaagttttaaattttaattttaaaaatattttattcattaataatagctcaaaaaaaaacaataaaaataatcaataaataatttgaaaaataaaatatctaaagtaactcacgaaaataaatatttaaaaccactgcacgaaagacgattatattacttagtttatatatatatatgggtattacctatgaatggttactaataagcaaatttatctataatattaattttaaaaatatcaaaccttcaaattttgatctaataacgaataattaaatcacaaatttaaatttctatgcttaattaaactacttaattaaaaaaaataaaaaaatatctctttttaacactatatcaaaaatatgttcgtacaaaaatattta

SEQ ID NO: 273777 - DNA, 862 bp, Cannabis indica
ctttttcatttctcaatccattatatattatatccattttataattaattttaaacaacttgggttggctttgcttatatcttgtgcaagaatttaactcaatttaaaatctttagaatgtttgaaaagaatttaatagcacaaccacaacaaagttaagtggttcgacattaatgtagtactatagaactcaacaccttttagttttgggtaaatactattttggaccctatgttttacaaaagttactaattggaccttctacattgttaaatgacaaaatagaccctgtattttccaaaaaagtacaaataggaccctgagcttaatttttgacaacttttttttttaattataaccaacttgaaaatacgaacagataccgaaaatgtaaaaagttttatcatcacacttttagattggatgtgacagtcagtagtcccgtgatccgtaaggggaaataccgggtaagctgtgcaatcccacaccgcctggggaaggtcaagtgggatgattctgagactgtgtaggtatgggactacacagttgaagagagcttaaatggattgattggtactacctatgtcaacaaggtgcatcttgtttttcggtagcccatcacgaaagaactccacagttaagcgtgcttggcttgggagcaatttcaaggatgggtgacctcctgggaagttttcccaggatgcgtgcgagtgaggacaaagcacgctgaaaacactcgtgttggtctgtagggtcagtcatcaatccgggaagcagccagagtgacgtactcgtgtataagagccatttattccgtgggtgtaaggacccaatggaggcttgaagcggggacgttacagtt

SEQ ID NO: 273778 - DNA, 1079 bp, Cannabis indica
aaattataaattacaataataataattaagataaaataataaaatttttcaaaaacataatacaaatctaagttgacaaataagatatggctttatttcaataaaaacttaaaatatgaaaatataattccacacaactaacttaaattaaaaaaaagccataaattaagtaaaattataatttttccacatttatcaaactttaaggaaaaaaaaaatccatattctacataatttgttttttttttttttttttttaaattcttgggagttggtttgggtaagtatggcctagttcaccaaattttagaaataacacaatcttatttttttgtatgtacctaaactatattcaccttttatatatggaataattacatatataaggcactattttttgtaaaatatttatatttttacgttcaaagaatgtttttttttttacatttttacggttttccaaaaaataacacgaaaacaacataaaatcaacaagaaaactacataaaagtaacaacaaaaaataacatgcatataacaaaaaatcaaacaacaaaattaacaagattacaacataaaaagaccgtattttctataaataaaatcaaaaaaattgtaaaaatgtttaaaattctgtgaaatcgtatttttgtaattttttgttgcttttatatttttgtgaaataatccctttatatatttcggccaaggcctagcccacttagcccaaggtcaggcttgttaggctttgttcaaaaataaactataggtaaatggaattcatgttgaactactatatttttctaagtctattttatattatttacatacggtcatatattttatattactttctttgaatattctctattttaattaagtactcgtataatttctctgaaatatatatgcgcattgtctcacacaaaaactcgcacagcaactcaaccttgatttggttccatggtactaaagaccagtgacacgcccaaagcttttattcatcaaggacataaacatatataaaaaaaaaatcacaaaaaatttataaatattaaataatgtaatttaaaaaaatt

SEQ ID NO: 273779 - DNA, 797 bp, Cannabis indica
tgatattattaccaatcctttccaataatgattgaaataataaattaattaattttttgttacaatataatatatatatatatatatttataccatataaataaattggtgtaacttaagaaatcaatcacttatttgggagttaaaaatagctgtgcatatatctagtcatttatttataacagaatatatatagataacaacaagaaaaatttagacaatttatagtttaattcttattaattaattaaattaatgtatgtatgtatagttcagagaatatttagacagtattttatttttatttgacattaaatcttgttcttgagtgcttttaaaaggtatgatgagtatcataactctgaatagggagtggaaaataaattagtatatagctgtatttttctctaaattaaaaccatatagtatatattgtatattaatttatcacattaattaaaactaatatatgtaaaaatctcaaatttatgtgacatagaaaaatttcatatatatctggtaataagaaaaaatgtttgaaatgtgaattaggaactaacaatgtagaataaataattcaaaaataagaaaatatatagatcaacactataataaaaaaaagaaaaaatgaaaaatgcaatgtgaagctttgatttttccttttttatttattaatttcttcattgataaacatatataataatcaaagcacagataaaagaaaaaactagctaacagccaacccaaaattcattacttaaaaaaaaaaattgtagacttaaaatatattattatat

SEQ ID NO: 273780 - DNA, 611 bp, Cannabis indica
tgttgttggctgttcaaatttgtacatcagtacttagtttctgatgtgtaatttgttttggcagttgacatgtttggtgctacctcatgagcattgcaatctgctgcaatcaaaatcaatctggagtgctgatacaactcctgggtcatgctcacttgtagaaagtatattgcatttggagccggtagaagtatgtttctgtatgtttgcagaaggtttttttgttttatttttctccttttctcctttcttagaattttagcaactttattaaatacctttaagactttagaacagatttagcttttgttattacaacagtactaataataattgtgtctacgttgattgatttaatatataaatattgctaagttgtcatttagaatatgtcatttcatttacatttgatggaaattattcaaaatcataagatagttacaatgtcagcataaaaagagacatatgcttttcatatgctaagatcagctatatctttgttgtgaaggtaaatatattcaagggaatcactttgcctgatgcaccaaaatttgggaaggtttttggaggacagcttgtaggacaggcatgaagaacttatctctctctct

SEQ ID NO: 273781 - DNA, 564 bp, Cannabis indica
aatagcacatgggatggaatcatggagaagaatagttcccataaccaaccaaccattctcattcaaacaattctctctctagatttttagaagcctaaaaaaggaaagcagagagagagagagagagagaggttgaattgaatgttgatttgatccttttcttgatgctattgctggttatgattgtgaggaaagcctttagctttggtttggctttggcttttctttgtcttttgtttttgctttgctttgctttcaccacctcatctaattatatttattaaaatttaaattactcaaagaaaagaaaaagaaaaaaagtgataataattaatttaataatggcattggcaacaacatgaagaccaataccactttattgattgcgattgtatgccaagactcctctgttttgtatttgggttttaacagaagcaaattattcgagctttaagctttcattttttggaaattgaaataaaaaatgagtatatgtccatgtatttttttgtttatttgtgtttatatattacacaatgtataatttgacactcgaactcagta

SEQ ID NO: 273782 - DNA, 2821 bp, Cannabis indica
ttatccattttcgcttattctgccttttctcttaatataatccaaacacctaacagaaaagaaaaaaaagaaaaaggaaaactacgtgtggtgcttttttcgaattccaccgccgcgtcttatttctctgtccagaataatttttcccgagaaacaaacaaagcaaccctattagaactcgccacttgtgttttgcgaaaaagataggctcagagaaaattctccccaatcgacctattacgcagttggatagagtttcccagttttatccatttgcctcggttacaacaaataattaatttttttttaatttgattttatttctatctagaagtaatttcacgactaggaaaaatattttccttctgatactcaattttctcgggaaaaaggaactagacaaaatgatgagaaggcaacaagatcagcagtcgggggttttgtatgagctttcatctctagtcctcaacatccttcgatctcctccatcgccgattccgttttccgatcagttaccggagatgcctccgacgcggaggttatcaccgacatcctcgtcctcggcggcgtcgcagatctcgccggcaggatttgcctcgctcttattagggatttctttggctctgatgctttgtgggtcagtaactttcttcatcggattcatattgatgccttgggttcttggattggtgatggtgttctacgtggctgggattgtttcgagcctctccatgttgggtcgctccattttttgttacgccatgggaccttctcagccccggaaggaaattcctggtaagttcatatctcctttgactttacttaaaacttcatgatttgatcgtaacgttctcgcaatttatgttttaattcatattttatatatgagatttgagaatttcatcattaatttcttgtttgtttactttgttatcgattgaatttaatgagaatatgctttcgttgattcatgtgaagagtttttgctttggaatagaagaaaaccctttgattatgaactgggttacctaccctggtataattatgtctctgttaagacatttttctttaactaggcgtctttttgaattggagtagcacaataatatcttttggatttatatgcatgatcaatcattgaataaatatcccatatgtcgcctatggaaaatttgggattgttattttaaaaaatggttattgattgggttaggtttctattaacggactgattgatcaaagccttatttaagttgaatgatttagtcaaaaaacacatttgtctatactctgtacttctctgtttttctcctagtttttattttttatcatgtttgtaacataaacctgaactgagaaatccctttttctcttttggattgttcattggcagagagcctcataatcagtattacctcagtacaagctttcattgtttgtgttgatatccccagttcatttgtaacataaaaaaatgaactgggaaaaagaaaacccttcttgcctttcgggttgtccattaattactctttagttaatacttcttactgtcaagctttcattgttttcctaataatttttacagtccaaccacctatctgttactgctatcaattgtctctttttacaacgtttctcactatttatttgttattattgtagcatggaaagtattgtgaagaggatgaggcgagtcataggaggaattaaatgcttcgttaaaagcagagcagcacacagaatatgttgttgtggttgattggttgttgttgctgctgtgtttagattctaatgcgaagtgaagttatagaatcatcatcatcttcttcaagaactgtggataaccaatcttcaaatcaaattttactgaactatgtggatacaacttcttttgttaagttcaaatagcaaatcaatggaagtgtttattatttactactactgccccaatatgagaacatgggatatggtcttttgttttcatacttaccaaattagctctcaaagtttcttttttcttcttcttttttatgtgtcattttaatctgtaaatttacattattataggcactattgttattgatgatgaggagggctgaaatgaggtcaaaaaagtggaatcatatgcttctcacaaatactaaaccttaaaataaaatgttacattaatcatgttaccagttttatttgttggttctgttctaaataattttctcatgtgttatgttttgtggggtcgtgggatgggagtgtactagactaaggcccctcaatctggtgtgcagttccaatgtcaatggggggtcatattgagtcagtcattgagataaagatgaaggaaaaagcaattgctactatctatttatgaagtcactttttgcattttgactgttactgatttaacgtattgcatagctggatgagtcaagtcaaatcatcgttataatatcacaagttgtcataagtatgataataatgagaaggcgcggcttggcttggcttgatgctgcttagttttgcaagatcagcattgagcatattattgaatgaatgaacgatatcagcttgtcgaaacttggtcatttttcataacacaatttccacgcgaatgcttataaacttgttccttatcatttattattagctatttatttcgagatgttttgggtgtttgaccaaagtatctgagccttgggtcgggggaaacagagtatgaccaggttattgagccctgggggcaacgcaattaaattaactcaagtacggacctatgtaagtaatataatcaaagctcatttatgttattgtgtcacgtggtcta

SEQ ID NO: 273783 - DNA, 899 bp, Cannabis indica
gagaggagtgtcaaagtgagagttaggggggttaaagtgcctacttccacagccgcaattcatgctctttatgagctaccaaccttcactgtagaacagcaaccattgaagcagcaacttcgggcaaggagttcgaattatgtggatatagccgaaactctagggtatccaggccttaggtttcatgaatttgatggagaaccgtatcaattgtatcggtgtgaactcaacccggtagccaaggcatggctatacttcgttagtgcaaggttggtcccgaacaaacattattctgatgctcagattgacaggattaagtttgtttatggaattatgaaaggttacaacttgaatgtgggggacatagttagagtgacatttgatatgatagttgagggctcttgtggaggtggacttgggcttgctggcattataaccgatttgtgtgaggcacatggagtaccacagtactcttatgatacaaaagcagcgccacaacgcagtattaccttgtccactgtgcttcgcttcaaaccacctcacccttatggtcaacagccagctcagagagatcctcctgcaagagaacaagaggagcatgaagacattgaaccaccacgtcttgctgggcctctcgacccagccatgcagtacactcatgatcacctgaattatttgattcagcaaaacatgcacatgcagaattacatggcccaacggagtgttttcgatgagcagcaggtggcccaattgaacatgctagtaacgagaatgaatgttggtgtggacgatcccaactattttgccgttccaccctgcttcaaccactatgatcagccacctctgccaaaccccttctaaggggctcaagtaagttctctcatcctggtttattttca

SEQ ID NO: 273784 - DNA, 943 bp, Cannabis indica
aatttagtttttattttcttttatgacctctctagttttttcttttttcatttttcatttatacctttattaatttctaaaaatatttttatttatttgttagcagaaaaaattcatacaaaatcatcaattttagtccacgtccaattcgtttttatgctcatttataccatatttttaaatgggttttcttagtttttttagaatgtctttaattacttcaggcaactctatcataaattagttaattatttattatttattatttatttttcttttccatccacaagaattcttatattgttcaagtgcaagtttgaatgattttgtagaataaagaaatactaattgtactgtactgaaattcaaatgtcaaactgcataccatgttaaatgtattgagatagttggctaagcggaatatataataggttcaattgcacagaaataaatagtcttgacaaaagaaaataagtgtagatatcattcatgctaggtgattttctattacttttgagatttcaatttaaattattgttcgacgtatacgatttttattttaaatttgtttaattttttgtctttcaaggacaaattagtctattgtatgtagtgattattaaattgtaaaatgagaatgagttgatttaacaagttggatgaaataattgtacataagagacaatattgtcctatgatttttttttttttaactattataatatatcaattgtttttttaatataaacataagggaagtcataatttcgtagaatcatgtgtcagctataagaattttattatctcagctttctttaattggaacatcaatagtgttgggataggtttcgaactcttcacccaaataaagaaggatgtcagtaaaaacaaattcttaccactataccacacagcacgtagttattgtatatcaatggttgtt

SEQ ID NO: 273785 - DNA, 5400 bp, Cannabis indica
gatacaactagagatgatcatgatgaccattagtataaaaaatcagtacacactatcctctttaaaccgcatatgaaatcatcatgtgctatacatgcccatgcaaaagaaggagaacaaaatatttacaactgcaagttcaaagtctgaccctgcagcgatttcagcccgaacatcttatatcctctactacatacataaagatcctgtaactatacatgtcatagatgtcaagacccaaatgaaacaaaaaaggaaaaaggacaatactacaaaccccaagccttccggaggacaaggccattgtgagttcagctactcatgatcccttggcagcctcatctttttatgtatatgactgacttgactgactggtggaggaggattatttagttgagataacgaatatgtatagtggtgcataattatgggaaaagagagattaataatgactctccttttttttttttgtgaagagtatgaatcagataatgaagatgaacttgcccagagatacagaggaaataaaggtcatagcctaaacaaggcaaggacaaccaatctggttggatcatgtaggcaatcatcagatcttttatggagatatagaatcaaacatcggcttgtccaaattattggtgagacatcagaacaggctttctacattcacgtccaccttttttttgccaattggagaaaatcaaggaccctgtgatacattacacagcttgtcacgcacaaggaaaaaatgcatcaatttcatccattgtttaggtatgattgtttccattcaaacagcaagagtttctttctttcctttataaagtatctgtactcagcagcttctggtttggtttaaaggatcgtaatcatagacatcaccggctttcacaaagcgccccttcactctctttcttacatcagccctcgccttccgagaagcatacctcacccttttatcaaacctaaaacagcaaacaagactgaggtaaatttcttgaccagtggaaggtaatcaaacaaattggaagttttgaaatacaaccacatttagtcagaatgaagagaaaatatgtacagaacaatcatcataaatggcagaagatggaaaaggacatgctaatctgcatttccttgatattttctatgtgtagtgtgcatatatcgtgtttcttaaactccaatgatggcactcagtgagacatgtaatatattaagtacagatggaaaacatgtaaccaacatgtagtgttcatgtgaaatatagaaacccaaaactctaagcagcaaagttgatatgcaaagctaagaaagttgaatgatcagaaaatatacttgcgcatcttcttcttttccttgtatcgcataacagcatcatttcgattggctgactggagagaagcatcctggcttggaggacaccatggaggttcccccaagagaagcattgaagaagctccacaatcctgataatctccagcagtcgtttccccatttgggcctgaaaatgaaaggcttgactgctgcctagcgaagcaaagaagtggttctgttttagtactcattgcagaatcagcagatgcggcattgctgcatgctggcattgcatttacctgtccaactgatccctgaagcaacatatcattaattaaccagttaatttcaaaagcatgcattagaaacattatacaattattgatcatttcaagtcaaaagtgcttcagtttgaccatcatccaagacacaacatgcataaaagagttgatcagtcttttaggctatcacattcacatgcatgaaaatatagtggtcaattggcccaaccattgtgatgggaccagaataactgaaagaaacaacaaacataaggccccaattgtaagagccagactagatatcaaagtttccttttaattaatctcttacaaacattatagattgctcaacacaaagccatgaagaccctgttgtagttccattgatgaatataaaataccatataaacaatgaaatgtaaactaaacaagtctgttatggaaaaggagaacaagggtagtgaatttgagataaaattacctcagcagcaactgcactctgacaattggagtcggcaccagacatttcagttgcttcgaataagctatcaatacctccattctcaaaaagctcttctgagttatttagagctaccccaaatagctcctcgtagttttcaaaattcaggtccacctcatccatgtctaaatccgcataaagatcatcatttgcactaagagcagggcctttgattccaggaaagcttaactgtaaactattgatattaagcttgtgcatttcataatgaaaaacaaatgatacagacatacttaaacacagaaacaaacccttacgttttcctattcaagaaaaaagatagaaagccgtaacacaaagaaatccacccgcctacactacaagtaagaacttcaaagaatttaacagtaactgggctacacaaaagtaatactactacagtgcaccaaatttgtttaccaaatgttgtggcattatctgataaaacactgcaagtaatgacactagtagtacttgataatgcgatgcaagaaaaatgtaatagcaagaaattattttaagattagcaaatcagactactcagactataattaacaagtttagcaagaaaatttgcctttgtgctgaagactacctaaacataacaaagtctgcatttgataagatgcaaggttaaaattagttcatgaactggaaaaaagagcgactgaccaagattctgaataactggtctcaccttaataatttagatgggcaatacaggccccaagaagaagaaaaacatagtcaaaatattatatatagtacaaagtgagaaagtcaagtgcaaaaactgcttcttacctcagcagaaataagataccggtccatgtatcccattccacactagcagtacttctgggttgaatttaactgatttttagtcctttgaaaatcaattcaacctagacttttttaaaaaataaaacaacctagactctcagcaaacaaatagttggatagttgtaataagagggtaatacatgtgatttccattaatgtatgggcatatattagcagtcaccaacaaacaatgctagacctatatatcaagaggaatgacagaaagaacaatctgtgattttcgctaatttatcttttccagagaagtttaatttagatcaaacctctaaggtacgcaatatattgaatacaattaggaaagccaaaatctaatataggacaatgattacaacttaatataataaataaactaaaacaattaatatgtagctgggaaaatcctatatataatataaatacatataaatcctaaatttaacctgaagtacaaactcttatcaagatatttttcacttataataagacaggatcaagttaacaacaaaattagcccaaactctaagccttttgacatggaattggaatgggatgagtgatcaccaatgcaaaattaataatgagggtcaagacaagggacaaccacttggaaagaagttagcttccaaatgatggagcctatccatgtcaaatagggaaggggatagcatgttcaaaaatgaagtttacaggtaaaaagggacgcaccttgatatgtaggaatataccaaatacaagaaacagaaaggcctacaaaccagctatataccaaatatcacagataaaaccacaagtccataataataaaaacattgtttctgaggaagatacgagacttgacagtgtaaaccatggtgcaaatgaattctaaagcatgattgaaaacaagaaatagacaaataatggataaagaatgattcaatgtaagtaaaacaaactttcaaacattcaaaaagaaggttaaaatataaatccaactcactaattcacatcaacctccagtaatatcattaaacaaaactaataataggtgccatttaaaagtacatattgattaataccttgggaaaagttgcattttcagattcatctggaaggtcgagaacttgggatgcagcattaatctcaggcactgaagaagagctcggccaaacactagccttagccatgcttgtcacactatttactccaaccgaaccagaagcattttcggaaggtccagggtcatttccagagctattctcattgatgctcatcaaacccatttcttgctcacaagtagattctcccccagtaggggaatctaaaatggaggaccagatggaagagagttctgcagccgaggggcagccagagtaggatctgattgtttgcctcttgtgtgttgaagatgaagtagatgcaccatggcccatccaatcacaattctgacagagagaaactctctcttctgcgcatctcactaatgccggttgggaatggcatctttcacatattagagttctcgagtgacgctttgagagaatattagcagagtggacatttcgatcacatgataaacacaagcatgcagcatcagaccgacaatataccatggacctttgatccccacagtaatcacacaagtagcccatgattcaaaatgactgctttcctcagccaatcaaaaacttccttttccaagtttccaaacttctagcaaaacaacagaccactctaaccaaaattagcttcttagaggaaccacagttcttcagactctcagagtgtgcctcaaaaaccttcaacaatgtcacagaaagaataattcagctttaatgtctctttctaacaaatttaaggaagtgaactaaaaacaaaatcagcacttaatccttcttctactaaaataaagatttcatctgtttctcacaaaaacttgatcttcataattcatatgaaaactaaaaatttggatgtgaattataacattggaacaaaaaaaaaaaacttcacaagaataattttgttgtgacatagaaattcttaaaagaaggtaagctccagaaattttacagctttgaattaaaatgataaaagaaatactggtgagggcgatgccttcacttatcatatctagtgatctttagcaacaactaaattaaaaccatatcaaatatgctaaaacagcacaacaaatacacatctagttgttgtaaatgtaatattcgtttatcatcaaattatatatatatatataataaataaacacatacaaaactgtgggttatatcaagaaatggacaaaacaaaaactgaaccccagctggtccttagtatgaattataaataaagtaaaaaaaaaaaaaggtaatgataacagtttgttggaaaatcatatgcagaaagttgaaggagagagattcataagaattgacttcataactctaatattttttttttaaaaaa

SEQ ID NO: 273786 - DNA, 3078 bp, Cannabis indica
tctctctctctctctttcattaagctctagattttattctttcaaggcacttgttgaagagtttcatcttcttcttcttcttcttcttctcattattattattattattattattattatcatttgtactattatctatatttgtggaagtaaatgcagttttggggggtgttctgcttttttagctactgtttataaaggttccctttttttctgttttgggttttaaggctattaacctctttttttcccctttcagtgagtttggtctagtattgtacttctagtacttaatctattctactctttttggatttctggctctaatttgatgttgattatgttctttgatgtacaaattataattgacctatttttctttttgttcaaaagctgggtatttttttttctttggctaatgaactttagtcttcaactgtcacaagatcttatgttcttgttttgttttgtatctttttcccctttggctgggatttttatgaaagattttgagttttataactctattacatatgcaattttctatagtggaaaaaaaaaataggaatcttaaatgacttgggactattggtaagttatttttttatgtcataaggcttgaaaatttcagggctttggatttcccattttagttcatttgctttgaatggaaggccattattaatggaataaaaaggaacaaaaaattggtctttagagttaattactgaaaaggaaagtgttttttgctgttaggaaaatgaggatttggagtttgtttcttctgtttttgagttattttcccattaatattagctatagattagatccatacttttactgaagatttttgctatagtcagactaacccttttctcaaaattaagtgtatgtatgttgctttgcttttttacatgtttaattttgccttttccttttgtatgacactttctttctaaaaccaaaagttacattttttatgaaatataactggacttgatgctttgttcttattcatcatctgtttattgacaatttagtctaaatgttggttcttgtaatgttgttcttttcatcctcaaattggtctaatctaatcatagaaatccaagtgattagatgctctgcaaaattcatttgcaaggacacaaagggctcaattgatttagtggtttggcttatgattcacatagtaacttcacttgttgtacctcatggtgttggtggctgaatgaaccctattaaagtctgtcttttaggccataaatttattaactttgcatcatagacatgttccactattcccatacatatgatagagggcaccatagggtgtatttattatcatgttctgctgtagtttttgaactgaggtgaacaagttgagaaaattaggcaatcatttcgtttcggtctaatagaagtttctgctaatgagacattttttttgtgagagtgcttagacatgaagttgttgtacccaatggaatcttagattattgctttgttgataatacttttgagtgaatagaacatgtctaaattggtcttgaatccacttgttttaacaggaaagtgataagtttggatcaaatatgctatatagtacaaatacactaactgaatagtgaaagcattttttatgtctctatatactgtagtaatgctttatgacatgtattaagtgctccacttgttcaagtttttcctctttatttctctcactctctagtttcacatgaacataactgattctgtttcggtatgcagggagagaattagctaacgattagccgttgatcttcggttcttgttgtgattactcaactactaaccgagcttaaacatgttaacaccagacatcaacttagaatgtgaaaatgattcagatgtgagcagccaagtagcttctaacgcggcttttcatgactcgtcccctaatgtgtcaaaggacagcaccgctgcctcgtcctgtcttaccaatattgctaaacttcaagaagactcgaggcctgtttccctcgatttatcgctgcagttcagctccaacaacactagtactgatgttgagttgataaaaggaggcaggggtgagagtagtagcaacgatgttgctactactcacacttcagtaacaacaattccaagagtcttctcttgtaattactgcaggcgcaagttttacagctcacaagcgctcggggggcatcaaaatgctcacaagagggagaggacaatggctaaaagagcaatgaggatgggaattttctctggcaggtacactagcttagcatctttaccacttcatggttctgcttttcgatcactaggagttgaagctcattcggctgtgcaccaaagagttatgccatcttctgagaggatccccgaaattgcaagaggtggagctaagtttcaacaaggttactatggaatgccaatgttcatggaagacgacgaggttgatctgttttggcctggaagttttcgacaggtagatgagggcgtcgggagcagtttggaagttcaatttggccaaaattccaataacaatatcgcgacaaagctgccacgagcaagaacaccaccgagaacagattcaacctcgcctgatcttactctaaagctctaagattagatgatatttttaagagtttaattttagaaagtgttgccagttatgatgtaaactttgtacagtgagattgcatttgtaaggaaaggctgcattttcctttttacttagtatctgttgtactttttctgattcattagcttatgttcttccctattattatatgtataagaagttttgaaattgattattattaaggattgtgataatgttccaatcaatggtatgatgtttgaattttgatattggtatatgagtgatttgttgtgatcatcctatgttgttatgcttatgagatgtcaaaacatcattttagttattacttttatatggctaatttgagaactcaaatgtatgtgacataaaacttggttataatgaaaacacattaaacatgttacctgttttgatatttaccaccttttttttcaaaaaaagaaaaa

SEQ ID NO: 273787 - DNA, 411 bp, Cannabis indica
atttaaaataatattttattttaatttacggtttgaaattgggaaaattcaaaattgggaaaaaatcccatgagaatcggatttttggtgttggttgcccagtaggctacacatgcagccatgagaggctgcaaatgcccatacccgcgcgtggaaggaggagctggcagggtccctgcgccgagaaacttcggcatgtgcaggatctccctaggcgtgcgcacagcatcatgtgtctaaagacatgggcgtgacatgcttttagaaaagggagatgtctgagaatatgcacgcgtctggtcttcttgtccgagggtctggtgcacacgatgcacccactcgacagccatggcatccaatcttctaaaattcataacttcctcaatttttatcagaatcgagttccgtaaa

SEQ ID NO: 273788 - DNA, 655 bp, Cannabis indica
ttttaggtcattttatggtatttgatatgccatatatatgtaattaggttttcaaatcccatatttaatgtttttatttgtttagaaagttttatttataattgaagccggaaaaatcaccggagtttgttgctggtgccggaaaagtcgttggggtagcgatcggtgacggaaaagtcgtcgaagttactgccggcgcaagaaaattcgtcggaattagcattgtcgctggaaaaatcactgaaaaaatcacaaaccggtttcttagtgatttttctgttgacaatgccaatttggacgactattgtgacgctagcagctactccggtgacttttccggcaccgacagcaaacttcagaaaagtcatcaaaattggcataatcgccgaaaaaattaccaagaaactggtttctagtttcttgatgaagaaaccacttttttggtgattttttcggtgatttttctgacgacaatggcaattctgacgacttttctaacattggtagaaactctgacgactaatacaccggcagctactccggtgactttttcagtaccgacagtaaactctggaaaattcgtcagaattggcgttgtcgacggaaaaattaccggaaaaatcaccaagaaactggttttttttcttcatcaaga

SEQ ID NO: 273789 - DNA, 906 bp, Cannabis indica
ttgctagaatggtgtccattttagatgagctgacaactctattcaatgaatgattactttgactctcgcctaccgggacaatgtagcagtttgttggaaaccttggaaattatttaagatatgatacttttgtattttcacatgtctttgttatttgctaatacttaataatttctaaattgtgtgtgaatttatattaaatcatgtgattttctgttattaattgtagttgtaaatttcgtgtaaaaataagaataactttgactctcatcgttggattcttattttaaatcaaaattatcctttaattattcatcttagcttattcatttcaaattttcttaaatagtatatcattggatgaatggtttatatatcatttacttatgatgtcattctatattctcttatgaaattgactggcgcatatgataatattcctgacattctatcctaaaatgatataaatccttgatcttagaatctcctacttgtatatgcttactttaggcaaattaagatctgaacttggatctctttctctctttcgggtttggttcccaccgtcttactcactatgattgagtacttgaattgctatgtgtgggcatggcactcactcactataggctgaagtaagaagaacaatgaaggaggtgagaaaacactaaggaaggaactctctcatcaaggtttggttgaatagtaccgttaataaaaaaatttatgagtgagagtatcatgttccttttatattgttttaactagggcatagggttgaaatatatggattaaaaaagaataaaatattgggaaaaatactccatggccgtacaaacaaagggaccactttcgaattacaattttcccactttatctcaaccacttattcttcttttcaataat

SEQ ID NO: 273790 - DNA, 787 bp, Cannabis indica
ccttttatccttataattttttgtcaagttattttcaaaaagagttgctaaaggggttgtgcatatatccgtctttttgaggcggtttacgaactgagattgcaatgtgaacctgataaattcaaccaaagtggttattgtatattttctgaactcttctgtcacactattgaagctttcgacagcgttgttggtcattatgttgtattgattacctagaaaataagggtaagcccacttctcaaaatctatactctccacatatgcagtaatggcatgatccatctgtctaagcttctcaaattgtctatcacaatcagctttttaccacgagtaagctacattctatatttacttgtgaaaagcatcagtcttgaacttggaattcacgttcataacaatgtggtgatagcatgcacagtggactactttggaaaaaataagttctacaacatagtcaatgctttgatgtctatccgacacaaacactaagttatcaaccaccccaattgcttccctcaacttctgcaagaaataggtccaagagtcgttattctcattgtcacctataccaaaagtagggttgtacataaacttttctaaactgcacaacccaaacaacatgcccaaaccaaactgagataacccaacaaaaaatacaaacaaaaaaacttgacgaaaatataactcgcccaatctttatattggacggattaaaaataatatcaacccgtccaatcaactcgaactaaaccgaccaacccaattaagaggtttttatatatat

SEQ ID NO: 273791 - DNA, 1141 bp, Cannabis indica
ggaagaatatctaccatgaatcaagatcccctatctataaatatgtatcccatattatgtctaaaataatataatgatggcacatcgtttaatcttgcgcaagtctgttaaactgaaaaaaaatgatagaactaatctttttaaagaaattattatcatgatataattaaaataactaaaaaataaaaatgatatagtacttttcttatttgaatagtattaataggaatcattgatgaaaaaaaagagcacacctataattcttcttgtaataagaaaaaaatcattgtacgtattaataaaaacaaatcaaaattattaaaaacaaaaaaaacaaaaacaaatgaccgcacaaatattataataataaaaacaattaataacttaaatattcttttgaatctgttacataaaatagaaataatcatttgtaaatatttgatatattactttctaattttaactattgtttagaatgatgatttaaagttagggtataattttaactatttcatatagtacctaaaaaaaatcatataatcttgttatataacgaggataaaatcaattatataaattaagtaatataatatgtgaagtgttttgtaaaaataatttttatgaaattatttactagtaaaataaatttattataaaaaaattattagaaaaataatcttgtaaggtcacagaaacgatcatgaagtacattgtgcaacaataaacgattactactcacaaaacgaccataaatttacactgtgcgaccatcatggtctgataaagtaaattaaatgaggttataatttttcaaattttaatctttcacattattatttttacaaatttcactattatatatatacctgctgcataaattcaactatgcttttgatctccatgtatactgtgaatctatatacaattagatgttataataaaaaaattaaaaataaaaatgtagcaattatattaaaaatatttaattttcaaagaaaaaaaataaaaataaatataactcatgattgaagtttgatggtattgatgacatatagagcaatgtatttatcatttgataaattttgttgagagaaaaaaaatttatcattagattaattattggtatcattggaaagaatct

SEQ ID NO: 273792 - DNA, 883 bp, Cannabis indica
atattaaaatcccaaattcatattaaatttaacaaaaagaataaaataaacatgagaagcatataagaagacacaattatgaaaaatcagctatagttttttcttttagtcatttaataaaacacctaaactacaatatgcaacagtaacaatactagcacaatccatattcgatgatatatgacaccaatctctacagaaccaaataaattcataaaacagagcaatatcaatacacgcagtccaaaaccataaccaataataatactcatatcaatatatccacattcaggaattaggagagtataccaaataggtggagaggccctttgccgagaaagaaactctaaagaggaaaaatcggtatgattggtttattttaagcttcttcttgctgcagctctatacagctagagagctattaatattttttttttctttttttcttttttctcgaaaaataagttagcagaggtaatttattatggttgaattgataactaaacattacaataactctctgtaaatacacatgactaccttttctgaatgaaattcctaatttctcaaatccctatacatatttgctcaaaaaatgttgtgatctaaaggttcaaataatttaatcaaataaattaaaatccatcaataatccatataacctacatacaacaatttattaaattgctttttcatgtaccttttagaatacgaagaggtttttttaaagcatattcacatagcttcccaatcttacggtcattgggttcttcatcctacaaatttttttgatatttatatatgtaagaatgtacagaggttacataccttaaatcttattatttttcaatgtagattagaaaaagattaattttttccaatt

SEQ ID NO: 273793 - DNA, 1773 bp, Cannabis indica
gtttgaatttttatacaacttcagccttccttcacggaagccaaagcttacctcataaaagtacaacatgactctcgcatgcacgttgttttcatgaaagaaagatcactgggggtatggcatgtcttcagcccttcttcccataatggaaggactgcttgaagtctgttttactcttcgtgatgctttcttcctttgatattttcaagcaaagtgtaagctttaatttttatgcaacttcagccttctttcgcggaagccaaagcttgcttcataaaaattcaacatggctcccgcatgcatgtcattttcgtgcaagaaatattactgggggtatgatacatcttcaaccctccttctcaaaatggaaagattgcttaaagtctattttactccccatgatgctttctccttttgatcttttcaagcaaagtctaagcttgagtttttgggcaactttagccttcctccgcaaaagtcaaagctggcctcctacaaaatttgacatgactctcgctcaccctgagatattcttcctccgccttttgcaagtaaagtcaatgtccaaatttctcgtgcacttttagcctttcctaagcgaaagtcgaaagttttccattacaaaatataacatgactttcgcttactgaaacagatctcagcttaaaataaattgtctgcgcaaggttcaggcccagctttcccttcaggaaaccaaaagccttctgcgccacaaggagcctatgctttcctctacgagattcgtatcacggagggatcagttagggacaacaatacaactgtgtttccacttacaacccccatagctattttcctgtgaaagctaggagataactgctacacttttaagaaactcccctcctagtgatcatggagagggaggatatggcctggaagaacagtatgtttcccgaaactaggcataaccacactcaactctcctcctccaaaacttgaaaaggacagaagatggaatccaaggatatgaccgagaatttgagactaaaattcccagatcatttgaggtgtacggtacgcccgattactggcaacttcaacagtgtcttacgtccatttaccaaagtcaattagcccatctgtacacatgtaaccagaagctagaaacgttctcaactaagtctccccgagagaaagacgcttgaattatttcctctgggagataagacgcgtattcgaccaaagttcttgaaaagataaaatatgcatgaattctttcttacacatctccgtggacttcacataagtttagctcatcaggtcgcataatttgctaaaatgctaggctggcaaggaccaaagtaagaaaaatgcctaagtttaaagcatttgtgggcatggctcccagagtcaactttgtaaaagaactaaaactcgaaggagaagtgtgagattgtgaagtctccttcttcgcgaaatgaaagcatctccgggtgagctctaagtgagtgattttttccaaaaaaataatttgagtggtggaagcatcacggctccatgaacgaaagggtaaaagtcaaggaaccattcctggattgagtaacaaacgatcaagactaatgggaagagtgttagattatatttaccaggatctagatttactaacaagtatgtttattaacatcctaaatatgaatttctaaaacaataaaatttaaacacatatgaagttaagaaaccttaaatttgttgcagcggaatataatgactcctccaacttagatctctaatcct

SEQ ID NO: 273794 - DNA, 1408 bp, Cannabis indica
atatatatacatatatgatataaagattggtttttttttctctactaattattaaaaaagtattaacacatacataagatgtataatatttatatatatatataaatataatatatatatacctgccaatgcatcaaggagagtagatttgccacaaccagaaggacccattatagccaacagctcgcctggcttagcatagccagtcagaccccgaagaattggtctgttactgttctttccgctagaaactgtcacccacaaatcctgccatgtcaagaaaactccctgatgatcttccactactggcaaactaacttcatgatcagccccgaaaatcgaactacgataactcgcattgcgattagctgtttcaatctctaccactgttattctagggtttccatgattagtgttactactacttgtagtactactagttcgtgaaatggtaacttttttgttatgataatggtcttggtcaatagtagttgagggagtaacagaagccatagtttggttaatggctgagaatcaagagagggactgatgagaaaagaagaatgtggtaaagaattgaagatggaagtggttataatatatttgattatttgtgagcttctcgtggtagccatataccataatttatatagaggagttggatttttcaaaatgtttgttttaatatttgatatgacttgcattaaatatcttgcgtacaatattgagtaaaacaaattatactttgctttttgtgcattgtttttggtacttaaattatgagaaatggtaagtatttttttatgtaggattattgttattgttttaattaagtatagggttttatataatttaatatgataaatattgttaattaattgtaaagttacgtgtcaaaaaaaatattagctagatagaatctaataataatggtcttaattattgttgactaaaaagtcaattattaaataattaattatatttcttattattttttttaacaattatattttcttagtattaataatcactgccaaaagattattgactatgtaagtcgttctgcaagtgtaataacactaatagagtggtcactctctcatcataaatacacctagacaaaaataaaaattagatgtttggttcagcaatatgaaattatcttgtttgttttatgcgtgaatattattcccttaataatataattatctttgagtaaggtaatattgatactttaaaaaatggtaagattaaattattaccttttattatattaatttaaataatatttttgaattaacaaataaatttaaatgtcaataataatattatttattataaaaaaatattacaatatatatttagtctgtgagaacaatttttttaactgagttatttttatattatt

SEQ ID NO: 273795 - DNA, 2994 bp, Cannabis indica
gaataatacaagagttgtttatctttctaatacttaaatgaagaccgcgtttttacaatttatttaatcaacaaatgaaaattattatgaatactttttacaaaatgttaatataatttttcttttttttttggaataacctcattttattgaacaaatatcatgttgctgattatacacagggccggctctaggcataggcgggctaggcccgtgcctagggcccacactttccgggggcccaaaataaaaaataaaaaaaaattattaggcttttatttaagtaaaatttaagtaaattataaataataaatatttatagcttagctgattgaggtagacgtaataatgtctaaggtcatggttcaaatcccataacactcttcttttgatatttttttttatatatttttgaagaccccaaatttaattcgtcttgggctcatatatttttagggtcggcccatttatacataaaattgaaagcctaagatttgagtccaattaagccaagaacaggatttttttttttctcttgaatgaaatgattgataaggagcttaaaagaataaagaaattagtcatgagtctataaaatatgtatatgtatccaaagagaaactcctaatggtatataagatttatgagttattttttcctctctcaattattaattagtttttgagatagaacctcatacattttacaattttattgttaaagattttattataattgataaaaattaagatgtatattataagaaattggttagataaatattacgacacacatatatactatgtatattatatatataaaagtagaaaaaaagaaatttcatgatcacattatataacatgaagaaaaagaacatgaaaagaagcattcactcacaaccttaagtgtagattagtgagaattactatgacttaaacaaagtattaaacttttgccgaaaaacttatttttcttaggaaattatctaagaaataacttagagagttatcaaatattgtgttttctaacaaatgtttgttcataaaaaaaaaaggtacatttttaaataagcactttaaattttttatatagtgtttagaatttatatttaatatcacacatccccatgaatgttaccagctaaaatagggcattaaatagagatatcaaccacctttccaagtaagcataaggaagtggaagatagagactgggctctgcataatgccccttggctttttagaggctacacctttgccctccatgcttggggccctggtattgagagttcaaattcagtgaatgtggttagactttgggtgcagtttcataaccttcctcaagagtacttctccattgaaaatggtaatctcttaggaagaaggattggtgatgtgattcagattgagttggatgaggagaaaccggcaacctggggtatttatctcatagctttcattgacataaatattctcaacccccttgcttcgggttgtttctttgaattaatttcaggggacaaaaggtggattcagtttaagtatgaaaaaattggtatcttttgttatcaatgtggtcgtctgggtcaccagagaaaggggtgttctttctcttctccggtcacagtggctgcggtggatggttcggtgcatcctttgtttggtccgtggctgtccacggcctctcgtttccatgatgtattctcaggaggtacggctcaggcggtgttgcctcctcgtggtggcccatcgtctgcccctgctaatggtggaaaggcggtccggcagttggctagcgctgcccgtgtttcgaaaaagtggaggaaagggacagggcgtgaggtgatggtgagttctcagggtggcgagcaggtttgggtacccaaggtgacggcagggggtcggagtccaaggattaccagaaatgggaatagagttgaaatgaatttaaatggaagggaaaagctctctgtggactttccctctgtgagagaagctcctttttcgggcattcgaggtgacacagagctcctgtgttcagataaggcacctgttcagtataccaatttgaggattgaagaagaggaccggtcaaaggaaggcttaaatatttcaaatgatattaccgttggggttaatagattgggttctgggccgagttctgttgggctcaatgtgaacttaatggacgagcttttggaaaagaagaatggtgacgtggcactgattaatgttcaaggaagagagttgtgtagtgggccgggtaaaggtgggccgactctatctgtgattggggcagggtacttctagtaatactattggtgggcccaatcggtctgtctttaaccattcatctattgggccgcagttagtaattggtaaggagcctcttttacttgagggcaatcatgggagcccgagacttgctagaggtaaatcctctcctagtgggccacttcaaatagatagaaaaaaagatgggcaaccggggccgcccttaaacttgcttccttctactccgcccgaagatgcttgtgtggcaataatgcaatctgatgaagagaatgctttatctcaattttttcaagcccaagaaaatttattgcatgatcttaaacattttgggaaattagacttgtatgagattcgtaaaattggaggggatattggcgtcccgacttcatcggacgtaaatgagaggactacgccttttaagaaaagaaaattcgaagcctctgcctctctgtgttctaggccgcacaaaattcatcgcaagtatccaggtgtcatccgtgatttcccttgggactccaatcaacatgataacgagtcgaaggtggtgtcggaagagccttctgagaattcatccacttctccgagccggtctggaattatgaaaaacccgctgattggctcgtttgttatagaagattctggttctagtgtgtctgcctactctcgtaaccctgtggaggagaatgtcgaatctcctcca

SEQ ID NO: 273796 - DNA, 604 bp, Cannabis indica
tcaggtttatggaatgcaaccctctgctcatgtgcgagatagatgttttcacgagtttcattacgctaggtgtaaatggtttatattggcacttatttgtcgtggttcttttgatttttcttgtccttggctgactccttagagttatccttcctctttgaattagaggcccctggattgtcagccttggtcaagatggtgcttgctgagacaatgttaggattacctcccgagccagtctttaacaacttcatctcttttcttgcttcctctttttgaacaaacacttgagctctttcattgaacttgctgctgtttttcactgagcgaccctgtaggtcatcccatagcttgcctccagaagtggtaagatcagtcgtgatccctacttgaagagcagtaagttgggtactatcgtccaaatttctaaccgtcacagtagctgtgctaaaacgacttaagtaggacttaagcatcttgctcggctgttgctttatgttattgagggaggaagccgcaagtcatctatcccttgctgcttggaattgtttcttgatgtccctatacaactgttccaaaaaggtcattgaatgatgggtaaatt

SEQ ID NO: 273797 - DNA, 1165 bp, Cannabis indica
taaaataattagatattgattcggggaatatgcagcgattatatctttcattcataacttacattcttttttaaagactcatcgtttgtgtttagacgaagtttcaggagactgccaaactccaacattctgctttgaaagtgatacctttaatatatttttctttctttaacaggaatatatatttaataaaacagtcgacttctaaatcaaaaagaggccagccaactactataatttgaaggcttataaaaaatcatccaaatagtggcaattatctcataaacgataacctattttctaaatctaaagaattggaaggattacacaaacatcatttcatcccaatacaacaatgcatatttataataaaagagaatgcaacaaagttgaaatttactcagtgcaacaaccattccagctggtttcgctgcctgtggttgaacaaaatcaactccattttgataaaattttctcgccggagataccttttcttctcttctctgattataggtattgcttaaacacgatatctccattttatcggtcattgcgcgagcctcattagatccttcaagacgttatctgctccataaaatttaaccaatttattttttgattaaaactccatcaatctcaaagtttggcaaagactaattaatctttctcaaaattgttgcgaaggagaagctttggaatatttgactaattaaactctgatttttcacatgatcccatagttttagtaaatcggttagggttaaggaaataggttttgttttctttaagttaacggttccgttaacttcacgttaacttttcaattttcaaaataacaaaaaaaaaaatcgttaaaccaacaaataacgttaaatagacactttttatataaagatatatttcttttccttttggtacatttgttaatttttttgtaacaattgtatatttgttaatttaatttacctattattcacataattaggatacattacaaggctttgtttggtattaagtaattatgaattttttacgtaaggtgtgcttagttagaattctattaggtaagagtaagcataaatcgataatttatagtgataaccaaccgctatataaacattaaataatctaattgtgattgagtcagatcagatactattttttt

SEQ ID NO: 273798 - DNA, 670 bp, Cannabis indica
tgtgtttccacaagtaacaagttcaatttatttaaattattaacaaatgagttaattatttaattaattattatgtgtataaatctttgccagattttctaaatcaatggataatatcaacccaagtactattcattaaatgttatcgtatggtcggcttttataataatattaaataaacaatctctcttttttttttcttttcttatttttatgataactacttcttgtcgtttttctctacttaatcttcgttgatttcctaaacccaaccatggttatattagattttaaagcacgtgaaaaacacgtgacaaaaaaatcaatatgagtagtactatatcaacaccctgttattataaattctctattaattaatgtgcttacaaaaagatggtagaatatttttataatttttttataataatattcgttgtataattttatttttagtattgtaaattattttaaatttttaaaattttataaatataatattattataatttttttattttttaataaaatactattttaacatgtaattttgattccaaagattgaataagaagttagaataggaagttgtaaaacaacaacctaattcttaaataaggttagttagactagaggaagtcagataaaaattattcctaatttattttaaaat

SEQ ID NO: 273799 - DNA, 2102 bp, Cannabis indica
aagtctcagttatataccgagacaaaaagaccaaaatgaaaactattcaaaaaccccgcctcttattttcatctcacgcccgactctctctctttttttttttttctcttgacataaacaaaacccagcagcccttatacacacgaaacccaccagcccttatacacgaaacccaccctcatcgtcgaaacccaccatcgtcgcccaaccttgaggcacccgagtcagcatcgcccaacctcatggcgatccactggtattgtcgctgtgcgtgactccaaattgaaggtactttgctctttcgttttcatcttttcaataaaatatctattgagtttcgttgtctttctttattttatttgggtttttctttttttacttgtttggattatttcatcgctagcttttattctatctaatttgcttgatggtttatttgtaaacaatcaagtaacatgtgattgttaggttaggttgatgtttttattttatttcttttagttttgagtgagtttactgtgttcatgtacttttttggtgcttcctattctgggtttcatattcttatcattattattatggtgtttgtcgaaattcttgaaacttgatcactactgcaataattattagtgatggctgagaatggttttgcatttttcagatttggttctacctattttttacttgttatctctgtctttgtcttgttcttagaatttggtattttttgtgtggtttactgaaatatgaatttaatgtttgtgctttattttagtattttcattttgtcctttgttgcccacaatatgctcgttaaaatgccacatagaggccgatattaaatgagtttgaattgggtttcgattgagttctgaaagaaaataaaataagggtatctagttattatgggaaatgcagatgtttaagttgtcgactgaaaattttggttgctctggcctgctcttttctcttctgttcattattgctaaattatcataatgataatttaaaaggaaattggtttctctatagcctttagcttttgtgcatttctttttccctactgttcttggttttaactgttaatgttaaaatgtttgtcgtttgttttttttttcttgtttatattatagtgtctaattttcaaagaatcctttatttttgtcaagctaaaaatcccatttaagtaccaactattagctattattcttgtgattattaagctccaaatatgatatgcttggtagggccataagtgaaattatcatttatttatttacttatttatttaaggttgtatttttttcccttctttaactttcacatcgtgcttcccatatttccttactctagatcagtgattgtggaacttatgatggtccttttttaatttctccttttatattttatcaatcccatttaggaattgatggaaaggaaataataatattggaatactgatttgggctttactttcacttggcttaagagtactacgacttttttcagggcactttgttaagtgatgaagggttttttacttcttagcttaataatataaataaagaccaaaagattgttttcaaatttaccaaaatggctcttgtagattccaatggttctagaagtaggtttagcttagggggcataagatacacactatatattttttgttaaaagaaaagactttgatgttgaatattttgaaataaataatgtggtgatgacagcaaagactctgtgaattttgctgagacatgctttgagaaattcggagacaaagtgaagcactggatcacatttaatgagccacacattctccatacaaggatatgatgttggtttgcaggcaccagggcgttgttctatcattctccacctcttctgcagggctggaaactctgccaccgagccttacattattgctcataacgttctcctgtctcatgctactgttgtagatatttacaggaaaaaactacaaggtatttttaaatctatatattttataactaacacccattataaatatttataatatgttgtagtaaactaaacccccttttgacatgctatttgcagtctaaacagaaggggctcca

SEQ ID NO: 273800 - DNA, 6617 bp, Cannabis indica
ccgctaaaaataaacattgggtttatgccgcttacaaacataaaactttgggtacttatgccgctatttaccttttaaaatgtacccctaaaaggggtttatccatgccccatttctatttcggtatttgagagaattttttactctaatttttttttttaatcatttatattgtagttaattgagacattctataaaattttgaaagattcgaaaaaatttaacattttgaaaataggcttcaaacaatatgttgcacgcgagactcacttattttagacgcgtgtgaaataaattgtttgaattctattttcaatattttaatttttttttgaatttatcaaaattttacaagatatcctaaataactgcaacctaaacaatcatgaaaaaaattataaaatattcttccaaaaacagatagaaattacatcataccacttttttaaaggtgtgcattgaatttttgtataataagagagtagatggattgtttcttcatagtattcatttcattatattaaaacaagatgaaaaaacaaaaaaacttaccaccacaccactattattggctattagagtgtttagcgcataattaagaattaccatcgtttagccaccataatgacatattgtgtcgtagtatgttattgttatagtagttagtagttgggtggatgtggaacttgaacgtgaatctttttaggcaaagtttgaaacataacctttttccattatttattttggaagagagtttgtttagctacaaatttgacaatgaaataattgaatttcatttatagcatcaaagcaaaaaccaacacgcatgcaatagagagaaatatcaaattttacacatacaagttttattaagtctattcatagtgcaatcctgaacaaagagtctattcatagtgaaaaaaaactatttgggaaagggttttgagtgtgtagcaagtcattataataattttatttcaattcctgcgggccttaataaggattaatcaacacaacagtatttgtccaataaattatactagggtattgccatgccatgttaagaactaggacaatttgatcccaccttggtagaaaaactagtaatttggtatagtaagcaattttttttataaatatacaatcattacaacaaaattcacacacaatgtcacaaaatgtaaagagagaaaagatgggagcaattctgggtgaaagatttgaataaggaagaacttaactataaagtaatataattagcaaattttgtataattagttactagaaagaccttttacacttatacaaatgcagtttcatggatactacctaattcgttggttagtttctagaagtcgtcctatataagattcaacaagggtaagaagtaggagattgaactgtacactagactctagtggaagagaaacaaacttatattctattgtcccaacccatcaaaatgtttcttacattggcttcaatcttgttccttggcagagataatccagacccttcatcgaggagaattctgtacacttcccactctcggccacggatcatgtgtctagcaatctcaacctgagaatagcacagaaaattgaatgccaaggaaaagtataggtgggaggaatatagtgttataattattagggaaaaacagaaaaagtaatcattggtttgaaatattactgagaaaattcgcatgttgagaagtttgaaagcaagagtaatatcatgaaatacaagaggacggcccctgccagacaactccactggattagctaccacaagttcggtatcagggccacgactcactacagctactctaagtggacgcataagctccatttttaagcgagagcgtaatgagtcttgtttagtgggatcaacaatcttcttgccatctgcttgcattatgaacaagtccatctcacagttcccttttggatttgcaaagaagcggctatatgaaatctgtaatcaaccgtacactatgttacaaattaatgaactgttataaaattttagaagctaatagcagctaaggcttgatgattttacataattccatgacaacaaagcatggacataagtccagtcattttttctcacaacaaataggcataataccaaacaattgcagacaaacaaatttagatgttaccagcaagcaccatttaatgaatttatacaaaaacaagtacttattgactttattctaactacgaatcatttattgtgttttgcaaagtcttagaaggactgcagaagaggccaacgagacaatgttttctacctgaatgttgtaatcctttagggttctcataatatcatatatgagacctttatgatcctgacagaggatttgaacaagtgtgtgagaagggctgaacttattgtccatagtgactgaaatcgaattagaggcaggacatccataaaagtttttgcctggaagctctaaactgaacatttcttcactgatttcagaaggaagatttggagaaccttgtgaacaagctgtaagttctggaccagccacatcaatttcgcaactgatcaaggcatcccctagtgcggctttcagatgatgagttgtttcatcttttctattttttgtatgaagaagttctctgattaagatgatatcaacacatatgcatattagtcataacctagaaacataataatcacaaggattctgaactctttaagtcttctaactactctttttgctaagtgaagtgttcataccctacccataaactaaccaaaagtataacccttttgttgcttcttactacacaaaaacacaaatgataagaattctgaaaatatggaaaggaaagtgattaagttgctcttcttaagactctcacaaagtttaacaaaaagaaaggttgtgtgctttacaaaagaaattctgcctctacaatgatggattaagagaatacaactcataagattgcattgattgttcttagagacaatactattttagttccatgcagtttagctaattactaaaaaaaactttttaattttcaaaagtttcaatagtctcataaaacacacctaaactaactttacagcttttaatcagactttttttcgggtggcatattatattttcatttttgaaactactaaacaaataatgaagaacctttctctgcagatccttgttggtggcagtgtatattataattaaaaagaggactatcggtgcattccttgtgttttcgactcttagataaatattaaacctaactaatttattttatatgacagtgtatattataattaaagcacttatcataccatttctttttaaaaaaatcaattaatttacaatgtatagatctatagtttaaacaattttgtacacgtgtataataaacatgtacttgtaatacaatatttgcactctaattctaacactaaattattcagaaattttaaaatactgatacaatgcctactataactacaatatataatattatatagagaagttgggattacagctatttggttatcaaaaacacaaggggtgccctgccctggtaatccctaactaccaaataattttcaaaaaatatattcttaaataacgaaatttagttgtagtttataaaaatacaaaaataataatcaaatttttttttattgattctaataatgtaagggtaaaaatgaccaaaatcaaatgtattatttatttggtagattatgtaaagctgaatgttattaatagaatttcgttttcttttgaaaaaaaaggtcaggtgtgtattcagttaaagcttaaaacgcactgcactactaaaaataattatctttttcttacttaaatagtgtcataaagatgatttgatccacactaaacatggctttgattttctgtatatataatatatataaaatgtgttgtgccttcacctctcttaacattaccaagtggaaaaggtagatgagatgcacaatgttgcatataaaagcaaaataccttgtgtctgtaacgaaaaagaggtccatcactttgccatttggggcagtggataccttcactctcttaattgttagctctagctcgcagagaacctcagtgacatctattaaggaaacatggtaaacaacactcaaggtcaaatatcaatgaaacagcttcatacacaaagattaaaaatgcacttcaaggtgcaaatttcatgtgtcatcattttccttcagtttaattcctctttgcctccatggcaagtaaagacatattatgctaacttatgtcctcctaacacgtcaactttgtgcaattttaaaaagaaacaaaattaaagctcgtaaatgatcagctatcaccattgtaaaaccagtttaagagctaaacttcaaagtcaacaacttctgacacatatgagactatattcattataaaacattaccatgtaataggccttctcgatcatatgtacaccaaaatttcaagagaaacacatctggtgggcttggctgctggttttgaggccggtaataatccatttcagacgtggaaaagtaagaaggacacacttctagaaacctgttcttcaacaaattccagtttgtgttgggcttttccaccacccagaacaccatgtagcaccatttcccatccgttgaaaaatcttctccacattaaattgaaaaacagaatataagaaatcactaaaaaatacacacatattgatacaaaaattaaatacaagcaaaacccatttcatttcccctcctatcaaaatcgaacaagaaaattaaaaagcctgacgatcacttattcttgatattaacttagaaaccatcaaaattttcaaatgattcaacaagaaataagagtataataccgagccccatcctataatcaaaagttccagattcaacagtaagattttcagaaatatagaaagtcaagtagtcgtacctgctctgcaaatactcagcccaaagatcaaaacaattctacataaatcacaccccaaaccagttttatctgggcaattaacagtaatcacagtgggatcgccttctttttcttgtttaacgaggaccatgtcctcgtgcaaaattcccattttctttttccccaaactcacttcctactctctctctgtctctctctacacacacatatatatgtattctccattaaaagcttggaaatttgatggagaaagcgagaaaaaccatttccaatacttagtgaacaaggcagctgtgtcagtcagtcgattgttgagctcacaggaagcagaggggcataatggtctttttaatattctgccgctgcctgctgtaactctaatgctttgttcgctcgttttctttttttgtttcttttcttacaattcaatttctcgtctctttcaattttgttgggggagacataattaggtctcggaaaataatcaataaaactccaaatgaagatcttaaacgtgtttaaataattgattatttagtaagatttaggtgagttttttacttagtcaaaatccaaaattaatgccttctgcttgtctaaattcttcaaggtcaaacatatatttatggattctcgtttatatgatttagaaaattaattaaaataataaaattcacctatgcataaggtactatagaatttagttatcaacaataaagatttatcagatttatcagtacactaaatttacattaacgtcataattagaaatatggtttgctcacacttggataagtgaaatgtcttttctaaggtattagcatacaatgtaaacttgtatcgcatgtatcgactatgcattaaattgaatcggtattcacagtggaaaggatatcataaacttactattatatcttctctaagtcaatgttacttagttaatcttatgctaattgatctctgttaggctatttttagcttagatttcgggtattacttaaagttgtttttagttgtttgtaatatttttaggatagaattacacttattttgtgtattttcaaacttcctatagttttaaaaggccgaagcttcaaaagtgtggtaaaggatcgaggcgagtgaagttatattgaaaaaatagcatttagtgcattcttcgccgcggcagatttattcgtggtcgtagctaaaatgtggtagaatagaagagtttcgactggcccagtggccgcagcgagatcttggcagagagttgcgaaatttaggtttgtgatctcgcctcggcgaggcattttatggccgcggcgagaatgtccgtacttcttgaggccaagttcgtcttttctcgatttttgaagttttgactgactctatatatagggacttcgagtaaagaagcagggattcagaatattaaaacctagaagcaataacggacgatagtgagagcaaagtggcagcccaaattcatttcaacatcagtttctttcttctctttttatttattttatgttaaattctattttagttttattatagatatgaacgtgaactaaactaaactcccaattagggatatgatgaatgttagttgaagttttctcaatttagttaatgtgattattagtttactttccttgattgtgtgatttgt

SEQ ID NO: 273801 - DNA, 801 bp, Cannabis indica
agctaacactggtgctgtgattaatctatgctttagctcttgaaagcttgattcatacttgtctgtccacacaaccactgattcgttttagtaagctcggttaagggtgtagaaatcttagagaacccatctacaaactgattgtaataaccagcaagacccaagaaagttctaacctctgtaactgtcttttttctcagccaatccctcatggattcaatcttccccgaatcaaccttgattccatctttattgacaatgtgtccaataaaagacacttgagatagcaaaaactcacacttcttgaatttggcatacaacttatgttctcgaagccgctataggaccatccgaagatgttgtttgagctcctcttttgattgagaatacacaaggatgtcatcgataaaaacaattacacaaatatcaaggaaatccttgaataccctattcattagatccataaaagcttcaggagcattggttagtccaaaagacataacagaaattcataatgcccaaacctagtacggaaagccatctttggaatttcctcctctcgaattcttaactaatgatagcccgaccagagattaatcttttagaagaccgtcttcccatgaagttgtttaaaaagatcattgatcttaggtaaaggatacttgttattgattgtcagtttattcaattctctgtagttaatgcacatacacaaagatccatctttcttcttgacaaatagtacgagagctccccaggggtacacacgaggtcgtgaaaaccccaggtcaagcaacccct

SEQ ID NO: 273802 - DNA, 1177 bp, Cannabis indica
aaaaaattgaaatagttataatggcaaaaaaaatatatacaaattttattgcataacaactacatattttttcttatacacatggtaagtaattgtataaacttaatttttgacatagtaaattattcattttttttcaaaaaaatttacatgtaatcctaaatagttacaacgtacacgatcataaaaaaacaaactaatttttttagatgtcgaaacagataaggagtctaacagaacgatcctttaaggggatctactataaaatttctaagtaattatactaaaatatggagttaaatacttaattacactagtaatattacatagacactattaatgttttttagcatttcttaataattaatttaacctcatgtttaaatttttaattaaataattaatgctacattttgtcctccggtactgtattttactaatttacaaaataaaggggtttgtttataattattaaaaaaataaagatcaattgggtatttaaagaaaacatgtgtattgaaacaaaatgttgttacttttttattatttatttatttattttgttttgaatcctcatgttcacaaattgcttaattaagatgaagaatatcaaatatatgtcttaaaaaagatacacatgggtaaattatcataattaacttggtgtttaagtaatttacaaagaataaatgtggataaatgtacatgtacttattaaatggggaatatatctcaatattattccaaaatattatcattttgttctgtcaaaatcaaaacgacaatgtatagttttgaccaaaagaaagaacgacaatgaatagtacaagaatatatataatctcaagattcatgtatttgccaaggaaataggaagaagatataatttgggattgtatggtaattacgtgaaattttttaacatataattatttttttattcactaatttttgacggcttgattataagtagtatttttttgctcaccgaattacaattaattttttgtgctttttttttagaataattacataaggcactattttttgtaaaatatttacatttttacgtttaaagaatatttttttacatttttacggttttccaaaaaataacacgaaaacaacataaaatcatcaagaaaataacataaaagtaacatcaaaataacatcaa

SEQ ID NO: 273803 - DNA, 716 bp, Cannabis indica
gaggaaaagccaaactcaagtttcagaacataattttagatttagacaatgtcttgtttattctaaatttcagaagaaacttgatttctgtttcatgtttacagttgcaacaatacaaattgaatttgttgagttctagttctatcatttcttgaaatggcattcaaatttgtgttgcatgtatgaaataagggctttatgttctaagaccagatgaaccatttgcgcttaataatgaactgcttaaggtagctaaacctagaaaccacaaaaagtaaaagatcgataatgaagaagaaacatatctatggcacttacgtcttggtcatatgggctatgctagacttcacaggttaaccaaaggtggtccattgaaaaatgtcaccttaggtgaattaccagtttgtgaatcttgcctagaaggaaaaatgacaaaacgttctttcttagcaaagggatagcgtgccaaggaaccactaggcatagtgcattcagatctttgtggaccactgaatgtcaaagctataggtacttatgagtaatttgtcaccttcatcgagaattactctagaaatgatcatatttaacttatgcataagaaatctgaaacgtttgagaagtttcaggaatttctagcattggctcaaaacaaattgggtaaaactttaaagatcttacaaactgataggggtggagaatatatggatatgcagttc

SEQ ID NO: 273804 - DNA, 1695 bp, Cannabis indica
tatttgatatatattttccttctaaaaggttcaacactactatactactatatactactactctttccatatgttgtgttctcaaaaatgaaaaatatgggtagaagagaggtcatgagaagtacaattcttatagttttggctcttatgtccttggaagtactatgttttgaaagaaaagcagtagcaatagcagaagccagattaatgagcaaaggttgtgttctaaatcagaagtgccacgtggaagtagctgagccgttggatgtgaaagatcagtataaatatagtaatcctgaagatgatcaagaagttactcctggtgatgactatgacaagtatagacaatatggtgatgttccaagccctggtgttggtcactgattaagactctctgtctttactattgtcatctttctttgttttatcttttagttttatttcaagtcttatatacatatatatatatattatatatatatataccatctatttgttggtacatatctcgatatctatatatatatatatattgaattagcaagtcagaattttaagaaagcttcactttcattttcaatcataactatttttacaaaatcacaattatttttaccatataaaatttcaactaaaaataaaatggtatttaaaataaatccaatcaggtggactatgaggtgtctttgtagcaagcagtgcgtgcatggacttgaatttagagaagggctaggctatagattaaggggtattcccgtcagatcatagaaaaatgtttgtgttttcgtaaaattggtttcacgtcaaacgagtgtcctcttttcaatttgtagtttagcttttgtagtttaatagaggcaccaaccaaacacggtctcatgtttcgaatccccatcatgtttctatactatactatatatctaacagatataaggtaaaggatacatcgaactacgtgatgggatttaaagcctgttctttcatgacgacatttcatctcttccttcttctaatattgcttctcttctatttgcttgctagcttctctctccacctttcttttcttctttcatcttcatcttcttcttctattttttttttcttttcttttctcctaacatcttaacattccaaacttctgtatcatacagctattgacataaaatactagctctctgcccactactacctttacacgctaacttacaatattatttaactctctttctcttattgtctctagcctcttttgagcctccaactttggctttaccttcagctcggcttacatgctgacgtgtccaggtgattgaattattggctctaaaagtttccatgaataactgaaaagtgtgatagtataattattcaacgcaaaatatataaaaaagaaaacatttttctttttacagctttctctttaacctctatttgtaatggcccaagaaatattcttctttttgctctctcccaaaggaggtacagaggcattaagcatttaagcataaatgtttttctattaaaaaatattatgaggaaaaagtaaaaatgattcattgctagaaataagaattgaatcaccaaaaggcaaactacgaggatattattgtgggtgagggagtttttatttatttattgttttccgccgctatgtcaaagttttgaacgagattcataataataataataacaata

SEQ ID NO: 273805 - DNA, 380 bp, Cannabis indica
agagaaagccatagccactttcctctctcttttcttctcttcaaaattcgaaattccttgagtggtttactaaactttatatgtttttattttattgttttagaattcatattaggattttaatgaaacatacttggtagtaaatatagatcctggtaaaatatttccaacagttttgtccctgtttttgagtgagaccaactaaaatagattcgagagaaaaagagagagtgagctagattgaatgggagtgttcaagagcaattcttctttgtaattcgatctctcttggtgtttagtcatcaatctgtaatcaccattgcaaacattaataaagattcaagagttatctgtttctcgggggatgtaggcacaagttc

SEQ ID NO: 273806 - DNA, 624 bp, Cannabis indica
taatgaagaactaatcaatattgatcacaaaattgtgagattatttagttattattttagaattgggagtttttttcgtgataaaaccatataaatagatatgagattaagtatttattaaaatggtaaaatatttagagaatgttaataataataataataatgtgagttttaaaaagtaaaaggatactattattattaataagaaattatttgatgatacaaatattatttttttattttagtttaataatatatatttatatataactgtcaaactaaaatgaaaaagaattggtataggtttgcctaaatttgtgctattttaaaagctgaaataagttgatggtatgtatatatttaatatgttaaaataggttacttgttacttatatagggaaaaagtaagaagaaaaatattatatatctatctatatatatatgatatgttatttatttagaatgtgagagtatttatatataagattaatatattaattatgaattatataaaaatataaagagagatgaaaagatatgtgaattaacaaatcgtttataatatgattatcttaagaaatttaattaaaaaatcataaagaaatatacaatgattaagtaatt

SEQ ID NO: 273807 - DNA, 593 bp, Cannabis indica
ctaaaatatagcatttagacacaagttatgactaatttagttttagtcacaataaatattgtgaaaaaaaatacattttttttacatgaaattgtaacttcattaaattagcactctgaatacaaataatcttaagatcaagaggtatgaaagactccagaacgctacgaccagttagcgatcatgtgtgcctatagcaacaaagtgggccgcacgatttgctgatcgtctaacaaaacgtaattgaacatcaaaaagagaggataacaaacttctacagtcattaacaactaagccaaacacagaagtcattaactgagtagaatgaatagccaaacacagaagtcattaactaagtagaagtgataaaaatatatttagtcacaataaattgtaatttttgtgactaatatatttaaccacggactttttagtcacaatatgtaattagtcacaaattttttatttttagtcacaaattttattgtgactaaattaaagtaaaactttttgtaatgattattgactcgtgaataatatttattaacacgagaacccgtattaaaaatctctcttcattattcatttttgta

SEQ ID NO: 273808 - DNA, 754 bp, Cannabis indica
aagaaaagaaaaaggaaagggaaaaaagaaagaaaagaaaaagaaaaaaagaaaattaaaaaaataattttatttttttttcttctgtattttttaattttttttttaaaatatttataattatttttttaaaactaatattacgtggaccactaaaaatttaccacgttaaaagtgtgtacacgtggacagtccaccatgacacttaactgtgatttttggacagacgtgtacagagcaaaacgaaatcagggtttaggtagttatgccgccaaaatttcagtttttgtggttaactgttacaaaccgtaaagttcaagtggtttaaccgccaatatttctatataaaatgtataggttacttttttattgtccattacttaattttaagatagaactcaatcctgcacactcaccatcatatctcaaattttaacaataatggtactccacacaatacaaaattatgtgcattgagttatctagtatctgatattgtgtttagaaaatatacactgaatagtgaatacaatacttattgttttaatgatgcttgccttagtcttgtatctgatagtctattaaaatatattgatgctaatgcgtcaaagacatagagatacttattttggcaatgatgcttcttttttatcatcattgccaaaaaatagtcattctagcaataaaaagttaagaaaaatttgataatgcatgcttaaattaagtgtaaggtcttttaatattttaccctaaa

SEQ ID NO: 273809 - DNA, 618 bp, Cannabis indica
aaagtaaaaaaaaataaccagtaaaagaattttactaaccttgagataaatatatttctcttcttacaactcccgacaacattgccaaaaatttgttgtacacccaatggtgtatgttttaaatatttatactcgcaagtacacgaatcgaatatggaatatagtgttcatgtaagtacgagatcgaacccaaaggagttgatttatatctaagagagactttttaaactcaaaattaattaaactctaacctagcttcaaataattgatgagatttgtttcataaaaggaaagaaaataaaaaagatttaaaataaacaaggtaaaaggaattgatgaataaatgctagagaaaagattattaagactttagaatccacaatatatattaaaaatatttaatagtgtattgactcccaagtttccttgatagttgaactcaataaaactatcatttttaaaaatatattttccatttaagtacaaagtattttcatatgataggaattttcttcacttataaaagtataatttcaatgcattaattgtgaaacaagctaatgaaactacaacaaatcaaagatattatttttaggtaaaagtataatttttatattc

SEQ ID NO: 273810 - DNA, 1279 bp, Cannabis indica
caaaaatttagtttttgtggttaagtgttataaaccgtaaaattcaggtggtttagccgccaatatcccttatttatattaagttgttggaggagatataaaacaacaataatttattttattttattgtcaattatgtgaaaaaaaaatattttttaataaatataaataatttaatattaaaaagtaattagtccaattaaatttaaaatataaaatttgtatttaacataaatcgaatacactataagcaacatagtccaaatttaataagatgaacactaagtaaaaataaataaatacccccattaaatgtatatctatatatctcatgaattctttacatgagttggacttggatattttaaaaacttttatactttataaaatatgctcatgttacatgtttcctgggctttcgtcatatgcatttatactcttcacacttatctttaagtttcttttgttttttttttagttacatatctttaacgtttcaatacatactctgtctgtaacgccaactatttttattatatgtagtgatttattaccttcccttagtacacacagaaaacattaacattgcctatagctacaaattaataaatatatacaatgaaggatggaaagcagaaaaagaagataaatacaacagagtactgtaatagtaagggtgtttcttggcaagagatgaagtaccttgcagatacagaagagggatcccttaaacaagatatacaagatctcaaatcatgggtatatcttatatatctccttacacttttaattaatttattctatactattttatttttattaattttatcaaacaccaagaagaactattataatattgttgctaggctagctttaattatcatgatataattaggtgggttttagcgtaggcaatgatggagagcagagggggcagactttatttgtgagattttatttgcacctcaataataagagtcgtagtgttctatcttttattataatttgttaatcaaacttttatatagaatattttttttttaatttttttattagcggtgttcgttatacttataatatcattcttgtaaatttttgaaaattttcgaataatttacagtgctaaaaatacatttgaagttttttagacgtcgcgtggtaaactggaatatcaaaaactctacttttagcattgtaaattaggaattttttcaaaaaattttacagggatgatagtgtaaactataaacaatacagctatgaaaaaataaaaaaaaaa

SEQ ID NO: 273811 - DNA, 1616 bp, Cannabis indica
ttcaaacacaatcaaatatttcccatattgatttatcttgttcgggaatatctgataccattcctatatggtctttcaatacaacttccaatttaagatatttgaatatatctttcaatcagattcacagtaccttgccaaacattccattggaatcgaatcattttcctattgtggatttaagctccaacagattccatggaaatatcccactaaattccctcttcaatgcaactatgctgaatctttctaacaacactcttacaggatttgatcttctgttttgcaactcagtacttaatgggaatgtggaggttcttgatctttctaataaccaattatttggaaaccttccgaattgttggtttcgtctgcagaatttgaattttctcaattttcgcaacaacagattgtttggagtgatcccaagttcaattgcttctctttatcaaattcaaatgcttgatttgagcaaaaataacttgtcagaagcattaccatcatccatgaaaaattgcactcacttgttatttttggatgttggagagaacaacttgaaagggaatataccaatgtggatagggaatacactatcaaatttggttatacttcaactaaaatctaatcattttaatggaacaataccatcaagtctatgccatctacaatatattcagatattagacatttcacataataatatatatggagctataccatcatgtataaataatttcacatccatggtcaagatatctggagagcaaaattcattggatatgaacaaaatttcaatatactatcagattggctttttcagtgaattacaagaatacaacataaaggcatttgtaacttggaaaggaaaggaatacgaatatgaaagtattttgggtttgttaagagtgattaacctttcaagtaatagattggatggagaggttcctatggagttgacagatcttgtggagctagctcaattgaacttgtcaagaaataatttgagtggagccatacctttgaatattgggagcttaaacaaactagaatcactagatttgtcacataacaattttgttggtgaaattcctattgggttggccaaaatattttccttggcatacttggacttgtcatataatcatttgtcaggaagtatccccataagtactcaattacaaagcttcaatgcttcttcatatgttggaaatgatgatggattatgtggacttcctctcttgactaaatgccctggaaatcatccaattttcaacaatgatgaccctcatgattcagattttgatgatgaaaaatggttagacatgtcatggttttacattggactcgaagttggaattgctcttggttttgttggagtttgtggagctttgtatcgaaactcattcttattgaaggcttgcttattttcgagatacttgaatcaatttggaggttgactttgtgtcatatggtcaacatcttcttaattgaagagataccttcaaagctaagtggttagtattctttttattctttttattacaaaatatatataattggaagaggtttcaatgattacatttttattgtaaccatcatggttacatttttttaag

SEQ ID NO: 273812 - DNA, 1990 bp, Cannabis indica
caagccacagttgtcacacacatggtctcctcccattccttacgtcacattgatctaatccaatccttcagggggggttaccattcagtctcagtaggaacaacagaagtagagaagatagataaggcataatctgcatacacaatgattaatagagccaatctaatgttgtatgctagttaaattgttgttatgtaccttatcattgtaagttctccaaatcatgtcaacaataatgaatctaaatgagtccccacggggatgatcgtcaaagatgctaagacaaattacaatacagaaagagatgctccatggtttcatcatcaccctcgcaaatagggcaagtcgtatcttcaattgtcatctgttgcccaatgattttacaaataggaagcgcattagacaaaatcctccaccacaagactttatgaacttcaagaatttttctattccacaacctgttccaaagggaaggagcaacatcacaccgaggagtcttatccaacacttgaatcaagtaggcacactttgtagaaaactggttgtttgcttccttaatcccaacccaatggtccttaccatgaccacttaggcacccacttttgagaatagcagacaccgtatctgcttcaaaaagatagcaaggtttttgaatatcccaatgatacgcaacccaagtaaattcctccataggcaccctctttggctttgggataaacgcttggccatggcttatctaagggtcctcccatatacgagtatcctttccatccttaatcactttgcaggctcttttcttgaggatatgttttggtttgacaacatccttaatcaggaattagatcccttgaaagagctattgaggaagtctttacccctcatgtatttggccctaagcatttcacaacataacgattgatgaccattcatcagattccaaccccacttgtctcggaaggcctaattcatctccaaggacttacaaaatcccaaaccctcacgagctttgggaagacaaacattcccaaccccttacacaaaggcccttgttacttctatcactgccctaccagaaattttgcaccaaaccatcaattttagtagccaattttttggagagtttggtgatctgcattgaatatatcaggagcgagagagccccataaatttaatcagggtagctcggcctgcttttgagagtgtcttcaccttccaaccttagagtttcgaaataaggttatccaaaataaagttgaaatcttcatccttctgtctacctctgaaaagagggagacccatgtatgttatattgtttgtagggcactcaaagcccatagcctccttaatgcctcggggcatgctatcacttacagtattactgaagaatatagaagtcttaagcctgttaactttttggccagaccacaaacagatctatctaaacagtccaaaaatcccttggcttactttatattagcacgacccaagatgattaggtcattagcaaaaaagatatttaaaaatgttgggccattgctgctaagcttaatgcctttgatcacaccttttctcatagcgtcttccaataaacttgaaaggatctcagttgcccagataaataaataagaggaaaggggatccccttgtctaattccacaagatggggcaatcttacccatagttccaccattgatgaaaatattaaaggtagtagtagaaatacactgatacacccagttgcaaaatttgtcaggggccttaaagctcttcagaacatggtcaatgaactaccaaatcagtttttcataagcctttacaagattaattttgatcatgaaaaacctttcttttcctctctttccctaaaaggagtaaatgacttcctgaatgataacattgttgtcttatatattcctccctggcataaaaacaacttggattgggcaaacaagtcttggtaatattggcttaattctattcgcaatgattt

SEQ ID NO: 273813 - DNA, 1189 bp, Cannabis indica
agcagccagagtgacgactcgtgtataagagccctagtctcgtgggggtaagggcccaatggaggcttgaagcggggatgttacagactgcccccagcccagttaatgcaaagcaacccattatcatgttatagactggagaaatgtcaactaccaagaattcttgtatttgggtagctgacaatggcaagtctcccattgtcagatggagatcaattgttcctagacttgcaacactatctccagtgaatccacataaattgaccctgcatcagtttcactttctctaatcctatttttctaagtgtttctttgaatagaatgttagctgaactcccattgtcaactaaaactcgctttatccttttgtttgcgagttgaacagttattacgagtggatccatatgtagaaaattcgtgtgcgtcacatcatctttagtgaacgtaatgggtggtatctcgcttttggcacgctttagcaatttaaatgctaaggctgaggattggttctttacttgattgatgtatcgcttttgggcagtgttacttgttcctgcgagatgggggcctcatgaaattacaaaaatattagatggtggtggctaaatattttgatttggattttggttgttgagctgattttgttcaatccccctgtttctcacatacttcttgaagtatcctcttgagatgagactttcaatcatctttgagttgtcgacactcttcagctgtgtgactaataattttgtgaaggtgagaatatttattatgatcttgtttattcctcccattcttcataggttctggtttgcgaaagaaaaccttgttctcatttgagaggaaaatattttctcgtgtttcgttcagctcggcaatacatagtataaatgggaacgtacttctcatatattttctgcttttttttaatctttggattattccttggattcatctttcctcttcccatgtggctcatgacttttgctcgtgtttccaatgttcgttttttctttgattgagttaggtttattctctgagccatctttcatacttttaattcagaccaaacttcttcctttctaacatatataaatgccttgtcgttaaattcatttattgatttgactgggcataatttgtaacagccaaaagtcctaaatctaacaatctcaatagttcatgagca

SEQ ID NO: 273814 - DNA, 644 bp, Cannabis indica
cagggtaagaccaggtggccagttacattgaggaagcattgcctagctggttgaatgaggccatggccggccaacatgtggaggtagtgaccggccagcttgtatattttattgtcaggtagcctgtttagtggtcagcctaccttctagaggccaagtcgatgttgtagtttgatcttgtatacactcgattggctttgcttcccaatgtaaacaccgtagagccattgtgcacttctatcaatagctcttcatcttctttcttggtaatgctccttagaagtggggttgggaaacaacatctgtgtgttatactgtgcatgattggacagcctaaaaccatccccccaatccctactttctggcaaggattctgtttggaggtatgttgttgtaggtgtatccacgttgattgtgcaataagtctatttcttttgaaataaggaggcttagttctttaaagaactaagcaggaccaagtttgccttggttatcaaggcctagctggctaatctagtgagtgtgtcggctgttgtgtcatctttggaagttgccttttagtacagcctttgagctaacttaacagctcaagtaggccatcatcttcttgtattaagttgtatattcacctaggacataaccta

SEQ ID NO: 273815 - DNA, 939 bp, Cannabis indica
ttcttgcgagacgctgcttggcctgaaccccccagttcgtcttctattcctttggctaagcctttgtttttaaccaaggtcacaattgcttttgaaccaggtgacttggattttgaaattatgtcttccaagccacgtaaatcaaagactccctagtaccctaacgtcactttcgaggcagagctaatagagtcgaaggtgcgagccatctgaggttatgtaggtgatactctgaggacttgtggtattgaatataaacgagacagctgggttagatcggtggttgttggcgagtttagttgttatgcaccagtgcggcttactcgcgaaacatttgagggggctagtggcgagaccagtacaagtggctcgaccaggataggcgctttgagcgttgaacacatcagggctggagaaataatccgcctgcgagactatttcaaggtcttcctgaaccatctcgagcttgccccgtttcaactaaatcccatttcatacagaatcctcacaagcttaaaggttctgtacaaaattttaagatgggagtgccccactcccttggaaatagagtatctctactctgtcaaggcggttccagcgaggaagaatgcagtaggggtttttactatcttgggactcatacaagtgatcgtaagatcattatggatttgcccaataaaactccctttaaagatgacttcttttggacggccggtctctccccgattggcacaaccactttccatataattcataagttattatttgcacaagacttggttaaattaatccatgtcttttattctggtttatttgactgaatttttactttgtttttgacagctgtctcgaaaacacatgcccctactcctgaaatggccgagcgagcaggcttctgatgggtctcccatacgaccttcgatcatctgactttctttt

SEQ ID NO: 273816 - DNA, 2759 bp, Cannabis indica
tggcattagtacttttaaatagtgatcagaaaattttgtataattgcaaattcccatttagctaacctgtaaattccgccattgtgaattcttccatctagcaggatcaagatcactgatacccgtgattgtacccatatacctacaaaaggaattcatttttgctttcaatcagtattccgaaacattcatgatatacaaggcaatatgtaattggagattattcaagattcaacaaatgtacaactaccttcttgttcccgactcttcggtttcaaacatcatacggaaacgcatgccaagcgatatttgatttccacacactgccttgtagtacttggctaatggaataacaaattctgatggactagccctgcttaaatgtaataagatatcaaaatttgcattcatgaaaaccgagtaagaatttgcttttctgaaagaaaacgaaatgtagaatgccaacctaggattgtagaacactgtgaaaggactattgttggctgcagcgtgagcggcagctgccaaaattccgatatgcatactatcgcttgacagcacagatgatgataggttcgtaggttgcctgttagctcgtctaataccgagaagtagatgttgtttttcatccctgatgatcacaagcagtgaagttgaaaggtttaaacaaaaggtacttttgcacttcataaagaatataaacagcctcggttcatcatacctgataaatagaaccgagtcaccggcaaaaagcctcttcccgctgacaaatagactccatccagtggtaagcaagtggcgtttcggttgtcctagataaagggggccaaaaaagtacaaaatcaacacccccgaaactatgcacctaaaaagcctaatttggaagattttgttgagccgaaaggagaacataccacggtaaatatggcggaaggtccaaacattatcatgcaaatccctggcaacaagttcttgagcgggtggttgcatagagaaatccttttacagaaaaaaagaacataagagtctgcattcatagtgggaaatctctaactaataccgaaaactgcttacaagaggtggaaaaatcttctctgctgcacgtcgaggcacagagaaacctccatgagtacttgtatcacttgctgtaagcgttttacagaaaaactcgggttggggtttatttgtcttgagagcaagatcagacctcaatagtgcatctttatcaacctaaaaacgaaagaattctgaatttgtattactctccaaactcaataagacaatcttcataatcttctaaatacaccaattaatatcttttagaagacaacaaaacaaagattgaaatgcttacggtttgaaccggttggagtgtcatctgagcatatacttcatctgtttctgggtcagcctaataaagaacacacaagaaaaaagattaaaactttaattagaaactattaaaaggaatctagagtagatcaaaataaaaggttagccatacatgaagggtgacactgtgaagaagacacaatagcttcgatggaagattcgggtaattggggatttgagaatctacatctttcttcatggatgctgcaacctgagattgggagtttcagttataaaacatatgatctttttctcttttcatttaattaaagatttgattttgtatgaagaaatggacattgattgaaaaccccacctacccatgaaaaccaaattaaagaaatcaaagaaaggatttttatattttagtagagcataaatgaagataaaaagggttcataataaaaatcaacaactttactaaactagtttcaaactctgaaatatgaatgaagacacattatatcaacaaaaatcaacatactattaaacttgtgatctttttttttaaaaaaattatatttctaataaaagacttgagtttatatgaacaaggatggacattgattgaaaacctacccatgaaaaccaaattaaagaaaggatttttacatttttatataacattactaataaaagatttgaaacttgtaatctttttttccttttcatctaataaaagatttgatattgtatgaacaaaatggacattgattgaaaaccccaactacccatgaaaaccaaattaagcaaatcaaagaaacaatttttatactttaagataaaactagcaaaatcaacatactacaaaacttgtcatcttttttctgttttcataaaataaaagatttgagttttcataaagaagatagacattgcttgaaatgaaaaccccaccaacccatgaaagccaaataaagaaaagcaaagttgggttttttagattttagcagagaagataatagggttgataaaaaagagacagaattagcagtagcagtagaacagacctgttcactgtgaccttgaggaaagtagacgacgtgggtcccagccggcggcaagttcaccagtggcccagcgcatgcctgccataactcctggtttatgctcttcttctctgcctgcaaacaacaacaacaacaacacttgtttgtcagaatcaatgcttgcttattatgcttatacccttaatctcttctctttttaattcattaatttctactttctgtttgtttcccgagaaaataagacccaaaaagaaaaaatacaaaactgaactcccacaattgagaaaaaatttaaaagactgaatctttattctcataaatcctcacccaattggaaaagttaagagagagagagag

SEQ ID NO: 273817 - DNA, 1082 bp, Cannabis indica
  modified_base (1038)..(1038): a, c, t, g, unknown or other
atcctagacagcatatgcgaagtgcctgcgaggtggatactggttggacgttataacatacattgtctggatttttcagcctcttctttaaatcagttatttacgaatgacatattactttggacggtatgttatagagcgtacgatctatccaagtcatgaaatattctcctcgtgtcactcagatagatgccacgtcaccctgtacaatagttgagacaacaattataattaattattatcttcaaataattcatttttaatttaaatatttatcaagactcctttagtaattgatattcataaataattttatttttatctacaagtctctagtgtaatttgtttaacagttaaactttaattataatatttacaataaaacttaattttgtttacaaaaattagacttcgacatatatcttaatttaaaagtgaagatgaataacaaaaaaaaatacttttcattaaactaaatccacatatatcttaactgagatgggcggagggaggagaactctaagaaatccatttctcattcaacccatttttttctgaaaaaatgcgttcaactcatttcgcatttcatcacatgattctaaataaatttttaattttttattaattaaaaaaactacataatttagtgtaataattttcaattaagattatatgtgtaataaaattttaaattatgaggttatatgtgataatttaaaattataagaggttttgctataaatattttaaaaatttaagtgcaaaaaaattaattgttaaatgatattatttagtaccaaattacaagttaatataattaattgttaattacaagttaattgttaattgatattataattaatttaagttaaaatataaaaaacaatatcaagttaatattatgttacaagtgttttattatttattttatttaaatttcttaaatatatacaactatttaatagtatttaattggttaaaaaataaatataaccataattataaattgaagtgtaactattaaaaatctccaactcnctaatatatacatgcattatcatggtctttatgacgtactacat

SEQ ID NO: 273818 - DNA, 1036 bp, Cannabis indica
atgaacgaagacaaccatctttgtgagcatttgaatcgaagacattccgatcttcgagagcgactaaattagaatgcaccttacttaagccatcaacttaatgctaaccaacaacaaatggaccccattcaactgcgaatcattgagttggaggctaaatttagaaaatactaggagagggagcatgagaaattacctggctatgactgggatggggaaaccgagccatttcatcctgatattatgaattctgaattccctcatgaaatgaaaaatccacatgtctcggagtatgacaggactacggacccagtcgctcatctaaataacttcaataccataatgcgagccaacaatgtctcgaataatctgcaatgcattttattcctaacatcattattgactggggcaacaagtagctggtttgataaattcactcaccattcaataacttcttttgaacagctgtctaaggacttaggaaacaattttaagttgcgagggataggcgactagaagcatcatccctaactaacataaagcaacaactaggcgagtcgcttaaggcttacctgagttgcttcagcactgccgctgcaaaggttaggaacttgaatgacagtattcagcttactgctttttaagcagggatcacaaccgacctttcaacagttaggggtgagttgtgggatgacatacagggtcgcccagtaagaaacattaatgaattcaacgaaagtgcgcaagtgtttatgcgcaaagaggaagcaaggaatgagatgaagttgatgaagactggctcgggaaacaaacccagcacaagtactgccacaacaagtaccgtctcgatgaaggttgataatccaagtggttcaaacaccaaaagaaaagatgactcgagagaatcatctaaaaataagaagcagaaaaagcacaacaaatatgtgccaatttatgaaactcatgaaaacatctttctcataaatgagcacagggttgcattccgcaaacctgagccaatgagacatgcgagaca

SEQ ID NO: 273819 - DNA, 507 bp, Cannabis indica
tctaaaatggtacaaaataggactctggattcgattttcaacaaaaaaaatttaatgttgagaatcatgaggttctatctcaaaatcaattggcaatgagtggagtagcccgtgttcttatatatggctcaatactttttacatttaatccagtgagacaatgttctccaatatttaataaaaccaacttaaaaacaattcttaacacaaataaatacagaaaatttaaccagactcatcatacacacctacaaattaagttattattaagtcttattttgacaaaatttatttcaggatactattttttaccattttaaaaaatataggtttaatctatgttaattaacaaaacaaagaatccatctaataatttgtacaaaacacagagttcaaaattgtatttacccacatttttattaccttattgttacttaattttctctaccatcttcattgatcattaatttgtattgaatctcatcatttaatcctaggagacattta

SEQ ID NO: 273820 - DNA, 529 bp, Cannabis indica
ctctgctttgcttttgggcctttctgaatcgtgtttccttatatagggaaatggaaaaggtgtgcctctaattgagaaaaaaatctgaattatgtcaaaaatctcgttttccgtacctggtcgcgacccacttaaaggctggttgcgaccacaggcaaaactcaaaaaaccgagtttctgccaaatctcccaagtcgcaaccatagtcgcgaccagataaaagggtcgcaactaggcttcaagctggtcgtgactactgactcccattgcgcagctttggccgatttttcaccagtttgtcccgtcttttcgtcaattgactgaatttgaactctaacgccccgggaacctgaaacaaggaaaatcaagcgtaaaaccgctccaaaagacaccaataaccgagaaaatgcttaactattagacccgagacataggctaaatataacctaacaaaattcccccaaactagattcttactcgccctcgagtaagattaaaaaaataaaaactactaactacgctatcagat

SEQ ID NO: 273821 - DNA, 2743 bp, Cannabis indica
aaatgagtaacaaaacttactttttaccttttttccaaaaatagaaaagctagacaacttatggattggtgatgatcctttcttatctcatctatgtactaaactcttcttaatggatcataaaagaataactaaaaattttatttagtttccattgtaaaaaaaaaaaaaaaagaaaaaattgtatttagtttctgttttggcggatttcccagtcatttctctatagtatactcttactacccatacacaaaagagaaaaatgcaaggcatccgatggtgcaaagttttgatacccacgaatcgctctctaatcttccttccacggaacccatcactgccccaatactcctcacaaccccaaccaggtcaaaaccacaatcacaaacaccacttggtttctccttcaagagtccaaaagctcattgctgcacaatccgaccctttactcgccaaagagatattcgagtacgcctctcgccaacccaactttcgccattcttattcttcatttctcattctcattctgaagctaggccgctcaaggtacttctctcttatcgaccatctccttcttcgtctcaaggctgagagatacccagttacgcacaccctgttttcctatcttatcaaaatctatggagaggctaatttgccccaaaaggctttccaaacctttcatactatgctggaatttgactgtaagcccttgcccaaacacttgaatcggatacttgagattctagtttctcaccggagccatctccggctggcttttgagcttttcaggagttctcatgagtatggagtattgcctaatactgaatcttacaatattttgatgagtgccttttgttttaatggtgatctttgtattgcatacgacctattcaacaaaatgtttaagagagacctcattcctaatgatgagtcgtataggattttgatgcaggggttgtgtaggaaagggcaggttaatacggcggtggaatttttggaggatatggtgaacaaagggcacactcctgacaccttgagctatactacattgttgaatagtttgtgtcggaagaagcagctaagagaggcatataagcttctgtgtaggatgaaggttaaggggtgtaatcctgatattgttcattataatacagttattatgggattttgcagagaaggtcgtgccattgatgcttgtaaggttcttgaggatatggccacaaatgggtgtttacccagtgtggtgtcttaccgaacattggttagtggattatgttaccaaggaagtcttgatgaggcaaaaagataccttgaggagatggtgtcaaaggggttttctccacatttctcagttattcatgctttggtcagaagtttctgtaatgttggtagggttgaggatgcttgtgcggttctggggcatgttctaaaccatggggaagttcctcatgtagacacttggacggcaatagttcctaggatatgtgaagataatgcaatcataggaataatcgacgatattctgaaaggggtgtatacagttaaagttaagcaagaaatgatactagagcctcgtacttgtctagagaactctctctgatctgatgaatgaatcgcaagataattaagcctaacacattttttaaatccatcaatgttggaatggatgcttcagcaaagttgttcttgataatactctggttgttctgtcattctagaggattcttctcggtggaaaatgtgaggaaggtttatgctatcacaaagtatctggttgagcaatgagtaacatgaagcattgcaacagaaattaagctagatcaatcttggtgatgagtgatcatagttggggctggtatattgaaagccagaacacagaagaacagtgggcagatgtaagtgaactatgtattgcggcattttatgatgagtttctgggaagggtagaattcaaagcagctaatgggaagtctttactgtattgtaatatatttggagtgggaatgagcctctgtcacatgtattctctaatatgtcagaatatgttctataaagcatacttcataaaaaatgattgagaaaattcaggttggactttaaaattttttaggaacttcaatattgtagaagttccatatcatattaggctttttgagagatctgaaggaataacggtctgatcaggttttatgatttttataacttaaaacttgtgggttctatgtaagtacttgattggtagagtattattgaaaattgtatccaaatcagaatgaaaaatggtaaagtcatgttttttgagttttctgattttctattaaaaaaatcgtgaaaactctattgcaatgtcgtgctccccgccctcatttaagtagcagctctaactcttcagtctgtaccacaccattgccgagtcactgtgccgttgccgattcatctgaggtgaaccctttatctttctctcttagtcaacatctgaaatttgtttccttgaatgttttgttttaaagctattcttttttttttttcttctcacctgagttttaatgttttcatattgaaagaaaaataaatctggaaaagataaatgttaaagaccaataaacctgagatttggatgctcttgatttgagcttaaatgttttttttttctttgcttttgatctgtgcttgaatgtttttttctactcttgatctgactatgactgtgtttgtttggttcttgagctgactttgaatgttc

SEQ ID NO: 273822 - DNA, 986 bp, Cannabis indica
  modified_base (164)..(164): a, c, t, g, unknown or other
aatcctattagaattaggattctatttacagtggatagataaatacttcttagaattaggattctatttaaaataagtattaggaaatatactcactaaaagataaagataactaatcttttaaacaaaagataaaaaaatcgcaactcttcttgaaaatttanctttttttttttcgcttatctttttttcagaaattttctgctgcgatggctgatagtatttttagccataactctctcgatattacttggaattggacgattcaagatgttctagaaagctaagaacaagatctaaaactttcattttgagctccaagtccaattctgcttctaagttcgtctgaattttccattaagttccgcctcgtaaaatcgagctcgccgacttccactattttccaccaaaatatgctaaaatctctccaaaagactctaaatgcatgaatagtcattaaaatagcctaacaaataaaaatcacactaatcaataatttaaagaatcaatttaagaatattaatacataaattgatcatatttataagataaatatggactcatcaaaatccaaacctacaactttaggttttgttatactctctatgaatcacactaactcaagaaataaggaaacacccaactacgacactgaaatggacgagaattgagaaaacttattttttggggaaccctgccaaaattggtttaccagttttacaggtactggtaaaaccggtaaaccgatttttataccagtctccccaaaaactcaccaatttgttcaaaacttgtccaattgacaccaaactctctagagtacctaaacaatgtatatacaacgtattccaaccagaaaatcacaaaaaaatcctatgaaactcaactagccattaaagaccaaagctttgagttcaaaagtcaaatttgcataaatccaaccccatacactaaagccagctgcaagaagcttaaacaaactcaaa

SEQ ID NO: 273823 - DNA, 570 bp, Cannabis indica
gcctttaaggaggcaactggtagagctcctactgtaaaggaggtgcattatgtgtataattttcgacacaaccccacattttggggtttctattacttgcacaagaaggtttcaactgaccaaacacgggaaaaacttggaaacaagaattcttctttgtcccagtcaagcgagcgtgatcgaagtcttttgaatgcctagtaagtgatttcattgtttctacttacgctaattaattaataagaaacctcttcatgatgatcattcaacacttttcttttcccgtttgttgaggtgcgcaaccctccttccctcacaaaagaggagtatactttcagcatgatttactatcatgatattacgggagcttgaattactaggttttagattgaaaattaaagaaaataaattcagggggaagaagattttgtcacccgaaggagaaggtttcgtcgttcttccatttatgttttaaaaatataatatatatatatacataaacttaactgataagttattacttattaattatatgtataataataatataaatattataaataaattttt

SEQ ID NO: 273824 - DNA, 695 bp, Cannabis indica
gcccccattctgtagcatcaccaggatcctcctcttcgcctgtcagcatctattctcagcacctcagaggctcgcgaaccagtataccctaccaattttagaaaggttagagactgtggagagggagaaaaattactttaagggaaggccagactgctttcttaataggacagatagagattataggtcagttgaagaccataatgagactcctgcaagatcctggaaggtcgacaccagatacttagtcatagccacagccacaaccacaagaagagcctcagtcaccggaaaatgaaatcattctcacaaatgattatagactggatgatgatgatatgttttgtacacctaacaacacgaagatcaccagcatcgggggtactcaagattttgaggcacaggtgttagcgacagctccagaactagtggagaatcagaggaagagaaagcggtctaggttattcaatgagtacactgaaatgaagaagaagtccagggcatcgaagacacttgtgaatatggacccacttagagtctttgatcgaaaacttctcttgacttttcacagttgggttctcggccaaattaggaagaagtcccgagagagtgtttctccgatagaaacgatttagcttggttcctccaactacatactcaaaagacatggtttggagacgatgtaagtttttaag

SEQ ID NO: 273825 - DNA, 809 bp, Cannabis indica
cttgtttgtgtgttgatttggatgtgttcatgttggtttacgtgttaatttgatggttgaatgtgatttatgaaatgtttccattaaaataatttatttggattccttgtgaaaaattaagcaattttggtatttatggaactcaattccaataaaaactgagaaagttatgaatgtttgaaaattgggattcaatggtgtcgagattgggtgcttacgcgcaccagcatctcggacaaagataccacgtgcgtgcgcatgaagtggacaacccttgtttgatgctcgcttgtcctctgtttagacacccaccaggcacgcacaagaccatgcaggtgactagtttctcggtcaggcaccctgcaactcccacgtctacgcgtccatgaaggctgcaagcagcctgttgcacgcccaatgctggcagcaggtgcactttcaccaaaaattcgattttcatgggatcttttcccaattttcaaaccctaattttaaaataaaatattatgtttaatatatttaaacttaaacatccattttaaattaataatattgaatttttaatagattattattaatttttgatattttgaggtttaaatttacaaattaattattttatttttaaaattatgttgagattttaaaaaatttattaatttctttaacatttatacaatatttaattataagatcagatattttaatattagacatattttaaattaaatggtactcttatctttaatttgaaatattatatttaaattatcttatatgataattaaataattaataaatttgaaatt

SEQ ID NO: 273826 - DNA, 1002 bp, Cannabis indica
aacaatttggattatatgtttatttgagaaatttgttatataaataatcatattttattttagttgttaaataaatatttatgtttaattcgttgtaaattgatgattatttttgattggttcacactattaattttttaattttaatttaaaaattattttaatatatcaatatgtggataataacttacctaaaaaagttacaaaatataaatgaagtattattattaaattaaatttaagtatttacaatataaattattctatatatttaaatatttacactctaaattactctattacttatgttgttaatattgacattcttactcattgttgggttactttggataataagatggcaagacaatattctcacaacaaattttgtttattattattatttatttaattattgtttgaacatacaaatttttattattattattatgtattttgttatccatttataaccttatcaacatagacataagtttagttaatcttatttttctatagttaattatttatctataattttaacaatgaataaacaaataataatttagcaatatggtggtacaaggtttaaaggattttcttttttaaaagaaaaattaaaatttctattaataagcaaatcaaacaaaagttacatgatgataaatctcgcaaataatataattaaaaattcattaaggagctatgttttttgttttttttttttttgataattaagtgactttattaaaaacttagaaccaaactagtaaccacagaaggagccactttcctcaaactgccacaggacttggcgagacaatcagcctacacgacttgattaaagaactatgtttaatcttttaaattttaaaatactcaaaaaaaaaactaataaattaataacaacaacatttaagtgaatttttaaggttgaatatatatatatagttgtgtaacgataatttttaaaattatatattaatatacacaaaattaata

SEQ ID NO: 273827 - DNA, 2442 bp, Cannabis indica
ccctatataaatatataaaaacctactcatgaccccaaaaataagctcacacacaataatacaaggtttttgaatactaataatataactaaaacccaccaaaaacaaaatatatataaatatatatagactctctagcaggatgaatgaaaaaagcaaaaatatagaaaacgactcatcacgtgaggctactatataacaatttcaaaagactcaaattatataaagaaaaccctagatgagagatttgattattataccttcttcttcttttttatttcttctttctcttatcacaatttgatcaaaggtgtccttctccacctcctccttcgttgatattgtcatgactccaagggagagaagtagtattataaggaagagaaaagccaccaccaccaccaattgggtgatgatgatagaactgactatctccccctcctgctccttgccttggtggaccagacatcattggatgatcatgaataatgttattcagatgatgatgatctgatacattaggggccagtggcgggggcgggggcatctcggtgcaggcaaagcggatgagatctgcgttggctgcatcgagctccttttgcagcctatggacttgtctttggaggaaagaaatggctccaacacagccgtagacagggtctctgactcgggcctcggcctcgtaagccagagagttaactgcgtcctccctttggtgagaagggaggtcgttgagtaactttgtcacgttgcttgcaccaaaaattttgtggacattggcgaacttttgtggctcctctggtgggaagtaaggcgcaaaaatgcaaccaggcatgcatttcctcctcaagaacttacaagctgcgcatggtgagttgtacgtgctcgatgatgatgatgccatatttttctctatctctttagctatcactgtttttgcttgatatatattattctatatatgcacctacacatagtatatcacaatgttattttcatgcgtgatcatatatatgtcatgtaaataagttaagaaactttacatatcgagattagagagatgttgttcttgttaattaattaattaactgacatgtatatatatatctatatttatatgtgattttgatgatcatatatatcatgtctttattacctcctcttcttcatcaatatacataattatatagatattaataaatcagatttgagatattcgtttctgaagtactagggttaattacaagatcatgctacctcttctttaaaatcgaattatttatagttttataataagatggagggctacaacaactctctgcctttcctttgtataattatcccttttttatcaattaataactatacatttttcacagattatatataaatatatatgtatcacatacactatactatcttcatcaattatagtagctagtaataatatatatacatgtataatattaggtttaaatcaactagttctattaagactctcttcactacctttgtccgattaattcttctcaaataattagttatagaacagatctgatggcaactaatgatcactgaaagtattaaaaaataatatatttaattatgctcatataacaagacaagtctcaaaataaaattattttcatgatgacaaagctttgttatgtataaattttaattaattatatgaacatatatatgcatattttttaagaagatatagaagagcctgtacatatatatacctgaaataaattaattaagagatccagtatattattaactttttataaacacctaatcaattaactactgcatatatccatatatagaaaacaaaatatgcaacaaagaagtagcaactttaatacaacacttttcaagtgtgtgtacatatattaatatatatatatatttacctgattatgatccagataggtttcttagatcaaaatgaatagataaaaaaagaaaaatactactttccttttcccctattgtgaactagatcagctctcaaattaatttctagctctctctcttaaatatactttgtaatctgagcatatataacagatttgtacagaagggtgatctccaaatgagggaaccctaagttaattataagaataatggagagagatctagagagagagagagagagagagagctgcaaagctcagtggctaaaaggtaatgggggggaagggagggaaatcaaagcatttagtggatggagagggaatggaggcaaaagacaaaggtaataaatggaaggtacactaaaaaagagtgactatgacactgcatctaataataatattattaataataataatatcaggttgtgtgaggatgtcttcattcttcattccagtaccctagcttactttttttcccttctatatattatagaaaagttattagcatatttatata

SEQ ID NO: 273828 - DNA, 870 bp, Cannabis indica
tttaacgaaaaaaaaaattaaatatagttaagtaaacaaaataaaaataatactttaatattaaatatgtattgtaacttagtggtaattgatcagccgacctcactaaattaacaggttacttatatatttaatatttatgataggccacttattttgttcttacaaatatataggtcgttcgttattttttttatatatatataataagtttgcattagttatgatagacatttcataagtcttttttttctttttttaaataatttcaatgcccaaaacaaaatgttaaagatttagttgcaatcttgctattttttatatatatatatatatatatgtaattgattattttgattttatatatttttgaatattttgaaaatatatatagattgtggtataatttttctaaatgaaaatgtctccattagttatttttggaaagacgttcactctcgaaatgtagtcatgaaggctttcttgtccttccgaaaagggtattcaggaaaagctagcctttctccaagatgatgttccaattggctagttgttcattttagaatgatagttctggatagttgactttaactagctctaacctatttgaaaactccttcagcaagtgcctttggtccatgattatggaagctcacatacgtttccggatgtactaagacttacactgacgtggagatctcactcaaaggaaaattaagttagttactgcttaactaacttaacaacttcaattcttgcagctactgactttaggatcttgatctaagcctgtaaataccacattggttttaggttttgtaagaagaatcttctgtagatgaagaagattcttgggtaaaagtgtgagag

SEQ ID NO: 273829 - DNA, 694 bp, Cannabis indica
gtatcgcttggttttgaacagccaatgaaatggggggaggaagagaaagttggggtcaaggtgaagagggaaactattaagagtgctttagaggaaatgttggatgatggagaagaatgcaaggagagaagggaaagagctagaaggcttggggagatggcaaagagagctgttgaagaaggtggatcctcacaccttaatatgacattgtttctagaagagattatgcaacatggcagtagtgatcaccaattagagaaataattaatttggagaaatttttgctttatggcaagtcattgagacacgtacttttttttttcaagttctaataaggtgttgccaaaatttgattgtatatgctggttggggtcttcatcaaaccgcttatgcagcacaaattgtctgcatcacactatattatacggaaaaacgcagtttaaaattctttacaatgcgcgcggttgcggtttgtgtttcgctaaactgtgtgatgctgtacggtttgtgattttgagttttataatcgcagtttcaaaaccgcacggtattatatattacaaaaagtctaaatttttttcaccaaattttcttttttttttatatattgaaaatcctggatgcttataaaacccaaccatacaattaagagataattacatgaaacaccaatttttgtaaaaaaatttacatt

SEQ ID NO: 273830 - DNA, 638 bp, Cannabis indica
ttaaaatacaaacaatgttggaattttccatttttagaccatttttaataatttgaaacgtttacccttattttgcaactaatataaaactactctcataatttatagaaatagacataaatattggtcttgcattaaaaaagttcatagtcacaatactcataacttaactaactaatctaaaactatttaaagatacaaaattgatgatatgcaaaaaaatatactcttccatgctaaatgaagtctttggttgaagacactatacatgttgttattcacagattctcttctttcgaatgagaggcgaaggcgtattcaacttcacgattttcttcgtctactttgacaaacggaaggctgccggggctttcttcctccataagtaaagtaatcggtgtttgtggagggtacttatccaagatgaagtcgatttcttcaccactgatttcgttctgattcagtagaacctacatttgcaagtaaatttagtttaattggctttttcgccacataacattatttcaatagctgttgaaaccgagctggtttacctaccttcacggttttaagtagcgctgcatggtgcctacgaagcaaagaaagtgtcttatcatacatgtcgtgtatcagctcct

SEQ ID NO: 273831 - DNA, 522 bp, Cannabis indica
tagcaacttgaattgcccaaatcaagttactattgagagagttatgctcaaaacactaaagggtgcaagacgagtaagacccacttatagaagaagccttgggccatcctcaagtcactcagcatgcatgcatcctaaagtcactcatcatgcatgcatcatcaagtcacccaaaaaaggcttcttgagaatgtcacttggccatgacattgagaatgtcactcagttatgatgtcgagaaagtcatgcagccatgctcgcatgcaaagtcactccgtcatgaccttgaaaaacttggtagagttttcccaagcaagaagggagtgaagcgacaagaatatggtcacaatgacaaggtaagcacacgagaagagtacgggcacaccttttgcaagctctgagtgaaagagggtacaagtagcgggtcttggaaatattttaccaggatctagatttactaacaagtatgtttcatcaacatcctaatatgaattctaaaacaataaattaaacacataaggg

SEQ ID NO: 273832 - DNA, 3922 bp, Cannabis indica
atatttagtgtaattaagtttttatgccatatatatcaaaacttatctttattttcccatatttttgtaaatagcccatgaatgtttgggtttgcagcccaaactacatttataaccaattcccagataaccattatttgatggaatagttttggagtaaagaatctcagtgcaaaccttccttcttcaaataccaataaagctgtgttgtctcatagaacatttgaaggtctaattgtataaaccacagcagaagttgttctagattagttcatgatgttgaattagtttttacacttgtttgtggaaaggtcttggtccttgtggaaaaattcaatgtggtagtgaagtttcaaacttgacaagagcaacattattgttttgtcttatcttagcttgttttgttatattagatagtgtgtcaatataacatggtaatagctaagaagaaaggaacaacacattatcatcatctctttattgatcaccaactggtttacaaagaaattacaaagaaagttctcttaggaacacaaacgagttacaagactttaggaacaaagcttctctctaagttctcaaagttcttgtcggaaactacattgatcttttgtgtgaattctcatcgcccctcgacagttgttatgcttgtattgcatgatgggggcctaagagcgggggaatgagctccttcccataaatctgtgttagtgaaataggctggtggtttgggctgaggcaatatgctcttatcacccaacattagaacgacagaagacatattaggcctatcaaacggtttttgttgcacgcacaaaaggccaatgtggatgcaacgcaatgcttcttccatgttgatgtgtggatcacttaacaagaacttttcaataagcttaaatgcattgccttctttcattaaagtccacgcctaataaacattataaaaatataaatgaaaacgagctaagaaccaatgtaaaatttaataaagtttttttctatgtacacttaccaatccagtgaggttaagaatgttatcttcgtcgtaaaggcctctacttttctttccacttactatttctagcaccaatatgccaaaactaaacacatcagattttattgagaatcggccatgggaagcatattctggtgccatataaccactacagttgcataatactatttgttagggtgcaatatatttatattaaagaaactaaaagaattttcaagatgacttactaagttcctacaactttgtttgtgtttccttcaatttggtctccaccaaaagttctagccaagccaaagtctgaaattttgggattcatttcttcatcaagtaacacattactagctttgagatctcgatgtataattctcaatcttgaatcatgatgaagatagagaagccccttagcaatcccacatacaattttgtaacgcttagaccagtctagtagtatgctttgcctttcatctgcaaatatttgtcatctacttttattagaacaaaattggcaacttatatatttatagaacatcacatgtattaaaagaggtgaaaagagtcttgccaaaaatgaaatagtcaagacttttgttggacatgtactcataaatcagtagtttcatttctctatgaatgcaataaccaaatatcttgacaagattccgatgttgaagcttagcaatcagttttatttcatttttgaactcattggctccttgtccagaacacattgatagcctcttcacagcaatttcttgacctccttccattgtaccctattatgtcacaatgacaataattttttaccatattaagaagagaatgatatattgagtgagaaaagcttactttgtatacaggtccaaaaccaccctctccaagcttattagcctctgaaaaattatcagtggcagtactaattgtatgtagttcgaaaaatggaagctccaagtcgtcgtcttggcttttgtttctctctgaaaaattacaagttgaagaatcaaagacaccaaacgaagcatgggatagtttcacatcaaaatgtagagaagagagtcatgttaccaaaaatgtgtgtcttcctgcaaatgtaaaaggcaatcaaaagaatcccaccacctaatcccatgatgatacttataatcataactaccctcttcactttcaccttcgccttctccttcgccttctcctctcgattaggatcagttcttgattcttcaaatataaacaaaagcaagcaatattaatagtcagatttaaccaaccaaaacaagaacacatgtgaaaccaacctatttttgaacttggtattcgaatgtgtgtattttgtcctccaccatcaccagaaggaagttgtctaatatcaaacagatctccaaaccagaggacacaattagtgttttctaatacaacactaacattagactcagagtatataaagctataagccatacaagagcaattgcttgagcatttactcttgcattcacttccattattagccttactcaaccaactatttttagtatctggcactctcaagcctacatactcacgaaattcttctttctcttcctcatggcaacttgcaagactgtataaactttcacacccttctgaccaagactcggggttccattcttgtggattatcggggttccattcttcttgattctttggcttaaaaccttccaaacattgacacattgggccatgctttatacttaaaacacattgtgaattagctccacagaagccataagagtcacactggtctactggtgttgtagcagaaatagaccattgttcgcggtcttcagtactcccttcccaacgagaaacacttccatcatcttgtaagacaagtattgagaccatggacttgttttttaggctgtagtaaacttcatcatcgttttgtacaaattcataacttgaattttggttggaacttatggcatcccacattccttgacgatacaatattgcagacccaacacgcacaattagttgaggatatgtatggtgttgttcatcaaactcaatcccataagtgattagatcaccatcacatgagtcaaaagagttattccatgatgataaacgcctattgagacctctcttcaagtcccatcccaatttcattcctggcaacaatgaatcggtaggataatcaaagctttcccacaagtaatttgtcgtgtttgcatctttctcatctctcaaaaccaagttaccattatccaaaagctgaaacaatggtttcgcggcttgtttagacgagtttgtagaccaaacaactactctcttatcatcattgtgtccagaataaagcacaagatttcctctcttgtctatactcaaggacccagatgatgaatcttgtatcggattacatcggtttgccacccaagctataggtccataagctgtaaaaattcccaggtaacgattgtttgatgatgaattagttcttctagtgaagaatcccagtccaaatactttttgtttggataccaataaaacagtgtagtcagtactgatattatctctcagaacatctgaaggtgtaatggtatcattctgaacctcagcaaaagttgttgtagacacagaaaagagtctcaaaacaagtaataataaggtaacaagagaagaaaagaactccatttgctgttagtatttggtttagtagtttgctctgtattgcaccatagtgcactgcatattaatatttggcttgtttgtggaaaagtcttggtcattgtgttgtggaaaaacagcatatacacttgctcatgtagtaggatatactttattgtaaaattgttcagattcaaattgagtaaataagtagtttcaattgtacactaattaatttttgttacttttctaaaaaaaaaaaaa

SEQ ID NO: 273833 - DNA, 1047 bp, Cannabis indica
tatatatatatatatatacagactttctataaatatctaaaacaaaaaagtaaaggaattttgtatttttacactaaagcggtttttttttataatatttttaaaaaaatacacatagcaaccaatggaatatcctaattcgtaaccaaaatctacatagcaacctacataaaactaccacaagaataaccactgaagcaacccaattttttaaaaaaagttaaaatatgatatatgtggttatttttcaaaaacaaaacacatattttttttaaaaaaattatgtatattgcattgtgaaaaagaaaaataaactaaataaattgatgaaaaaagaaaacactaataaatataattaattatataatattgataagaaaaaaattaaaaaataactaaataaaaaaacttagagcatttttaatggatatgtgaattaataaagagcattgctattgagtaccagtggtatctaacatcttctataagtagggtctcaagattgattaatgatattcccttaaaactattttttaaaattatatgagacacgatacttaattacaccaatagtggtatgacatcgaggagggtgctagacacccataatacttttaacaattctgattaataagtgaagcaaagttaaaatataacccatttagcaaataaagtattcttcaataaaaattttacttctagtacatataagttaacaatgactgcatcatcctaatgttcattgaatgtattatgatctaatagttcccatgaagaatgtaatatttcatcatgactttttttgtaaaaaagtctaatggttgagatatgttttgaaataatgtcttcactaactgtgaaaagggcaactatcgatcatcttcttattacaaccaactttaaacaatactatttaaaaataaataaataaatcatcaccctaccacacattaaacttctctcatctaatggcatttctaaaaaacttctctcatctaatggcatttctaaaaagcttctctcatatatactactttttaatttttt

SEQ ID NO: 273834 - DNA, 783 bp, Cannabis indica
aactaatccattatatctcgtaaaaaccatttttttttttaaaactatttaacttttgtagatttaggtcctttaattagttattttgttaaaaacattgatgaaaccagtgataaattattttcagtaaactttatttgaataaactaatattttataatttttctaaatatttatataaaaaaaattattacaaattttattttcaaactgttcgaaaatcctatacaacttatattatgttgtaaaataatggcgcacacaacaattttttaaagaaatttatgaaattttgtgtttgtaaaaataatgaagatcaataattattagttacgcagaccgtgaaatgttataaccagatgcacagttttgttctttctatatgtagattttgtagatgacaatatattaccaccgtgaaactttttttttcttttaaaaaaatataaatacttaaagatactagttagtatacattttattttgtttgttatatagttatttattagtataataaaatattaagttcgtataatttagtataataatttttaaaaatattactaattaattacataaaccacctcaaaaaggtgctaactaaaaaaaaattaaaaagtttatttattgtattcacttttaaatagctaaattagattataagttggtgaatctgttacaagttcagatttcagcataggcaaattagatatgtgcgggacgatgcaaaaaaccattttctcttattaaacttatactgttttttattaatttttaaaaaaa

SEQ ID NO: 273835 - DNA, 571 bp, Cannabis indica
ggaggcatggtgccttgaggattggaccatggacgtatgggagtccttggacgataagggagacagttcaaacagtatcaaatggggcatgattagaagcgtcgacacgtcagcttagtgttgacatcttgccacacatgctaccttggtcacgagtgactaggtgagtgacagtgttgagatttgccttatcatagtaagaacctatggacagtgcgagtatcttggctagagagccttgatccatggatgcttatgagcatgactcggcgggatttttcgagagatggaagtgtgcatgaggcagaaggtcgcgtgaaaaatgagatcattgttactcagatggttagaaggctaaccttggcttagagaagtcaaggtgctgcacgggtgttctgctgccggaaaaggtgagcccgtgacagttggtattagagccaagtttatttgagtgggaggtgaacccggttagcctatcctagaggggatgtaggcgtgtggaaggatcgagatggtctgaatgctggaacaagatatcgttaagccaattagtcttctaaagtggatcaga

SEQ ID NO: 273836 - DNA, 1625 bp, Cannabis indica
ttttggaaatggttaggtccatgcttagctattcaactctacctatgtccttctagggatatgctattcagatgacaactgacattttaaatgttgttccatctaaatcagtccctaagacacctattgaattatagaatagtcgtatacccagtttacgccattacagaatctggggtgccctgctcatctcttaagaaagaaagatggaaaactagaaaagcaaactgaagtttgcatgtttgttggaatttctaaggagactaggggtggactattttacagtcacaaggatgataaagtattcgtttctacaaatgccactttccttgaagatgactatgttaagaactttaagctgcaaagtaaagtagtattaaaggaaatgctttcagaaataactccaactaatgttccatcatcttcttctcaagtagaggattatcccactcccttggttgaaccaatgcaagtttatacaactgagaaatctaccaccaatgttcctattcagaaggtcacgactcctcatcgtattccctggttggtcatcctaggatttgtgggattttcttggacattttctctagcacgagcttcctcattcctcctagttctcaacattctaagccttccccaagactacctcgtggatgtgtttggtttagtgagaggtgcatcactgcgtgtcgctctcgcaatcgtagcctcgcactctaattaagtatttctccgatttgattctgctagtctctatcgatctattttcaaattccaccaaaggaacgtatctcgttggatcatatgcatcctaggtacgctttttagggatctcgtcatcagtttgtttgaatccccattcaaaaactgttctccccgagtgtggtttcttagctgtgttcgttccctgagattcctgaagctctttcccaagacactgagttatttctctcagttgatcattgtcgtcttgagtagtattttccatggttggaaaaaaagaaagacttgaatgttatttagggtacatagatgtgtcttctgagtttttttttttaaaactaagactctcgatggaagcaccaaactgttaacactaattttttttaatcgataaaagagcctaaatttaataaatatactttcagaatgataataataatgataataaatacttaacaagaaggtttttactatagtttagaagctaattcttcatagtctatgagcccatcttaaaatcaagatttgatgaatatatagagtacaaataatattttgtatattctcttaggatttagaatttggcgtcctttagtctggaaattcttccctactttgtaggtgtttaggggggacaaatatctctactaatcttatctttatagctattcgtgaaacgtgaataactcccacgtttcatatatacaacacatggataaaggaaataattgatattaactgcttttgtatttatccaaaacggttgtgctgactacgttttgtcgtgacgtggtagtacatcttgttttatgtctcaaagtatactacatggaatgactttgacgagctctctttggccttcttcttgcatttagctaatgaagtctttatataatatttat

SEQ ID NO: 273837 - DNA, 775 bp, Cannabis indica
gtaatatcgttcctcttttattttgctagcagtttactcaacagtcgtgttgaactcaaacttacatgctttgcaagctatcagataccaataggtttaaattaagttttgagctatgccacatattgatccaatgctaagcgggttcatggagaaaacaaagtacaataaaaagattgagacagaagtaattacaacacacaaaagcaattaattctcacatattgtataaaaagtgtcacgtggaatttgataaacaatttaatgatcccatttgagctatagtcatgtataataattgattttttatgagattaggtactctttatactgatgtaatctattaatctttttattattagaattacacagttgattttttcttgtgaaaactcacccaaactctcgtgtgttgaagttgaaattacgttaacatgcttagcatgtgatggttttgtgatcaaaatagactatacctctccactccagccagacgtacagctaaaccagctcattattatatagccaccttagcatttattgtgcggcccaaggagtaagtgtagactactctaaattttctttgatgatataatgatacatgtcatgtaataatgcaatgcaatattaaatatgcatccacatataacaacacttaataataagattattctgtttggaaaatctaacttggggtaacctcatcaattacaggaagcttactggggttgattaccaataatccaactatatgtaaactgattgctgctgtagt

SEQ ID NO: 273838 - DNA, 587 bp, Cannabis indica
gtaagtcttttatttttagtaacaatcaccccaatagtgactgctaagagtagcgcttacaaagtatgaaataatggtggtagctcataagatagaatgactttgactctcgcctaaacaggacaacactggattctcgtcttgatcgaatgaaatgttgatggtgtccattttagatgagctgactactctattcaatgaatgatatctttgactcttgcctaaacgggacactgtatcagtttgttggaaaccttagaaattatataagatgtgttttctttaatttgtattttcacatgtctttattacgtgctcaatgtatgataattactgaattgtgtatgaatttatattgaaccttcatgttgttttcttttattaattattgtagtcaaattttcgagtctttattgttggtctaacttaatttgttgtttttaatgggacaaattccaagagattgtcatccgtttgggaattacagtttcattaggccattaagaaaattttgcgacaaattcagatacaatatttatggctaataactctaagagtactggtcgaagctagcatatcgacattaa

SEQ ID NO: 273839 - DNA, 2926 bp, Cannabis indica
cacccaaatgtgggttcttcactcagaatcattgatatattaagtttttcttgataagttgattatgtttttatgttaacaactcattacagttattagtaatgggacaaagttcatgtacttgttccacacactctactatgtccttcattatagtataattcttgccgacatagtttccccacctcatctctttttccagttatgttgtcccttgtcaattattaacagaagccaaattaagcattttagaaagaaaataaaaatcaagaaccggaagcctgaaatttgttatcagtaatctgtggtgtactttgcatatgaaattttcagtattatacctagttttggataaactgagaggctaataatgtgttgggggagaaatagagcacagaaagaaatagcttctcaaagcagaaaatcttctaaacacttacagaaggcaaattaatgtatttacactccatgataatgaaaaaaacataagataaaatgaaatttctttttaccaattacaagaaactactaagccttttttttggctttgaatcaatggaatccccttgagcctctggactgataaagctccaacctactcttggcctcttgtaacaatgtttcaattgcttcatcttgggtcacataagattgttttgttgcccattcaagaacagtgagcacctcagcctgagcaagttcttcgctatccggtacatgtagtgcaatgtagcatagtaaaaccaatgcagatgtttgaacaatttgttcaccaaaatacacaagctgaatcaagtgctttgtccctccagcattaattatggctttgcaatgatcaaggtggaggtagtttatggttgctgcaaattttgttagagcaattgaagcttcccttgaaacttcagcttctctttcatcaagcaaagtcaccagtgggccaatcattcttgtctccgttgctcgaaatgtcctagctagattcccaatagctttgatacaaggaatcaggagttctgattcttccttctcaatgatgtttagtaactgatcaactacagctttgcaagcgggagaacttggcttgaatgctgatcttctcaactctggatccttctctgccactgctgtgatctccatcaacgccatggccgaagtgtatttaacatcttcaggacctttctccagtagaactgcaaaacataacaaagctcttgactctgtaatactccgacatataggcgagttccccttggcaagatgcaaaagtgctcttgctgccatagctttcatgttggccttagttgcagggtcttccagttctcttcccttaatgctagtacctgaaagtgaaagattctgctgatgattttgctttgtgttgccattgttgttcttcacctgattgttctggtttgcactattattaatctgttggagaggtttggaccctgtcttcaaggcaatggtattggtaacaacattatacatctgactcgggcttcgattacccaaaggatgagcgatttgattctgattctgcttgtcatccccaccattagccttgctaccgttgttggtgttggaattattgctggctaccacaatggcatgaatggatgttgttttgttaacagcaacggtgtacttgatatgttcttgaacagtttcgaaagctagatggctaacaagcaagcgaataatattgttctgggcaaaaagatcttggcatttcgggtagttagcggctagctcagatacagcccatgctaccatggcctgaaccttcatcggaccgtctttaaggattttcgcaaacacagaacaaacaccagcatgaatcatatgctccacactttcagggtcacgaccaagcagtccaattgctctagcagcgttctcttggccctcagcttgaccatctttgatcaatttcaacaagggtccaaccccaccttcctctatgatcagcttcccataccgatcattatcccgagcaagcgaaaccagtgaagccgcagcatcggatcggccttcaagcgaacccgtgtaaagaattgctatctgttcccatatgaagcatagaattggctcgttagccgcgatgggaggcaatcctaaatacccatcgtctcgagcatcggcaggggccgagacacgaaggagccaagacacatcccctatagagttctccaactgggacgacatttttcggaatgccgcagctggaataatggtgaaaactcgcttcatgagtccgttggctcgacatttgatggctaaagagagagccttgtcgaggacttgttcagtatcatcgatgatccgtcgtgtgggtcgttcatacaggtcagaactggctcgagccgcctggcgtaagagaccagctagcttttccgtcttagacttaagctccgtacactcctgcttaaaagaactagcttcatctgctgatttaatcacttggtcagccaattggatcggctttgctaggatctgtttcactatgtccgccatggctaccacggcggactaaggtaatccaagttctggtgtttagagagttttttcttttcttttgggggggtctcagatcaagagaagagaagagtaaagtgaattttgggggaatctttttagggtcgtgatagacggagatgatgatggaggcaggtgggtctgttgagagaggtgagctggatattattattatgtgaatttgggtaatggcatttatacatacaaaagagtcatattgtggatttaggtctcttttgtgggatattgagtgctttaattgcgactcagtctggcgagcgagaacaatatgtgtgtagaaagaaaagaagggtcagggtcgacgggttttacaaggtcaaacgcgttccaacacacaaccttttataagtttatttatataactctctct

SEQ ID NO: 273840 - DNA, 705 bp, Cannabis indica
ttattgtaaattacataaatacctttagcaaatattattaaaaaataattataaagataaaatagtaattttataaattaataattatctattcttcaatcacttcatccttcctacctaccaaacaatataaaaggatcattactctcctttctctctctcttatattcaatatcttccatcaactctccatccatctaactcttcatccttcctaccaaacataaccttagtgtttttatgccgctaggccagcccaagccaatcagtagtcttgggcttaaaaagttcatttaaagcacaccccaaacgtggagcagggggttgaaactcaaaattatttttttctcaaaaattcaaagatttctttttaattattgttattagattattttatgaatttgtttgatgaagtagtaaatgatgatgatgaaaaatatcataaaatgatatgtacgaggatatgattatatttggtatatttttgaattataaataaaatgtagcattttaattttagggtgtttctacaatacacttctttaaaaaaggtgcatcgatgtacttctatttgtttcggtatacagaagaatatttaaggcatactgcaaaattttaaaaaatttaaaataatttacaatgtagaaattaatgttcaaacagtctattttatatgcttataatttcgttaaatttaacgatgtt

SEQ ID NO: 273841 - DNA, 990 bp, Cannabis indica
  modified_base (52)..(52): a, c, t, g, unknown or other
gtgtctcatatatttgagtacaatggctgagctaattcgacccacaaatacngaacaaaaaaccagaactgatagtaaatcagggcctcagatgtcaagtacgggcccccgtactaacttaggcacaggttgactccaaagatgtcatggtgacatcctaagtttttcgttctagtttcttgggtcatttttaactaatcacttagacttttgaaggatgaaacttggaaacaattctgcattatctgagcctcaatatggttgcccccagtgtgcaggtgacactttcctattgtgggatgtagggtccaggttttttcttcttgtgctacgtgtcaaaaatagtgtatgcatcatcaacctattttttgctataataattaaattatttaaataggggtcctaaaatttaattttatcttaggtcttacattccttaggacaaactctaataatatattattaaaatatttatttttgcataatttaaatcgatagatcccttattttcaatttaaataaaagaggagtgacatcatcaaccccatattacaatcttttagtcagcctctgtgcccaaaaacacagacaatttttttttcatatttggtttttattacggtgttcgttatagttacaacatcatcccagtaaaattttttaaaaaatttaacattttacagtatcgaaaatatgcttaaagttttttgagtatgtgttgtaaactggaatatgatgaggaactctatttttcggtattgtaacttattcgaatattttcaaaatttataaaaataatattgtaactatagaatataccactataaataaaaattgaaaaaaaaaatattttagtatgttatttgggcatgaaagttgacaatgagattttgataaatgaaaccttatatgtatcatggtgtcatggacagtggtagacccaagatttgaaatgagggggatttaattttttttggcaagacaaggagg

SEQ ID NO: 273842 - DNA, 1094 bp, Cannabis indica
aagcaaccagagtggcgtactcgtgtataagagccattcattccgtaggtgtaagggcccaatggaggcttgaagcggggacgttacatactccctgtcccgacagagactcgtttagaattttatataatcttttaataatattttatagtttatggtttatatttatacttttttagtatatattatcattttacaaatttttaagtgtgtttaaaatataaatatgtgtaatattttaatttttatctattttaataattttcatacatttaaatttttattataaactataattttacattaggagattctccaccttgtttttggctgattagggaatttttcgctcccgtctccaaagaaaaataaatagggatggaaattaaaattcttaatgagaatgaggacgcgagagcactccacactaattcggtgcctgtgtatgtggatcccgacttgcacaacaataaatacaatttttcttattttaaacatgttctataaaaaaaaataaaatgtagtgttaaatctgtatggcaatattatattgacacttgacattataactattttttcgatatttagttttctttttaacaaaatatatagtttgtactttcttgacaaaaaatatatttaggactacgattagaattttttccacaatatccaattgttttattactatttttttgtatggagttgatttattattattggtttttaaatttcttacaaataaaataaattagtacaagaatacgaatccatggctagacaagagccaagttttgggtcaactatgtatgttgccgcaagttttgtgctatcatatagtggataaatgataaagactacttgactgtaacagtggaacaataataagaagatgaaaaaaaatcccaaagtgatttgtgggttcgcaatatttaattcaattcaattcaactaaaccgattcaattcaatttaattataattagattgaattagatgctaaaagttaaattctaattagattgaatcgattattaaatgtcaatctcaaaattaaattaaaaatggatcaaatcaaattacatttatatatat

SEQ ID NO: 273843 - DNA, 569 bp, Cannabis indica
taacaccacaacggaacaaaagcccccgacggaggaaaactcggaccccctcagacgagaactccgacggaaataaagggcctagagcataaagtaagaaattgataatttcaagaaggcgatgccgacggaaacgacatcgttggatttagggagaataatagcattaaaacccactaaaagtacagacacgtgtaacacgggagttatctattagaatacgaacacgtggcagggggcaaaaagaataaaagaacaagaacacgtgtcaataaggggataggaggatggtagatcgtccatgcaaaaaaaggacgtacatataaataaaagaaagaggacgtagaaaagggaggattaggaattggaaaaagaaagacccccaaaaagaaattttgactattttcgaccaaaacacgtatctatattgtggaacatatagagcgttctatatgacagagagtgcaattccaagttatatgcgtggatgcaacacgaaattaataagttagtgaatttactttgtaaattcttgatctgcttattggaagctctgttatatagtccca

SEQ ID NO: 273844 - DNA, 1042 bp, Cannabis indica
tttattttaaacaatatcttataggtatattatattatatatgaatttgtaaaaaaataacaaaatattcttctcatataaaactacatgcatcttacaattttaatacagtattaaaaaaatacatgaaataaatatctaaatccaaaaacaaaaggcaaatcaagaaaaaagaactgaggaaaaagagctaccaaaaatctgatcaaactgatcagaagaaaaaaagttatttataattcgggaataatgagttaaaataattaagttgcttataatcaaagtgtctaaaattagtgaacaaaaaataaccgcaaacttaaataaatattagagcatcttcatatattttacaattaaaggtattagtcacaaaaattacaattagtcaaaatacttgttgtgactaaaagtaaattagtgacaacttgtgtttaaatattatgttttaatctcaagtaattttttgttgcgatcaaaagtcacatttaatcacaaaaaatttatgttgtgactaaaaagttgtcactaaaagtaactattttttgtagtgattcacactatttactctaatagtacaccaaattagtatgcactaaattttacatcactaaatggtgttgaatttcgaacttacaccaatttggtgcaaaactttttttttttgtattctaacccttattttaatttattttaaaaattaatcttaaattttactcctcaaattaacatttatcacaaaaataataattaatttaaaatactaatatattgtaaaatataaaataataatttgataaacaatattaggtgtgattttatttaagttttttttttttttaaatgtaatgtttaattgatttaataaattaatattttattttattaagttattttaatattcaaatactttagtagtagtcatgatatatttatattatgtattaattattttggattattaattaaataatatgaaatatactatttttaggtaaaatatatttattaagtaagatatttagtaaaaaaaaaagtaaag

SEQ ID NO: 273845 - DNA, 1247 bp, Cannabis indica
taacaaatatagataactagtctaacacaatatttattaattcacataattagcatcagaatttgactcaaaattttcaaaaaggtaaaaaatttatccaacttaacacaagaatatacgcagtacccccaactaaaataagacagtgtcctcaatgtctaaatatgtatatgataagaacatgagatgagaaatgaaaaaatagagaatatgcacagtgatgattttctaacaaaaacaaatgatagaaaataaattaaaatactgaaaataaagaaagcaattaaagataggaccagtagtgaaagaattcactaaccttggtaaatcgggccgtgaaagtgcgtttcctccccttcaggtggtgttaattctaaaaatggtttcaacctttgaccattgactttgaatacattaccagatttaatattttcaatttcaacagcttcgtgaggaaaaacagtacgaacagtaaatggaccagtccatttagaatgtaacttatcgggatcaaaatgaatgtcccaatcaggaggttgaaataacttttgtggtccacagagtgattgtgattctctaggaattttcacagatcgatcggctaactgaagtgtcgaagatgttggtttcaattcccctagaccaagttgcttataaacagaataagacaacaaattcacattagctcccaaatcgagtaaagttttgtgaatcacatgatcaccaataatacatgtaattttgggacaccctagatctgtatgtttaacaagatttttatattgaattatggagttgacttgttctgttaaaaatgcttttctcggaacatttgttctgttaaaaatgcttttctcagatatttatacttacttgcttggatacctctaagatgtcaccatactgactacctctttggattgggagcaatctttgtgggaatggagcttttggaatgaacgacaaagtttgactcgattcttcaactgagtctttggaatgtgagcgttcaggctgactcttttcattttctttgaatgagtcagtgttcattttagcatcaggttgaggtatgtaatcaggtttttcaatgatttttctagacctaaggatagaaattgaattagcttcttcaataggtctagatgtacttacctcatactgagttgactacgaagttttcccttttccctttcaactacagcagtagcaagctgacccatttgtgtttcaagctttaataggga

SEQ ID NO: 273846 - DNA, 912 bp, Cannabis indica
actgtaatttttctctaattttttcagtacagactttgtgttaatatactgctaaaaataaatactggctttatgccgattaccaacttaagactttaggtatttataccgctatttacccaatacattaatatacaattatgctttcatatatatagtagttaaagagagtaaatttgttaagatgctttcatgtttcgaatccatttactctttttttctatgtgtatctacattttatttattaaaaaaactaaggaagtataaaattcaaaatagatttgaacttatgaccactagaataggaggatgttgctaaatcatcattccacttaaatttagcttgtaaattattattttggattatgttaaatgtataactaagcccaccctaaaattaaatcctaggtccgccactgcttccaaattacggtagaagtagacttctgttctttccgtttaaaaaattaagttgatgtgacagttaaaaaaaatattttatggtattttttatgaataggataattgcagcaaaaagtttctaaaaatttgaagttgacgcagattagttcctaatcttgaaaattgatggtgaaaatacctaaggtcaacaaagtcgtgagcccgttcatacccagtgcattaatataagtagcatgacacgtgtactcttaagtgctaaaaataatgccatatgttaaaagctcgttagtccaaattataatttcaattaaattaaaatgatttaaataataaataatttattaaaaaataaataaaaactttaatatttttctttttcttttagttttcttttttttattatttgtttttcttcctttcttcttcttctacggagacccagtctgttagtgtaagcttctttttttttttaaacttctttgtttcttg

SEQ ID NO: 273847 - DNA, 712 bp, Cannabis indica
aaactaagcggtctttacagtggccctccattaatgttctggtgaaggaaccaaatttcctcactatagaattcagttgctttggtggttataggcgtattcttattggccagccttggcatttcgactacaaactcattgttatgacaccccttaaaatcggataaacaatcactgtcgacatgctcagctcaacacccttttggatccaagtctttgaaatcccttttcttcatcggtcatgggctttagcgcgaaagcttagtgagattctcggtcgctttatcgaagtggacactgcctctcttaaagaaacatggggcccttatctttgggtgcgaataagaatcgatgtcactcaaccccttcctcgtggaaccggtttccacttcaccaatatggctacccctatttggcttgagttttcctgattttttccattattgcggaagactaagccatattatgaatcattgtgctgattttttggccaaatgtgattcgtcttctgttccccccatgctccgctatgatcacacctttagagctaaagtttgtatcacctccaatccattctatattgaaaacacacacacaacacttcgtccccacatacgccatcatcaccttatgactgcccaccaacttttccgtctgtcacaaagacaggccacactagctcatccttacaatgcactaacattggactatg

SEQ ID NO: 273848 - DNA, 1268 bp, Cannabis indica
aaatactttaaggaaaaaaaatacgttcaatttataatataaaattattttaaaattaatatatcattatattcataattagatatagtcataagtttatccattaactaataattgatatattattaatgtggatgtgagttatattattataatactagcttggttttgatcaactcctcatggggtggttgtatggctccatagctgaaggaatagcttctgaagtcatcggttgtcaatcagcctatgctcttttagaatgcacttgaagaactctatggagctcactctcgaggcaacatggatgacatcaggatcaagatccaaactacttacaagggatctcaatcaatggctgagtatctgaaaatgaagaggatgtgggtagaatatctatctattgttgtgcttattgaatctcaaccccatacttcctggcaacaacttcaaagtaccttgctaagttttgatggtagacttgagagactcaatgtcatatctaccaacaacaagcttgtgggaaatgcttcttcaaaccttgcacacaagccattaggatcaggaaatatgcacaatccatgaagctataagaggcaaaaccctcatcagaacagtggtaggggaaatcagaaccatactatgagaggtggtggatacagaggaagaggtcgaggtggaagaggaaatgggtctaaaccaacatgcaaatatggccactcagtagttgtgtgttacaacaagtatgatgagagttacatgggccataaacccaacacagagactactcaacacaaacaatactcagccataattgctacacctgagatgctcaatgatgacatctggtatgctgatagtggagaaggaaatcacctaacctataatccagataggatgcaaactaaaactaaatatgggggtaaggaaataatcactattggagatggctctcagctgcctatctcacacattagtactggtatcatcaagtccaattcatacatcccattattactacataacatgctcatgttcctagtatttcaaaaaaattaattagtgtttcaaagttaatagcagttaacaatgtctcagttaaatttttctctgattgttgttgtaatgatcgctttagtagtttaaattagtaaagacaattagcactaatttcagttatttttagaattatttatgaaattaatcatttgtgagcctcattattagaaatgagcattagagatataatttctcaatttcggagattt

SEQ ID NO: 273849 - DNA, 1512 bp, Cannabis indica
gtaaatatcccttctttctacccatatgcaggggtctagttcatcatgatcccaggccaccccttgtgctagccaagcgggtgcctcaggaattggctcttcaatatcttctttgaccttaaaaacttatctggtcgggacattgcagcacttttgcgcgcttttttgatcacccttcactatcccaatattttcgctatcacagggaaactttatgcacaggtgcctgatggaagttattactccgaattccactatgacaggacgtcccaaaatggcattgtaggcagttggacaatccaccacgacaaatgtacagtatttgaaagcaatagaagtattgtttccggctatacccctgttcaatgtgtctgggacttggatcttccccatgggaagtagggagtcttcattaaagccttggagttggattgaacagggtgctagtttagcttcagttaatccaatggcttgaaatgcggccttaaacaagatattgaccaaaattccattgatactcatttattggcgacttggtccttaatcaccgatggatcgttatggggaaagtgaaacatgttttgcatcttcttccgtgaatgtgattggaaaaatcagcattcacgacatttgcgctggtgcttgcactagtgcacacattttcccttcatatcaaagctcattgaggtatcctttctgagtgtttcttgtacttctagtgatatgcaggtctctggatattacagaaacatgaccatctaccggcagtggggcagcccccagcaggtaaggatttcttggtgcaagagcatggacatttgcgggtgcttggatgtttgggaacccctaaggagcctagattcccagagcttgttggtaaaccgttccttgaggagaatttatagctccatgatatttgggaatgaccaattgtccttgaaccagcgttggtcctgggtagatgattagaatcctcaagctaacagttggtcgcctttagctgttcccactccaaaatgtgtgggaaattttaaggataagtgctttatcgagctcactacccccaatccaattaatgctgggtgacccatcaacacgttatatacgaggggatgttaataaccaaaaactcttgcatttgggtcgcaaacaacggtgcttcccccatagttaagggaagctcgattatgcctaggctcgcgacactgttgcttgtgaagccacacaaatttaccatacaaggtcttagttttgcctcttctaatcccatcttattcaacgtttccttataaaggatgttgatagagcttccgttatccatgaataccctctttattcttttattagcgagttgaattgttatcacgagaggatcaacaagtggatatcgtacatgctttgaatcttcttccgaaaagatgattggtggtttatttaactttgctctcttttaaggttctggagtgaatattgataattcatttttcagttcattaatgtacctcttttgtg

SEQ ID NO: 273850 - DNA, 538 bp, Cannabis indica
aaagaaaagaaaaagtaaaaagtattttttttttttatttttatttttattttttataatttttattatatttaaagttaaaattacgtggaccatcaaaattttgccacatgtactcttatgtacacgtaggtagttcaccgtgacaatttaattcgacttttggacgaaaagggtaaataactaacagaaaaagaggtttgggtattttcgccaccaaaaaattaatttaagtggttaattgttaaacaataagtatatgtggttttgccgctcatatccctatttaaaataatactatatttagtatttattatgtattaaataatacgattcacattgtattaaattttatagtggtaaattctaattaatacaatataatgttctgtctaaatataatgttagttaatatttatatttaataggataaatattaataggataaagttatagatttgactctttattttgttaaatgataaaatagaccctgtgttttttttttaaatggtacaaatatgatcttgagctcaat

SEQ ID NO: 273851 - DNA, 1078 bp, Cannabis indica
tatttttctatcttttacatgattaataaaaataatataattttttcagatattttgtagtttatttaaagttaatttatgaataatttgcatatttaacaaaattgatgtcttattattttcttttaatttatagtttgttttttttttattatttttatatatagttgtttttatattgttgtttatgtgttctatagttgttttatagttatttttttgttatttttatgtttttttgtatagttgttatttagtttagggtaaatagcggcataagtaccaaaagtttcaagtttgtaagtggcataatctcaatgtttatttttagcgacataagtaccaaatgtttataaaactataatttttctctaactttgtcaatacaaactctgttaatttcttaaacagtccacatataaggtccaaattcttgattattgggtctagacaaaaacgtgtagtactatttacttccaaatattcatttaataaattcaaaacggagtctgtaatgacaaaactagagaaaaattacagttttataaacattggagacttatgccgctaaaaataaacattgagtttatgccgcttacaaacttaaaactttgagtacttatgccgctatttaccctttagtttatgtgcattttttgtcgtgtatattttttgtttattctagacaatatttttattgtatatatgtgtatttgttttgttatttttatgttatttttttagttatttttcaaaaagaaaaagagaaacaaacatgctaaaagaataaagtggtaacaacaaataccattaaaagatatacaaaaagataaatcaagttgtcaaaactaagtaaaaaaaataccatacaaaaatatgttgaggagttgatattattttgcttattgcaattaggtcaatggtttgttattattttgttactttgtagttatattattgttgttttatacttgtttttatgttgtttgttaagttattctaggttttttttttaattatttttagttgtttttttattttttttattttacttgttatgcctatattttgagccata

SEQ ID NO: 273852 - DNA, 859 bp, Cannabis indica
gagcaatgctcacaaccatcaagcctcacattagaaatgttgctaaacgaatcattcccaacccaattggggaatttcgtgcttggataatgaagaatttggagcaactttaacattgtgttgggtgtaagcatttcaagtacaccctctccatgttttggatcgacaacaacgttattcaaactccatttcaaagtcaattcctcaagttgaatcgtatccagtacatgcacttgatctgatgcttctgtaatattcaccacattttccaacttctcaatggaaagctctccatgtagactgtgaagttctaacaattcttctattttagcaccactatccttcccaacaacaaaagttgtcaacagttgcaaatttgtcaatttacttatttgtcttggcatctcaactaggctatatccactaataagaagatgcctcaaattaatgagatgatgtatatctttaggcaaagcttcaagtttatgacaagattctaacttcagtgtctgtaagttgtacaacacacttatagattcgggcagcatcacaattttagtgccagagagatctaaatagcgaagatgtttaagttctccaattgaatgagataactcagtcatatgagtattacaaaaagatagaactctcaaacttttcaacatcggtagaagattatgcactacttccttagaaatactgatttttgaatatcttgaacctagtaatgttaaaaaggttcgcagacgtgtagcttcaaaatcatagttagatatcttgttatcagtataaagttccatgacacatccaaggtgacgtgtcttcttctcaagcccatcaatgtcgtcattttgctgta

SEQ ID NO: 273853 - DNA, 540 bp, Cannabis indica
agtatttttagaggaagaaaaaccgtacataatgaggttctcgaaccaatcgagaatttttgaagagaaactacttttgttaggttttggattacaccgccatcataattgtcgttgttgttgtagctagatttcatcatgacgctaaatttcgacattagttgaagcttagtgatcatacgtttggaatgtaacgtacatcgttctataataaatttcattttttttctttttctatcattttctgatagtcgataactattcgtagatattattttgacaccaaaagaaggctcaagccaatgctttatttttatttctaacattagaaataattttatctataactacaacatacatatatttcattatatagataaaaatatttatacacacattattggtgatatgatgagattcattgataattttattaatgatgatcaaccaatgtggttgataataaatggttaggtaagataagtgactttgtaagaaaaaaatagatatattatttaataaaaaaaacatgtttattaa

SEQ ID NO: 273854 - DNA, 1227 bp, Cannabis indica
tgtatattcatatatatatatatatatatatatattgtgatgatcaaataaataagaaaagaaaaaagaaaaaaagagaaaaaggaaagtttggaaaaatttttggaggagccggcggcgccttcatacatcattacaaatatgacattttattacctcctccattattatacctatctatataatatatatattatcttcttaattattacaattaacatgtgatataatatctaattaagttcaaatggatcaatgatattaataatattaatattaagtgtacttgattaaattgcatcaattgaatggtattagattttttaaaaacttatgttactatagccgagtgcggctacatcctatgagaacataatatatgtatgtgtttaataatattattattattattaaggcacccaatgtggactgttataaatgtcttaatttcattatgtattttttacatttaataattttattatgttttgggatgggaggttgtggtgtggtggaaagtctagtctatagtatgtgtactgtatatgtgtgtgttctattattattaattatattaattatcacgtgtttggcgactgcactacccacattactttcctagaaatatcatacaccataaatatctttccacattattaattattagtatgtgattttatttatttatttttggaaaaaaaaaactattcttcttatgtttgttttatatatgactgttttgagttaattaattatttagggtgtaagagaatcttgaccacttatgttagaacaccccaaaacttttcttacattatttttttttgttggtagcaatgttcttgatgctattaatagtcgatttggttgttctatcttaattgtaagttttttttttcattcaaataaataaataaataaaatactagttcgaaaattggcgatatattaatttctttaatttatttaatacatagtctaataatatattattatgtgttttgaattgatacttaatgaataaaacaatatacgactgcaacaaaatcataagataaaatatttttgttactacttctttattagggtcatataggtaacaattataaatattaaagagatttcgcaacaaatatcctttaagaagttattccacttcttagtgcatctacaataatagtatttttaaaaagtctaaaaaaatttatatcatctaaaaatataata

SEQ ID NO: 273855 - DNA, 3284 bp, Cannabis indica
tatttccaccgaatgtatatattgagttaaaaatatttaaacacgacccgtctaattaagaaataaaaaaaaacaactcgcccaataattttaattggtttggttggattaagacctaacgctatccattaaacaatcttaacctctcttattggaataaattttccctcccctgcgagaaagactttattatagagaatttacagtatctaaagtgactcacaatattacaggactcgcgatattaaaggtacctcgcaatattaactggaagtaatcttgctgtatcaaagaaagcacacctcacatatttaataaaactgcaaaaattgcagtatcaataagaaaaggtgtgaattacaagttaagcattcaaagtacaattaagacaaacgttacatactatctataagtagggacttctccctccattcaaaaggtactaggctgatctgaataataaaaatgcagagcaagagatctcttttcaagagtggattgggcaagccgagctcgaagcttctactgaactactatatattttgtgtttattctataatatttacatacttgtatataattatatattatattttttaagtactcgcatatttggtgttgtctaaatttctccgataacaaactcaaaattatatgttataaaacgttcagttctaatgaaatatagcaatggaataatatgaaacaagagaaagctttaaatttcattccctcaatattagctaagaactataccatctcattatacaaatgttataacaaattatagccaaaaaaacttctatacacaaaagaagaaaaaggaaagaagacatcatcatgcccttgtcttacaatttaagcaaaacttgctcaagaaaattgcttcttcccctcatcggtgccataaattcgttgaagttcccgagttgcagccaaaaaggattctgtaaaacaaggaaatcaaatgacctcattaacttatcatgtttagaacgattttcaattcgaatgacatgtagcttttcttacctttccaaagacgaaatgacttctgattgataggcgaaccggtaatggtttgaatggcatcaaataacatgttctgaggtgtacttctgagttcttgaacaatcccatagacagttttaccattctcgaaataaatatggttattcgggtgttttgttttgcaatcagcatgacgttcgaattcatatgcattgatcacctacaatgaaatcagcagtcatctaagaactcatagctcgatcggtctcaaaacttccctcaagaaacaaatttaaatcaaagcataccttagtgaaattacatgactgacagccacatagatatccagcgccttttataacgccacgaagctccttctaatatgcataggaagagccaatacatgtcactaaacataagctaattttaaaagtaccaaatgttatgtaggtacccaagagtgactcgagttttagcccctaccaattgtgttacccctcttagttctaaacataagctaattttaaagtaccaaatgttatgtaggtactcaggagttactcgagttttagccccgaccatttgagttacccctcttaataagctaattcgaaagaaaggcattataacaaagtaatgttttttacctcctttgaccaggcaacatacttcacaggcactccatccagcataccagtcgatagcaaacttcgaacatttgaagggaaattgttcggttgagtcttcttaaggaatttgttatcatctttctttttcgacacactttctgcaacagaattagttaaatgggaagtagtgagtacttcagcatttgagttagcaatctttttctcattcatttcttccatcttttgagccatcagcaattcataactcgaaaccagtctatcatcatcataccctccaaatgatatgatagtactctctccattgttaaaggaatgtcccgagttgaaagcatgactcgtcgatatactactctcttcctcaaccttgttgaatgtttgatcagctgacataaaacgattatctgataagatatcattatcagtgtccctactataagcttgtcctatcgatacaaacataggattctcagaatccttaacctcactcactttaactttccttaacccaccataagtaacactcgatctaggatcatcaagggcatgaggcattgacaaaccgaacgaggaatcattattaccaaatgaatcctcctcaacttttctctccaaattcattttccccgagccatcaaaccccacagtcttagctgtctcgggttcatataaccacgaatgaaaacccggaggagtactactccaaggagaaacacaagcacctgtgtttaacatccccgaaaagggatgatgaacaccattgggaacttctatagcttgtttcttattaggaacaagctctacctcaggatggccttccacgaaccattgttgttgagatctcttcaactcgattctcgaagaatcatcatatgccatctctccatcattaccctttgccacccaaaacccttgattctaaacaaaacaacagagggggttccaaatcaacaaaatttagaaacacattctatgtgtcctcaccaatcattagttacataataagcttacaatatgaaaccaaaaatgatacctttttcatgttacaaattttagtaactacaaaagcttacaactttatgtttgtttttgttttaaactagggtccctcattaatcttagatacaacatttggggacaaacataaagctacataacaaatactatgtaggaccacacattagtatttggggaccatttgaactatactatatactctaactgagactgcaataataacacagcagagaaaaaaaaaacatcattaataaaaaaaaaactcaccatattttggtggtatcacttcaaatcttcaaaaaaaaaaaaaacatagaacaagaacaacaagagtagtcaagctaaacttccctgaaaacaaatgtacccaattagaaacataaatctttacaatttcaaactcattcatttcagctgaaaaacataaaaagactgaaatcttttcgtatagagctaaacaagatttgatttttattagttaaatggataataggttgatttcccaattgtacagaggagaagaaaagtaaagaatcgaaccttaaaaggaaaagggtatgaagatccattgatgggagattaattgtacggaaaaggatgttgttgttg

SEQ ID NO: 273856 - DNA, 931 bp, Cannabis indica
agaagagctcaactaattcaatcgttttcttttgtctcagaatgcgattaaagagatcgataaactctgtaggaatttttttgggggtgctgagaaaattttagcaagcttcattgcacttcttgggatttgggagcaagtgtgcctttctcttcctaagaactacaatggtattgggttcagataaggaaggaaatggaataaggcaagctatctcaactaagcaagactttctttgggttaaatgggttaatgacatttacttaaaagggccatctttttagaattatttgattttggagaaaatttgtcaagttaggttgctatatatatgaattaattgttgcaaagcatagatttatattttggcaagcagtgaatattcttgtattggcttagaccctacaacattttgggggcaaccgaaaggtcgcttttaatagtactggaaatcgcgcctaatgtaaattaagggcggcctgtcctgtttggctgctcgttttgagagtagtgtcatgttgtaatcttgtttttttgtgatgaatgaaacttttttttttcataagaaaattaggacaaatgtatttttcaaaaaacaaatttaaatatgccttagaaaatgcatatatccttttatatttataaaataataagatttatgatactatatattataatcttttatacaaattaattaagacttacctgaatagtagctggagcaatttgtcgaattttcttggattgaaaataatcccatttttgattatctttagctttccaaaacttagaagctgctcttggattagtaaaattaacaaaggcatatcctttgttaaaatgagttctgataagtaagacaaaaaacacatatattattacaacattaaaacactcactacacataaaactaaccttaagaattaagtta

SEQ ID NO: 273857 - DNA, 589 bp, Cannabis indica
tacgtaactaattaatcaaatattgtacagatgaagagattatattctcattaatttttatatatatatatatatatatgtatatatttatataaatgagatcacagcatcaaacaagctggattctctgacttatttcttcattaagatagccttttggttcctaggtactcacatataagtatactagaaatattatatattgatgtccaattcccggtgattattgatacaattagaaatattatactcttattttgtcatctataaattaaatattatggtgatgactttactcatatttaatgttgaattatccaatacacaaatatacatttaaatttatggaattattttatatattttttttatatttttaaatttttttgaatttttttaaaattttgcatgatgtcttaaataactataacgtacatgactatgagaaaaaatttgattgaaaattattttgataccaaacagataaaggtattgcatcagtgcatctcttttaaggagttgcattgtagagttttctaatactttttattattgttttcagaaaaaaaaaagtaaaattattgaaatt

SEQ ID NO: 273858 - DNA, 823 bp, Cannabis indica
agtttcattcaactcagtatatataataagaacatacttgtcatgctttttctgcttctttttattcttggatgattctttcaagtcatcctctcttttcgtgtttgaaccactaggattgtcagcttttatcgagactgtgcttgctgttgccacggtactcgtgcgaggtttacttcctgagccatttttcaacagcttcattttatttcttgcttcctccttacgcacaaatactaatctctttcattgaattcattaatgtttctcacagagcgaccctagaggtcatcccataattcaccttcggccgtggacaagtcagttgttattcttgcttaaagtactgtcaattgaatactatcatttaggtttttgacttttgcagcggttgtgctaaagcaacttaaataagccttaagtgactcgcctggttgttgttttatattggttaaggatgatgcttctggtcgtcggtctcttgcagcttaaaattactatttaaagtccctagacaattgttcccaggatgttatggaatgatgagtaaatttttcgaaccagctgctcgcagctcatgttaaggaggttgggaataaattgcaacgcaaattgttcgagacattgctggctcgcatgatagtgttaaagttgtttaagtgagcgactgggtctgtggtcccatcatactgcgaaaaatgtgggctcttaaatccatggggaaactcaaaatttaagatatcaggatggaatggctcggtttcctcatccgagtcgtagcctggcaacttaccatgttctccatcttgatattttctgaatt

SEQ ID NO: 273859 - DNA, 750 bp, Cannabis indica
gaatacaagagttttcgtcccttatttttgtcagtccaaagttgtctgtcgagcagatagttgatgataggggtcatccatgtaggtgaactgtctatcatctccacgttttccttttcacatatacttggtttgttcagcatctccactagaaccaagttcaattcttccaagttattctgcgaaagtttcgccaaggcatcagcaatagtgttttgttctcttggaatttgctcgattttaaagtaatcaaatatttctaagttcttctgaattttctctagatacttagccattttcaggcccttggcctggtatgccctgagagcctgatttacaatcaactgcgagtcacaatggcagatgagatttttgactttcaacacctcagctatctttaagccagcgatcaaggcttcatatttagcctcgttgtttgatgcgtcaaattgaaatctcaaagcataatgaaacttaaagccttctagtgaaattaatattactcctacacttgagccctgctccttggatgcaccatccacatataacttccaagtgtccgcatcttggtgaacaggcggaatcttctgaagttataccttctattaagaagtctgccaacgcttggcccttgatggatgttcgagggtggtatgttatgtcgaactaccccagttcaattgaccattttatcaatattccaaaagcatctggttttaataaaacttgtctcaaaggctgatcggttaa

SEQ ID NO: 273860 - DNA, 1152 bp, Cannabis indica
agggattacacacaccaaatccaccgtttgctgcctccttgcacttgctcttaaagacgagtatccactattcccaacaactattcttccataattgattacatcagcactatagcactacatgataggtgaacaaatgtactctgtaaccacagactgagttcaggtctccttgaaaaatgtacggaggttaccttgtcattagattaaaacataattgccatttcaggaaaaaaaaaagcattaaatttgtcaattaaattgctattctcatattcatatggtcactcacttactcacttaatttgatagttgaaaagtgcttaatttcatcagcaagatacccgcgcatggtaggtggctaccttaacttcagtcattactctcaactacccacctttattctttattcttttttaattattatttttatttaaaaaaaaatcatcttttattaaacggagcaatatctaaagaaacacaattctcctttaacatataagatcaactaataaacgataacaaaatgcgcaactcgatggcttgacaaaaaacaaaaaaaacatatattatgaagtaaatgcaatataatatatataccttacgatcctcaataatcaacacaaacggagagcccatccacaagtgctttgaatagactccactaccaccaagctatcagtttccaccgtaactaaggaatatttgttcgattttagccaactcaaagcctctttaacaaccatggcttcagctgattccaccctccccactttacaccgagtttgagccaccgtcaacttcccaaccatgtcttgaacaataaagtcaaaaccaaactttcattcttcttcaaatagagtcgcatggacatatatatcgagacgcttgaaactagtttcgtcatagctcattttcatcatctgccgctagcccacataatagaagaatatttcccctaccttgagatttaacctattgatcaagactaaaatcaacaaacgtacataacctccaatgcaccccttctccgctggttccaaaccacgtcattcttggcagacgaaatcgcccacaacaccgttaagaccagacataatctaatcccatcaatcctatatttaaaagggtaactatgattacgtcaaatgt

SEQ ID NO: 273861 - DNA, 736 bp, Cannabis indica
aacgcggtgtttggctattaaaatcacatcttagtattattagtatagcgagacaatatggttagacattgggagtgtcgggattttagaatttcccaaaatacccctaagtgaccctttatgatttttagtgtgggaagggcaaaatagtcattttgcccatttatgatttgtcttttgtggtttttaattaaagttaataatttgatttatttgttatactttggctgaaaattggtttaacaaaaccaatttttatttcatttttataaaattaaggaaaaactcatgaaaatcacatttctctctctctctttcaactctctctcttttcgaacccctaaaccagctagggttctaaaattgttcttcaattcttgtaaatttctagcagctctaagtgaattcaagctaaggtaagcttttaggtaacttttcctttaattttcttgaatttcaagttatgaatttatgcatgctttgagagattgagttctatagtttctgttgatgtttgaaatgtgtttctgtagttggaatttgtttatatatgttgaaataagcatgttttgatggttgatttgttgtttgagcaagctttgagttttataactcaagcttggctctttaatgacgtttttcaattctgagcttgggtagttgttttattgcttgaaaaatgtttattggggtataatatgcaggtctagaaagtttggttaagtttggaattcga

SEQ ID NO: 273862 - DNA, 556 bp, Cannabis indica
taataagatcaattagtcaagattacaaaacaagtaatacaagagttgaaaagaggtttagaatcaccacaagggagagattacactggaagtgaaccagagcactgtaacgggatgcaacccactagagagttccagagagagaaggttcatgcgtctaccactctgtctcattgattttgctttcctttgttttttcaattattctttttaagtttttttttttttttaattttgataattgagtcctaattttcacaccacaccttttttcaattttttattacttaattttttttccacatatatatataaaataattctatgaatatagttttgtccttatgctatacatattacttttttaaccattcatttatatgacttttgataagcaacatttttaatataattgtatgtagcatattaaatttttcaatttaaaaaaaaaataaaaaaatctaacaccaaaatagaaaaaattaaaactttcattggttattaaacaaattaactagcaaataaaactaaccttatattttaggaaaaaaaaaaa

SEQ ID NO: 273863 - DNA, 713 bp, Cannabis indica
taaaacccaccagaattaagtcgttcgtggaataaaattcatttctcttgttccaaaaaaaaattatccccatatttctcagaacctcaagctagccaaaattccgaacaccccatttcttctactttttctccaatgttgccaagctcagttttaccgacgtcatgcaccagaaccaacaaccattcgagctttttttatttgtaagtcacctcctatatgcatttatcttcagaattgttgctttatttggtggcttgtttgcataaaagtgatagttacactctagctgtgatttgggtattttccccagccatctctagttttcatctcaggtcggggcttccatgtttaggatttataggactcgccattttctttctttttgtcccttgtaccattgttcttgggcatggtgcaatttgcacccgatgcttagcacaggaaatttccaatttctacatatgctagcatttggagggggcctcttctcagcggttaaaggactttcattccattatttgtttaggttttgatatgagggctaactgctaagtgtattcttgcttttcagatgagcaacacatcttgagggacttacataaatacggtttccacacgtttgacagaaaaattccggaactccactccgaaaggccctaaagctccaaccactcgagagagagagagagagagagagagagagagagaga

SEQ ID NO: 273864 - DNA, 603 bp, Cannabis indica
tctctcatttcggcactcaacaacaacctccatccgcaaggaccacaacgaatcagtcccacacccatgtttcttcttttcctttattatttttatttcattagaaacctttgttattttattttattaagaaaaaacaaaaacaaatttaattatttttaatttttcttacttttgtttccaattttttatataatgtatttactaaatgcttaattgaattgtaatgtaataatttgtaattagatttggttatattgtttatgttattagtaaaaaggaatactaaatttttcttattgtttatgttagtttaagaaaaagtttcagtattattttattgatgtatatatatacacgagatatatttgtatgttatattgtttatttctttttttttagattgggctcaaagaagaaagttagaaatgccaattagaaaagaaaaactctatagttattttgcttgattgagaacaattagaataaaggtattttgttcactctttgatttgattaacatattacttgtatttgttgatattttttaacttcaaactttgttcaattttttggtgcacattgatttatgttcaatttgtt

SEQ ID NO: 273865 - DNA, 728 bp, Cannabis indica
tgttaatgaaacatacttggtagtaaatctagatcctggtaaaatatttccaacacgtagctccttcttgctgtaactcgttccagaatggagttcctgtacagatcccagcttgaagaagtgcaagctgttgttagtcatcaactttcttagttttcgaggcttcttctttgaacctctttatgaaatttttcaatgtctctgtgggtagttgcttgatgttaattagggcactgacttcgagattaatcttccttgcggcgaaaaactgtctccggaagctaacttgtaacttgttccagcagtccacagatcctagttccaactttttgaaccattcctccgcggacccgtttaacattagtggaaagcataaacacttggcgtcattgctgactctcatgaccgtcattactcggttgaaccgagacaaatgatcgctggggtccgtgtccccggtgtaagctgccatttcaggcatcttaaaatttttggggagtttcgcctctaaaatgtgtctggcgcacgactcccggtcctcacagtcagaatctgagtcatcccttttttgtctccgggagactcgagcaatatctttgcgcagtatggctagctctgccataattccctcgttcagcgttcctacggagaccgctggtgcgtgtttcttttgtccaactgatcccgcaaatcaccatgcttcccgttgatttgatgtctcaaatcaa

SEQ ID NO: 273866 - DNA, 1248 bp, Cannabis indica
ttttttagagaattgctattaggcaccagtggtgcttagcaccttctcgacatgtcgcgttgcgacttgctagcgatactccctaaaaactattatattaaattatgtaagacccgatacatagttgaaccaatggcgatattaacacatagaatgatgcttgacaccactggtgccctttagcatttctcgattatttattactatgtgttctcaatctctcacactttttttttttcattattcttttctctcttcataattgttatcatttattttctttttccaatatagcatcaaataaattatgctatataacttgcaggtatatattgaattttataatcaaatattatatagcaatctctctctgtaatgaatctctctctcctaccgagtcctactataatctatcgcgtgaaagacctttgacaaataattaaataaattgtaacacttattttgatttcataaactttcagatttttaattttccttacttttttcttttatccaacaaattgattatatctttaaattttctttgaatgatatatttaaagatgagtgctaattaaaatctcttagttaacctccacgcccgaaatcacatgccgaaatatttttttaaattttttttatagtggtattcgttttagttacagtatcatccctataaatttttgaaaaattctaaacagtttataatgccgaaaataaagttcctcatattcctatttcggcactgtaaactattaaacaaatttcaaaaatttataaggatcatgttgtaagtataacgacgccataaaaaatttgaagagaaatattcatccaacatgtattttcaggcacagaagttgtaataagaagttgacagtatcactcctcatatttaaaatattgtatcaatgatatatttcatatgattttgttattgttatttcaattaaaatgtaactctagggtttttagttttcgtaattttttcttccaaaatacgatatatatatatatagattgtggatgttgatcctttaaactaactttgaactaactcacctacaccaactaacttaactaactttctggtatgttagttagttagttggtaccagttatgtacctattttcctggtgtgagttacaactatatctagactactcttttcactattgatagtaagaataaaagagagaattcagagagagattgcttagtgttctaagctgtaaagtcatgttctt

SEQ ID NO: 273867 - DNA, 587 bp, Cannabis indica
aggttggggttcgggtcccgagtccatgtttggatggggatccaggttcggctccgatttcggttctaggtcttatttgtagtccgggtcctggtctggttacggttctggatctaggtccaatttcagttgtgattccaagtccaagtcctagttccagtcccggtcaagttccggttttggttccaattttgggtcacatggtacgggttcgcgtccacttttaggtttgggactgggttcaggttcgggtccttgtgagggttgggtccagggctgggtcctaaagccagacaccgactccgggttttgtccaagccctgggtccatatctggatcccaatctagggtccctgtcaggttcaatttttggtgctgggtcacgagctgggtcctacgtttaaatttttgtctcggtcgggtactaggtccatatcctagttctgtttcccatgtccctatcctgattttgggtccaggtcccgattattgtgtgggttttggtcccagtctaggttaaggttcgagtcctagtctcggttcgagtttaggtctctgtttgggttttgatctgggttcgggtttgg

SEQ ID NO: 273868 - DNA, 855 bp, Cannabis indica
agatcaaatttttcgaactgatttaaattttcttcttcttattcttttgggacataatcagagattgcatgttggatgtataccggagaaaggcaagtgggaactttgagaaagaaatatttagatgcagtgctgaaacaagacgtgggcttttttgatacagatgctagaacaggggatatagtttttagtgtctctacggacactcttctagtccaagacgccattagtgagaaggttgtttttgtctactcttacccatataatatattcattcattaattactcctccctatcgctctcacacatgcatatacacttgttagtattctcactcactcacccaaaaaaaaaaaaaaaaaaaaaacgagtggattagactaagtcaatggagtggccttagatcaagatatgcttatctgggtattgtggtagttggcaaatacattaatgggggacccacgattttcgttcttcacattgtggcgcacgttagcatgtacttcgttaacgtgcgcggtttctaacacctttctttttaggttctgtattccatggatggagtggggtgagtgtgagatagagaaatgtttgattaatgattatgaaacgttgtcgtattgatgttggtttgttttgtttaggtgggaaatttcatacactatctgtcaacttttctggctggctggtggttggttttgtctcggcatggcggctagctctgctgagtgtggcggtgattcccggcattgcctttgccggaggattatatgcctatactctcaccggtttaacctccaaaagtcgacagtcttacgccaacgccggagtatcgccgagcaagtgagtctcaac

SEQ ID NO: 273869 - DNA, 821 bp, Cannabis indica
actaatcttttcgaaattatgagctgaatatcgctatcattttcctgtcaaatttttcaatctagctaaaaattaaaaataaagaaataatactctacctgaatactgagtctttagttaaatctagactcttacaaagagttaattgctcctaatacatcccttcccctcttactaagctgagaaatgaaaacactcttaactctagatttaatagctaacttaacatggttccttagaactttgaccaagctacaagctaaatgagaaatacaacaattcttattacaccaaatgaaatacataacatagcagctacaataatcgccttcataaccatgcccaccacccctgtctgaggcagctcacaccaaaaccttccaagcctccaaatctgttggtcaagagaaattgccaaatcaacaatgaataccatctatgattaatctagaatacacaaacatagaaaagatgctgctgcgactctcaatctctacttcacaaacggggcataaacaagaaggaatcaccataaattagctaaggtgatttcgagtaaggaaatgatcatttatagcttgccacataatgaagcaatgtttacaaacagaaagcctattccagatagcatttgaatataaaaccggggtagaatgcagaagagataagtagaaagttctgaccttaaacctctcattcttcacaacctccatcaacgcagcatgataatcttatgatattttgaagctttgttagcttcctaaaacaccagcttagcttaccttttgggacaaagtttccaaactccttgttctttaaat

SEQ ID NO: 273870 - DNA, 2436 bp, Cannabis indica
aaaaattctattacatagtcacacgtttttttttttgagataaactgttattattaaaattgagagtcattaataaaaatagagtagattggggagggaattttccccaaccaagagatatctttatccaatcgaagagcaaatttagctaaagcatgagctgctttattagcatctcttttagcatgagatacctttgctctaggaaaagaggataaaaggtaaataatgtcatctaccaaatcataaaagtgtgttacaaatctagtagaagacatgttattaaccgcattggcaaccaatagagagacagtctcaatagaatggattggcagctgatgctcaattgcccatttcacactatgaaatatagcagcagcctccatttcttttggagaaaaacatccacgtataggcttagagaaaccagcgatgacaaagccaacatggtcacggattagagcttcaaaacctacaatagcccctgcattatcacatgttgcatctagatttaatttaaaacaaccagcagccggtggcagccatgtaggcaaagtcctcactgatgtaggcggttaagcttgaacattgcagctattggagtctgaattttttatagctgctatttagtcgttgtggttttgtgatattgagccaaatgagaagctgaaaaggaacaaataatgtctgctggtttaggcttgtaccatgaaatttttgtttcgttcagaccaaatacaccacattaggcatgtaatcttttctaaatcagcatcattgtgagcaactgcaatgtgggaaaaaatatcaaagcctttaaggttactaatattcagcatatatacttggaattgaaactttttccacgcggccttagcatggtcacactgaaagattgcatgtcctactgattcccacgcgcacatacaaactgtacaagtagtagaagaagtgatcttcctatgagctagattcatggaggtagaaagcgcatcatttatgaattgccaagcaaagattttaacttttttgggaagccttagagaccaaaactgattccaccatcgtcgatgagatgacgaggatgagtgcacattcatagattccaaactctctgctaagtgatatccagatttgacagtgtataatcccgtgtccgaatgttgccaattaagcatgttctctcttggaaaaggactaagaggaatagaaagaatacgatcaatgtcaatagcgccaaaatgatgttctaagatccatgtatcccattgcctatccatagagatatagtgtgcaactgtgaaaagaggatcgccacagtaggagtaaggggtaaaggtagtattttccagtaaccatggatctgaagcacaccgaacattatgccctgtaccaattttccctcttaggcctttcaaaaacaattctttgccatcacagatactttgccaagtgaggaacagtaaaattcctttttgagctgagaggaaatcaccattcttaaagtagcgaacttttaggacctttgccaacaaagaagaaggattatctaatatcctccatgcttgcttccccaaaagagcttgattaaagtgaacgaaagagcgagaacccataccgccatcagcttttaaagaacacatgaatttccatttcttccaatgaatcttggagttgtttgtattagatccccacaaaaaattagccatcatagactctagttcaatgcaaaatttcttaggaaggccaattcatggcatatgtcgaaattgattggacaacatcttttaaaagtacctctctaccacctattgaaaaaagtttggcatgccattgattcatctatttccaaatacgatctttatactgctaaaaagttcctttttatctttgccagcatacgaggtaaggccaagatattttccatggagagcagaaataggcatacccagcacgttattgaaacgatcttgaatgcctggagtagcatttggtgagaaagacatgacggttttctccgtgttaagaagttgtcatgacgctctatgataaaaatcaagggccctattaataacttggcaagaatcttaagttgcttgacaaaatatcaaactatcataggcaaataaaagatgagatacagcaggggcaaccctagaaattgataatccttttagatgacccgaagtttcctcatgcttcaacaaagttgaaagtccttcggagcagattaatgcctatcctctcaaggatttcaaaggtccaatgaatctcgggctaagcttccctttcttaccaaagcgtttaatccctttcatcggagatattcagagaaataccatgtccccgatctgaaaatctatatctcgatgctttggatcagcataactcttctgtctactctgagccgtgagaatttgcgctctaatcttgtta

SEQ ID NO: 273871 - DNA, 1062 bp, Cannabis indica
ttggtttggttcttctgggccaagtggagtagaggatctgttgtttgaacaggagaagcatcagcacctgactggaggttgaagcagcttggttggaggttgaagcagccgcctcgttcccaccataagccccttgttccgcgcagtactgaaggtacatgtacttggtgtcgcccaagtagtcaaagttggcccggggattagccttccagaaatcaaagaagagctcgagactggctgtctccaaggcattgaccttctccttcaacctccccacctcggctgaaagctcccactctttggcatccttctcctcctttatccgaagaagaactgctcgcagagaagtcctctcatcctaaagactgtttacctcagcaaataagatctcgatggtctcctcaaaacggttagcagcctcgagatcctttgtcaccacggagatcttcttctcaatagcgaacagcttcctgttggccatgcccaactccaaccgaatagctcaagtccttgaagcgacaaacatagcccgggaataagtgtaggccaacttcagaccggcctgcacagaggaaaaactttatcatatggagctaagtatggaaagttaaagggacgtatcaaaaaagacttaccctggtgaactttttcaagactccgcccaccaatacatccaaagatgagtcattatcagcaccagccagttgctcactgacctcacgaaccagccggttcatgtaatgggccagcatctccttgccctttttggcctctagaagcactgacaaaggtggagttggtgcctgcaccagttgaggatcactcctgacaagttcagacccagtcgttggtggcccagactccttggacctggtagacttgggggtagaggggtttgtagcagtcagctcctcagaaagatcaatgacctctctagaaggtctcttttcctttgaagaggacccctcaccgcccttggacttcttggccggaggagaggcgctaaagcttccaccaattctcttcctcagagcatcgatcatctgccgagacatgtctgca

SEQ ID NO: 273872 - DNA, 681 bp, Cannabis indica
atttgccacgtgtacaagtgtgtacacttgggcagtccactgtagtacttaactgtgatttttggacaggggtacagagcaaaacagaatgggaacttaagtagttttgtcccaaaaatatataagatagtttcctcacaaattaaccataataataataatagctgggcatcattctttctatgtatcaatcaaactacgtaacaatggtaaatacaaatgtataagaattgcattgtgtacctgtgttaatgcttgactcatttccatggcgtctctatagaatttgtggcctcaatacacaaaattagagaacacaaaaactcgtagatgtggtttccaagagataccaactctctatatttaacatcaaatagttaaacacattgtcacttggagacaaagctgattgacttctatgtcaatgcactcaatttttgactgttggaggactaaacaaaaattaatacttttctttcatatatagaaaacgaattggaaagtatattactattagtattagggatgcatatttttcctatatggttccacgaggacccattcttaaggggtggcaatttatgttcgcaggtcgtatttgtgttccatatataacaagtatatgctcgatccgaacacaacccgtttaataatcgtgtcagaaaataaaacccgaacacg

SEQ ID NO: 273873 - DNA, 729 bp, Cannabis indica
ctctttggcctgtcttacatttgtccgcgtggtatgccttactacccccctgagtgtcataaaaattatttttagggcactcagctttaaatatttatttagaggttgcacatacttgtccgatacaaatttactttacggagcatgagtataatttttcgactataggttatacttttggaggtgattggcgttccaggccctaggcaccatggttccgtccattcttttgagcttgtaagtcccggagccgatttcgtcctcaatttcgtatgtccttcccaattaggcccaagtacccccactccgggttcctgagtggccgaggagactcgtcttaagaccagatcaccaatagtaaattttctatctttaacctttgagttaaagtgtttagccaccttcttttgataagctgccattcgtatttgagactcatcccggagttcgtcaatctgatccaacgcttcttgtaataaagccttgtttgttgttggatcataagtcgttctcctgtgggatgggaatagcgtttccaccgggaccattgcctcacagccgtatgccattgaaaatggcgagtggccggttgtggttcttggggttgtccggtaggcccataacactcttggcaattcttcaggccaattgtttttgcaggccagcaactttttctttagggtaattttgaggatcttattgaccccttccgcttgtccgttcatttgt

SEQ ID NO: 273874 - DNA, 3466 bp, Cannabis indica
tttttaacgacaaaaaaagtttagtaggtatgatttagtacttggctgtgtgtaatcaatgcctattttacttagttttgaatttgtggcatagatgtatattttaggaacctctaaaacaaaattttacccgactatataacacggattgacaaactctcttcttttagaactgaaagacaatttggtgatgaagtgaatgcactcaatctacttgacgaatagaagttggtgggcgtaccaacccacccatgaatatagctggtattagaagcaaatagttaattaagataatggaccaagaaaagtctgttaatattcaaattcaagtagaccagacgcagtattcaagtagaaagtgtaaaagttgaaattgtaaatagattgtctattttgtttgtttatttattattattattttcttttatgagataaagagatctaggtgttaaagatacaattacagccccaaataaaagcattatgtatatgtacaaatttttatgtgaaatatataaaaatatttgtactgtacaattataattataatagcgatatggttatatatgatgcaacactgatgtagagacaaatacatggtataatatgactagctagaacgaaaagcacacatctgcaaattcctaactcgttgaagatagaaagtggaaatggtaatcatacctagctatatcgattgggtttgggtctctcatatcactacctataacactgaaaagattttgattcctgtaacgcgccaaagctctggcccctcactattattgcaatacaactatcaaataatttatataaaacacacgagatatttaattaattagtagctaagccttctctaaccattgcatcatggtttagtagacataaaaatcatgtatatatataataataatacaatagaagcaaaaatcatcagtcaaagatgatgattcatatgatcagacggttggcctttggtgatcacattaaataactaagctaatattattcgatttgatggaatctgttatgactcccctttttgtctcaatctttcatacatatatgggaccctttgttgatcaatctaaatcaagtgaactgtaaagctacacactaaaatttccctcactgatttcatttataggaatattacactgtcaatatcatgggttaattttgtgtgagtcgcagattgccacataacaaactctggtttaaataattaatatcatatatttatattaaaatatctaataagccaaattcaaatataaatgatagatcgataataaaagaagaaaaaaaatgcacagtgtatatattaataatttggcagctttgtcggcatgttggcccttgtataccccacatgtacagaaataaagaattaaaataaagttttatttatatatatataaaaaaaaatagtaatgtcatgaagtcctttaaaaggcatccataaacctttgtgataaacactagcactatcaattccaccaccaagctccattattatcattatcaaaagcttatagtatttgttgaaagctcttcaatttccatttccttgaagaaatcccttatacttgatcaaaaacattatataattatataaatttccatcttctttgtcttgccagcaagttcagttttagattatctttatacacacacacatatatagctatatataattaagggtcgaattgaagttcattgatcgatatatatgatgtggcgtagggtgactactttagggcaaaaccttcagaacataagaaagagtccaagagtggctgatgagagcatgtttggaggtgggaataaccaagccgagttgccaatcatcatggctcatgatcatcatggaagatcgcctgccatatggaaaggcttcacaatcatatgcagtgtggttggggctcctattttgtccttgttcgcttgcttctctcaatcttcttcttcccaccatgttaatggtggaaataataataataacaatatttcagctaattatggggtttgggccacaggtgagtttgctcagatatctgaaatgaaccacctcatggtaagtgacagcatgcgttatgcaatattgaatgtaaaaaaaaaaaagaaaaaaacaaagagtggagatatataaggaataattaattatgtaagtagcaaaactatttgtttgccttaattagtggaaaattttaggtaatgaaaaggattctgagtcgagttttctgactttgtccttttcttgtataccgagttaattaataatatatttaatgtgtattaaactattatatgtagtgcatagcaatagctatatatccatgaaaacattcatatatatagataaatcaagtattatgtgtatatttccagttatgtatatatttcttattttatatgtaataaaaaaatagaatttgtagtatcaaactttgggttaaacatattttttttaaaaaaaaaaattatactagtaggcattataatttaaaataaagttagaaagtgtagtttataaatgtatgtatggagcgatggatgatacgataccaaaagtcttatatatttagagttctggacacaatagtataatactataaataagtattgatacatatatatgaacttattctctctcttttttccttttccctttcattttattcttttttagctttttttatttaaaccacaacaaatgttatgcggatgtcttatacataggtgtttagattcagaatatgacaaaccggtaacccactttcataaaaggaattattcttcttatgcattattaaactttgcatatatataatatagactctctagtgttttctttttctccaattgattgagactatttgttaatttagtatgtccatccattattgtgaatacgacaaaactatagaattgaaattaatgattaataataatgtggcacgccaagtacggatatttatatggcactgtaaatataaatacagggtacgaaaaataaaggcatcagtaaagtatatatgatacgcatggacaagcctaaaggtatcacatataaaaaagcttaataatttgaaaataatattaatttattaattataagtcaattaaatgatagtaaaatatttaaattttaataattccaattcttttattataagattgtaataatttttgaaaaattatataaaagagtaaaaatatatgtaaaataataggccaattagaataatgtatttgaatacagcacaaaaatatcggatttataagttatacacaaagcctatttgataaaatttttgttaaacaatacacaaaagtattaaataagattcaattcaattgtatctagcatcctctgttattattattattggttcaatcaattcaaaaaaatatgtacaaaagtgttaaagtacccaataacaatactctgttttattatagc

SEQ ID NO: 273875 - DNA, 647 bp, Cannabis indica
atgtgataatagggttaggtatgcggctgagataaaaatatggtaacgttaggtatgttaaagttttttagtttttaaatagaaaaaaataactatttaatacaaataaaaaaatatagagtaatttgcagcaaaaatatctaagttttatgccgagcagcagataaatacctaaatcctatttttggtggtataaataccttcgtgccatgtcattaaaatgtatgccacatcactcacaccacttaaacttaaccaagccacaacatacattaaaaaccctcttaaaataaaaattaaatattaaattttttacacaaataatatcaatttaaattattaaaaaaataacttttaattgaaattgatttataatctaaatcaggaaagaaaaatgaaataattaaaattaaatttgacatttaaattaaaaacaaaacaaaattgctcctcagtttttgaaaagagaacagttaccatttttgcacaaaaatcccaaactttcttgagagagtcgagagaaacttagggttcgacttgaagatgaacgaaggttgaagaagatcgaaggttcgattgtaaaacgcaacagtccaaggttaaagacgatcgaaggttgaagtcaaacgggacagtgtcgagggtat

SEQ ID NO: 273876 - DNA, 725 bp, Cannabis indica
cctatataatgagagtaagaggttgaagtagggttctttgggctgaaccttctctttcggacctacttgacggtagccaagaacaccatacatattacttcatctttttcattgagtcaatcatactcagtcgacaacaagacctcaaactctattgatacacacttcttttttctactttattggtttattgttcccaagaaccttacaaccaccaactttgatcagatttatgaatgttgagtctcccatgagtcctatattcataagtctcgattatgattttatctaaaaattctttgctgtatttttatctatacactcttgagaatataattctggtgtgtcgggtttaatcaataaaaataaaaatagacgtaactccattaccatcgcgacatgggaggtgaactactataaatctctggtgtccaatttatttattacagttttattattcaaaattaattcattgcaatcctctatatttttacgatcttcttagaccagttgatgccgcatcaataatatcatataattttttttaatttatttatagaatgtcactaactaatctaactaatcgtaatatatcacctctaaatggtactaaacagtactggtactagtacttaatagcagtgctctaaaataatggtgaaggattcaaatccctatattatatagaaaacaaactacctctcaaccattcttacaaaaaaaaa

SEQ ID NO: 273877 - DNA, 678 bp, Cannabis indica
atctgaatatacagaagacatatctccaattctatcgaaaattggaatagagataacacaattaagaactttcttcagtttgaataactttccaatgcttttcaaaagcaacaaagttatgtagcttcactgatggagcttaaatcattttagatgggtttttacatccttctagaatgattaaccaccatctcgaataggttatgagttggtgtagatatgagaattctaatatacacccttatcctctcacatataggtcactttcagagatttcttgactgtctcctaatgttccttgttttattacatcttagatggctcccactcaacagtaggagtctggttaaatttgtacatagaagtacatttaacctcttactattggttcttatagatatcttgttgtgacatattatcttagtctgaagctgtaagtttcttctagactaagtcatcaacatagcattctagtattaacattaatgtaaaatacttgcttaacattaagtaatcattagagataccatataacattacaggaagattaggtatttttcccaagttattcgaatagactttgcttaattctcctatcttatcctcaaaattttgataagttgttttcatgcatatgaatggttagatttactttctcagttatattctaaagttcct

SEQ ID NO: 273878 - DNA, 4355 bp, Cannabis indica
aatccacactattgtgtaatgtgccatacactctaaccaacacgctgtgaatatttattgtttacaatacacttaattttacttaaatagaagcttaataatgtcttttatttttttattttgagtacccaaaaagtgtgtaccctataagcacggtatgcttagggtcagtcctgctaacacttttttgagtaaaagtgaagactgaagctccaagaagtttcataactaaatgaaataagatatattatgtttcacatttagccgcctttgcaagcacaaaaaataattactaaatatctatactaaatgaaaatgataagtaggaggacaacctagaaaactttgctaagacataccaaaataaatgttacaacataaacatgtaaaagataaaactagtgacaaacacttacacatttaatatttatatatgtataccaaatgcccatttaggaacatttatatacacatataaactaataaactacagtggtggattgaaaatcacaggtactgatgtagctggggaaatagtagagactggacatggtgtcactaaattcaaacccggtgacaaagttgtagctaatgtaccctttactgtgagtacttaattctcttatgtttcctttgatagtatttcacacgtagttaatctgttctattttgttctattctgtgttatacatcagattggaggtggattagctgaattttttgtagctagtgagagcttgacagtggctcggccgcctcaagtgtcagcagccgaagctgcaggcttacctactgccggtctaacagcacacgcggccctaactcaagctgccggtatcaatcttgataatgacaatgataacaatgggaataagcatgaaataaacattctgatcactgcagcctctggtggtgttggtcactatgctgttcaattggcaaagcttagacaaaacacacatgttacagccacttgtggcgcccgcaacattgagtttgtgaagagcttaggtgctgatgaggttcttgactacaccaccccagaagggtcagctctaaaaagcccgtctggtcgaaaatatgatgttgtgattcactgcgccgaggcaaggatttcttggtctacttttgagcctaatttgaataagaatgggaaggttattgaccttactcctgggccagctgcttttttaacttctgctttgaagaaagttactttctcttctaagaaattggtgccattttttttgagtgttaagggtgagaacttggagtatgttgttgggttggtgaaggaaggaaaactcaggacagttattgactcaaaacatcctctaagtaagggtgaagatggttgggccaagagtattaatggccatgccaccgggaagatcattgtagagccttgggtataggaatgtcactaacaacatatatattcattttttctgcttaaatcatcaaataaattttggtaagtgagaagattaccaatgtcaaattccttatagttatagcaaatattagtttgtaaaaaaaataattaaataagaaaatgaaattcaatattattatccttttatgtgtgtttggtataagagtttaacttggcgagttttatttgagggaggttgagattaagtgaatgtcaaatttaaatttaactttacctcataaatagacttaaaagtgggggcgagtgtctagtactatctaaaagtgtagcctcgtaaataggtgatattatataataattattaaattaaattatgtgtgatctgatacttaatttagttttacattgtcattcccaataacctaaacacctcattaataactaattagtttggcaatatgtaaaagaatattaccagcaaaaccacctaaactttacggtctgtaacacttaattacaaaaatcgaattttttgcggctaaactacctaaaccctggttccgttttgctctgcatacctccgtccaaaaatcactgttaagcgccacgatggactttccacgtgtacacatttgtcacgtggtaaatttttagtggtccacgtaattttaatttaaatatattaaaaataatttaaaattaaaaaaaaaaaaaaaatttataaaaagaaaaaaaattgtaattattgacataccaaaaacaattagaggtacaaatagcctatcttttcttaggtgcaccataagtccatgacattaattatcattatcaatacgtgtattgaaaatcagaatatgcatccattcaatttcaatttgggattaatatttctttttcttttatatagattagatttaaatcaaacaattatttaattacatttatcatcataatagagcaatccagaatatcgtagataattcaaatttattctgtgaaaaaagaaaaatttgccacccaaaattgaatatttccctaaataaagaggtagaaaaaaagtaggtgtgaaattgtgaatgaaaaaacaagaagaacgtgttctccttttacgtccacgttctcgattccaatttccaactaataaagaggaagggtatttccgtcatttaaatatttggaaaaaaaatcttgtttgtaccgaaatcccagcgtggttactagttaccaatatcaataccagatcgttacccatttctctctcagcatcagtttttgggtattatggcgtctttggcagggaagcttatgcaggctcttcagtttgatagctatggcggaggagcttctgctctaaaggtatgcctttcttcttcttcttcatcttcttcttcagtatgatagattgtaattgtgattttgatttggttttcagcatgttgaggttccagtgcctactcctaaaaagaatgagattttggttaaaatggaagcattggctctgaatccagtggattggaaaattcagaaagggatgttgcgcccacttttcccacgcaaattcccctacattcctggtatttatgatttgatatgatatgccctttctttcttagtaccaatctgttgtgtattttgtataattgaaaggaaaatttttgagatttagaagtgaaacaggtactgatgtggctggtgaagtagtagaggttggacaaggagtcaacaaattcaaagctggtgacaaagtcttaacatttcttggccaagccgtgagtttacctctcatatattttttaaattgttcttactttcatttattctttgtgccctatttaaatattccacttacaattaatttattctctgaagcttgatgattctgataatttaatatttcacccataaaaaaaggtttttggatggccaacataagcatttgaacatttatatatttattttgaggagtgatacattcttcaacttctctgtcagagaatatttttttcaaattttattttcatagcggtattttttatacataacatatttttcaaataatttacattagtgaaaataagtttgaaattttttgaacaattgataaacttagctctatttttgatattgtaaactattcaatttttttaaaaaatttaataatattataactataacgaatactatagcgctataaataaaatattctgacattgtgatttcgggcatagaagttaattaagaaattgtaataggtgattgtatttatttatttgggttgggggctgctgatattacatactgttcaaacaactcatttttctaatatgtaagatataaaagaattgatgagtatattaacaagtctttatacacattgaattatagataagaaattggttagaggtaatatggttttaggttgaattgatgatatttacatctaatttatgtgtgatatgatgttgtgtaatgacagaatggaggtggacttgctgagtttgttgtggctggagagaacttgacagtggctcggccgcctgaagtttcagcagctgaagctgcaggcttgcttgttgctggcctcacagctcaccaggcgctcactcaatcagccgggatcaagcttgatgggactggcgagcaaaagaacattctgataactgcagcctctggtggtgtgggtcagtatgctgttcaattggccaagcttggaaacacacatgttacagctacttgtggtgcacgcaacattgaactagtgaagagcttaggtgcagatgagattcttgactacaagaccccagaaggggcagctctgaaaagcccttcggacgaaatatgatgctgtgatccactgcgcgacgggaatttctggtcaacttttgagcctaatctgagtagaacgggaggttattgatattactccgggccagcagcatcttacatttgctctcaaaaa

SEQ ID NO: 273879 - DNA, 2892 bp, Cannabis indica
acgataagtaatgaaaatattttatataaaagatgagtaggagtaaaaatatttacaaataaaatgtgtaaggaaaaattattaagatattaatattttttagtatattaattctcaaaatcaagttttagttatagctgaaacacattttaaaatacattatcaattaaagtataagttattttaaaaaatatataagcttttataagatataatttctaaatattagttgtgtaataacttaatgaaactacaaaaaaaaataaaaaaattatgtgttaagtaaaatataatatttatactataaatgttaattttaatattttttttaaagatattttggtctattactcatgtgtgagactttttatcactacatcaaacaatatttattttttatttaatattttatttatatattaattaacttttttcacaaatttagaatcccgagcggtcggaggcctgaggcgcacatttagcttgcctactcttagagccgaccctgctccaaaagcaaggtgggaaattcaggcgagtaatccctatggagattcatttattttaaatataataaaaaagatataaataataataatatcttatgttaataatgtaaactaagaaaaattattcaaaataataataaaaaaatctctaaaaatgctagtatgctataattttttattctattaattttttatttttatttttgaaaaaataattaaaaacaagacaatataaataaaaattgttggtaccattttctatttagtgaaacagccgactaggtagcagcaggaatggataatgggtgcatctaaattttttctaaatctattaaaagttgcatttaactttttggctcccacagagtaactctaataataccagaggaaattgtcctagttagtactataccacattaccaccactacactaatcttaggcgccacctttttaactcatttaaacctacacgcaatcctacagtctccaatttttccattattaaaaccacttggaatatggaactactgccacgtacaccttagcaaaatagaagtatgtgaatctaaaatacgccacacaggactaactagcattctctacctctcacattttcaaacacaatctttttcattattttattttattttttctttctgaaatcaaaaagggagaaaaaaaaatatttccagaagctttggatggcactacgcgccacatcatcatcttcttcttcttccacctctgtaaaactcgggcccatttcgtacccgcgcagaaaccctaggagttctctcagctttaaccatgtcttattgggtttatcttcttccaaatcctcgaggtcttcttcgcttcgtgtttcggccaattcgaaacccagagcccgtttcggcgctcgacggaccgagtccgttccggttcaacagctcgaacggcctctaagtaatgttagaatagcatattagtttccgattttgtttactacgtacggttttttgcattttagagtttctaattttgatatatataaataattactaacttcaggtgagtatatgagtttaccggcgagccagtactcggttttagatgctgagagaatagaaagagtggatgacaacactttcaggtgttatgtgtatagaatcaaattcttttcctttgaggtttgccccgttctgcttgttagagtagaagaacagcctaaagggtgctccattaagctcctgtcttgcaaggtctgttgttaatttgttattatcattattattgttattattttgaatgaatgaatgattgtgatatactttattatcgtcttttggtttgtacagctcgaaggctcgccaatggtggttgctcagaatgacaaatttgatggtaactcattttgtgacttcgtgttatgcatgtgaatgcgtgtaggttcagaaaaagttgggttttccattttaattatgtacaaacatgataattgtatgagtaatccggcatttggtttaggagaagtttgaatgtattcggttaagtgaattggttttcatgattttgatagacaaatactgttaaaactgtaaagagctgggcataacttttggcacttttactcttcatatattgtgtagtatgtgttgctattataattttgcaaataccttgttcagaataaccaattccatgtggcttgttgcattgtctaatattttactttcaatcttcagcattacctagtgaataacagaaaagggaattgtaaggcccagtagtaaagttagattttcctgacatttttcgttttcagggtagataagtttgatatgttttggacatactttcattctgtccttctccatgatgccccaaattgttacacctaatatttttttatgtttctctgtctttctctttatggggcttcttataaaaagagaggaaatggaaattacaaagaaagttgtattttacactttgacagagctttaagggtgcctaaactggttgttatttaaggtctttctagatcttggacaatctatttttgttctagcataagttgcaaaatttgagtaatcttataagttgcaactatttatataatgaataaaaaagaaaaaacaattggtaggaatactgaaccaggttatgtagttgtttacattgaattcatgcacaatgttgcaaaatgaataccggtttcactggagtttgttttgtagatgtacaaacattcattttgttggagtcatttggtttaatccctttttcaggaaggctttgacattgatttggtgtgggaatgcagctttcatggagaatatagtatcatgtgatagtaaccaaggaaaagacttgtcggtgcaacgactcacttcagaggct

SEQ ID NO: 273880 - DNA, 4270 bp, Cannabis indica
acttgaaaagtatgagtaaaataacaatgcaagggattacttcattgtcatcgatatataatgattaaaataaaaaagaaaacttgtataaatatttatatatattgctaattaaatattctagaaagcaattaaaatataaagaggaaaaaatcttgatttcagaagcttcttaaatctatacaacatcatcaattacagaggctgaacatctcacatgtctgttattatgagttgtgatgatcaatattcgaccttattaaaattaataaagagaagtataattccttgtatgaaattaatgtaataaataacagcactacacatataaacatggggtccaaagctgaaatagaagagttttttgggggcacgagaatacaatgtcttcaatggtgtcatatatgtcctccaaatgtctccctcttgcactacattggctttatcaaagacgcacaaactgccaaaataaaacccagatatcaaacttttctaaaaaccactacaaattcaatgcttttttggcctatactggctagaggtggcccttcacttgaccctttatcatccatcctccaaaattcaaaaaccaaatagtgtcttccaaatatagtttcattaactactacattatacactagtgtaattaattaatatgtacatttgtaaataaaaataatcgtccatatcccatttttggggggattgattgatatctattaaaatctacattttaccttaagttatgcaatgtgttatgctgctaaaaaaagttttaactttcataattaagttaatgcagataaatatactttaaactttttccactacaacaaaaattatgcttgtcgctaggatttgttaacgtaagcctttgtatagttcctctaaatataaatgtctcgagtcgagctttcaggaaagctaatcatcgttcgaaaggagttctgaaaggctagcttatccatccgaaagagttgtcgttcggaaaggatatccggaaggctagcttgttcctccagaaaggagttccgggaaactagttgtcctccagaatgttgttctagatagtttgtttcagtaggctttgtgcctatcagggacttccttccagtttgtgcttcactagttttggacttccatccaagaagtgtgatcacgtccggagaaaattcgttgccaagagctgacttggagatctcatagaaaggagctagttaagtgatcggttaagtcttaaccaaattaactacttagttgtttgaatgcactgtcttttaagattcatatccttaatccataaatacaaccatcctcttgatttgataaatatgaaacaccaaaagcagagtacgcaagttttttgagagagagaaatttgattgagaagtatagagaaaactgaggattgagttttgggtcttgtaaatgggaaagcttctcagagaagagtgttaaagcgaaaacactgtgagaaaatccaaatagagaatcgctctcaattgtattgtacatgtgatcttgctcaatcaataaaaagaatttagtggcgttccaaaactggagtagagccataaatcacatcgatctattagacttaaaatagtataattccatgttatttttacatttttcatgcattgtttatttctggctttatcatctctattataatgtatttttttccattcttgaattgtgtttggttgatttttcattgctaattgttggttgattaaattataattagtttgattctacacaatagttaaaacttcccacaaatcaaagcgtagtcatcgatcaagatcgcagaatcaagattctttctactgcaacattcaatgtcatcattggtaagttttgaactagacaagttctcacgaacaagagactttgcactatggcgagaacgactgaatggcatcttagtgcatcataaagactccaaagccatcagagatgagatattactggccgagaaaaaataagaagagaaagttgaaatggaggagatggcctattacgcgatcaatatgtatttgtccaatagtgtcagaagaaagattttcatagagaagaaggaaaaaggagtctggaacaagctggaagaactctatatgaagtcatcaattgctagcaagaattactttctagaaaatttagaatgatattttctctttctttagataataacattgataggtttaaagagattatcgtaggtttggctaaaataaatcatagagttgatgaaaaaagctagacaataattttattgagatctctctcgattacgtatcacaaagtcaagactatcattaaatatggtagagatgtgatttctttggagaatgttcttgccacactcaagttgaagaatatttgaattacaattggagaaagaattcaagaaggacgaagtgtacctagcaagagggagatcactaaagagagtaatttcaaagagtaaacaccacatctctcgatcaagatcgaagtataggggaatgagtcatgaaagtgttaattacttttgtggaaggcttgaacacttgcaaaaatacttcaagaagtaaaaggagcaataattttttaacaaatcttattattgagataggaaaggcaaaaagcatcatcacaataagaaagattcagctgcaatcgtagaagacagtgatgattgctcagcaaatgaagaattattttccatctcagaatccttaaagaattgggagtgaattcttgattccagatgcacttatcacttgtcttcgaattgagaatcatcgtttgattataaatcagtttatgaaggtaaatttctaatgggaaatgacttttcttgcaaggtcattggtaccgggaaaattgccattagacagtatgatggtggaaccaaagtactaaaaaatgctagcacattttttgaattaagaagaaacctcatatccttaggtacacttgaagatgagggttacatacaagtccatgaacgaaacttgagggtcaacaaaatttctttgatattaatgaaaggtgaaaagataaatagttttgtatgttcaaggagaaactgttccagccgaagaagctagcttagtgaaaggacaagaattgaatatgcatctgtggcatcacagacttcgaaatatcattgaataaggccttgaagaattttacaaacaaggtatcattaaaaatttaaattcttgtgccttactattttgtgaagcttgcattttagggaaacaactttagctgaaactcacaacatcgaggcatacaacaaagaagatactcgaatatgtgcatgccaatctttgggggccatacaaagtgcctacttactctagtaagcgatactttctttctatagttgatgattttagtaggtgtgtttggacatgtctgttgacaactaagaattaattcatagaaatgttgaggatttggaaaactcaagtggaaatcaaaccgatctgaaagttaagaaccatagaactaataattgtttggagtttatagcatacctacaaccctaaaccgtcaagcatcacctttgataattgcccacctaattaaggagaaatttgcaagtgacgactctgatcattatgcctctaatataagaaaacatatccacaataattacgtgataccaattagttatggaaaggcttggaagtgcaaagagaacgcactacacctagtttagggtacacgtgaagcttcgtatttgaaattacctggttaaattacctggttacttatgttggaacttattttactaggatctagatttactaacatgtaggttgattaaaattctataatctaatgccctaaatatgaatttcctaatacgatgaaataaacacttgagagattaagaaatccttacattgatggaagaagaataatatgactccttctgttcagatctctagcccttgttcctttttgtagcaaagcattatcaagatctgaacctggatcttctctccttcagtttggttaaccaacgtcttccacactatgattgagtacttgacttcctatgagtgagcatggtactctatcactaaaggctcgaatcgattaagaacaatagaagaggttcaaaatcactatagaatgagctctcatttattagttgtctaacagggaatgaaaactaaatttagattggttggatgagaatgagagcatcatgttccttttatagtattttgactagggtttaggattttaattatatggattaaaa

SEQ ID NO: 273881 - DNA, 303 bp, Cannabis indica
aaatgaaatatatcatattgataggttggaaaccaaccagcagccacgtaaaaaaaaattaaaaagaaataaaaaaggtggtgtggggactggtctaagcattcacgagatagtgaaaaattgggtcagaaattcagacgagaagcattgataccaacatttaaaagggagagagaaggtttgatgcttgtggtcaatacctcaactatatgagaaaaacatttttaatagggtcaggcttagggatgatctctagtcattgtcaggtacaatcttagtacattcattagcatgctacaaatt

SEQ ID NO: 273882 - DNA, 841 bp, Cannabis indica
ttttagagctcaataacagaataaaaatacaagtataatccttaaaattctttccaaacctaacctaaaataaactcaaaagattcaagcacaaagcttgctcaaaacaacaagaacaacccaacaaacatcaacatgcatctcaagaacataaacacaacccatatcatgcttttcaacaataaaactcagcaagatttacaaagatcaaagccatagaaagctacctcaaattcaatccaaaggcaagctcaaaattccacaattacaaagctccaatccaagccaaatccaagcaatttttaaattttgaaatgggttagagaaagagagagggggggttcgggtatgagggagaagaaaccagaaaataaacctctttcttgccaaaaatttctgttttgctaaaaatcaattattaatgccaaaggacaaaaatgcccctagggccaaaataaagcatacacattaaacaagggtaaaaatgtcatctctaacataaatattctcaaataaaaattctgattattcacatataattataatgccaacaattaatcccagaattgtatttcggccccgaacccggttcggcccgaaatacccagttgtgactataccgcgccaacctgtcagaacacacttgaaaaataaacacaaaagatatactatataataatatagtccataatcaggtaataaattaatttcactgtttacccttctcaggtcataattactaaaaagcccctacgctcacaaacaatgtcttaacatgttatagatcatataaattctcatatattaaattatataataatataattcgttaataatacat

SEQ ID NO: 273883 - DNA, 725 bp, Cannabis indica
attttgaaaaaatagagagagaaagagagaagggtcaaattttcactgaaaggctaatgtattatcttctatctgttttgagtctatctttatctatttatagaagtccttctaagttaaggtttgaattatatggcattaaaaaaattgataaataaatgtctatatagagcttaagtggtcgaccataggatgtgggcccccactagttacaattttaatatcaatactatacaatcaaggagcatggtttagtacataaacaatcactgaaacagtaaaattaaataaaattagacaaaagtccttaaatctaacaatcttaatagttcaggggaaatttttaacagtcaaaaaagttcagggggcatgatttagtacatgtcaaagttcggggaagaaaattgctaattagcctaaaaataaaatagattttcttttctttcaaatataaaaattaaaaaaacctgacctggcttctattaatgtaatgtacttaaggatctctcttatttttatttttaattttttaaaaaaaaaggtattttatagatagagagaattagatctcacggtgatatataaattgttaagtggtattgacgatacacaatcatactagttaagttttgagtaaaagtttagctagccacattataagctttaaatttacaaacgagaactttaagaaaattacaacacaataaaagtaagtctaagacaat

SEQ ID NO: 273884 - DNA, 436 bp, Cannabis indica
taaattactttttttttaatgataggatctttgagattcatgaaaagttataaaaatactattggaataaagttgaggatgaagatggtaacataacatcataaaacactctacactaatttctctttttttttaaaaaaaaaataatgtatgtatatctatatataaaactaaaatatgagtacactacttaataaattaattttttttatcatgacggatagagtatacttcttaattgattttttttccttcactaggttaaaaaatggattttatggataacaacacacaagtttttacttttatttttaatagatagattttgagcgtgtaaattttaaaagaaaagcttaaatacaattttagtcggattcttcatttaaagtttagcaacaaagtttaaaaagaaggaaaaaaataaattaaaggtctt

SEQ ID NO: 273885 - DNA, 1728 bp, Cannabis indica
ctctagatgatcaactaatctgccgccaaaaggagcacccgttctaagagagcccaacctgatgatggcctagtggtcggaccacacgtccctgaagaactcaacctgacattggtcctagtacgcggacaacacgctcgaggagaactcagcgtgggaatggctagaatcctgaggcgagggatgaagtgctcaaccaaggaggtgcccaatttgtgggagaaagaacttatgaaatggagagccaccgttatagacgccatttggatgacgcatagcgtcgaaacactgagttagaatcagaggctgcctcacccagggcgacgtagggtaggaacgctcaaaatgaacctgaaccttgaatgagaagaccacgaggcagacctcgtggctcacgaaccaggagaaaggaaaaggcccgggaagaacaacccgaggaaaatgagacacctcttgagaatcaagacgaacagccagaaaggagataaccggaaactgatgaacgagaaatccctcatgaaaatgaggaggatcttggaactcaactgggagaacgaagaccacctactaggaatcaccagcattcttcccaaacccatagagcgaggactcgtgcgtaccctgatgagggaaatatgacaaatcgctcttgggaggaaagaacagagcgtgaagaggcaagtgtgactaataacaagcccggtcagcctaataacccaaacaaccaggggttgcgaccacttcctgtggaaggagagggcatcctagttatttcaagagggtcacgtattgcaggggaaagcaacaatgctcagaagagatatgtgaaagaaataaagaacgagcagttggtctttgccccagaaccttccaagaaggtgaaaactgaggatccccattacattcacagaggaagacgagaagaacgtgagataccctcacgtcaattcgctggtcataaccatccaactcgccaataagaggatcaagagagtgttaatcgataatgggagctcggtaaatatcatttataaggagactttaaagaaaatggggctcgaaaaggccaagttaaggccttgtatggtgaatctctacggattcaccagagttagcatcgccatccttggcataattgagctcgcattaaccgtaggcgaggcacctctaactactactattatgcaagacttcttagttgtcgacctgccctcagcctacaacatattgttgggtcgcccagcactgatcggactaggggcaatcagctcaatcaaacacttgtctttaaagttccaaaccccagagggcatgggggtggtgcgtggcgactagatgctagctcgctattgttatcgcatagagctgtagcataggaaggctacgtggcaggagaaaacaagaagaaggatgaagatcttgatcctcgagttcaagataaagaaacctactaaaaccaattgaaggattggaggaggttattcttgacctagggaatcccaccaaatgtgtgtagattgggaagaacctggacgagcagctcaaatagcaattaatatgcttttttaaggcgaaccagaatcaattcgccaggagtcatggagatatgatagggattgaccctaagattattttccatcacttgaatgttaatcccaactacctagcgaagagacaaaaaagaatgcccttggaattcgagaggaaaggggcactaaaacaggaagt

SEQ ID NO: 273886 - DNA, 1326 bp, Cannabis indica
ttttaaaaaacagaaaacagttttttaaaaaacagaaaacagtttttagactataaagccaaccacccttaaaatttctagtaagtgattttctttttggacagaaagagaaaccaaaaatatctcttttttaaaaaaaattctgtagctttggttttcacattagaatacataagacagcataaaaataaagagtcttgaagagatttaaaaaaaaaatgcaaaaaacacaaaattccaaagaacaaagtcattcatttagaaatcaaaaccacagaatagagattttacaaaaagggtaacaaaaaaaaacatacttcagaaatttcgagcaagaaaatccccgtaaaactcgaactttcctcatctatcgacaatatactatgatagtactgatacaaacattcccatttcaatgagacaataagagagaaaaaaataacataataaacaaacaaaagaaagaaaatataaactcgaattttacctggattcttctgtcggaatatacttccaatatcttcgatcatcaattctggtgatggataatccttttgaagcaacagacaagcaaactccacctgttgttttgtccaaccaaactttctgcaaccaacacaaaaggcttactcaatggtctttctaaatggcctgaattattcgaagcatgaaactctgtatggtcaaccgagaaaacatgagaagagataagagactagtctaccaataccatctttgttccaattcaataacttttctactgcttcaaatgacttcgtcaatggtctttctaatactactaagaattaaatttagagttcacagttctatgtatcttcttcctattatttttcctgcggactcgaaacaaaaaaaaaaatcaatcttctaaaagacataaccatgaaagtaatctaatttcatgaaataattagaaatttgagatccaaacctgaaaatttctcattttccaccatatttactcatcagccaaacacgtacttttgactaaagaaataaaaaagaagagggtttccatgattactattatccttttctaatcagaaacgaaaactgaaattctctcagagggttccaaaaatcccataatggaagcggcaaagctctcaggtcagtccccaaggccaggctttgattgcgaacccatcaacccatctggggccgaattaaaaaacaaagagaaaccaagacccatacaaggaagcgaaaacaacttgataacaaagaaaccccagataagagagggttctaaagaatctgattgaggtaagagatgggtgtaaatggtggtttaagatatatggg

SEQ ID NO: 273887 - DNA, 463 bp, Cannabis indica
ccaacaggtccttctactcgaactcatgcccagcaagcctctgtcgagaacgaacttcgatcatctagaagtcatgataagccagtgcctccagccaagaagaagcttaagatcaatcctccttcggcttcttcaagttcagaagaagaagaaccaatggaagtctcctctgacaaattcgtttctctccattccaagaaggagaatccagaggacatgggagtttcctcagacagtgaggacactgaactcgagccaaagactcaattgacaaaatatgctccaactcctgctcgttcttcttcagcagcaaaggcttctgttgctgccaaaggcaagcagccaatgaagggatcttctcctggtaacgttcctactaccctttctcactgttatcgtgataatgagcgtgattggaatttgtatgctacccgtaagtttgaaagtgagaggaattatgatt

SEQ ID NO: 273888 - DNA, 1030 bp, Cannabis indica
ctaattgcctttactaatcaaaaattactagagcggtcattacaaaaaccatcaagaatacccgttacactcatttttaatttcaaaattgtgactattttaaacaattaagaatttaaaataaacgtttaaaattgtcaggaatacttaactattgttgacggttttaaatagtcacgtaactttattagcgactgtcctcaaaaaaaaccaatttgaggaccgacgggaataagccttttgtaatagtgattggaggaatcattaagtaaggtcgtagacacaaacagatagacttgtgtcaaaaccatccttaaatgtaaaatttgtgtatcataattcattattaatttttttacatctaacaccatcttcaatagaatgctataaaaattgtgtgtatgtattttatagtccaatatttataaaattaaactctaatagtacgtagaggtgtgcataaatcatccaatccaatgacaatcgaccgatctaattacaactgaccgccaaacattagaattccagttgtgatcggatcggattggatgatatttttgaatatccaattggatcggatcggatgttggatggggtgtccaaaaatccaatacatccaacatccaatcgaactaattagtactttcatttagtttggataagaaattagattttatattgttatacgcaaaatatatatatgtatataaaaattaacgttaaaattttactttttttttcttggattggatggatccaatctaatctaatacatactggacctaaaatattggatggatccaatccgatccaaaaaaatattaggtctaaaatattgaataaacctaaatttatatgaaatacatccaacgaatagaactaatccagtccaacattcaatggatgttggatcgattggatggctgaaattaattggattggatcggatggtaaaatctaatatccaatataaaattggattggatctggatcgcctaaaaatattgaatgtgattcaatgaacacccct

SEQ ID NO: 273889 - DNA, 958 bp, Cannabis indica
tttcctttgattcataaatagagcaccactaataataattgctttatgaaactcaaatttacaatgaatacaaaaatttgaaacaataaggttgatatgataatcaaaattgaataactaaataatggtgagcattaatataaataaccagatgagtccattatttagaaatacccattaaattatatcttcctattttctttgcatccaaaccaaacaataaggtaagaagaaacttactcggagattgagctaagaagatgagacagagatagagagagagaggcaactacatatgttggttcgaagaattttaacttatttttacaaaaatattgaattttgagtaaaagtttacaattttcacctcgcgtaaaaaaatttatgaaaatattagattttgaacaataatttataattttattgctattcggaattttttataaaattattagattttgagtaaaaaatttatgattttacttttacaccgaaatttttataaaaatattatttttttataaaataattgtaaaacaacagtagaacaactaaaaaacaactgcgaaacaatattaaaaacttaacacaatgcacaatataaaaaatatacagtgtttttaaaaaaaattctttttttttaaagcatttttttaaaaaaattctacctcatagtaaaaagaaaaaaaaataagaaatttcagtacgtggtgtaaaaatccattttaatttggagaaagatgataccataacacatttttaacaaagttaggactcatttggtatgcaaaattggactagattagatagaatagtatttgggcatgctaaaaatttagataactaatccacctaatctcatgtgtctgagattattcgctctaattatttatcctatatagaggtgggacaaataattctatacaaatgagatcttttttattatttttttaatttt

SEQ ID NO: 273890 - DNA, 852 bp, Cannabis indica
ttttatataataagcatccaagagaaaataaaaaaaatgaaattaataaaattttcaattaaaaaggtagaactaatagagtttttaattgtgtaataataataaaacaaaataataaggataaaagttaaaataagaaagtttttttgtttattatggttaagtgttttaaaaagtagatgagttagtaaaagacaaaatattaaatttgtctttttattactgtacaatgagaattatcaaaatatcatattctcttaataataatttatttgacttttcaaagaggtatatatatatgtcattaggttatattttatattttattaatatcaatgtaattatatattattatgaaggtcaaaagtggtatgtaatatcacaccattaccacactttcacaatagtaacaaataaaataattttctaatatatctataacaataggacttgtttttgttttttccgcttttcttttccccccccttttttttttttttttttaaattttattgtatttttatttatttatttattaatttttttttaacttttattgattattattttatttgtttctttttttatttttattttattttgtttatttttttatttttttatttcattttgtttattttttttattttaattttatttttttttttaattttttaatttttttattttattttgtttattcttttttatttttttattgttagaacttaaaggaaattcacatagggcagatttccttttactaccttcggttatttttgtacaattttaaagtaccatgtgtcaactatatgggtcttatatctcagtcctttaattgtagtctatcaa

SEQ ID NO: 273891 - DNA, 3109 bp, Cannabis indica
aaagtctaacacacatgcccgtagcatgtcttctaaaacctgaatagcccttttagactatccatccgtctgaggatgaaatgttgtgctgaatttcaattgagtacccatggctcaatgtaggctctcccaaaatcttgatgtgaacttcggatccctatcagagacaatggactttggaacaccgtggagactaaacatttctctaacatatagtctgcatagtgatcaatggagaaattcgccgccaaggaaaaaaggcacccacactgtaaaaccggcaacaatgacccacacagagtcgtactgtcccgtagtcttaggcaatccaaccacgaagtccatggcaatgtcttcccatttccattctggaagattcagtggctgtagcaaccctgtaggcctttggtgttcattcttcacttgctggcaagttaaacactttacaaaatatttagctatatcacttttcatcccaggccaccaattcatcgccttaagatcttggtatatcttcgttgtttccggatgaactgagtaaggagtcgtatgagactcattcaagatttttcttttaatgttaccatccataggcacataaacacgattcataaattgtaacattcccgtgtcatccactgtaaagtcactaatctttccagtcgaaaccctatctcggaatttcactaactctggatcttgcaattgtgcttctttgattcgctctagaatagtagattgcagggtaattaatcaaagaggatgtttgtgaagcagttctgtccttcttacatttagggaagttactcaaagaattgaactcaactgtcatcacacttattccaaaagtaaaatgctcgagcaatgtaagtgatttccgtccaattgcgtgttgtaatgttatctacaaagttgcgactaaaataatttgctctagattgagattagttttgccttttctagtgtctcaaaaccaaagagaatttatacaagggagatatattgcacataacattatgatttgcaaggatcttgtcaaacactatgggagaaaggccactagaccgaatcgcatgattaaacttgatctaagaaaggcttatgatacactagaatgggatttcattgtaaaaatattgcaggctctcaatttctcacagaaattcatacaactagttatttgtataagaactccaagatttagcataacttttaatggctccttacatggcttttttgaagctaaaaggggtatgtgtcaaggtgatccaatgtacccattaatttttgtgctaactatggaatatttatcaagaatactagatcgggtggggaagaatgtagactttacatttcatgaatgatgtttcgagttgaagcttaatcacctaagctttgctaataatgttcttttattttgtcatagagattttaaatcaatatattacttgttgcatggtctcaaattgtttttggagtcttcgggtttaaatccaagtgagcagaaattagcattttactactgtggtatggcaaattctaaaattaaaagagtcatagatacttctggtttttcgagaagtatgcttccattcaaatatttgggtataccaatctattctcgaagattatcagtagttgagtgtgatgttctagtcgagaagatgatttagaaaataaagatttggggaacaaggaatatctcttttacaggtcgggcctcattgattaactcagttctaataactttgcatacttactgggcatagattatggtacctccaaaagttgtcttgaaaaaggttaactcaatctgtcgtgctttcttatggaaaggcattgcataaacgaattgtcctgaatatgtggcatggaatcaactttgcaaaaacaaattggaaggtgggcttgggtttagaaatacaatcctttggaatatagcattcattgggaagtatatctgggctatagcgtcaaagaaagataatctttaggtaaggtggatacatagtgtctatttgaagaatgcaaactggtgggactataattcctcaaccttaagtagctggtattagaaacagatagtcaatatcaaagaaaaatacaaaaatgttcctgaattccagttacttatggactgggattatagcatcgatatgtgttacaacactcttttagaggattcgggtaagatggtttggtgtagagagatctggagcagatataatgtttcaaagcacagtttcattgcttggctagctattcagaatcgtctccaaacgaagattaggttgatgaatttcaaaatttgtaatgaggatgtttgtctttgtgtgatgctaaatcagaaattgtggaccacctattctttgagtgtgaatttcgcaggagaaaccttaatcagattaaaagatggttgcaatggaggacatccaaaccttctttgatgaagctattgagatggatctcaagaaccaagatgtcaagtttttgaaaaaaaaacgtgttttcaattgctattaagagattagtttatcaaatttggatcaatagaaatgagtgcttatggaatcaaaaaaatacaaactattgatagatgtgttcaagcaattcaatttaatgtcaagaatagaattgtatatattaaaaaaggaaaggtttcacatgtgaatatagggtggtttgagtcattgtaaatggaattttgattggcaagttagttcaatgagaccttggttataaggagctgtgtaggttgtaaacagtttttatggaggaatacaatgtaaactgattcatcggaaaaatattattataatgttttctaatacttgtattttttcatatatgacgggtgttgctcgttctcacgggagtgatagaggaagtgatcctcctcatggtgcgataaatattggagctaactatgtgcgaggttatataatttaacatatttaactcatgttattcatatttacgtaaatatactaacttatgaatatttaaacatggcagcagttcctccaaagaaacgtggacctcataagggattaagaatacgagaaaagcgagaaaaactcagacttccactgcctatcgagtgggacat

SEQ ID NO: 273892 - DNA, 794 bp, Cannabis indica
atggtctcaatagctcaaacacattaaaaattaccaatatcaccactaattcaccaacatgcatcaaatctcaaatgaacatcaagaacatcaaacctaaactcaaaaaatattcacataccagaatttaatcataaacaaaaaggatcaagaagttttaccacaaatttctaagctccaagcaccaaaatcacccaaactccttaacttttctccaatccaagccttaatttcaaagttgtaaaatattgaagatgataaagagagaggaagagggggtcgggttaaggagagagagaggacccagaatttctaatttcatttcctcaaaattcagcttttattaaagtaaatcaaataaggtcaaaagaccattttgcccctaaggccaattttcacctattcacacatacaagggcattctagtgaattcatactcaattattttcaaataaaaattcagattatcacccataaataataatgccaaataaatcaatccaatttatatttcgggcccgaacccggttcggcccgaaatacccggttgtgactataccgcgccaacctgtcagaacacccctgaaaagacaacacagtcatactacatgataatatagttccattaagcacgtaattaaattaatttcatcattttacccttctcgggtcataattactaaaatgcccctggctcaccaacggggtcttaacatataattaatcaaattaattcacatatactgaattatataataatataattcctcaattattcataattatctaattag

SEQ ID NO: 273893 - DNA, 813 bp, Cannabis indica
tgtaaaggagcatgataaacaatagtggaaaaagtaaagggcattttgtggtgtttaccaagacagcaggcattacaaaaatcagcagtagttttattatccatagtgatattacaagattgtaaagcctgttttacaactctagcagtagggtggccaagcctactgtgccataaagcaaattgagaattaacactagacacatgatttgtaaggcagtaaagaggaaaaggttcttgagtgggattgatactaataggtagatgtgatagttgtgtggaggagaatttgtataatccattctcaagcttcccaaccaataagatcttcttggaatcctgttctttgacatagcaaatagaggggtgaaattcaaagaaaaccgaattgtccttagcaaattgagaaacactgagaagattttttgtaattgaaggaacatgaagaagattagttaaagataaagccttagatgtgaaaggagatataaggatagagttaccaatattttcaatgcctaaaccagtcccattgcccacaagaacttgttcttgaccattgtagtggctggtagtggctgctggaagcaatatttgcaacatctggtgtgagatggtgagatgccccagagtcaggataccaactttcatcttggacagtttcaggtgtggcaatgtatgcttgactttcagcaatgttagcagtagctgggaattgaccaaaacactgcggacctgtgaatgatttgtcgaatctatagaaacattgcttgactgtgtgtcctaatttgtgacataattgacactgaggttt

SEQ ID NO: 273894 - DNA, 1768 bp, Cannabis indica
agtatttttgtaaaagttatcccaaattttagtatttttataagtttcccctaaaataattatttcataattataaaaaggtgttaaactaaatttattttgagaataccaaaatatgtaagtggggttctagctgatcaacccttttgcagatgcatagttgttttttttttttttggtggggatggaatgatgtcaagtcaactattagtaaaaagaaattcatattgtacatatgctcatcaacaagtgaggttccattctgaagtagttgtgataatatgttgtaaaattttgaagttttggattgttataataaattatagtaaaaggaatatatgtatagtacccaggtacgacaggataagcggagatgccccagtcattcttgaccatgtgcaagtctgtgtggcatattccacagtacaacaccttaaatgttacatctttctctccatttcccctgcaacccaccaaatatggcactaagtatacatatatattcttttaaattagttaaaaaaaaattaaaaacaaaaaataaaagtccctttgaaattattttaaactatcttcttgttgggttgaaatagtcctaaccaaagggactaaattagagtatgaaataattttgtctaattcccaagtatgaaaaatgtactacatatgaactaaattgtccaattccacatagttgtcccatgtaccaaacacacccataagttatttttttagtgggagtgtggaaaacatcccataagtggggattttttgtaaactgttcatttaatattctacggatgagattaaaagatgcactaacccacacaatactaacaataaagaatactcaacccttttaatttcagatgtagaattttaaatgaatggtttaacaaaagtctggtgaagacatttttcaattaaattttgacattttggagtgcttaacttaacaaactagcaaaatgtatgtaaacaaatttcatttgaatatttatatgtaagaagaacgatatgatttcagttcatctcagctcatcatcaaaaccatacacttactaaaacgtagctatatatgtactcaaaaaagaaaaagaaacagaggaatatcaagtaataataagtagtaactaactagtaaccttctggaaaattggaagggtgagagaatgccagaagtatctctagctgcccatccaaatgccttctgtgccatttttgtttgttctgaaatgagagggtgagactactagagtgaatttatatgagtgctcataacatgtgcttttcacttttgaggtgggatattaacaaaattaatgtccctactcataatggaagaaaacagatgtacatttatctgattgggtagttcacagcaataaagatcattaactcttattgttgtgggtttcaacagatttttcttctgtgttgtcgtgtgcgtgtcacagtgagtggagagtactgacccatttttcttcaccctatcctgtgtctcactatattatgcccgtcagagatctgaggcgctttatttccgaggcattttagagagtgaggcggtgaggaattgaaggaggataagattcaatgaatgcgtgtcaatttctggtgtgatagagaaatgttaaggtgaaaagacattaaaggtttcaaataaatgaggacattttaagagatacaagctggacgtgaataagactcataacatatacactagttctacaaccataattttgtttttaaaaatattaattaggca

SEQ ID NO: 273895 - DNA, 1530 bp, Cannabis indica
caaaaataggttagtttcaatatcaatggggaataacacaaaattacagctaagtaaactagaaaataattaagaaaatagaaagatactatgatattttaaatatagtgtaaaaaaatattttttgatatttttttaattaagtagttaaactaaacatagatattaaaatttttattttattattcgttattaatcaacatttaataatttaatatttttaaaattaatatttatagttaaatttatttagtaactatcgataatacttattaagaaatattccatatatatatttatgggtgactatttaatgatatatatttttattgtaactcaaaagttacatctatgtgtagtagattccattttgtttggtgagtgagtctctttcactaaaaatcaaaacaaacaagctctctctacaaaaaattagtgattaatgtatcaattagttaatcagaactatcaggagtagttattcaagatgcccatttgttacttattgtgattagtttagttataataatttaattgttctagttaaacatgcttagttatatataaactcattctgcaattctttcatgaattaatgaaatataattctctttctcttccacattcatttattaaaaactctcaaggtaatagattgaacatgtttaacatgcaagtatttgcaaaagacatgaccaagttgcatagactaataatgagtccaataaccacaatgcagctccaacactaacaccactgtaaagattcgatttgggtgaaaggcgggtaaaaatctttgaaatgttttaattttattttcttagaaaattttggttatttatttgttggaaaacatatttttaggttctcaacaatcttcaatcatgacaatgattcaatgttaaggatctgaattggaaataatgatattaaagctatgaccataagagtaagcgcgctcctgtagaggaaccaatttttttggtattcttgaaaggcttgtaactttcattcgaaattatttatcttatacatgtaatgattaatttttactcggtataatatggttatatgctcagtcatatgcctgctattcctattctatataattttattaccaccacctcgagttcagcatctagagccagtgtggtgaaaatgtatttgtaccaactcatgattttaattaaggataaatttaagagaagagtgattaaataaatagcattattatcttttaaatatatttgattgaaactgatcttcatatttaatgttaatcttcattttcctcttctctttcctttatgaagattttgaattgacctttcaccatgcatttcgaaataactttatacagtaattaaaattaatttttgaattattttgaattatataattatttattgaattattctcaatttaattataaaactcttaatataaaactaagtatacgtgctttaaacataacttttttctagtacaggaataaatatctataatgtttgaatatttaatatattttcg

SEQ ID NO: 273896 - DNA, 623 bp, Cannabis indica
tctaattaggattatgagactcttattagtttgactacataaataacattaagggttggtcccaaagctaatcttaactacttttttcttccattttcataattgaatgagaactcacatagagaagattagtcttgaaagatcatatattgtacctatcatattattaaaaaatttttgatctattattttaatcaaaagaaaaaaaaaagtgcatgaaagaaaaataaaagaattttttagttcactaagccactttcacatattattgattctaatggaataataatacctattaaaataattaaaatagatgagtaaattaatttaagaactaccacatatttataatgtgtgataaaaattaataataatatttaataaatggatgaatatgaatatttttaataagtaaaagaaacatgggcatatggagaagagagagtgagagggcgtaaagagtgtgatgagatatgatataaaaaaaaaatatgctaattatgattttttgccgcttgaacttttgatatgtaccaaattatgccatctgaacttttaaggccgttaaaatagtccctgaactattgaaattgttgaatttaaggactttttcctaattttag

SEQ ID NO: 273897 - DNA, 679 bp, Cannabis indica
ttacaaatttaaaactttaagtatttatagtgaacgtaatttattctaatttgaatagtgtattctctaaaagcatataaatattaaaataagtacttttaaaagaaaatccttgcttctgcggtagaaatatcagagccggccttatgtataagcaggttaggttcgtgcctaggatctatttattttagaggtctaaataaataaaaaaaatacatttaaaaaaaatgtaaatatatcttttaaatttttttaaaaataccatttatctttatagtaaggctttaatttttttttttgcctataactcatttcaactcagagccagtccaaaaaagcattggtgtatcagttatggaggaatcggatgatgtcttgtggtcttaattataaggtccagaaaattccatctcatgtgatcaaccaaattaagatggagattgagaatagaattgctaatgaacactcatgatttactatggtttaaacaagtatacaagatattttaaatgtacttactagttacattgtatatggtgaggaaagagtgaaactaatttcacattgttagaatgtacagaatttaatgttgcagtacagtgatctaatcttaaaaaagacaaaagattatgtttaaataagtatgcaatagttatttgaattcaatttttgtataatt

SEQ ID NO: 273898 - DNA, 822 bp, Cannabis indica
ctttagtaatttggatcagtaaaaaattagcactaatttctgatatttttataattatttacaaaattaattatctgtgggccccattgttagaaatgggcattagagttataatttctcaattcttgatattttattaaactctaggggtattatttgacttatatgtgaattatgttatttttgtaatttttgcacggtgacaacgaaaaatgcgatggatcgctagtttgatcacatgggtaagtttagaaccttatttcttagtgggcaatttattggagaaaataaaataccggggttaagcaggattatggaatttgaccattttacccctagttttcagaaatgccaaggttataacctaaagggtattttagtaatttaaaatggtggtctggtggttgcctaggtgagtgacacatggccatttaattttatcaaaggattaattaggaaatcctttttcatttagagaaaaataaaggaaaagccaaaaaaaatcacaaaatagagaactctctctcttcttctctttcagctaagacaaaagcataaggaaaccaagtttttcatcttcattttttggaattcagataggaatttaggtgttcttggagctaaggtaaccttagaacctatggttttgtattttgaagcatttactttgatttcaagttgtgattttgagatataggggttgttagggttaggttatgttgtaattcgaattataagcttaatatgagttaaatatagcttcttggagctggttttggtgtatgggattggatttatgcaagtttgaatttagaaacctaa

SEQ ID NO: 273899 - DNA, 3415 bp, Cannabis indica
ctataatacaccctattaaaatgggtaaactaatggaactcttaattgtttcagtatttataagaatttttagtttaaaatttttttcataatcgtgtacatacatagtattatttaaaacatcctacaaaattttaaaaaatttgaaataatttaacaatatagaaatcaatgtttaaaccgtctatttcacacgcgtataaaataaaaaagtcacgcgtgcaacagattctttgaacattatttttgacgtgttaaattttttcaaatttcttaaaattttgcaagatgtcttaaatatctataacgtagatcactataaaaaaatttaaattaaaaaattcttatagatactaaagtagtaaggggttgcatcagtacacgtgtattgtagaatttttctatattttaatatcacgcgcgtgcaacagattctttgaacactgtttttgacgtgttaaattttttcaaatttcttaaaattttacaagatgtcttaaatatctataacgtagatgactataagaaaatataaactaaaaaattcttatagataccgaagcagtaagagtttgcatcagtacacctactttaagggagtgtactgtagaagtttcctatattttaatatcgagttctataaaatttaatttaataaataataaaaaaaattataatgcattcttaaaaaagatatatcgatgcacatttattttttttggtatttaggagaatttttttagtccaattttttttatctacgtagttattaagaacatctttcaaaattttgagagatttagaaaaattaatactctaaaaataaaatttaaacaatctatttcatacatgtataaaataaaagaatctcaattgtaataaattatttaaaccttatttttattaaatgacgtttataaaaaaataaaattaaagtaaataagggtgggtggatcactttcaaattgtgtattataaaaatattttataaataagataagaaactgctaactaattaattttcacgtataaaaataaaaaaaaagcattactattaagcattaatagtgtctagtaccttctcgacatgtcgcgttgtaattagttagcgatacttcataaaaattattatattaaattatatgggattcgatacttaattagatcaatagcaatattgacacataaaaaatattagacactaaggtattctttagcatttctcaaaaataaaaatgtggtggtgcaggctgtcacgggctcaattcagatgccttcgcagtttggttttttggtacaagattgtcgtaatttactgtcttgtattagtcatgtgtcgttacatttttgttaaacggtctgctaatagagcgattcattgccttgctagagcgtcttgttaccattcagatcgtattgttagtgagcacagtgctcctcatgttgaatgtttatgaatgaataaatcatctttttaggtcaaaaaaaaaaataaataaataaacaatgtttaatagaatcgagattataataaagaaaactaagagagagaggcacagcatatggtactttggaccgtacccccaaaatttcaacacaagtgcttttagtctagtcttcttcttctctctcatggaacagtaacgtcctcttataaataccatactccacaaccataaatctcactacttcttcttctttctactttctctcacctccaaaatctcaatcttcttctctttctttccttttgcatggcagtgagcttgttatcacatgagatttccgatctctgtctcgccaagccggcgttgaggtctctccccgtcaccgccaccgtcgccgacgccttggccgccttgaaaacctcagacgaggccttcatcagtgtatgggactgcaaccactcgtcggaatccctggccgccggcgacagccacgagtgcaggtgtattggaaaggtgtccatggttgatgtaatatgctacctctgtaaagaagagaatctcttgtccccttcagctgccttgaaatcacctctctctaatattctgtctaagattccaggactcgtcattcatttggaaccatcttccaggtaattataattaccactgctctcctcaccctccatggaaactcaaacttttggagttttctttatcacatttttcttcaaatatttaactctctttattattattattattattattattattattttgtaattttggatcaattatttacactgatttttcattaatttactgataacatttctgatttaataattttaactaaaataaaaaagagattatattctattctgattctgattcctctgttttttcaaattctcagcttgttggatgccattgatttgatcctccaaggagctcaaaacttagttgtacccattaagagaagattaggtagcaacacaagaagaaaacacctgccgaaaagcggcggcgcgtctgcaacaaccaccattcacggcggtggtcgtgaattttgctggataacgcaagaagacgtagttaggttcctcctcagctcaatcgggctcttttccccaatcctagcaatctcaatcgaagcgctcggaatcatcaaccccgacgttctctcaaccgattaccacgcgccggcgatctcctctatcgatctaatctccagctcacttgctgatcagacctcagttgcagtcgtcgactccgaaggtttccttatcggcgagatctcgtcgttcacgttaacttgctgcgacgagagcgtggcggcggcgatcgcgacgcttacctctggtgatctgatggcttacattgacggaggaggtccaccggaggatcttgttagagttgtgaaccagagattagatgagaggaatttagaaggaatgttagagtatttcaacacaatttcgagcgggaaccaaacaatctcgtcgttttcgtcttcatcagacgaagaatcgtctttatctccgaagacgacattgtcgaggtcttcgtcggcgaggttaggccgatcagcgagctactcggcgaggatggtaagaagagtagaggcaatcgtttgccatagagagagctcgctggttgcggttatgattcaggccatagctcacagagtaaattacgtttgggttatcgaagatgactgtagcttgatcggaatcgtcacattttccgagatttttgaaggttttccgagaatatacaatggcataggtatgtaagggaagttttttttttttttttttttagtgtgggtgtgtgtgaacgtgtttgagatgagaaatggggtagagagagagtaagagagagctgagaaaataattattatttaataataaaaacaatggaaaagaaagtggaaagtagctgtgaataggtcgtactttttgttt

SEQ ID NO: 273900 - DNA, 1087 bp, Cannabis indica
tctagaccctggtaaaatatttccaacaactaaaactactccgttaatacttaaaaaatataaatatatcgtgctaacaaaattatatactactattaaaatatgtatcgcatactaaaaaatttatacataagcattatatataataaaatcgaaactaaatatcatcttaagtaaatgatatactatacacaacaaaaaaatacactatacaacaaaacatatatacctgcaaaaaaaaataaaataatataatataatattatttaaaaaaaaataacatatatcatattaacaactataaaataattctagcatacgtgccagattatataccatatttgtatataataaaataaaaactaaacatgcatgctctaaattaaaatgatatacaatacaatacaacctatatatcatataacaaaaaatatgtaccttacaatagaaatatatataataacaacaaataaaaataaaaatatatatagcatgctaataaaattatatgtcaaaaaatagaacttagatgacattttaagaaaatgatataccgtataacaaatacatatactatttaccaaaacatatattctaacaataaccataaaaaaaacatattactaactatactatatctaaattatgtatcacaattaaaatatacataccatgacaaaaaaattgtatataataaaataaaaactaattaaatattatttaaaataaataatatatcatacatttaagttatataaaaataataatttaatatatgtagcatgctaataaaattatatacctacattaattatttctattatattaacaaaattatgttcaactattatacatcgcaaaataaaaaatgaatatcatctatgaataataatataccatacaaaaagataaaaatatactgtacaataaagagttatttgcggcaaaaacctccttaagtggctaggtttttgcaactaacccccaattctaaaattttggtggttaaacctcctaaactcaagttccgttagcatttagccctttccatccatttttgggtgttaagtgccaggttggaatgtcc

SEQ ID NO: 273901 - DNA, 518 bp, Cannabis indica
cattttaacagatccgttagttgctctaaaaaatgtcacatactaatattaaattgtagcataagtcccttaaaaattcactttaatagagataagtccccaaaatattcactttgatggagataaattcctaaaaagtttactttgatgcagacaagccttcaatctcgaaagatcgcggtaataatctccaagctcgagattctcgttagtctataagtacccaatttaacaagttcacttgttgcttccaaaaatgtaaagtgttgatattttattggttcaaatcatatttttaattaaaaataattttaaaaactaattaatcaacatttgttgttttatctttcctaattccttttttttttcttctcgttcacttccaacgtcccgatttgctctacccgtcaccaaaaacccaccacccacacccacatctccttttctctatagcatactccctccatatctctcggtttcttagaaactaagaaaaaaaaacaaaaagctccatctct

SEQ ID NO: 273902 - DNA, 533 bp, Cannabis indica
gataaagtggtcatatattttcaatgatgatatatattagtttagaaataaaatattaggtatacgtaagtatagaaaatcaaatttcccatatatgtatatatatgtatacattcatgaagccgctttatgataaatattccatgttgaccattcactccactttgggtaaagattataaagcgttttgtataatattctctattcgatttactgttttcggtactaattagttacacaatttggagatgatgataaggttttgtgaatatagaagatcgtactacaataatattttagcttttatttctattcacttacaataagtctactgggattctgtttaacttttgggggtatatatagtactatcacaagtcacttatttattacattaatttgcataataaatataaattgctttttaatcacgttttcatttattgtgtgccaaatatctgttaattattgtactttttaactttcctcacttctcttttttattcatatgcattatgcatgctacataaaaa

SEQ ID NO: 273903 - DNA, 713 bp, Cannabis indica
aaagaaaaaaaaagctacataaatgaaaacgccaaaaatccagattttttactgaaacgattcatgcccgtgagctaaaacttcaaaaagaaaaaaaacttacccaagttatatatatgttcggtcagctaaagtgtaaaaaactgatcatatatataatccaaaatcgaaaacattctcaaaattgcgatttaccatgaatattgtatatatgaaatatatgtagtttaatatacatggtcagttttaataaatacttaaagtaatgagtgtatacacatagccttatctatattagtatgtatatatggaaaagggatcttaggcaaagaaaacatagccaaggaaaaaagctagcgtggcacttgatacattttataaaaaaatataaaataaagaattataataatgtattgccagttttttttctatatatacatatgtatcaattatatctatatatatatacaataagatcgtgaaaatttgaaggggtaatccaatccatatatttgaaacccccagttgatcatgaagaaaagtgtgtaatgcttactgaactgaacaatatatacatatgtaactacatttgaaaagcacagactgaatttaggattaattgaaatgtactgattgttttatgttagtccaagtgggagtttgttaggctttgtgccttaaataaaactctatttcaatgtaatcttttctat

SEQ ID NO: 273904 - DNA, 875 bp, Cannabis indica
aaagaagcttttactccactccattgttgaatatccttgaaagcttgaggttgaagatgaagacaatggtatttttggatttggggtaatatggattgatttttggtgttgagtttttttttttttatggaaagtgaagattgatgattgaaattggttttaggatggattgggattgagaaattggtttgaagatgaaagaattgaagatttggggaagaaaattttgaaatttttgaatgagagaggttggggacggctgatggttttgaatttgggtgtatggttgaatggggggggaaaatggggtatttatagaatttcgcgagctggtcgcgacaagcccatgggctggtcgcgactagcttaaatttgaaaaaaaaaaaaaactgggctttggaaaattgcgtggtcgcgaccacgaaaaagggtcgcgactagcacaagccctgattgcgaccactggaaccaaaaattttctcgtggtttctgtaaagtcccaggtcgtgactaccaaaaagggtcgcgacccaggaacctggtggtcgcgaccactgggttcccagtcccgaattttttttttcacgtttttcacgattcaactggaaaagtttaatgtgtggtactttaccgaaaatttaaaatactaaaaatactaaaacataaattgaaaacataaccaaagagtctgaaaaaattaaagagaacacttgggttgcctcccaaaagcgctgtctttgtcgtcatctagccggacgctgagttgttgtttagagaggcgccagaataatggcggacttggcttggtcaatttgacctcccaagtagagctttaaacgctgtccattaactttgaaggttactggaccttctcc

SEQ ID NO: 273905 - DNA, 1925 bp, Cannabis indica
acccccaacaaaattggaaccatcttcataaagttttgagctttgaattccgtcttcaatggccgccgccgctgctgctgttgctgttacaaggcttcacatatgcccacatgggttaaacttagacctgttcaattccaaggctcacttccgaacgggaccgaccatcctgattggacccggttttagtgggtcagtgcgccctgtccgtagtgggtttggcttgaaaaagtgcagggcttataggaacgagagtgacgatggaggggacgcggaagagaaagagagagaaagtgcgaggaagtgtgggaaagtgaaggaaaatctgaaattgaacaaaggaagtgggttttggagttgcttgaagtatgctgtcacggctggttttggctcaggttcaagaacatgatgagtacggcaaggctgtggccaagtgtgaggaagtcttttcctccgtaagttattttattttgttaaattaattttgcttaatttggtaacataattgccatatttagtacaacaagacataacttttctagtttgctaatcaaatcatgatatgtttatctaacttatgttaaagaaaattttcatgaaaacaaacaagagttattttctttcatttaaggtgtttctcctttgtccttgaaaaacaaccagattgccgtccaaattggaagatatattgtgaccatgatgagtactggagttatactaggtgttggatttcagttatcaggtaagcaaaacatgaaactctcaaacacaattcgattgtgcttttttaccataacaatgacaaagtttactgtatcaaaaactgtttttgaaggtggtgacagccaaatgcacaccttaatctggtatagctggcttggagggattatcattgggactatgattggagctaacatggttttagaggaacactgtcgtgctggtccccgtaatgttgtcataaccggaaggtaccatctctttcgagtctttccattccatatttgcttattggccttttgcttgcacttgaaagatctaaaacagtgtttgttttagttgcaatgtataagagcattcttattgtaatttgtaatgttgatgcttatttttgattggatgaattggattggattttgcagtacacggggacttgggaaggctcttgctcgtgaatttcttctttcgggagatagagtggttatcgcttctcgcaggtgatttttagaaaatgctaatgttgaattcgacatgtattagtatgtagtgtagttttctttagttttgcttttgtttgttactttagtagactacctttttctttcctgatcatatgatgtaatcatgtgaaggcagccctgagtctgtagttgcaactgtgagagagctcgaggaaaacttgagggaaggtctactctctgcaggtggctcatccaggacaaaccttagacatgctaaagttgttggcatagcatgtgatgtttgtaaccctgatgatgtacagaaattggggaatttcgcttccaaagaacttggttacattgatatttgggtgagagtttgccttcataattagtgactcactttgcgaaaattgtttttgttgtataaactcataatttaataattagaactgttggacagataaataatgctggcacaaacaagggatttagacccttgctgcaattcactgatgaagacattaagcaggtactttgatggctggttctttacttgggttatttgttggagcactttattggcttttccttctcctccatctttgcatctcaaatgagaattcaaggatgtcgttctatgaagttttgcaaatctgctgaaataaattaattgtccccattgatgcactataatctatagtttatttctagctacttcatgatgttgtctgctttatgtct

SEQ ID NO: 273906 - DNA, 572 bp, Cannabis indica
gctaattgccttttctaatccaatttattaaggcggtcgttacaattatcccccgttaaaaggatttcgtcctcgaaatctaacttgaatagctctggatatgttgagtcctcatatcaaacttcaactcccaggtggcttcctccaccttaccgattctccagagcacttaatcagaacaatagtcttgttccgaatttgaataggttgttctttataggataagtctaattgcagttcaaggacttcataactcaagatatgagtcgggtctaacacgtaacatgaaaatatgaaatatgtcatgaacagccgacaatgctgattgtaaggctagctaaaacgctacctgcccgatcttctcaagtatctgaaatggcccaaatgaacctagggcttaacttatccttccttccaaaataccttatacccttcattagtgaatctcgcacaaaacatgttctcctgtcttaaatgtaacgtctctgcaccttaggtcagcataactttctgcctactttaagaagcaagcatccaaatttttgatttaatcaataacctcagtggtcctc

SEQ ID NO: 273907 - DNA, 999 bp, Cannabis indica
aaaagaatgaatgaatgaactgatgagtatatatttgaatcatgttaaaactaggatttgatccaatccaataactagcttgagagagagagacaatatatactgatctcactgattcccatgatgaataatatcattctgaaatattcccatttcagcaatcatcagggttatgaagcttaaaaaggggtacatctatacatgtattccttccattatcaattctttcctttctttcgtttatttagtcctaattatggcctacttctgatcaaacacacaaacttccatgtacatacagagtaacagatttatatatctatacatatattttgtaattgaatactttgattccctcccagatttcattttaggttctataagtagattttaagtaatgaattaatttgaatttttttacttttcctgaaactgattaggctaacaactaatgactgtactaattacatatatgaacaatattaatatcagtttttcaccttaattatatattaattttagttttatcattgaagcaaaagtcttttattaatttggacgtacatatagtagtcttgtcggtataatattttttctttccctgtttctgttagtatgtcctttcttaaaaaatgcagagctcgctcgttagatagttacaaattaaagaaaagcattggcatgtgaatgattgtctgtctatgcaattggttctatatatatatttataatgtgatttagtatatatatgggtccatataataaataatatgatctttcctataatgatatattgtcggtttcgatggaacctaataaattatgaacacattaatacgacatatatagatatagcatcagtgtatcctagttatttgtctaacaatatcagtcaccatataataataatttgtgaaaaattctttcttttgttgggtttaattatgtacgtaaatctctatgtgtgtagtcgtaataatgtagggactttacaaatta

SEQ ID NO: 273908 - DNA, 1607 bp, Cannabis indica
  modified_base (40)..(40): a, c, t, g, unknown or other
aaaaaaaagtagtaaaaattttttaattttatttttttanatatacatatatcttttaggttataataatacatatatcaataaaattaccttataatatttattgatgtagatgaaaaattaagtgaagttttttctttttttttttagaaaaaattgttattattaaaattgagagtcattaatatattaacagagtagattggggagaaaatttatcccaaccaaaaaatatatttatccaatcgaagaggaaattacttagctaaagtgaagttgatgcatgtaaaatagaaacttaaggtctaaaggtctaaagtagaaatttgaggtaaaatggaaaaacaaaaattataataatttattttaaacaccatagaaactattaggagtactcttaattgatttttttttttcctcaacacagttttggcgggagcagtttgtggagtagtaccaaccataatagtgatgggaattttgttgtacaaaaaactaaaccaatcgaattcgaagaaagaagcaataaaaactctagtcaaagagcgagaactcagtctccaatccaaaacaagtggcaaatctgccagaatcttcaccggaaaagagatcatcaaagccactaacaacttttgcaagtccaatctcgtcggctccggcggcttcggcgaggtcttcaaaggaatctttgacgacggaaccatcaccgccatcaaacgcgccaagttcggaaataccaaaggaactgagcagatcctaaatgaggtaaggatcctctgtcaagtaaaccaccgtagattggtgcgtctcctcggttgttgtgtagatcttgatcttcctctcctgatctctgaatttatccccaatggtactcttttcgaccacctccattgtcatagctccaaaaagtatgctccgatcaagtggatcctccgcctccaaatcgctcatcaaactgcagaaggcctagcttacctccactccgccgccatgcctccaatctaccaccgtgatgtcaaatcaagcaatatcttgctagacgagaagcttgatgcaaagatctccgattttggactgtccagattggttgaagaacaacaaagcaaaactaacaataataatagtgaaatagaggataataatattttcacttgtgctcaagggacattgggttatctagatccagaataccatcgaaacttccaactaactgataagagcgatgtgtatagttttggggttgtgttgctagagattttgacggccatgaaagcaatcgatttcaatagagatgaggaggatgtgaatctggctgtgtatgtgaagaagatgataaaggaagcgagattgatggaagcagtggatccggtgctgaaagaaggaagttcaaagattgagttggagacaatgaaggcattggggttcttggcggcggcttgtttgaacgatcaacgacagaatcgaccatcgatgaaggaggtcgccgatgagattgagtaccttatcactatcgtttcacagactactaagtttataaattaattatggctataactagtatgatgtaaactcatcattatctccttctatttgttttttttttttct

SEQ ID NO: 273909 - DNA, 969 bp, Cannabis indica
caaagtcacacatgattaacaatatagcaaactacaatcgacggtagaacctcctcaaaccaggataacttatcgtctaaccgaagggcatattttgtcaaaccatgagctgcagaattcttattgcgagcaacatgggacaaaactacccccgataatttagacaataaagctataacatcttcaaaaataccccgtcacattgaaaaaaaaaaccttattataataattgtcctcaaagaggtagcaaaactgaaaaaacataacaacaccaaactaaaaaatatagttatattaaaatgacaatctttaaaataaaaattaaaatacaaacttagaatttcacacacaacccaaatcacaagctcaatattactaaaatgctaaaaaacaaccaaatttactagccaaaagtattattactctttagtttacataaagtgtgataatgtggttatcatttaaatatgtggttttagtttcataggtgtgagcgtgccggagtggttatcgggcatgactagaaatcatgtgggctttgcccgcgcaggttcgaatcctgccgctcacgctttttatttacttgttaaaacaaaaactaattattttttgtgtacaccaaaataagtatttatttatgtcttttttttccttaacatttatatccattttagtatagtactttttttttggttaatacaattttggatcttagtaaaaattacatctgttttattaaataacaaatcgtatggatgaaattcggtcggttatggtgagttttaccaattttataatcgatcgtttagaattataatcgtataaaacctaccatacgacttttagcagttttttgcaattttttaatttggcggtttttgacagttttttgcaatttatggagattttggcaattttttatttaaccattttttttttcaaaaattgaaactgatcgccatatcaaaa

SEQ ID NO: 273910 - DNA, 1809 bp, Cannabis indica
aaaaagaaagaggcataagaaatctaaaagataagaaattactgcagtgagggccacgctcatgtcctggacttgatacacggggttggtagaagcgcaggtcgcatatctcttcatggcgagttgggttaggtcggcagcaaaatggctcatcatctccgaagataaggagctaggctaggtcccacgaagtgcttaaactagtctgtcaaatgatataaattcaaattccagacatctccagcatattcaccccggaaagatccatcctgagcatcccttagcgatttcttcagggcttccgcctttgcattccccttggtgtgttccccaaaggcatagttgtacttggccatccggagcagaaccctttcttcgtcaggatgaatgggagtcaagataatacccaaagtcacaagatactcatccacctcaaaagaaatccctgaatcagctctgggggctagagtatctacctccttggtttcgtaatagactccatctccacaattttccctttacttttgcagtctaggggagggatgatctctccttcttcctcttcctcatcaatcaggacaacttgatcctttagaaggccagcagacgatcttccaggagttaccaccacatcgcatgatttacgcaggccggcctcacgactgtatgtacacgcaagggcatccaggaggtcatccatttgcttcactgcttaaagaataaacaagggagtcagaacatttccaaaaagccatgcatgcaagaataacataatgaaactaatcctaccctagtgatctaattctgccatagcaaaggtatagattaaaatactggtgtcgtcgtcccctagaaagctatccgaagggaggaaccaactggaagttaggtatggggaatggtccaagagaattggtacaggaggaccagaaccaattcgggactggccctagaaacaactaaggtgggaaaaataaattttttttgcattataaccccaccgtgaagcgggtactcgaaacttatgcagttgaccatcaaattccactggcctaaggccagcgtaatcttgaatagaaggaacgtgatgaataatcaatggagacttacaagttccggaactgctggcatcaagagccccagagttaggaacacggaaaggaaagttagggcggatgggcgcctgttctttcccaatttcctcccggaggatcctccttgaagcagcctgggcattaatataggcctactcttgttccttcttcaatttatacttcttgtatttgtcttctgtggatgagatgatttcttctcggagtactttctcgatcttggggttacgaatatgagggcagagaaccttggaaaatttgaagtcgtccaccgactggccttctgagatcaacctggccctcctgcagttaacggtcctgactaggtcccccacattcaacttatccttattataaccagcaaaaactttttcatggtgtaagaagagttgagtgggagcggtgcgatgcatggaaggatccctgactcattcagtaagcaactccgggtgctcgacagctatgaaaccagaggagaagaagaattggtgacggtattctttcatgttcttctaaaagttaaaaggcaacagacccttgtttccagggtgggcctagagtttgtaaaaaccatcttttagtttgtcccccttttcgggacagacacaagttcataaaaatacaaaacctcatccagactggacgtagcccagttcgtggccacataaaaaatgtacaagcctgagagcagacgata

SEQ ID NO: 273911 - DNA, 1011 bp, Cannabis indica
ttttttttaaaaaaaattttacagttcgggttgctctgatggtttctatgtaggttgttataaggatttttagttgtgatttagattactccgttatttgatataggggtttctgtgtgaaattctgtaaaaatgacaaaaaaaaaaaatatattttaaagtaagaaaaaaaaaaaaaaacctatatataaatgtaattagaatggatcggtttttaattgaattttgaaattaacatctaataatcgatccaattcaattaaaatccaacttttaacatttaagtcaatttaattgtaattgaatgtccaatttttttataattagattagattccattcaattagattagataaaatacatgcattttcttactaaattaatatccatcttatttgattagtaaagagagcttctacaatggataggctttgcggcagttattcaagtgcaccgtaggggctggaaaggccactaggaacttcactgtttccttctttagaattttgtttatatactaaaatgatttttcctttgtttttgatggtttatgagtttagtgtattggtatttagttttagtttgatatatgtgagagtgggtgtagtatatgatggaccaagtatagttgatagtgtttgatgtttataatgggacaaaagagtttagtttatattggagaagagtggaaaggataataggctttctttaatttttgtttctagtttcttggtcactaactcaaacttaatatttatagggaattaaggttggtgctatataagcttctagatttttcttctttgttttacaatgttaactttataatacattttaagttataaaataatattaaatatagaaaaaaaaataagaaaagagagaagagtaaaaaataaaaatttctcactactttattttaatggagtgatctcttatttatacaaatatgtgagctataaattaaaaaactaaaaagaggaatagaaattacaattaatagtaattaat

SEQ ID NO: 273912 - DNA, 900 bp, Cannabis indica
tccttcagttgtgaaggtatttagattgacgcaaagaattgaatataaaactctccggagaattcctcccaagaattaaatcttcttagggccagcttgaagtaccatttttgggctatttcagccagagttgctggaatgatttggcatcggacatctccagatatttgttggagatatgtttggatctcaaagtattttaggtgtactatgagatcttctttctctgtgtacatcatccaagttggcatcttgaatttaggcacatgcaaggcattgatgtatgctgagaaaggtgaatcccttgacctatctagatcaaggttttatggttttgggctagccaagcccttgagcatgtctcaactgtgcttgcacagaaggatctattgctataggggcttggtttattgagctgcaaccctagattggctagagcctggtcaaccataccctgggaaagggtatgttcaaggccacccatccctgagcttgggagttgttcatggttgaccagccctatgctaggcagggcctggccgcccattcttacttgacaggatggtggagcctgtgcgttgacatggtgtagaccacactaattactggagttagatgaatctcagtatttgaagtgattggtcttacttctcaatttgttgttatcttaggtgtttccacccattcttgagcctagcaagttaaagattggcctttgggttacttcctcctggaagctctgggaagggagttcaccctgttggccagccagaggtgcaccactaaggtgctggttggccaaaggtttgccaagtaggggtactattgtgccagagatccctagttgacaccccagaccaatggttgctagagtctggctattctcgccaccaaatcttc

SEQ ID NO: 273913 - DNA, 1400 bp, Cannabis indica
tcatactacactacctaatatccatcctatataaatccaaaccaatacaaatatattctcaaaccatccaaattttaataaaaaaaatttagaaaaaaacataatagtaatttttatttattaataaaggctgatatggatgatccttctaattttctaggatcatctatttttttaataatttctacgttttgagaaaaaatgacatattcctattaaagtagccctgttatatatatatccctttcaataataataataataataataaaacacagaagaaagaacgagaggaagaaggaacaaagcatttataagagagaaactttaattcttgactttatcgagtcataagaagcaaatatcataagtagttgaatttcgagaccgattcgagatcaccaagccatgcgatgatggcaaggagtagtatagtaaaatatattatcgatcaattgcccttatcgatcgattgcctgaacagaacacagtccttcgcatcatctacggctcagccaatagagatggaggtcgttgaaggagaagttcctgagaccatatacataccactctctcatcgatcatacatgtatctaaacacaaataaaaaataggaaaggcatattggtaaaatcagtatttgaaaccatttgaaaattttggaacccttcagcattcaatcataactgtgagccttttaaattttgttttagctttttaaatttggttttttttccggataaatatgttacgattcaataaaataaaatagttcaaataataaatatctaattgatagtattaagcgattgattgaataataatttatattttatgatttaatatatgagattgaaatagttaatttatatatatttattaaaagaatattctgtaggtaaaaaattaaaaaatatcgtaattaaattaaaaattctgtaatataaccacatttatattaaaaaaaaacatataaaatacaaaacaagcttttactctatttttatttaaatggcttcaaatatttcttatttaatttccttttattaattacttttgaagttttatttaactgtaaataagaagctagctctctccttaaaatgggtgtgctgcagccgcatgaggtggaggcaattggaataaaggaagcattggataaaatttaatgggtgggttggagtcgttgttgagtcggattgtttaagagtaattattaatattaaaagtaataaaaatatggtcttatggccgtacattatttttgatagtaaggcattatatgccgatgagttgtgtgatcgtacttttaataatttttcgttactttatgtaatttattcattggttttagatgatttaaaataatgaaatttccattattattcaaaaaaaaaaaa

SEQ ID NO: 273914 - DNA, 924 bp, Cannabis indica
aagaaatgacaattattcataaacattgaatttaaattctaattatttatgtggtattatctctttgcgattaatataccatagattttgtaatcaataataaatacaccacataaaatacatgataaacaatataaatataattagtactagcatacaagttatagaatataaaactcaatttcataaaagtaattcataataaaatccttttaaaaagaaaaatattatattataactttgaaaaatatcacaatgaattgtctgcaataatatgaaataaggagtaaaattctcataataattaaaactaaagtgttcattgagtaaaataattaattcaaaaattaaagacgaaaaagagcttcatgttaaaattgacaatctccacccttctgtccaactatctgtctcaacttgctagaataacattccagttttaagtagctgaagttgaaataagaagaacatatacatggttaatagatctagattaataacctaatggaataataattttctagaacacatgaacttataacaaagttagaattaccttgtttctttgccaaaaaattaggacactggggtttctagtggcccttttcgttgcaatagaagcactttccttttttcttttcttttggattagcagcctttttacccttattagctatgttaacaactttaagaggcttcttgctattcttcttctttttctttgtggattttgaagtagaggcaatgtttgccttaggctttgtcgtaccagtcgtagcattactagaacttggagctttgtttcctcctttttgcagtcctccaatcaaattttcaaatgtctgatggttgtggatcaactcgtgaaagtcaaaagtcaactttataacaccccgatttcccgagatgtcacataggatagtc

SEQ ID NO: 273915 - DNA, 692 bp, Cannabis indica
acaatataaaaatggtatagaatctaatttcctcgaaattacactacatatctcttttaaattgatgtctttaatttttaccccctctttcaaaatctattatgtttacctcttttttttccaatcattctaccaattttactctttacgataatttccattattctttaattaaaaatttgccacaactttctcacaaacctacacatatatctccaaaaaatacacatctattatgtttgaaattatatctgcgagagtgtgaggattatttgagtataatacttataaaatgaggtatatttaaataaaattttatttgaatgtaaatttagttaatgtatgaaaaatagatattcttcaacttctcccgcaaaatagccttaaatttaaaaaattaagttagtaaatatttctttttaaaaatacttagcataatggtcatttaattaaaatttcaattataaaattataattatagccttgaataattaaccttaactttctatcctctattctcatatgtccagacaatctcgcatatttcttctccctcaaaactaggtgtatactaaatgatggctcttagaagctacaagtttctatgaaaaaataaattactttgaaagagaagattttactatagaaattgttaacaatttagaagttcaataaaatgggtaaataataat

SEQ ID NO: 273916 - DNA, 724 bp, Cannabis indica
ttttatttttttaatatataatcaataagtagttttagtcaaaaaaaaaattattatagtcttttaataaaaataactttttttaaaagttggattagagcagctttagcttctctaaaaattcttcaaaaaactgctttttgactgcttacaaacacatttttatcacagctttttcaaaaagcagcttttagcttttttaaaagttgcactaacatgccctaagttacgctgataacctttagtatattatgaaggagaatatgattataggaaaatgtgtaaactatgtttggctgtgtagggtaatatataatcatattcctattaattaaattacattgtatggttgagtacaaaaatcttatatattattttaaaaaataaaaataaaaatatttttttattatatctatttaatgttaattatatataaaaataaaataattatttattaaagaaatatatttattatttagtaaatattaaatgttattgtattttttattaattaaaatgaatatttatatatattttatcactatattatttatttttgtttgttatgtcatttatgtacaccattcgcacaaaatttatgtataataaatatttatatatatgttattactaataatataaaaataactcaattaaaaaaaaataatctcacagactaaatatatatatcataatattttttttataataaatgataatatta

SEQ ID NO: 273917 - DNA, 1541 bp, Cannabis indica
gcatggatcatttcttgagcaatcagaatattatcaaaaataagacgatcagataggaacgcactttgcgtgggagaaatgacatcctccatgatagacttgagtctattagcaatggttttggaaacaattttataaagggttgtgcaaaggctaataggtctgaagtctttcaaagaagaagcattttgttttttggggataagcacaatgagggttttattgatacaaaccatgctagcattgttgttaagaatattcagaattgcatcacacaaatcacccccctaaaatgctccaatttttttgataaaaataggcattgagcccatcagagccaggagctttatccccagaaatttgaaacaaagtagacttgacttcctcagcagtgaaaggggcatcaagaaaagcaaactgctgagaagtaagccttgagttgatagtggagagaagcagattaacagcatctatactgctgccctgagactggaacagattggagaaaaaacggcagacttcagctttaatggcagaattattagagataatggtgccgtcttcaagggtgagcttcctaataaagttagttttctttcgagaggaagctttctgatggaagaacttggtattcttatcaccagctcgaagccaatggactttggatctctgtttccagaagatctcctgcttataaagaaggctatcaagctgagattgaaggttagaaatctcaagcaactgctcaggggaggcaagaagagaggaagaaatgttactgagttgaccatctatttcattaatcctataggataaactattataggatttgttccaattcctaatggcatggatacaactgctctgtttattaagaaagttcaacaaagggtttgcactaggattggagttagaggaagaccaggaactattaaccgtggagaaaaaagagggctcagtgagccagtgattttcaaaaaggaaccttttatttttaactttgtacatactatcatcagacagaacaacctttaagaccctatggtccgaaccataaaaaccgaggtggtggaggagagcttgaggataatggtgaaaccatttatcattagcaatcccccaatccagccgttcataagttgagccatgtttccaggtgaatttattaccaacaaagtgaataggaactaaggagtatttattaagaaaagcttgaaaattaaccatagcataataaggtatagaagaggtactgcttctatcattaaccgaaaggtaatcattaaaatctcctaaaactagccagggaagttggggagcattatcaaaaagtctatctaagagagtccatgtatgaattttatcacgggcataaggagaaccataaaaacaggaaatatgagtagttacattgtcctcaaaggtgataatatagtcaatatggttggaggagtaatttaaaatatttacattaacatcattagtccaaaataacaaaagaccaccactaagaccacacctagggacttcaaaagcactat

SEQ ID NO: 273918 - DNA, 880 bp, Cannabis indica
ctgttaattacaatatatatcctatatatattaattttagtctaacttttgatcgaaattatatactagaatattttttgtttatagagatatttgttatagctataatatcattcatgtacatttataaacaattctgaatagtttacagtactgaaaacaaagttcctgatattttagtataccaggcgtattcaaaaaacttgaaacctatttctgtcactgtaaattcttaaaaaaattttaaaaaatttacaagaatgatattataaatataatgaacactgccatgaaaaaaattttgaaataaaaaattctaacatatattttcgaacataaagattgatcaaagattgtaattgaaggcaacactcctgatcgagcatatagaattgttgataggaaaatgaatcctaagaatcttatcctgaatcattaattgagagttaaccatctgccataaattgagttaaccagctataaaataagtttgtgttttgacaccgagagacaccaaattactctaactagcatataatgttattctctaaaatataagctttttttttctcctttttttaattagagacaatatactaaaattgtttgaaagagtaacattatttaaaatatttttgaagtaagataatacatgaagcataaaagaaaaaattttcttttggatttgaacccatctaccctcaagcatttttaggaggtcaatcaagtaaactagaagtgttccatctaaaccgtttcaaaaaagaaaaaaagaaagtcggtttgcctactaaaaacaaaaagcaaaaatggcaaattggtaaaaaaattagaaagagaaagggtgaaatatgggaaagtggaataaggagaaaagaaa

SEQ ID NO: 273919 - DNA, 584 bp, Cannabis indica
ttttcaaaaaatactttacttaaagttttaaaattacaaaaatgatatgtttcaagtaaacaaaaatacaactatagaacacttagaccacaacaagacaactgcaaaagtaataaaaaaataataagacactaatcttattataatatgcaaattaatattaacttcttggaattgttttttatatttacctaattttttttatacttaatatttgctaactttaattttttttatattattatgctatttttttttatataaaatttgtttgttacttcaatttttttcttttttttctagagttagtgactgttgaaataataatttattttttaaaaattaaataaatagttacattaataatagaaataataaaatcataattttaaaatgcagtatataatattagatgatgctgatgtccagtcacaaaaattgtcgttgtatttttttttctagtaagtgtcaccttattgttatatatactctgtatttagttaattactttatattccttttatatatatttttcttttgaaatattcctattgatgcttggtatttttcattcacttactagt

SEQ ID NO: 273920 - DNA, 1264 bp, Cannabis indica
tctctctctctctctctaagctactgtagacactctctctctctcggtgggcggtggtggaaaactggagcacaccccaatcacttaagaattttacaccattataattggtaagttgtgttttaagtattttgttagatattatgtagtttactttcgttatatgtgtcatatttgttggaactggtattttttggtctgaaatggtagagatctggtagatctgattttctgtcgaaatctgggtttttcagatgttatcgacagtttttcaatagaatattgatgctatgtcgaaattatgcgaagaatggtcagggtatcgacatgattttgacagtttatcgatatcatgttgattaaaaagtaaattaacataatttatttgacaatttgtcgacattttgtcgatagtatgtcgacattaagtcgaccatgtttgtcgacaatatatcaatagaatgttgatatattgtcgacttcaagataaaaaaaatgaagaaaagcgtttgacaggaaacaagtaaaaattgttgaacataaataaagagtaaacaggcattaaaacattaaaagtcattcaaaaaaaaacaaacactaaaaagttcattcaaaacaaataaaattaaaaaaacaaacattaaactaaaataaaaaattaaaattctttaccttgtcggtgagacttgcaatacttgcataaagattcaagcctcaccggtttaccattaaaatagcctaatttgcaacgacgacacccttcgaggaactctggtgctggagccggccatacagtagtcttgtgaaattctttttcaagttgtaggtagctccactcgttcgccagtcgttctttttcaaaatgtttatagtcatctagaactttctacatttgaggagtaattttaccacaaccaggctccttcttgatctcttcaggagttagaattaggtatttgcccttgttctttctaatagacatttagaacataagagaattataagggaagtataagagaaatttccctttaattttgaagtataagagaattataagagaagaacacttatgaattagaaagaaatatgcttttatagagcagaatacttgttgagaatgtaggaaatattaattaacattaaatgtgtaattgtacaaatacaacgcatgcaaggtgtatttatcgatacaatgtcgatagtttatcgtaaaacttgaacaaaagaaattcaatctacacattatcgatatgatgtcgatgtt

SEQ ID NO: 273921 - DNA, 1369 bp, Cannabis indica
cctatttgggtgtacactgaccaaccattacgccaaatattgcaaaagtcggacgcctctggacgacttctcaagtgggtggtggagttgggtcaatatgaaattactttccaaccccgaacaacaatcaaaggccaagccttagcagactttgtggtagaatgcacatgcaaagagaaagcatacgagaaagcaaccccgagccggtacaaatacctcagccaagtaacaatgaagaaaggccgacttggaaactacacgtggacggattggctatagatcagttatctggtacaggaatttcccttgtcacgcctgggggggcaacacctacacgttgtagtcaagtttggattcatggcatccaataacgaagtcgaatatgaagctctaatcgccgacctaaagttagcccgacaaatgaaagctgaacacattaaaatctgcagtgattcacagttggtggtaaatcatgtatccggagaatatgaagttcggggagaaaagacgatagcatatctgagcaaaatacatgacttgctcgcacaattcaaaagcaacggtctcagaaaaattccaagggaagaaaacacaactgcagacgcgttggctcgattggcaagcagtaatgtaagtgataaggcgaacttggttcatgtccagttcctcgaagagcctagcatcactggtacggaaaagatcgaaatgattgatacttccccaaactggatgacatcactagtcgcctacctcaacactggggaactttcagataatcggaatgaagcttgaaagatgagaaggaaggctgcacgttatatcatagtagagggaattatgtacagaagaggattctctatgtcgttgctcagatgtgttactcaagaagaagttgcacgactcctatctgaggtgcacgatggattctgtggaaatgatgctgccgggcagagtttatcaacgacaattctaaggcaaggttatttctggccaacgatgattgaagaatcaaaggcctatgttaagaaatgtgacaaatgcaagagattttcaaagatacctcgagctccgccaaacgagttaacacagatgtaaagtccatggccctttgccatttagggaattgacctgatcagacagttacccaaaggcaaaggaggagtgcagtatgcagcggtagcgtttgattacttcactaagtggacggaagtcgaaccactcacaactattacatcaaagaaagttcaagactttattgtgaagaacataatctgtcggttcggattgccgtacaaatagtttcggataatggcaagcagtttgacagccaatccttcactgacttttgtgcgaaccatggcatcatcaa

SEQ ID NO: 273922 - DNA, 781 bp, Cannabis indica
gtcagtcatatatttcaaaatataaaaaccacattcttaatttttagtttgtttgggacaattttctagtaaaattcctggccacgccctaagacacgaatttgaccaccctataatctcatatgctcggttttaaaaattatgttaatattttaattcattaacatatatatataacttagttaattaaaagatttgttaaataaagagtaattaaagtattactgttatccaaaattttgtccacctaacgtggcatgaccacgtaagccaaagataaagtataggtggagtacaaccctgccaatagcagaatagagcctccatccaagatataggaaaaccgtcaagcagaaaccgaagggcgtgaagcgagccctcaagaactataccaacatccttggccagccaagaggagcatataggccgaccagggtgagcttataggccagccaagatctgtgcacaagctggctggccaagaagtaacttccggacctaaggagcctctgttcgaccaagggaacctgaactcttcaaggaaacaatgtacaaagttgtcctcaacttgaaaaaggctagcctcctctttgtaaagctatagtgacctgctagaccctagtaggaccatggctggctagtattgacttgcgaggaccatggctggccaggattgacctagaaggaccatgactggacaggattaacctggcaggaccatggccggccaggattgacctggcaggaccatggccggccaggattgacctggtaggaccat

SEQ ID NO: 273923 - DNA, 4955 bp, Cannabis indica
aaaaaaccaaaaaaaaaaaacttaaaaaaacagagagagaaaagaaaatagcttaaatgactgaaatctaaatggggtcaatgacaatatgatgaatttgaatgacggtgttactatcaatttgggaatgttggttagtaatggatgtaatacttttgcaatttgaatgggtatagttcgtactcagtcaaaactggttaattatgagaaaacaaaatttaaatattactactatactcttctttttctgtttttgcgtaactatataaatttaagaccatgccaaaatacaactttacagtttactaagtactttaaaaatagtttccaagaaaatttcgttttacaaagataacaataaataaaatatatgaaaattgttacaaaattttggtagagttaaaataaaataaagctttgaaacaataatgtattaaaattttggtgtgattaaatctatcaaaaaaataatttattgtattggcatacatctctaatccagcttaggagtgcagatttaatttaaatcctttttctttccttcaacaaactaccccaatggcaatgcccagttctttggcaaatctttcaaacctcttcaactcataaaacctcattgccagtgccactactctttctcaaaataatccctactgcagatgacaatattaaattgctcgaataaattatctaatgggtcttctgacatcttgattccaattaggacacatgattcttaccttcttctattaagattcatttcttcacaaagactagaaatatcaggaactatgccgccattgcaatatcttataacaccatttcctactagcccattcaatatatcagctggttctcttgctcctccatgctgtaaaagcttttctcttagggccactcccgtgcttagtgacaacggatcctccttacacacattctgccatatgcttgcacttaaacacttggcatacaagtagctataataacctacgaatgcaagtttatatttttagaaaagagcatagagctgtggtaagtcatcaaaaataaaatgtcacattggggggtttataggttcacgccaactaccataagcagtggaatgatttccaaatgctaataaaaaaataatgattgattaggcttacttgcaactacattggttgtactagaagttttaatataaaattagggatcgtaataggggattattagagcaatacaaaaatatatatataattagggatcagtgacagtggatgacttttatgactttaacatgtggggatgcttagtactaagagccgaagactgtatatttctcaaatgctagaaggaaatgggttcaattgtgagagtactttatggattttaagcatacctgcaccataatttaggagatggttgaagcgggactgccaatgtgtgccctctacatgcctccaactagtatattttgttttcaagtctgcaacaatagaacttgggtctcttggtgggttttcctgctccccaaagagtgtctgatccattatggcgtaaaaaatctgagaaacagagcaaccaaagaaacactgatcagtatctccttttttttccctaagggaaagtctaaactatgcctttgggcggggtaggaggggagaacctgtcgttgtaattcagttgcagcaaacatctttctggcaccctccattgattcaaccaacttctgtggaattacttcaccagttgaataatgtctagcaaatgtccttaaaactcgataatcccatgcatagtacctaggcatgtcaccagaaacatatcaggttgattaccattacatccacaaatcatctaatagactggtaaaatcaataaacaatacagcaaagaataattatggataacatagtatgcattttgaacagtgaaacacttccatgaccaatgcctaacatgtttagtgagcatacaaattatgtgatgcacactacaatactacaatcatgttaattggttcgataaagcctaacatgtttcgtgtgcatacaaattattcagcataatgactaataataattgcagcacagtagcacactactcactcaaataggttagaaggtgtttctgctaaatcaagagcaaccctggtaccggaaaaatgttggtaatcctacagaagaagaaacagagtgagtgagcatgttcatagggggaataaaatagagaaattttatttcattttgttgatatttgataatcaacaagttgcttaggtcacataagctatttaattcataccgttcttgagagtaatgagtgtagtgcatgtccaaattcgtgaaaaagtgtctctagttcccaatgatttagtctcacatttgatggatcaggagaacctgaaaagttgcaaatgagagctacaatctgttgtatcaccagattcaccacaagcaaaataaaaactataagaataaactcagtaacttaaaaaatcttgaacaatgttttctaggataaatacataagcagttgtatggtactaacaggaagttggtattctgtctcagaaactcgacgaccgcctttaattgcaaaatgagcacagccaggatactttcccttcctcgagagcaaatcaagatacaaataccccaaatcaccctaaaacatatggatgtttgatgaattcttgtgaatacagtgaataactagagtatgagtaaacatagactaaaattgtgttcttcatattctagaaggactaaacccaagtccttgatggcgcatgcgaaatgacatcaagctcaacacatacaactattagttttaaataattttttgatactaacaactgaatcctctaaaaggcaagtgtcactctttcactacctaaatcttcaagccatggaacttttacttccacaagtctctttaatctttcattagaaacagatccgaagcaaattcatgggaattttgccaagctaaaaacacgaaattgtaaaatttgcaaaataacaacattgaatttacactgtgcgaccatcagtgtaaatttagggccacaaactgaccattatattatggtcgttttatggtcgcacagtgtgatgtttggtcactcccacgatcaaacatgattattttgctgataattttttttgaaaagttattttactaataaaattttccataaagactatttttacaaaatactcagattcatcaaacaattcttcataacagaaattagattcgccaaatcctaaaaaaattatgaacaaagatacagcaaatatagatcaaaagaattcaaagtactgactccatacagattctatgttttatggaggaacctcatgcatatttctttaacatgcctagaataagtgtctttgataatatcagatttctattaaaatattttccatctaaagaaaagcaaatcagagctctcaacatcaatttaaatacctcgtcaggatgatgaagtgacattttaagcacatctgggtgccacgattcaccaggtgctagggggacactgcaaaatgttgcaccaaataatgactgcaccagcactttcaaaccctcaatgcattgtggcaaaggaaaatatgatgctacaacctgcacaaaaaagaatcgtaaccattcctacattcataagcaaaatttttagctaaaagtagatacatatgatggttaagaaagtaaaatacatccaaatttaaagcaaaaaccttaaatgaaagaacagcatcactaatgcttatgacagaacaatgataaagatctctgaaattctcattgctgtaatagatattaaaaaataatttatatgcaagatttacaataaaatatatgcagaatttaccgaagaatccaagttatagacagaagacttcattaatgcagtgtagtaagcttcatcccatggctctaaatctccagatatttgaccacatttccctctcttaaaatccctaattttcttaaattcctgcaattattattttaaggattatatatggatgtattaatacatattcatgtgtgtttacttacacaacttattgaagcaaaccaccaccatggaaataatgatacctcatcagcactaggtcggaccatgttgctcatctctaccaaaaatgacatcaccacttctggagatgaagccatgttaggcttcagtgagaattcagcatagcttctataccctaatatctgcactcaccagaaacagaagataagtttttcccacaaatactaagtacatcatatttatgtgcaaatcattactagtaattagtaaaacaggaaaaataactactaacacctcaaattaaattgcaattggatctatctaaaaaaaaatgcaccattggatacttaatcacaaagctatgcatgagaaatcattcacctgagctagttcattgcgagtgcttataagcctattaagaacaccaagatttgcctgaggagaagagtttccttgaacatatgccattttcctcacctaaaaatgagatagttttaagtcagtttgataaagaaagattgattcaaagccctaaagtggcaactactatttaaaggtcaagtatcattaatagcaactacccagcacaaaagattcaaataaataaaaaaaacgaatatatttgaactttaagatgaaaattacctcatcatcaggtgtcaattgcagaacagaagatagagttgatgcatctgtttctatccggaagccctttttattcatggttacaggatttaatgactcccttgaatttgctgatgatgaatgataaatgggcttcactaaatggtgcaaattttttggaactcgtgatgatggaaatatgtccacacgacccgggtcaatgataatattttcactgtacctgaagcatatccaaaatgaacttagacaaaagagtgtaaacacatggaaataa

SEQ ID NO: 273924 - DNA, 2445 bp, Cannabis indica
aaaaattactaattagcctaaaatctaagtgttaagtgatgacagtaaagctttgtcaattttacagtacctcacactgtcaatttttttaagtccacacctaattaatttgattcacatgttctgtgtgaagaaaatgaaaaacggataacaaataataaaagagtggaacttacatccagctgggaagctttctccttgagtacattcattgcttcatcaggttgaggcacagtaaaagcaggaacaccatgctgtatcccaagaaagaagaatgttactaacgagtaatacttccctgtaagttttgttagacattacaagaaattccagttttcatatgcttcaaagagcatcttcagcaagtggttggcctggttgagtatcaaaagaaaagaaaaaaagaaagtgcaccttgaagataccagccttctccccagcaatttctccaagggtattacctgttatcagtatggacaaaagagaataattaataatcatcaggctcatggttttatcaaacataaaataaatcctcactggaagaaactatttaaacatgaaatattataccacaggcaagaaactatacctctatgacgaacaacttattgagcatggtttgtctaaaatccttttcgatatgacacactttaggatttatattacttgtgatgagtgaatgcaactaggtaagcaatgatacattgataatatagtaccctcatatttgaaatatcatgcctttgaaaatattgtacacacatatctgcaatatcatgcctaagtatttgttagcacctctgccacagaacagaaaactaaccaagaatttccatgtggtcatacccaagggaagatataccacatacaacgggtgcctcaacctgaaatattatgatcatctacacttaaaacaggtactgtgaagaaggcttgattgatctatttccaagacaataatttcacatactgcatttgttgcatcatattttcctcctagcccaacctccaaaatagcaacatctacctgcatgaaaacacacacggaaatttgattttttttttttcctgattccattttatacatttcttgtaaattaaaatgggaaaggatattgaattgaagcagcttgtcctcaaatatgacgtgacacacatcaaacctgttctgctgaaaatatcttgaaggctagcaatgcaagaaagcgaaaataagaaggcattggtatatcctcattagtcttttcctgaatacaaaaataataagtaaataaatcaagttatctatgaaaaataatgtttatagaaaaacaggcgcagggagagaaaggagggagtggatgccccatttcttgttgttgatgaagttacctttaatctgtcaaagcaccaccagaaatatgaaatatatttttcttcacatatttccaccctgaagttaacagctgatgtaagtttttggaaagacaaaaacagtcaaggatttaacaaaaaaaactcaggacaataataattttgaaagatattctatcaaacacaatcccaagttttaagaaaagaaaaagacagcagtagtcaaataaattcggacactgtcaagtcgatattataacccacccccacacatgaaaaatgataactgaatgtaatagtccatggccccacgtatgggtttccaacactcacccgtttaaacgaaacctttctctgacatcaatgagatgaggagaagtgaaaagtccagtgtgaaatccacaattacgtaatatagattctgtgaaggtgcaggtggagcccttttaaaccccaaacagaaataaaaaagaattagcatcacagtatcgtacgagcaagttctgacagagtgcacattaactgttttaacaaaattttcatcaacaaaaacatgcaggatattataaagttctttatagaagacacaattcagatgaaattaaaacgagtagaagataagaatttgatacctttccctttgtaccagccacatgaataaccttcattttggatatagactcctccaagtctagcatctattatttcaatccaaacaacgtaaacatcagcaaatttgagctcaaatacataattcaactattaaatccaaaaactaaagaaaaatatttgaatttcttcaacttccattaataattcatacttagtcaagaaaaaaaaaataaaaaaaactaaaacaaaacttacccaaaacttacctttatataatcaaatatcaggtcgaatctatcgccgttattgctcttatctgcacgactgcgtttcgtaatcaaagaagacaaggcatccatggcttcttggtatgcagttgctttagaatcttcatattgaaatagatagttaatcaagttaaaaattgaaaattttggattgaaagagggaaatggaaaacaagtaatgatgaagaga

SEQ ID NO: 273925 - DNA, 877 bp, Cannabis indica
cgtgtcatcaatatagttaaaattatataacacaatttttgttcacatgcagaatgatccaatgtaaaacaaaagaaaatgtaaattaatgtaatccgtactttttgcaattgaattaatttattttgaagtagaatatatattaaattagatctaaaatacaccataagtaaaataatcctgtaaaattggataaccctaattatgtcacaaaatatgtatattatgttacaaaatatgtataatttgagcatctctctatcattactttcttttttattcattatttaaattatatttattgccttattatgttgacattcatttttttttctttaataatatatgttatagttatttaaaatgatatataaatttttataaaattatgaatagcttattgccaaaaataaaagtttaaatattttattacatatataactattttttttgtaactatatcaatttcttttttttagcactataactattcaaaaaatttaaaaaatttataaataattctaaataaatacaacgtacacaatcatgaccttacaaaaaaaaatagacaatcatgaaaaaaattgactaaaaaactctcctagatacgaaaagagtaaagggtgtaccgaaatgctaattttaagatgtactatagacttaccctaaaataaaatatagaaaaatgtatgttgcaccatctaaaaaataggtgtctcgatgcacctcttcatattttctatagccagtatagttttaaattttttttttgtatgataatgtacattgtagttaaagacatacccaattttttttttttaaaaaaatcagaataatttaatgtaccaaaaactaaattcaaacactttgttgcgcg

SEQ ID NO: 273926 - DNA, 1437 bp, Cannabis indica
ggggaaccccccttttccgggatggtatctgtcatttttacgagacttcttccagatggacaagttagacttccgggaactctcttccagatgtcatctaactttcaaaaacgagaacaatttttaggagaccttatcatttagaggaactataccatatttttctatgtaaattagaaattaaaaaataatatataattaaaactaaattttaaatagacatacataaaataaaagtaaaaaagttataggtttggaattttgttagttgaacttatagttaataatattcaaaaaatatattaattatggtgtagtttttaagaattaatttaagttattagattcttttcaaaaaaaaaaaaagttaaataggattaaatcaagctataaattattatctttattgatatggtataatatttaattcttattgtaatagccgtatatatatacatatattcatctccagctctctctatacatagattacaaatgatcaaattatatcacgatacaatactaccaatatagttcaaataatatgtatgaccatatatatatagggagttgtcattaagaaaattgggcaaatagtttaaagtaaatcaagccttccgtaactttccaacatggatctctctctatatattatctacaatattgggttcagttattaaggttttaatataaatatttttgtacttttaattatgtaaccgcgtaaagaatgtcatttgtcaaacactactatactattacacgcttaaaactagcaattttctttcacaatacagtaaagttaaattagtggtgatcagctagcaagatatatatatagggttcaagatcaaacaagaattaacatcatagactaggtagagcattcttatttggtgtccaagatcatagttacgattctataattggttaataattttttatattatttattaaattaaaaaaatataaaatttaatattaaaatacacatataattctatgtcaggtcttatgttacttcacattaagttgcgtcataacatttttctcacagattatgtattcaagactaacgtttcacttttatttattcaaatacctcaactcaaatttgaatatgacaaaattaaggaataatgggtgctgtgtgtggaagagaaaggaatattattgtttaactcttctttttttttttaataaatactattttagactctatgttttgtaaaagttattaattggatcttctattttattaaataacaaaatagaccttttaatttctaaaattttacaaataggacccctgaactgattttttatcaaaataaaatttaataataatttgatctagagatgttatgtcaaaactggatatattttttgtatatgttcatgttaaaatttgtcttaaggttggttatattaaaaaat

SEQ ID NO: 273927 - DNA, 912 bp, Cannabis indica
gaaaagattctagatagtgatatatagtaactaatttatattttctaatttttaattaagtagaaaaatatatttaagttgaaaattgatttatttattaattttagaccaacttaaataggatatttttcttagaacttaaatagaattaataattaagttaattttattcaagatacttaattatttgtttctatttcatgaaatttaattaaataagtaaaatatatttaagttgaaaaataatttattaattaattttagacaaaattaaattagaatattttattaaaaattaaattagaattaacaattaagtttgttttattctaggtacttaattatttctattttaatgaatttaattaaataaaaaattatatttaagttggaagtgtgttcatttcagatcaagttaaattagaataattttcaaaatatattttattttattttaataatcatttccccacttaaatttcaaattgcattgatttaaatgtagatatttcaaaaaattagattaaagctgaaaattaatttataaattaattttagatcaacattaaatcaagtaactttcattaatgatttattaaaataagtagattaaaatatattatattttaattagaaaattagtaattagtttatgatttatctagattgatattttctaggtagacttttggtatttttaaatgtatatttaattaatagaaaattaatatttcagttaattttgttcaagacacttaaatacttgatatttttcttaagcgatttaattaaatagaaaaattatatttatgttgaaaattaattaatttaattttagaccaaaataaattagaataatttttctagttgtattttattttattttttttatgaatttcaaaaatatatttt

SEQ ID NO: 273928 - DNA, 4326 bp, Cannabis indica
gcaatatcacacaatccacaagcaatttccccacaaattttagtacttccacttcaacatttatagtactaattccaattcatatcagttgacatgagaaatcttgttatttctccaacatgcaaagagagaaacatttgtactataacatgaacaaactaaattttggggccaaataggtttattatgcaagagttaaatgagttagcaccctacttggaaagtagcaatgccttaattcactggttacaactcaccaagtaagaagatcatgtttcaaacagaacctaaaactttgagatgatcatccaaaaaggctaaactaacaaaacaataacacaagaaattggagaatatattggttactttatagtactgcttgtaatagaactatgaataaaactaaagcaaagtctccaatacaaaaaacaacataagttaattgatgaggcaaagtaattaaagtcacaatattattaattacattactatgagagaataaaatgaccataatgaaacaaacaattaaagagtcactaattgggaaccaagcatactttgggtactagttattttatgcctactaatttgaattatctagaagagtatgaattactggattttgttttacttgtatgtttttattttgaatcataggcagagaatcagatgccccatatgattaaaccattgacatgcttatatataaaaaatttcatattaattggtatgacatacgatagagacatgacatggtggtatggaatccatgactgaatctctgccaactgttctgagcttttcacagacctgtagatgtctccataccataccaacaaaaagaattcccaacaattccaccttcagaaaattcctcttgttgggtgtacgaacaatagtctcaagtaaaagaatgagtttacaaagtattgagctccttaccccaccttgaagacccttaatttagccaaaactgtttaatcttttgttctttgtcatatttagtaccaaaaaagaaagttgttagtggggaaaaacacttgtaaacatagttcaggcatctgtgaagagctatagatcaaagctgtgtctatagattcatatcaaagtacagtacactcaatatgcaaatctttacagaaacagtaccagcaatctactgaccaaaaataatacgtacattacaacttcacacacctttctagtcacatcttcacatttcttatcttcccctttaaaaaaccaactagcgctcaatttgaatggtgacatgagtgatgttatactcccttttaaaatattctactacattactcagcaccatgtctgcatttgcttctggcctgatcttgacatggcaagccagaaggatttttcccactgttatggcccatatatgtagctcatggatggccacaacatcctccatctccaatagccctttttcaagtttagtagcatcaatttctcttggtgtgctctccatcaggacttcgagtatgtttcgcagcatcctgaatgttgtccccaaaacaatgaccgaaaatatgagtgtgcaaatcaaatcaactatcacccattggggcttataccatataattccaccaccaatcattactcctatactttggatggaatccccaagtacatggagatatgctccttgtacatttatgttcctctgcttcttttgatgaccaccttcgggtttatccaatagcgactcagcaggatcttcagaatcatgattgtgtggatgatctttatgatcatgatcatgatcatgtttgagtgctctcatgtttatgttcatgttcatgagtatgagaatggccaaaaccatgatacatgctcaccatgtcccatgcccatgatcatgtcccaacaataactagaccatgactatgttaactataggccaaatgcagccacaacaaacataagaaaaccatctacttcacaagtcttatgaaaaatcctaaacaatggcttcatacaccagtatacctgcaagcagccatatgagctggatggaaatgagtgcaccaagaatttcaaccctgaaaaaccatagactggcgggattggcgttccagctagaagcccacagagaaaataaggagatggcaaaagcagcaacatctgagagcaaatgagctgcatcagtcaatatagctaaactgtttgctttgatgccaccaacaacttccacactcatgaacactagacaaagtgccactgctattaggagctttcgcattgctgctgatcgttctttagcatctttcgagtttgatccaacatcagataatccacaggaaacttccccacaaattttagtactccctcctcctctgctaccctcctctccataagaaatatcacctctgatctcaataatctgcccatgtggatgattttgtacttccatctgaagacttcaaggacaacaccacagaatattagtgtgttgctaagatggacaagaattctttaaaaccaggaaccttgaaacaaagttgtgtcaatgagtggtgtcatagtcatatgactcgtatttttcataagaaagaaacttatatgatgatatttttcatggatagttttgttattatagaagagaagatgatcaaattcaaaccatttgccaattcattttctatcatttacaggttgttcaaatatatgctttttttaaaaatttccatagtcagattgtagtacaaaccgaccttgaggattaagttaaacaacatagccctgctctagcaacgaatggcccattaaaaagggatataagaaatataagcttattcatttaattgatcacatttcaacaccattacacgagaatcatatataaatatctcaagggctacggaaaatcagacatcaatatctatcatacagaatagtcagaaagaataattaagcaatgaaatgatacaaaggaaacaaaccaaagaatatgcagttacgaagataaacaagaaccccacataggatattcacaatggtattttgataatcccaaaaagcttcatttaaaaaaaaaaaatagaattagtaaataaaagtgtggtgatcttaccaatatttgctattaagtcggtgattgaaattgaaatctttgcaactgttgaattgaatcggataaaagagggtctttattgtgagagggtgacactctcatcaatacataatgttttggatcttggaagatttataagccaaatcctaaacttggtcaaatatgccaggccagctgcacatgagtttgggcatttatttttattcttagtttaatgtctcaaaactattttatgagtaaatctcaagtgaattgttaaattaagagtttgaatgtttgatggagtcgttggaactgggaagtgacaaacatgatggacaataaggttgtcctctccgatctttgcatcaatcattacatataacaacttcataagtttgataaatatcattcatgtaatacatatatatatatatattatatatcatcatagtaatcattatatatatttttttggcttcactcgccatataatgcactttgtttatttctttttcattttctttgtcatggaagggaacgatgtcagctgtagttctcctggcccatacatttttttttttcattatttccagtaagaattcataatttatataaaagaaaactaattattttcagtaaatatgattgttattgttatttatcttcttagttttgtggcatacgtttaacatctgtactaaggtatgaatatgatagtacaatatgtactaacataatcatgtatgttgcgagtcacttttcaactgcatacagttccaactaactaggacaaaaaaacaaaaaatgtacataataatatcatttgcatttaaagaaaatgtcatcacttcaataataataataataatatcatcatcaatctattattcaatatacatatatatcatcatcacacagcaagaaaaatatatatatatatatatcatcatcaatctaaatttcaacccattgtttgcaccaataattaaaaagaagtgagtcgcaccaataataaatgcatgattatgttagtacagattgtatcttggtcgatgactctgtactaaacctactttatttttataattaataattgacgagaaatattaataattgtgtagttttaagggtgtttatctgatcaaattaatttgtattattttgcttatagtgcattattcgatttgcattaagtgccaatttcataatttggatccaatcaattacacatagtaactcaaaatctaatccac

SEQ ID NO: 273929 - DNA, 1303 bp, Cannabis indica
tggtcaatggaatgtttcaattgatttgtaaccacttcatccttcaaaaagctgaagccatctgtttgtccctggggggactgttgaccataaactcattaggcacagttgattccctatccccttggtggaaaaaactatgtagtaaagttcctcaaaagagtgaggatttttcgttggaaagcttccttagattggatcccaactgttaaaaatcttataagacatggcacgagcattaatactacttgttctttatgcaatatggaagaagaatcgagtctccatgctttgtggagttgtagtgctcttaaagaggtgtgtaaagagagaggaagatggtttggggtgcgggcttctagtcatgattctttctaattgttcatgcttcatattatctcgtgtcattcccataaggaatttgaccaaatggtgattgttttgtgacgaatttggtttactaagaataaatttattcatgaacaaactaaatcgaaagttgagctcattgttcaatgggctattgattatcaggctcagtttggtagtgcctacgagaagcggttgagttcttcgcctcacatgaacacccaatgtggatgttgcgttaaagactgagaggaagtatatgggagaatggggtggtcctttgtgatcctgacagggtggttctcgcctctggtttggtttactccatggtggtcactgaaattgttaacgctgttttaattctcaaatggatacagctgtgtaagcgtttgagatatttgagtttcagtttgagtctgattactttctgcttttaatgctttgaaagctcatcgctgtgatgattctcatctaggatctactgttagctaaagctagctttggtggaggaagagcaaaaggtgtggtggtctagctaccctctagaaaacatacgagatgccatacaggactaaaaaattaagaatgacactacttgtgaacattaatgctcgtgtacctattaaacatgctaaacaaatcgaggggtgattagtgttacagataagaaccagttataaaagtgcaattgagagttataattctggaaagggcatttagcatccctaatctcgtttaactctagcaattaaaccactacatgtgatttttcttctaattgttgatggaaaagctgatgtagcatcgccaatatgacaatatggaattacataaatgtaaaatccattgctccaactaaataacatccgaaactatctcttcttaccctctttctttctctaaaaagcgaaaaaaaaaaacaaagaaactaaaa

SEQ ID NO: 273930 - DNA, 607 bp, Cannabis indica
tttagtttttttttttctaatttgttcaattgttattaatttggcagttaaaacaaaataaaaactctaattaatttttctctctttcataaaataaaataaaataaaattatttttctctcttcttttttcttatatatttcctatatcgcctgcatctctcttcaatctatctctcggcgcaggaaaggactgtcaatctccctgccactcaatcaactcgagtcacgtacatggaaaagtattcttctctaaaatcaaacacacacacatatatatacatatagattatatatcttcccgtgtcgattcaaccgcaagatcttttcggttcaattatctttgtaatttggtgtaaatagctaaatccaatcttttgaatcaaagccaaataaacttttaaaaaattccattacctatatcttcttctcctcatcatttctttttttaatggttacattgtcgttagaaggagagcagtactacatttataaattttcatgacaaagaggtatgaagagttccattgtaatttatagtgatgtgattcctgttgtaacgtttttaactattgtctataaatctcaccaaacgataatagtatcac

SEQ ID NO: 273931 - DNA, 641 bp, Cannabis indica
ttatttttatatgctatttatttataaaattatttttggagtaatgaaaaatttgctgaatcatacaaaaaaaaaaaattaaataataatacaaacttataattaatgaaatttatatgacctagctacttataatatcatacatatgtgattcgtgaacaatatatatgtattgcctaactactatatacacttatacagcacatatataataaatatgacctaactacttatgatatcatacacagcacatatgtgattcctgacctaactacttataatatataatacacatatacatatataatatcatacatatgtgattcgtgacctaattacttacacaacacatgatatgacctaactactatacattatactcatataaagttctatgcattgcctttttattataagtctctccatcaacatatatacaatataaatcatatatatataagatgtcatgtctaatcatttttattcacattatttcatgtagattttaaatgccatgattattgccaacatcaactctcatcaccatgatccatcatttagaggtaatgtctttcaagattttaaaattttaatcccggctatagttatttttatagaatttacttatttattattattat

SEQ ID NO: 273932 - DNA, 499 bp, Cannabis indica
gagcaagaagtaccaatgagtgtgacatctgaagtagtactcaaacaccgggggactagaaatttggtcttaaaaattattcaatgcccaggggatggtgtgagtgctcaaaaaaattaggtggaggaattcgttgttgatgatgttttccatactccaacttgtgggaggatgttaaggatacttaaatacgaccccaaactgagtttagaagactcgactgaactggaggattagagatcaaagctattggttcaaagagctagcttccaaaaaaaaaaaaatgcttatttcttaatacaaaacttgtggtttaatctacaagcgtggtagtattcaagagctaccggcgcacaaagaccgaagagagactgaaaacttccttaacctaagatgtagtagcatacacattgacgaacctcaaggagagtatgaaacaaaggatatggacgaaattcgtaaccaggaaagtatctatgtaagtgttgctactcgaagg

SEQ ID NO: 273933 - DNA, 1918 bp, Cannabis indica
tctgaagcttatgtggattgaagcttaaagaataaatagcttaaggtatttcgatctctttcgtggtttgcatatatgttcgatatgtttatattattctacatttcatatcgattgtatatgctttattattttcatataatagtgtctaatagttggtattaaagtcatttttatctctgtcttgattattttgagttgttcgtgcatgtgtatatatatttgttagggtttatgtcttgaaaagcttgtaaaaatatttttgatttgtaaataagagttgaacattttgatatatgcatgaatgctaaattattaatatttaatattgaataattattttgattctgtgatcacctgctccagatggctagttacttccaggaagctgagaatcatggagctattatagatcaagaaactcaagtgaatttgatcttaaatagtttggctgcagcttttctgccatttacttcaaattatgtcatgaacaagttgacttttgacttcgacaagttaatcaacaaccttcagatttgaaaatttgattggaggaccgcaaaaggaggaaacaaagctcctagttctagtactgctacaaatggcacgaccaagcctgaggtaaatattgcctctacttcgaaacccgaaaagaagaggaaatgaaagaattgcaagaagcctcttaaagttgttatgttaatacaactaataaggataagaaggttgataatccaaaatcaaaggaaaaagaaaagtgcttctattgcaacaaaaagggccactgaaaaccccagtgtcctaagtttttggcaaagaaacaaggtatttctatctttgttataaactcacgtgttttagagaaatattatccccttgatttattatttctggatctactagccatatttattttcttcttatttcagctccagctacttaaacttggatcgctatcctagcgagttgagtcggatggttgaacagaagggtggagattgtccaagttgaagataaagcttgttatcttctttaaatttttgaattaattgttttagttattgaacaatttaactttaattattagtatgggattttatcccctatttcatattattgcaaacaattcattatgatatttttgagactattaataaaattttctctttaagagattttcattatgaattatttttataaaattgagcttcgtattttttaacttgtacgttaataccatattatatttatatgttatcatgttttatgtgttttgtgttttattattgatacaaaatctatggtatttttaatatttgaaaagagataatactacataaacacttagaatttaaaattcaatgtgttatgaataattgttatttcttaagcaattattaagatttgtttaataaaaatatcttttgatctgataggggtggaagaagttaagaagtaatatatgcagttcaaagatcttttatgtctatttaactctaaattataatcgaaactccacaaaatttctataacacttagggattgaagaagttattgattatgtagtttaaaaacttttaactttaaactctagactatactcaatacaccacaatatctctatggcacacttattttgattagacatagataaaatataataaacgaactagcaaattaactattagaacttattcttgattagagatgaaaatttataccgcggggatgggtaactgcggggatccgcccctgatggggtggggattccccatcttgatggttaatggggcggtggtgggggacaatttcaatacccgaagcggggatggggcgggggcgtggataatactatccgcaccatatctgaccccgatatagatatatataatttttttttgtttttttttcaaacttt

SEQ ID NO: 273934 - DNA, 714 bp, Cannabis indica
tatatatatatatatgtatgggtgcactcttaatgggtattacccatgaataggtaaaattagaaaattttgaatttttatgcttaatttttctatctaattaaaaaaaatctctcatttttatatcatatgggctgagattgttccatcggtagaaagaaataataaacaaataaaaataaaatttagggaaaaaaataagataagaaaaagttgagtttgacatatattaattttttataaacatatttttgatatagtacaaaatgagatactttttttaactaagtatctaaattgagcataaacttaaatttctattttattatttgttattagatcaaaatctaacggattagtatatttaaaattaatatttatagtcaaatttctttagtaactattaatggataatacccattaagaagtgttcgatatatataaatatatatattagggtgatctacaatgtatcccttaaaagaggtgcaccgttgcactttctatctgcttcgacatctaagaaaaatttttagtctatctagtcttgtatgttatggttacttaagatattctgcaaaatttttaaaaaaaattgtaataatttacaatatataaaatagtgttgaaacagtctgtttcatacgcgtataaaataaaagagttacacgtataacaaactgtttcaactctatttttagcatgttaaatttc

SEQ ID NO: 273935 - DNA, 2067 bp, Cannabis indica
tgatgacagtttttgtcgttttgaggatttaatgtcgtttaatagcaattcagttttttggcgtttttttaatgattatactttggttgaagaattatactctcgttagatatgagtttggttttaaattacgttcttcattaaacttacaaaatattagtatagaaataattttataaataaataattaattaaaaaaaaaaaagaagaagaatctaaacaaatccatatacactacttaagagcttgtagacagaattttatcaagttgagagactgtcaagaagattggtgaggttgattcactagcaactatacattacattgcttattcggttttttgagtctcgaattggcattgatgaggaaggaaaagaaggatcaactcatagcaccttcattgaaacagattcttcctctgtctcccaaaatgacctcgagcatgaggggcagcatcgaagaatctccctctattttccaagatgactcgaagtagggggcaatcgaaaacagtaaaatagtggtgaagacgttttttataagtctcgagataacattgagcaagaaagcgacactgaagattcctaatgaaaatgggaagaatcttatgtcgtcacatcacaagcatagaggtattagaacttgaaacatacaagttgtcctcgacttgaatttagtaccagtaccttggtactgaaatagggggagcatctgagacgatgttatcaataaaatcaaactattcctcaacactagttcactttgcacctagcaagtgggtgggaaaagattgaagagactcgcttgccactccgtgtcgatcaatgggtgttatcgtagtgaatggaactcgtactgtactgaagagagagagatttaaagtgactaagcctataaatttaaagtgcgattgcaagtgcttcttcatgaaacacaaaaatcaaaaagaaaaacaaacacacattatcaatcatagaaaacactctcgaagcaagacgatgcgtccagcagaaatttagtttacatggttggctgtacgtagctatttgtacaagaatctagcatagtagcatgtaatgctcgactcatcttgatcttgtatgaggtcaaaaagatgagcaacaaaattcaaacaaaagggctctggtgtgtttgattttaattaaaagggaagctttaactcaacattgatactataaccataagcaatcgccatgcaacacgctatactcgaacgacggtcgctccatacctgtgagattgaacagtattatatgattcagtacacatttttttaactattctcaacaaactaaagagaaataaatcaaaattccaaaaaccagttctcaaatgagcagcctcagcaacagcatagcttctgagcttctgaagaattcttctctcactaattcgaagcgccaaagaatggtacaacttcttatctcttacgcgacaacacttctctaacgcttcaatatcatcctctaacgaatttgaaccataaagactctctctaatatctgcaattgacaaaagagcatcactaacatttttgttcacgtacgtgtcgttgctcggttctgtcattcctttcaacaaaaacatgccctttcttttctttaacaccccaactgaatccacacaagctgacactacaaactccaaggcgttatatgtatgcataggtaacagaattatgtataacaaagttcttagctctatttgaggctctccatcgaacgagatctcgaaataattggaaccttctaggggttgacacttacaccaagggaaagagaacccgagatttttccacatagatgctcttgctctagcgcgtcggctagagaataaagacgagctccattcgactactatttccatgtcgatgttcactatgtcatatgggttattaggctctgtaaatccaaacttgtgaagcagtgtagcattacctatatagccataagtgttatagacctgacaaaagaagaaaactatcaaaacaacaaccaaaatactaacaaatttgaagctggcatgaatggaaattgtaatggaatc

SEQ ID NO: 273936 - DNA, 891 bp, Cannabis indica
aacatttatacaatttagttttagtttattattatttttaccacatgcacacacaatacatgcaactgacacgtaagtgattgatgtattacatcaatcgttctatacatcaatttcctcaattttttctcttccttttcttattatttttcatttcttttcagtttttttaaaaaatcataaccttcctcctccacgatcccaactcgattttcctcttcttttgttcttcaatttttttttcaactcacattaaccgaatcccataaccgttttccctctttttattatatatatggctataactcgttcttcatcaacttcttcccctgttcaaaagaaaagttctaaaatggggttgaaatctttagctaatagaaaaaaaggtaaacggcctgttgttgaggaagatgactcttattttactcctccattgtctaaacgtgagggagctcctccaaagaataaatcaaaggtgggtccctaggaaaaaaattcctcaagatgatgctcaaaaaaaatgatcaagatggtgctggtcttcgatctcaggtttgtttttggttattttttggttactcccctttttgaaatattttcgtattcgacctttgtgtgttttgtgtttatcaatttcactattttaggtttttgattttggcatttcttttagttttgtttggttttttagtttaatttatttgttctttttatgggtttttcatttttcgtttgtttagtattgatttctgtttcatattgttgttttttttatttttatttttggttttccagatgtgttattgtttttcatttcagtttcttcatttgatcatttctcatttagtaattattttttcatagttttttaatagtgtaaacaccttctgt

SEQ ID NO: 273937 - DNA, 925 bp, Cannabis indica
tttatagtagttcacccctatgtagcgatagtaatgcggctacatctactttaagtttttatttctcacaagatagtaattacaataatatactaagtatcaaaaaactccaaactctagagagagaaagtctaaagagagaagctttgactttgtgggtagttttttaaatgtgaaaaatgcgctaagggagccctccttttataggtggaggcccacaaaaataggagaaaaataaaaataagttgttttccactgttgatgatgatctaacggtaaaaattagcttcttgtggtgatggctaatttttgatgcccggggggtcccgctgtgggtaacctggagcttattttcataaatcccttagggtgaattttgatgacgatagcttcagcgttacgcctagagtgtgagacatgacttgatgagcatttaaatagcttcaaaatgcaagttcaatcgcataaatcagataaaaattgagttagttatggttgttttactgaaggcacttcaggtcccaacacccaggttgacatccagcgcccacgttgacatcccagcacccatgttgacataccatcaatttggacgttgggtaagtgtagaaacatccaagggatgtcctttaagatgtctaagtgatagtctgacaccagttagtccatttatatgttctggcgaagttggtcaccagttctcagagatattgctattttacagaaataggagactcgaaaatcttcatttctgggtgtgttggaaatgagaaatgcaaagttgtgaatttgatttctataatttcatatatcattgtatttgtgaaaaactagacagacgattgaaacgacatcagattgggataaacaaaacctagcacaccaggtcatttgttgacagcgcgttgggcccttaaaactgagc

SEQ ID NO: 273938 - DNA, 521 bp, Cannabis indica
gaaaatttaaatttaggcaattcgaagtaagagaacttgaaatctttggagattttaagttaccattaaagaaggtagttggtatatggtattgtgcagtgtaaaggatttaaaaccaaacttaaaattgtgtgatacagtgtgagttggtactgattttattggattgacagtttcttttttatggcacctggctaaaatgctcaaagaaaattgattggattatgtgtaccaaaaattgctttacatacctaaagcaggtgtattatagttgtaacagaaattatatatgggaatgtgaagtaatgataacaatgttaaactggccttcattaactccccttcatgggtttttctatggaaaactgagaaaataaacaagaaaacatgtaacaaattagcaatcaattgagatattcctaaaccaatcaacaccaaataactagattgaagagaaaactaaagtaggagtgctagctgatatagattcttgaatctcattgttcatgaagcaaattaca

SEQ ID NO: 273939 - DNA, 1002 bp, Cannabis indica
  modified_base (934)..(934): a, c, t, g, unknown or other
ttatgagactatgtatcttggagataacaagtcttgtaagatggtgggaattggaactgtaaggttgaaacttcacgatggtgttgaaggacgtccgactagtacatgattttaaaagaaatttgatctctgttggtgttatccctagatgtgttcataaaatacctaatccaatcagcaaaatacggatatctacacttgtgcggattagattggattggaaaatttaaaatctgtacttgtgcgaattagatgttgattgatatgtaaaagtaactgatccaatccaatctacacatatttatatatctatttaaaaaaaattatatatatacaattaatattttaatataaaaataataatttaaaaatataatacatattatacaaatatattttaaaatatagtatatcaaatgtatatttcatccctacttacaaggaaaatattatataaaacaatattaaatatttttttatacatataattattttcgtcttgctttgaatattttttttttgttttcctcaaaaaaattttttgttattttttattttatttattttaattttttatttgatacataaaataacaataatttattttattttgttattagttatgtaaacaaaatatttttgataataaatattaaataattcaatattaaaaagtaaccaatctaaaataacagattaaatccgaacttttacggattagattggattagattagagttactatatggattgaattggattcaaaatataaaatctgcacttagtgcagaacagatgcactatgagtaaaataatacgaattggatcggatgaacacctatagttatcccattttttttttcactatgacgtgccatgtctacatagtcaaaacaaaagacacgtgaaatacaacatgtcaaacaacccgaanacggtacactccgtgcagcttccaagtaaaacaagacagtttttaaaccctggccagccatgctgacc

SEQ ID NO: 273940 - DNA, 5245 bp, Cannabis indica
tttaaaaaatataatttttttaataaaaaataataaaaaaaatagtatgtgaccattgtttatattaaataatcttctcataaaattactcttgaaaattaaacacattagcaagattactccaatagataatttctattagagatgcttttatgaattttattgcggtgttataagtggttagcagttttttatattatttattaaattaaatatgtctttcttcttttaatgcttgtcagctgccctttagtatttttctgtgtatattaattaataatataatataataaaaaatatgtaacattgattattattattattatagaatgctgtggtttggtggacgatgcatccatgggagagagatgctcgtttggtgaagaaggccataaaacaggggtctgagtcgtacggtatacttgttgaggtggcatgcagtagatcatctgatgatctcttaggtgctagaaaagcttaccattctctctttcatcactctatcgaggaagatgttgctttcaaactccacgccacccctcaaaacaaggtattaattaattaattaataaccaattgatatagtaatttgttttttttttaataaatggtaaaaatgtttgattgttataacttaattgttttattagaaaaatataatagttatttcctatttatttattgaaaaatgctaaaagacacccgtggtcccaaacactactggtggcagggccggtcctgaaataaagtggggcttagaaaaaaaaattatttttaggctcttatgttagaaaaaagtgattttttttttttaaaatcaataaaaaaatatataattttgaaagaggaaaaataattttgggcccctgagtttggtgggccctaggcacaggcctagcccgcctatgctcagggccgggcctgactggtggccaatagcaatgcttttatttatttatttgattggggaccatatatttattttgaaataaaggataaaattaacatgtctctagttattaatataaaaacatgatattattaattattatgaacaacagctattggttgcactagtgagtgcctatagatatgaaggaggaaaggttaaggaagaccatgcaaaatccgatgcaaaaactcttgctagtgtcataaagaataacacacagaagaagagccttgttgaagatgaccaagtcttgaggatactaaccacaaaaagcaaactccatctcaaggaagtgtgtgaacaatacaacaaaatttcagatggaaagaacttggatgaggtataattattatttatatatgtttcttctttctctctgtataattcatttatgctgatttttctccaattataggattttggtatcactgatttgaggctccaagagacagtacaatgtctatgtgctccacaaaaatacttcactaaggtaagtgacaaaaacatgtacacatggcgctatagtgccacaagccatttttcatcgctcttttactattttgaccttactcaataaattatgtataatttttgtgttcggacttcaaatgagataatttaacgtgttttggaaaattgggaacaaactttatcattttgggttttataatctctttgaaaaaatgatgaaaatattatcaaaaatgggttcaaagatctcagtccataacaaaattatcttttaagcacaaatttgtacacttgaagaaaacacatcgaatctatacaaaaataaatactaatccatctaataattgactaaaaatgagcgtacatatatttgagtacttttaatttgttattagctgaaaagaataatattaatttttcttgcccaaattaggtattggagcaatcactacagaataatgatggtaataagagattgaagaaggcagtgactagagtgattgttactagagctgataatggtatgaaggatattaaagaagagtttaaaaagaagcttagtgttgatctctctaccaaaattggtgagacctcaaagggaaactacaaggatttcttacttgcattgattgaaaggggacactgataatttggagaatttggagaattcatgagttggtttgtcttaataatttggagaatttaataaagttggttttcgaattagtgttttctctctaatattgttattcttattcagttattatgatttggagagtttctcagttctgtttgtaatttttcttttaccaataagatgtaataagttaatcaaagtgcgcctacttctcgatttcaatattattgatggattgaatcattcacaaatttaagcttttccattgcaagagtgttagtggggaaattacagctcggttttagttttatgagattgaattgattcagtaaatacaataggaaagccattatatatataggcaagtaaaaagttagctagttgagttagttggaacaaataactaattaacctgactaactaaccatatttagtaggcccctttagtgtaattttttttacacccatcttagaaacaatttcattgaaatcagctaggaagggtttggtaaaaatatcaacaagattcatcttcaaagtatcattattggtgatcttctctcaataacacaatcaatctccacatgctttgtatactcgtggaatactagattttcttaaatgtgaattgctacattgttatcacagaagagaagtacaagaaaacagatgttaatatacaagtgatattggcaaattctctatgctcgacttgtacattgagtaatagtttcttgcttcttggacttctaggagatgagggaggaattgcctaaaaaaagcagtaaccagagatgaatctcctatagtgtcaagacaagcaccctaatcagcatctacaaatgcttgaaatgttaagtttgcggacgagcaacatggaagaaaaggccttggctgagggagcccttcaggtattggagcatggggtaagcaacattcaagtgaggttgcctaggagattgaatatattagctgagtttattgattgcaaaactaatgtctagtcttgtaattgtgaggtatgtgagcttaccgattagaattctgtactgagcattggatctgttaagagagtacctgaatctttattgagttttagatttggttttattggagttgaagcacgtttagtgccaagatatttttcttcttggaggattttaagggtgaaaggttgatgtgagacaaaaatgcctttggtatatcgaactattttaagtcctacaaagattcataattttttcaaggttgaagcatcatgggagcttttaaaattatttaattcattaaaatcattagtggtaataataatatcataactataaataattaaggcaaaaaaaatacataatttatatatgatgaagagagaatgatcacacttggagtcactactacaacaaaaatgactattagcagtggatgtattattagcgaagggaaaattcaccgctaatgtcaaggtcattagtggcggaccccttagtctaccgctactagtgtttagaaactaaatgagtccacgagctcgaggaagagcggaagggtgttggtcggtttcatgtctctcttgaggaccgaaccaagtagctaaaccaatctttggaagctgctcaaagagtattgaaggctgagaagaaaactcatttagatggccaacagaatttagaggctaagaagaaagttctcaagattaaaaggttggctcacctgcgagacaactcgaactataagacttatggcaacatagttttttatgagctctggaaggccaatctaaaagttgactttgctatttggaccctgaagagttggctgcgctttttagcttaggtgaagcccaagaagctcagaataaggccaaggctgccgttgcaggcacctgctaggatttccaagaaagttggacctatctagaatgtcgaggcttctgaattcaccaacaagatgataatcaagaatccactccatattcattgaagattctaagataaagaacaattctccatctgtggaaaagtcactatcttttgtgactacaactgaatccttcctgtggtgtacgcaacttatccttcctatctctattgtgagatttgttgaaagtcttgttgctccttgtaacttcttgcaaaaatctttgcaagtgtctagactgtccacacgaaagtaaacactttcttcgaacttactttcttgggcgatctacctctttttaaagtcggtggctgcaaaaatcaaaattgttaagttagttagacaataactaagttaacaaactctcctctgagcgagagctccacgtcggcatcagtcttagtgcatctggaaacatatacgagctttcgagatctcagaccaaagacactcgttaaagaggcttttggataggttagaaccaaatggagttgacttttcaaaactgctttcttggaaaaataactagttgtccggaactcttttctagagaaaggctagctatcttaaagactaaacccgaagtggacatgatagtcatcgggaacccccttccagactcaactatcattccacaatactccattcaggatggacaagttacaacatccgagaaatacctaattttctaggcataactttagagaccttttatttggaagaactatattagaaactgcaataaaatatagataaactaaaaaataaaaatgaaaaatttcacccataacataagccataacaaaaagtagcattaattgaaaattgaaacactaatgagtttattattataaaaccataacacaacaccacaaagaaaaacagagtactcaactcaactcagcaagtaacaacaaagtactgatctcgactcaacaatacaaaacgaaagaaaatgagaaaagccaaaaagaggcaataacaatatagtttgtagaaattaattaacaatggtctggttttccaaggagagctaggagaaagtctttgtaatcccctgaagtgtctttggcaatagcatcatcaagggaaatactgttcttcttgtagtaaacctctttgatctccttcaagtccttttcagctcttgtcactatcacacgtgtcactgagtcctcgtcagtgcccatcttcttcaccccatcacgcaacacctataattatataaacaaatcacttattgtatttttatctttcacaataaaaaa

SEQ ID NO: 273941 - DNA, 873 bp, Cannabis indica
tacacgtagacattccatcatggcagttaaaagctaaaaatgaatgcaaatgttaaaatgctaacagaacatgagtttaggaggttttaccaccaaaattttggaattggggttagttacaaaaacctggccacttaaggtggttaggccgcaaataactctaattttaataagtggtgtaaatgaagtactatttgttttgtattaattttattttcttctcaacaatagttataactaaaagagtacaaaatattcaagttattatttaatcataaaataatcaatacaattaataatataatcatggtataagtggtaaaattctcttacatcaactacgatatcataagttcaattctttgtaaagaattttttttttaattaaacttttaaattaatttattttttctaaataataatttaaaatttttcaatgttttttattataaagagagaacaattcttatattataataatttacagtttctagttattgtagtgggaagtcttcaatttttctttgttaatatatattgataattttattacatatattataatagtgaacaataaaataaaacatgcaataataaaaaaaataaaaaattatgattatataaaattaaataataaaatttgtcaaaggaaataaaatacatattaaaaagatgaaaaattttacactagaaaaatatctaaatagtctcgtctaaatttgatagtggatgccaattttagataattatgaggtgcttcaagcgtactaaacggttaaattgctactcttgtaaagacatgatttattttattttattttatttatttttactttaactttttaaaattaatttaataatttgatttttttt

SEQ ID NO: 273942 - DNA, 1470 bp, Cannabis indica
tttgagagaaggtccacggtatcatccaggagctcgagacagtcagtgatagctgcggtttctgagtgggccccaagcctctttgaggaagtgaagctaagatcatgggccagggttcgggtccagtgggcctttccgattgtgtattgcacggaatgatcgaataagtcctgtttggacgaagggaaagaggtggaaaatccggtaagataaattgattcgcagtctgatggaaacggggtgtttttgcagaagtttgatggaataggttttctagaaattttggcgaaatgggattgtgaagattttagctcagctttagctatatttagtgaagagaaaatctgtgatgagagtataatcaataaaagaaatatgttttgcagtttcttccttgaggaaatagcaggtactattatctccatgcttctaataagaagaagaaaaatgtgaacaaagagaggaaggacaagagtactttaaaattgaagtgatcatgccctatatatagcaaaactttacgtacggatagaatatttattaaaattcaatatacataatatatacaatctatatacatatatggtgtgagattttactcttggttttatattatagttcatcgtaaccacataaaagtaaataatatgtatgtatacatacatatacaataaagcccagcttacattgctgtaaattatatatctgagcattacatccttttaacttaataataattaacaataataataataatctgtaagatataaaccgcacagaaatgtacaacaatctaaaaaaaagtaattgggctgtgaattctctttatattttagtttttatacacttatggtgcgtttagtaacacttttttaattaattttttgtttttaatcaatttttaaaaataatttttttttttctttttttactttggtagcattagcaatactccttaaatatacttttgtttataaatttgaagcctcaatttaatttcattgttaaatgtcaatttaaattgtcattgtgatcatttgtgtacacataatactaaatctcgaatggaatctaataaaacatgtcatgtacacataagtagtgtccactactgtaaaaaatattactattaaaaaaaattaatagcaaaatttaacttacatctcaaattttcgaacaaatataaacttaaaaggtattatcacaaaaaatgaaactaaagaattatgtttacaaaattaaaacaataaacaattttgccggcaaaaacaaaaaattaaactaaacttaacacaaaatcaataaatatacaccaacaataaatattacatattagttaagaaaaacaattaaaatatcatattactatcactactttttctataaccaatcatattattgctataattattttacaataaatatttaacaaatattattaattttcttttatgtcaaataatatttgca

SEQ ID NO: 273943 - DNA, 901 bp, Cannabis indica
attaaacattaacataagaaatgcacatagaagagatgaatagtatgtttggtaggtcgtataaggattgtattgtattaaataataaataatattatatttgaataaaataatatattgtattaattattacgactaaaaattttaatataatgtaagttgtattacttaatacataacaaaatggtctgtattaatttgtattataatatttatgaaggatttgggatcaaccctaatctttgacttagatctagggactcgaaccacgaattgggaccgagatcccagactctggactagatcaaggacccatacccgacaccggatgccgaacccgaccgaacactggacctgaacctgatcccaagacccgaactagacctaagaattgacccgtagtcagtgttagggtcgagtttattgaaaatatattataactttacacaacctattaatataagtcaatatcaaacataatattgtattaaataatactaatataatataatgcaatacaatacaatcgaacataatacaatataatacaatacaagctcattatataaccctaaaaccacctaggccatataagaataaattgaggcaaaactcctaaaaaatttacctcgctagcaactaatctctaaaattcattttttttagtggaaaccccccaaaacctgtaatttgttaacaatttatcatttccatctgtttttaggtgttaagtatcatgttggactatccatgtgtacatagtgtgttgtctaaatggacacattatacacagtataattttattgtgttaactcaaacttttaggtctccttgttatgatgattaacaaatatttgattattatttgtcattaataaaatttgttgattttgtagcaaaa

SEQ ID NO: 273944 - DNA, 679 bp, Cannabis indica
atgaaaacaacgtgtttaaaaaaagcaacgaaatcaaacaaacgtgttttacaactttaaaacaactctaaaacaacaaataatgtttctaaaaaatattaactttcaattgcatgtaaaatatgaaacttctgtcatacttgattttccaatagtgaagagaatgttttaactagatatatatagttgtatatgtgttgttgcatttttataagttgtatatatcgtttgaattatgtagttattgtattggtttactgctattttgcaaaaaaaaaaaaacaaaaatcaattaaatatgcaacaaaaatacaactacaaaacaacactaattaaatatgtaaatcaagtggacataaaaaatattgtcgacaacttttaaaaaacatacacaacacccaaacaactttaatacatgtttgaacaactatataacaacaaacaagtaactgtaaaactactctactttaatatgcaaattaaataataggcataaaaaaaacaagacatcaataatcttacaaaataaaagaaacttaaaatcaattataatacacttgctcactaaaaaattaaaaatacaagtttctcatctaaattaacaataatatatttattgataaaaaatacagtttagataaaaaaaaattaaataaaaaatatgaaaaattatttaatt

SEQ ID NO: 273945 - DNA, 1151 bp, Cannabis indica
tctctttcggccgaggcaaaacatgggcaaggatcaagaattcattcctaattctctgagatttagctaggaattcaaggaggagcaaccaaaggtaaaccctagatcattagtttcatgtttttaagctttttctttagtttgagtttgtgaaattgtgaagtagtggttgttatggtttgggatgcttagggttctgattttaggtttaatttgaattgattttaagctctggatattagttttgagctatggagatggatttgagcaagcttgagctttgaagctcaagtttagggctttaatggtatcctttgatttaatgactttttctgagaatttctggttggattatattgtgtatgcattgtacaggtataatggaaagtttggtagagtttggcttgattttaaggtcttgggggcattttttgggttcccagcacagaaccggaattccggttctggggacctgtaggaactggtcgaccggttggtgtcctagaactggacttccggttggggcagtttttagaaccctagtttttcccatttttgagatatttaggttatggccatgttatttatcgatagggaaacttttagtttcaagtttaagcccccagaaagtgatttagcgagtcactcatctgtgttataattaatgtgattagggcatccatctagcacgagactttccgttcaggtcggccagcacacttgaattcggaaagaaggtaagaactgtatataatgtgtgatatagatatctgagtgtatgtatatgttatgtgtatatgcatgcttaaaacgttagttgcactaccaacacttatacagttatggtatagagtgcattggtatagtgaatgttatctgagagtaccatgataccagcataaatacggagaggtactcggagtgcgtggtatatcactcagggtatgaacaaaccctaccaacactcgtacatcgaggtacgcagtgcatgttgtatagtggctataccctagtatggaacgttcgtactcatctgttaagccttgtaaataggtgtatgggcgcctaagtacaagtcagaaattatatgatatgttatatgcttttcttactgagtctgtcgactcacagttctactttcatgtgtaggt

SEQ ID NO: 273946 - DNA, 1161 bp, Cannabis indica
aatttatttttataatttttattagctaatttattagatttggccattttacttaattttttaaaaaagtggacatttactaacttagttaccaaatttagggccattttgcatctcaaccctaatattaatgagatttcaaaaatttgataaatttttcaatttttagcaaaattacatttttatgtaataagaatttgatattatctttctttttaataaatttggacaaataaaataaaaatatatagaaaaaaataatgcatgattagtttttttttaaaaaaatgaatttaggaaaaaaaattgtaaaattaaaattcttaaaaaaaaaaaaaaaagtcgaatcaatctgatccatataaggtgggtcagatctgatctgatccgatcaatggagcggaacaaatcattacatgattcggatcaggtcgaatcataactagttcagatccgacatatatgtataggactctgactcacttaatagtactagaaattcagtactactatgtgaacaaatatgtgaacaaatctgtcccagtgaatcaaacaacatttcattatctaagtattgtttttattttggcaatgttggtaggtgtaaggtagattagtgcgtgtgtaatagggtaaaaataaatagagccattaagagtggccaaaccaaagtaaatgtattctcttttccatacaaatcctattttgcatcattcttccaaatggtccctacttaattatccaacttgtcttaattcatttaataaaaacaaataaatatttaaacaaaaggtaaatttgtcttagattttttttttgggctatcactagtgtgattattaaaaattaccaaagcgaatagtgtttgatttaaaaagataataaaaacaaaaagtaaaaagaaaaaagagagctttattgaattaataataattattaattatcttatatttattttttagggagtgataatagagaaagaggttgttatgtgtctccttcatcattgaatcgcagggaaagaaaatttggatttagagagagagaaaataaagaggaagaagaaaagagaaaggtaggacgtagagagagaagaaagacgtactgtgcacaaagaagactttgtattctctctctctctctctctctctctctctctct

SEQ ID NO: 273947 - DNA, 557 bp, Cannabis indica
tgctctcaaattcgacccaaacctaagcacgaaccaccgtcgccaccaccaccaagttcagttcaaaggtaaaaggttttttaaaaaaaaatatatatatttttcatagatttggatgtcaattattacatgttgttgagattagtagaatttttgtaaattttgtgctctttcttgtgataggttgtagatgttggatatgtttcaatggtgtctgtgttttttacagtggtatcgatgaaatatcgataggatatcgatttatttggatgtctgtttgtttgtttaaacaatgtcatcgatgctatatagataggttatcgatataatgtcgaccaaacatgaaagtagtttgacaattagaattgtctgtattgttaatgtatatcgataggatgtcttatgtgtgtcgataggatgtcgacacactaaattagttgattaagtttattttttgacctaagatgtcgacaatttatcgacgatatgtcgatatgttgtcgacattgtgatgtagttgctttttgtgatagttaagtttgataatgtcgacctca

SEQ ID NO: 273948 - DNA, 2073 bp, Cannabis indica
tgggtttattgttaatttatctaacaatactctcattagtatatcatctataaaaaattgaataaccgtaatagttataacaataaataataatatacattttatcatatgtttatatattgtattagaacgtatgcatacagaatattatatcttagatacaataaattcaaaggagtaaatccaatatatataatgttgtacatcaaaagataagatcacgtataagatacttattttgcacttctaaaacctttcttctaatagtaataaaggtgcacttactaaacttcaaataatatataatagaaaagattcgatcgacagctagctagccctaaaacttagaatatacaacttagaatccactttatttttggctataaaaagtttgtgacatcatgtatatattattacttccatgcatctattatcaaaccctctctcgaagctaatatataaaaataatatggggcataataagcagggaagagtgagtgcaatagcaacaggttttgtgttgatggtatttctaattggacaatcaggtgtaatgttggcaagtgctaccaaatacgttgttggtgatcgcaccggcggctgggcttttggggttagttgtaactggccgcctcatccagggaagcccatatttaaggctaacgacacacttggtcagtatatatttataaaatataggcactaaaatatgtactactgcaaattacaaaatatagaagcattaaattaatttttgtttggtattattgtgcatatgtgtagtgttcaaatacagcgcaggccatcacaacgtggcgcgtgttagtaaggatggttatcggaattgcacggcgggagaaggtgctcaagtttattcaagtggaaatgataagatacagcttgtaaagggcaaaaactacttcatttgtacttatcctaaccactgcacttttggagtcagacttactgtaactgcaatttaattgtatatgtatacgcatacatatataatagatattcgtgacatgatatcacttaataaatcccacctatatatctcgtttccgaaataataaaagaaaaaacacataaacttctgttatttatttattattttacgtggaaattataagctgttggcttgtattttaattaaataaatccaatgaaaatatcttatttcattgaaaagcatttaattacatgggagtaagattaatttagtcaaactaactcatgagattgatataacaaagtttacgtaccaacagtgccatatatctcctatatatgataccatcaaaagcttcctatatacaaaatggagtataaaggaatttttacattcgtactttaaattattagaatttttattttttaaaatttataagaatgatatagtgtaattataaacatataaaattattgtgtagagaaaaattagaaaaaagaaaatactaatcactactataaaatggtcttctagttttgctttatcgttagctttaccttcggttttgacaaaatttacaacgtctaattttattttattttaattttgaaatctaataaatgtaattttaatttttcccaataacatgttatttagaaaaattataacattaaaatataataatttttaatgtataacatactcacaatgtcattaaaaactatataattattttaaaaatgttattaaagtgaatatgacataagaaattataactttaataaataaaattttgttaagaaattttaataacattaaaatatattattattaaaacttatatgatgatatgatatttcctttcattggtgagcaaagatggcatgcatctaatatatagaaaagatatagcattccaaagcatactttcattacttggttaattgcttggaatcggctgagcagtcaggacagattacttaaacaaggaattcatgtatgtagaagcttaacaaagcttgaagaggtaaaacctgatggtatgaaccagagagaaaaccagaagcaaaacagaacaaatagcagagaaaagctcaaaaaaaataaaattgagctgagag

SEQ ID NO: 273949 - DNA, 864 bp, Cannabis indica
gctaaatagttaggtatatgagattatatgaataataacacctagtttctaaaaaatgggtggttaagttgagatgaagagtattgtatttatacttaacttattcatttataaaaaatcaataatattttagaaaatattgagaaaaaaagtaagtcctctcatgaccataattattacacatatagataaatatccaagtcaagtgaaagtaaacttaatggcattattatcaccagtcatttaattattccaagtagcaaaaaagtcattaacactctctcattcattcgtaattaatattgactctagctatgcattaattccattccacttaagacttatgatgaatttatacttttctaagtcttatgaagttcttatctataattttactcaaaattctacaccaatatataatatacactgtccaattaggatccgtctaatttagtgggtcatgagaaaataaaatattttagttccttatttagaaaaaaaaatatagtattttccaaaattggtaaaaaaaaaatatgtattttttaaaagggacaaattttttttagatccctaggctaggagggccttaagcataggcctagcccacctatacccaagatcgggcccatattcaatatgcacgatgtgaattgaattagcttttaaaatttaaaaattaataaattatattcttctgttagcttggaaaatactgtatttaataggattaggtatccaatctaattcaatattttttttctcattcgatccaattcaactagacctcaaaattcaatccaatttgatctaattactaatgggaaatttgaaaaaatatgcataaaataccctaaaatttta

SEQ ID NO: 273950 - DNA, 3062 bp, Cannabis indica
ctcaaaaatgagagaacgaaaaaaggaaaaaaaaaaaaaaaaaatcagccaaagaccttaacataattttttgggtaattatatcattctaataatgacattaaaattaggagtagaaaagacttaaaaattgtagtaaatgctaatcatgactataaccacatgacccatctctgacttgagatctaaatcttcttattacattgcattgttctctatgcaattttaagcctccttcaaatataaccttttcctagtacaataaaaaaaacaaagcaaacacagacacactttgagaaatttcccaaactaagtataaaatttgtaaaataaccaattgtgtcaattaaatattatttcataaacaaaaatatgtatattatatatataatgggtattaggtatagtattaaaaaatttaaatttttatgcttaatttttttatctaattcaataaatctcttatgattgaagttgtccataggttaaaataaaattaagaaaaaaaaaattcaacaaaaaaaaaagaaaaaatttgacttaagtactttgtatataaatatatttttaatatagtgtaaaaataattaagtagttaaattaaacataaaaatttaaatttctcttttattcgccattgaaataaaatctaatggtttaatatttttaaaattaatatggtgaattacctatatactatttttaactttttttttttttttaatttatgttttgagttgcttcagtttttactccagtaggttgttatgtggattttggttgtgatttaagttactttattagttgctatgtgggttgctacgtgtatttccatcaaaatatataaaaaaaaactgttttgaaatataaaattggaaaaaaaaaaccaactaatatttataagttaaatttaattaagaactaatacccattaataacaatagagaaattttccatatataatatttatgttattacctgattttgtttggtggtgaaggcagtatcaaaaaccatgtgatgatcaatagcagcagcagcattagcagcagaagtagtctttatttttctacccaaaatattggatttcttgaggccaaaccgttccttccatcgagctaagctcttaggtggcctagaaaatatgtctccataatcatcaacatcatcatcttcatcatcatcatcatgatcaacaagtagttcatctttcaaagtgttcttcttctgaatttgttgttgctgcagcaagttattattactatttctagaactattgttcttcatagaaggcaacaacataccttgaaacataatctcatcagcagacctcattgagtaatttttaacagagaattcgaaatcagaagacacaggagcttctctgtagattgcttcatgtttcttgatctgcatggctgttagtaaattattattattattattattattatctacaaaatcattggagaaagagattcttggatccattaattggaaatggaggaaatagtagaagtgttgttgaacatgttaaatgactcaaattgacttgtttctatttataattacattttgagaagtattattagacatctcatgttactttgatttgtctctttgtgattaaaattttcatgtttaactttttttttccctttttattataacataatattaatatatatatttatctatctctatatatatttatggttagtacttaatattattatcttgcctaagatagtggccatattctagtcacttacacatgaaaaataaaataaaaaagctataacaactaattgaaaaggttttcttccacattagtcaaatctgccagacaacttaaagattaaagtaaatatagctttgtctaggtaagtggtattcgtggcaatcacatggcctcaaatagagaaatgttaaggtggacatgcattgctattaagtatcagcataataccttttagatatgtcatcttgcgattagctagcgatactctctaaaagttattatattaaattatgtaggacccgatacttaattggaccaataatgatattgacatgtaagagaatactaggcactactggtatcctgtagcatttctcgacctgtagtatctaacacttttataaggtgtaatattgttattggtgtaatttaatattatatttatttaataaatattatagagaaccgctaactaataataagacgttatgccatagaaatgttaagtatctcggtgcttcattacaatgctaaaaggtaccaccagtgactagtcaccttttatgtatcatattgttattaatatcgatgttattaagtatcatatctcatataatttaatataataacttttaaagaataccactaattaattataacacatcacttttatttgtgtattgaatttctacttattctaactttcaattagtagaaaagagaaatgaacaatctaaggatagtgattacataccttgcattttttattttattttttttggattattgcttgtcatgatccattctttcaccttttaaatcatttttttgggactattacttgtcatgatcctcttattttttattttatttctaaccaaatggttttaagaaactagctcaattaactttcttttccgtttccactctcatttttttcttttttaagtatattagtatatgctacaataatttagtagaaattgtagttcaagatctcacaagttttagttccatgtgatatttagcttgattgtcaatcaagtttagctatcagatttagctttcattactcctaaaaaaccaatctcataaaacaaaagaataaagaaacaagagagttaattaaaatgtaaatatattaaataacatatgggaattattttatatattgttttttattaatttttttttaaaaaaaattattgttttattagttgttatatgaattttgattgcgatttagtttgtttcattaattattatataaattttcgtaaaaatataaaaaaaattattttaaagtgtaaaattaaaaaaa

SEQ ID NO: 273951 - DNA, 3793 bp, Cannabis indica
aaacaaagcggatcgcggtatgctctatcctatgttgtagcccctgaaggcaatttcagggtagaaattttgaatgccccaatgccttaacatgggattccaatgttgaagcccgccttgatatctttgaaactcgacttctctgcccatttgctgcattttaacgcctggaattggattctcatgccatcacactactccactactttctcagtattttattgttctcaatgtttttgtattttacaattttgttttttggtaattttttttttattttgaaaacgatgatgaatgcccgtactttctctcaacaaataataatgttttatttttaaagtcaaaatacttttttttttaattatgttaccaaacactcactattttttataagacgttttcgattgagaacgtggaaaataaataatttgcactacgatacacctcaagtaagagtacttttttttttttgtaataatttgcagttgaataaggggcatgtatttttataataacacataataaaattctcactacagcactcacaataaattatacaaattaaataactttaattaaaaaatagagaacagaagcatgagatttaccccaaataacccctacaagagatgatatattttatatattttttttacaacaataaatagtagttgctccacatgtagagcaacactattcattgctctaaacattaaattagttgacaattaaacaagacaaaatgcccatgagaattattcaacatatggaaataaaatatgataaacaactactcttggataaaacattatattaaaacaagacgatagaaaataatattaagacttttacaaaccatgaaaaataaaagtagtagacttaacattactcataattctatttctaaacatcataattcatggaattatttctcttgcatttcaagctcttgaaacctcaaaagcactccagcttgtaatattggcagaagtaataatattctcctaaacaaattaaaaacatacatggaataaaattattagttaggatacaaatataatttatcttatataattagtcagctaaaataagttgattaattcttattcctttggtactattaagagaaaaaaaaatcaaaacttagtacattcttattacctcaattttcaaagctcttgatcaaggaatgaaaggataaaactctcatagaggtaagccacaaagtagcacatgctccaacaaatccaacaagaaaccctatccaaactcccatacgaagccatggcatgtctaaccattctacatcatgatcacttctatcatcaatgctttcttgatcaccatcatcatcattatccccaaggcatgatgagtttgttagaggagggccacaaagaccaatattattcatgtatgaagaagcattaaagctttgtaattgagtacttgtaggaatttttccagacaattggttactcgaaagatccatgtaagagagaaaagataattgtgctaagcttgttggaattacacctgagaatttgttgtgggacaaatctagtgaatcgagattacttaattttccaatatccgaagggatttccccactcaaattatttcttgatagattaagcacgaccgcttccattagatttgtcaactcgtgaggaattttcccagataatttgttgtatgaaagatcaatcattcttaataatccaagaatatcgatgtactcatgatcagctcctttccacattattaatgcattaaaattatagaacatatattgtttctttgtggaagaaattgatgcaaaaatgagtccaaatgtgtcttgggctttcaccattgaagtgatattatctatacaagatgggatagctccaattaaattattcgaagaaagatccaatatttgaacaagttgaagatggcatagactcaatggtataactccatagaatttatttgatttgagtcgaaggaattgcaaattttgtaatctttcccctatccatgatggtatatatccttctaaattattctccacaacatcaagaacttgaagttgagtacaattttgtaaagaaggcaaatatcctgaaaagttgttttgtctcaagattaaaaagcttaggtcatgtaacaagccaatagaccttggaaccactccactaaattgattgttgttcaaattgagaacaaccaatttcttcaaactccactcacaattaggaagacttttttcaaacaccatattattactaaattcaagaacacttgttatcccttgatgatgagtttggttacaaagaaatgaggttaaactaatgagtttatcattattggagaaatacaagcttatcacattggacaatgaaggtgggataataccatggaattgattagaagaaagatttgcaaaagctaaagggaataaggtttgattgcaaaaccaattaggaatctcatcttgaattcctgagttagaaatgtcgatttcggatatgtatacttgagttttgagccatgtaggaaagtgtggacctaacttacaagatcttaataacaagctttctagttgaaatggaggaatccaagtgggtgtgaaatttaatgttaataaagagttaccagataactcaagatctttcaatttggaattgttttgaaagtggacatcagaaacaaacccaatgaatgagtttgaggacatgtacaatttctcaagatgatggagctcaccaataatattttcacttaaagtaccattaagtttattataagagacatccaaccatttaagattaggaagcattgaaaaattattaggaaaggttcctcttattttgttgtatcccacatccaacatttccaatgaatttttagcacaaccattgagactttctaaaatttgagggagtgttgtgttaagtttgttgaaacccatattcaattccttaagattacaaagatcactgaatgattttggaattccaccttcaaactcgttcgatgacaagtcaatacgttctagaaatctcatattttcgaaagagtttggaaggccaccttgtaattgactctctcttattgtgagattaaccatatttgtactcaaatttagcaaccaaggaaaaattattgaatggtttaatatggtactaaacgaaatatgaaaatctttgagagaatttgaagaatttgcattggaaagagacaagacatctacttgtggaaatacacaattatcaaagtgtaaacttaataaggaaggagtacttgatttaatggaatgaagccaattcgtagctttgtcatttaaatttgtgttgctcaatcttaagatttttaaagaagggagataagaaagccattcaagattaatcatgatcaatttaccagattggtcaatatcaagatcaagaaactcaagtttggtgagattttgtagctgaggacttttaatagtgtcaatgatgggattatttgcaagattgagatatttgagcttagttaaagaaccaagaaacttgggaattttattgaagttgttgttactaagatctaaatacctcaaatgttgcaattcaaccaaagagtagtgatcaatttcacttcccataaaacatggctccataaaaccatcattgtctaagcaatcaaaattaagatcaagagcgataatatgataagttaagttatcacacctgattcctctccaattacaacaatcgagattattgttggctgtccaagaagagagaagattgtttgtatcaacaag

SEQ ID NO: 273952 - DNA, 2992 bp, Cannabis indica
aaaaaataaccataaaaccttaatattctaaatagccttcaaacagtcatgacaacttcgtcatcctcaatatcaagctggcataggcgcttaaaagaattatcgtcttttacattgccaccttttctcttagcattttcatcatccttcggcttatcattttcaatctctaacacactagcatcttttttctcactaacatcaacatctttcctatcactaacatcatcatcaccagaaccaccaaggtcaccaccatcctcatcaaaatcctcattagcatcaacactatcatcactatggtcttttccagatccaccagcattagaatcatcatcatcatcagcagcaaaatcccttttaatgttttcagatttctcatctcttgtctcttcatcatcatccttagattcaaaattttgactaactttggatgaattcacctattgaaaaataataaatcaacttaaaaataatgtaaaaaataccatacaatgaagcaatagataatacattaaaatttgatttaaatgcaaccaataatacctcaacaacatgtcaatcataaatgacggtaacttttgtctatatatcttgaataacagacaataaatacttaaagtcaacttttacaaaggaccttaacgcaacaaagttatttgccaaggaattttgcctcttaataacttcctctaccttaaacttcaacaaatcaatatcatcggcaacagactctttggaagtagaaccaaaatcaaaggttgattcaattgaagcacgatcatatatcaaatcatcatcaaataatccatccaaatgaagaattttcttttcttcatcagtaggacgcatattcttcaattttaactgcaaacaaaaataaacaataacaatcataacataacaaaaaataaaacaaataacattaaagaacccatgaaacaactataagaaaactttataaaaactaaacattaccgtcttcagatgcaaatcaaatatctgcaacctcaaatcctttgaagttggtgtttatgccttgggtgtaacatcatttgaccaattcaaaattctaaaaatcctagatgcaacacgtttagaaaaaaaaaaattaacatctctggacaacattcataaaaccaaacaataaaagtccatggacaccctaacactctataccagccatcataactacattctccattaatctcatgccttttttatcttaatcccgtgagcaaattttctcttaaatgactctagggtcaactcagacgcgccctaccccaacaaaatttatcccaccaacctagctaattctttctttggggtattacttaaaagaaaacagtgaataaagtacaacacaatcgtcttcaagcccaaaaaaatgtcatcaccccacctcttggcatcttcaatggacttatggtcaattaatttattgacaggaaaatatatatcaataagcttatttgattcctgcctcatatgactgcaatcacccatgtaatccaaactagttatcaaataaaattcttcggcactaaacctaatacactgaccagaaacttttgcctaaaattctttaggatttcctttctgtacatccctcaacagaagactgtgaacaatttgtggatgaaatttgtactcaggaacatctaaaaaatgaccaagttgactttcccgaaacatcttcaacaaatccccataaatagcctttaatgttctcaattacactataagtgaaaatattcacacacttagacctgtaataatcagattgatagaatttgtattcccaatcctacaaacaaatagagaaaccattttaaaactaaaataacattataattaaactataaataaatctggtcgcatataacaactacaccaaacaaaaaaaaatagtgtatacaatacttaacaaaattaggacaaaactaaaaatatactaaataccataaaacataaaaatcagataatatacaaatcacaaggaatggaatgtgttccacaagttaacatatgcacacataaaaagttttaaaactataacgaaattataataaaactaaaaaacgaagagaaaaaatagaataactacaccatgtcaaaaaaaaaacattatatacactaatttagggaaaattcctaaaacatgaaaaaaaaaatcacaaaacacataaaaaaaagataaagaaaacaaatcactaacaataaaacaaacattaaaatattgcaaaattgaaaggaaaaaaaacctcaaaagttaacctaaacgtaaaaaatgaacatttaaacaaccaaaaaatatgtataacctatactaaaattgaatggaaaaacacaacccataaaagataaaatatttaaaagttatggcaaaatgaatatgcaacgaaaataaaaccttattaatatgatcaggttgcttcttttactttttagcctccgggaaaagaccattctcagtctcaacaaattttgatttcttttgcggaggacgacaaacagattttgtaacagggccaaaatcagaatcatcatcgttgtcaatagagcgtttacctttagctttgttggcccgagctttaacacccattttcacagatttcttcaacaatggcgaaggtgaagatgaggaccaagtcacggccattatatataacagtttataaaaggaaaaaagaagataaaggaaaaacgtgggcagtttcaaagtggaacgtgcatgtaacgtccccgcttcaagcctccattgggtccttacacccacggaatgaatggctcttatacacgagtacgccactctaactgcttcctggattgatgactggccctacagaccaacacgagtgtttccagcgtgctttgtcctcactcgcacgcttcctgggaaaacttcccaggaggtcacgcatccttaaaattgctccaggccaagcacgcttaactgtggagttctttcgagatgggctaccgaaaa

SEQ ID NO: 273953 - DNA, 2977 bp, Cannabis indica
atacactatattcttcgagtactcgctattctaagtgagtacttgctatttttagttttttagtatccaagcatcctcatgaatactcgcacaaaattagtgttgtctaaattcctccaacaacaataagctttggacatatcaagtttaagcccaaaaaatcttccaaaccttgattcttcttaaaaaagtccatagtctcatggataatgatacaattcttggcaatccatcaacctgagataaagactgattaaaaaaggctagatcaaggatggcaagacaatcttcaatctgttggcaatgatcttcaagattatcttataagtgaaattacaaagacttataggccaaaagtcatcaagaccttgagaaccaggtttcttagggttgagaacaatgaatttttgattggaagtcttcacaaattcccaatttagaaagaactgaatagtagtataatgacgtcttggtcgatgatgtcccaatgcgctataccatcagaccttagagttttaagctatgcaaaagactaggccaactctttaatttcaataacatctggggctttcaaaatatttgagttctcctcgagagaaatagacggctgaatcagagtacaaaggtatacatatatggagtgtgttttcaagaaataaaaagatttttaaactgggataagaagtactacccactgtcctcacgatcttccacccaataaagaccattatcaatgatagatccaacataattttgcttgcatctaaaaatggtcgaatcatgaaagaataatcattaagatcctcgtccttataccataactcaagggatttttgatgccaaatctcacattgtctgaaagagatttcctccacttccaattcgatatccacttcaatattgaggttttcttgggaatggattcttggatataattaaatgagaagattacttagaagcaccagtttctccttgtagtacccgaaatgagccttgttccatcaagctaatcatcttctagtactattgagtttcccaactaattgaaagtattgtatcattatccatgagactatggagtcatttatgaagaagcaaggattggaaggtttttctgggcttaaacttgatatgtccaaagcctatgatttgttggagtggagttttttggagagcaatcttaaagccttagacttctgtgatggttttataaagctcattatgaaatgtgtgaccacggttccctcatttttgcacaatagtggcccacttaagcaattcttcccatccatatggattgggcaagcaaatccgctatctctctaccaattaattctttttaccgaagtgctttctcaacttcttttgaggaaagagaggcttggtaatatttatggattcaagcttggctgaagaggtccatcgttgtcccaccttatatatgttgacaacgcctttcttattagcaaggttaccaaagaggttgaggtttattagtagtgtattcactcctattgtgagtgttctagctaataactcaatgttagcaaattagttgttgttttctgacagaacacaaatattttgatcaaatttttctctcttggagtttttaagatttaatgaaatgacaaaacaagatagatttttgagaaatttgaacctattttctaaaagcaatgctatagattttggttcctccaagacaagatagcctctaggatcgaaggatttcaatgcaaacattcatcataagttgggtagtgactcattaaagtttcttcccaaagctccctagtgtatgctatgtgtacatttctcctacctacatttttgtgtcaaaatcttgatcaaatgtttagaagtttcttgtgaactggtaactcccataatagaaacgtttccttgcattaattaggtaggattctattttcctctctaaagttttgggtggtttggatatctaatgatttgaagacattaataaggcattgatcgacaagcttggttgggccctaacctccaatagtttaagcctttggtgccaagtgtatcaagataagtatttcaaaccatgttagtcctttggaatattaatattgggaatttgagaacttttagagccaaaggtatcattgcttctaaaatgctgattcaaaattaggcatgctatcgtgtttgaaacgatctctcggtcaatctttgggaatcactatggctttgtggttttggtgggatcattatcgggttaccttcaatgctagagtgcatacgattaactctccactacgcaattcatttgtggatgatgatgatggtaattggaacccaaattgcatctgaaattggtttgtcccgagtcttagtagtgccatttgtatggttctgagattgccaagttctaatgatgatgtgtttagttggaaagcctccttaaataatttcttctctgataaaactacttaaagagctagtactcaatgagattttagtgattcacgtttactctagaagatactttagaaatgtccaataatctacttttgggttatgtttctccttcgaaacttggtaataaaatctgttaggatttatgccctaaaaggagtatttaatgaataatatattagagaatacatggaatacaagtataagataaatgaatatgttaattatcaaaatataattaataaatatcagcaaatttcatattcatatagagtaggtaggatcttgtaaggaagtacaagagaattaagatcatacaatattaataaaacaagtctataatgtcctaaagtatgaaatctttaatatggaattaccaagtacgatttactaggcactgtactctaatgcgtgtgattttgattcagatcaaatatattaatagacatttagtaaaggtagtgcgtataatttagttatgcacgactggattgatagaactaatatcttttatcaacgtgtcgtttat

SEQ ID NO: 273954 - DNA, 2754 bp, Cannabis indica
tttttttaaatttcttaaaattgcatcgctacatggggtttcctgtattttaatttttacgattagaatatttatttatctatttatttattttatttatttgtacagaaccaattcttatactttttagaaatttcattatatccgccagtctctctcaatataatattgattaacaatatgcaactgttaaccaactgatcaaaacacaacacacataactaaatttccaactaccaccatttggccatactgaaaaactattcaaagtgatccaacaaatatttgactagtagtttacaattctttcttttctccaatctcatttcactttaaagatatatatgaaaaaaaactcacattttgaggtccaaaacttctccttgaagactttaatatccatggatgagtctcttctatatgaaacaaaccaacaaccaagagagatcaccacaaaacaaccaccacttgaggatcccttacacgatcggagcttcctaaacgatcccgaaatagctcctcttttcgagctttccaacttcaacaaaagaccaagtctcacaagccgtcggttgccctctgctccatcgattttcattggaaatttcggggaactacaccgacaccacgcagccacccaaatccacaattcattccctaactcaaacttttgcacataccattgtgctactcttgttcttcttctcatggccatcattggaatggccactgttttcttaaccaccaaaggtttcaagggacatttcactatcaaaccagtggatgcaatgtactacattgttgttactctttgcacaattggctatggtgacattgtcccgaacactgtattgacaaagctcttcacctgtttcttcatcttgattggtttcgggtttgtagactatgcattcaactcttgggtctcccacattttcgattcccaacatgctcttctcttggggttcatggaaaaaacccaattcaagaaattggctgaaaaggcacccaacaaagagaaatggttcaagaaactcatcaagacatacattatggatattgaaaagaggagaatgaggattagaacaagggtttgctttgctctgttagctgttgccttgtgtatagctattgggatatttgggcttcattacatagagaaactcagttggattgatagcttttatgtgtctgttacttctgttactacagttggttatggagacttctcatttacaacatttcaaggcagaatttttgccattgtttggctctccatcaagcacattagcagttggtcagtcttttctcttcttagccgaattaagaatcgacaagaggcatcgcgagactgcaaaaattattcttcataagaagattaaagctgtggatttagctgcagcagacttagattatgatggagccattaggtacatattttctttaatttttgtataagttatatcagactttatgtactcatcaaattcacatctagttcataaattcctacacagtaaatctgagtacatcatattcaagcttagagagatgggaaagatagcagagactgatattactcagatatgcaaagaatttgattcgttacaacatggcaacagaaggaaaaatcactcttgctgatatagtgtaaatgaccaaaaggtccattctattcaacattgtcaatttttgtttataaatagcaatacaaacaattcctcttagtgcctataatatatttgctacaccaaaggtaaactttaaagaatattgtagatggaatgaagagtaaaaaagcattcatgagcaataacaatttaaaatattgaaagtgtattgaattcaaattaatgtctgcatttaaacacagaaacttcctcaaaatgcacagatgattatatgaattcatttcaaggaagaaaacatcaaagttaaaaggaacacactacacttttctgaagatcatggaactgaagcagcaaatggctgatatctttcattgtatatactaaatactaaatacacacctttctttctttgcccaatttagccactcattgcaaatgctaattgccatttctacacctgacaagcttgcaaatactaatagaaaaactgaaaactgaagaagtatagcttcatttagtctttgcctcagccagccttatatcagcaactctgaaaataaaaaagatcaccaatgggataaaagacaactatacaatttcagctaccaaacaacaaagtaacaattttaaatgttcaaaaaactaaaacaggaagcaatggccagagctatatcagcttcaaatataatgtttatacctttgcctgatttcatggatgctctcaagaagtttttgtgcttgttgcaccttaaagttttttgttttctccttattgtctagtactaaggttgagaaccttaaaacagtggcaatttcttcttcaatttcattaagctgttcatccagatgctctaagaatctcccaaaagaagttattcctttcaagcggcttgaaatttcatcaccgactgagataacccctggcagagatccttcaagatcctccttttcttgaacaacagataaactagcttgactgtctatgccagacagcagctcttgattgtcactaaaactcttctcagattctttacctgcaacagaatcttctgtagcttctgtggttggggatacaatccgaacaggactagaatcctcccgaacaacttcaagatccaacgcc

SEQ ID NO: 273955 - DNA, 1510 bp, Cannabis indica
gctataatggctgacttgcctatggagattcctttaaacaaaaaaaaaaaagtattttttaactatttttaattaaattataatgtcacattaagaccaaaagttctaaactatcacataaacctaaaactatcagaataggcataactcaagaatacttgtgaaagaaatttcaccaacggaaaaaggttagaaaagacgatttaaaaatgatagtagtttagggagagaattcctaataatctttccctaatatcaatttgaaatatatatatatataaatacattgttattaaaaattaataataaaaaacggaggaaaaagtaagaaagaaatatgatgccactggaataacgagtaaaataccatacaaccaaactaacatgggatatatacatggattactaaaacggttctaacttgaataactagatttactaatatgacaagattacttgtaacgtgctcagttttttcaataattttcatcgaggtattgaattaacaaagatcctaaacaatacttggagtccatccaaagaataataaggatacttcatcattcaaagaattacctactcttcctcttcaatcattctgttgaaccaccaacttattatcttcatctgcctcaaaagcctttctcagcttctcttcatctgtctcaaaagcttttcttgcttgtttgagctcctcattcattgatagcaattctttacaccggttaagtttccgaaagtcctgcacattaaaaatgtggttattttgatttatcatttctctaccaaccaaaatggaaaattacattctaaacaaccaaagaatcaagaaagatttatagcaggagatgcttccacttaaagaaaggggtccctataatccacaaacgtgtctttgataacttaggatgtgcattatatgtttaaaaccaaatataactactatagtactacttattaagacacaccttccgcattaagtaaagaaagtcctcaactgatagctttccctgctttgaaccattatcttgtgctttatgtacctgcagtaaaattaagacaacagtaaagtactctctctaaggatcttacttggtaaagaataaaatcagaaagaaattaccaaatctgtgatatactctacaactatgtcctccataagtgccacgctttctggaagaggctgacaataaacacaaaagaattaattaaaaacaaaagcaaaaatgaaaaaaagaggtcacactgaattctctattactgtcagtataagaaaacatcacagcaaaataaattacagaaatttcatactaaaagtaaacaatgatgcattgtaagctctaatgaaattgtcaggtgtatcagagaaactcacattaggatcatccccaaaaccatacatcatatgctgcactgcaaatccacaaacagcaaagtaaaaaaataatgagattttgctttgggaaatcttcaactgcctctaacaatcataacttacattctttctgaa

SEQ ID NO: 273956 - DNA, 2474 bp, Cannabis indica
ataatataaataaatttatatatatttggtgatattaatagcatcgtcaccatcaaaatctgagagattactcattgtttttgtcaaccctgagacaaaacccaccgccataactaccagactaccaaaaaccaaaccaaacctactcaacttccaaagaaacaaaaggaaaaaacaccatggaagaaaaagagaagaaaaagaataagaagaacagcagtagtaataagaagcaaaaacaccaacacccaaatgatcaaaatacaacaaaatatagctcagatttctctttcaaaccctgctccgacgtaaagggtgtccgattcggtggccagttcatcgttaagtctttcacaatccgccgagccagaccacttgagcttctccagcttctttctttccctccaaacagtactaatattaataagagtagtaataaggttccttttccttcgacggtggggtttttaccgacaaatttcacgatcttagcccatcacgcttggcacaccctgactttgggcctgggcaccaagaaatcgaaggttctgctcttcgttttcgactctgagacgatgaaggcgagcgtggaccgactgtggccaacagagatacccctgggggaagttaacaagagattgattaggggattgagcggaagcgagatggctcggttcaagttcaggaaaggttgtattactttttatgtttacgccgttcgcagagccggttgcctgggcttcacttgcgccgatgacctccgtaccatcttacaatctgttgttgctttgaaagatttcttggatcatacggctatgcttgctttgcctaatcagagaagtattagctatgctactcctcctcccccggtcgccatggctcattaactaagccacttttcttttcatttttatttgtttaatctttctcttctttaatattattattattattattattgtcgtcatagggggaatattattggtttatttgttggagacgatcttgttgttttgatattttaacgcaaaatcggtaattttagtactaataaaaaagaaaaacttgggactttgtatatgtaattttagagtgaaattcaaggtctcctctcatctatttgtatctatttgtatatttgtttgtttcatatggatatatacatacaagttcggttaatgcttctatatcgactctatcagaaggaaaatggtacgtagaatagtatttaacttcttccctttttcttaattttttggcttagtaagtgaagagtgtaggcttctctgtttttgagttgatgggatatcattaatttacaggtttaagtgtgggaataaatctatttacaggacatgtgaacttgtaaaataagttgtttagtattttgatcaaaccccaaataatgttctgtgaaaattcggtagatttgatcgttataggaggcaaaatgttttgcttttcttataattctgacactattatcttcggtaaatcgtgcctatggattcaaaaaacaaaaacccgtgaaccaactgagtgtaaatttacactatttaattggtatagaactcgtgccccaaatattatattagaactttgcaaataaaattaataaaaacaaccaaacatgtatggattgtgggtcgagaaatccataatttctcttaatggaattaaccgatggggatggaagaaaagaaaactgcctaaaggtgtgtttggtatgacagaaaaaaaaagcatgaaaaagaaagattaggatgaaggaccatttctccaactagtgaaagctcttttagcgtaggaaagtgagagaaaaaagaaagcgtatgcgtatgtgtatgtatatattatattgttaaagatatatattcatattgtttcactgttttgttgttccagcagttgtggctttaatgatggtgtgagactgagtgagagagcagagaaggcccatctcagctcaacttttccacatgaatcattgacatctctgtcgtccaactcaggcaacgtgaataaatgaggcttttgagcattggccactgggtggggtgaggtgggggtaataataagtatgccacagtgcttttggttggacctgttgtaagtatctattattatttatttggtgtgccccaacatccccttattatatggtgtcacatgccaatattttaattttgtgaaagactacttctaatttgttttataacccctattattttgcatactatgtagattgatattagagcttaatataaatattgtacacccctgttcatacatgtggatatggtcatggtttgtataccttttctacattctgacacgtacaattaatcgaatcattgacgcataaggtagcgtttgatgttgctagttcttaaaaatatataatatagattagattcatatgattaggctacatgagtcctttgaatcaatttaattttctcacataagcaaag

SEQ ID NO: 273957 - DNA, 2507 bp, Cannabis indica
ttgttgttttcaaaattcttgttttttgtaattttgttttctgaaaactgttttaaaaaaacaaggccaaacaagccaaattgttttcaaaaaacaattttctgtttttaaaaacaaataacagatttttagttatgatgccaaacatgcacctaagctccccgaactaaggtggagattgtccataactaaatccccaaattaaaattcaatatttataattactaatttattacttaattaattagttaattaattaaatataaaataataaagttggatactgaaacaaatattctatagctacagatcaaagattatataactacataccaaaaaaccagtataaaaaataaaaacacacaaggtttttcttacaaggtatcaacagttaatagtccacaagatcacacccaaagataagattctttagtaagatctcaaaaatacaaaatttttgacacatgcatataaataaactccctctaattctatatcttgatattaagtgcctagttaatcgtactactaacttaactaactttactttgttcattttgcagagatggttaactttgcaaaactccttcaaagtccaagtctgcccataaaaaggggaagaaaacgaaataaagacgataggaaagtacctcaaaattaacaacaactccaaaaaagaagaaatcttatccttatgccgaacttacctccattatttaggtcaacccttcgacttccaaagccctctgaaattttggccaaaaatcgaatttcaatgtggaggcctatttgaaagagcccaaaaaaggaagaaagtactcaatcctatcgaggaaattacttttaatatagagaaacctaaaatccatttccgttatgcccatatttcgagcagcaatatagccacgtcacgtgtaaaaaaaggttgaataataatcggctcgtgatttgaggaatatcgaaagccggttaatttgccttagagaatactagttgcatacgtgtttaaatctttccttaattagctaaggaccagtaatgaaatgccaactgtaaaaactggcaagattaaatcttaagcgagaaacgttcacctcgggaagtacaaaatacagagtaattaagagaaggcaatatgtgagttaagcgagacaatgtaaaagttcctaatctaaagatacaatcttaaaaatcttatttgaaagatttatacaaaaatatccaaaactttattctggataaccaatgcgaggaataaaagaatgaatcattcatttcgtgggaaatatttgagaaatacgaatacatatttgacaatgtgatttgcgagcaactataaagtgatgaatagaagaacaacttggtggaataattgtttcagataaggataataaatagttaccagcatgtaattcatttatccagttataaatatcaaatgtggggattgtccacgtttttgagcagttctctagacaaagccaaagggaataaactgtcattcccaaaaaacctataaataaggacagaaacaacaatattggggatgaccaattttctagaaggatcagtctgagagaataagtgtagaaaactcagtatctctcaattttaatattgatcttctgcaaggatttacaactcataaataatatggacacagggactatgtagattgaattacaaaacaacgtaaaaattcatcttatcttacttattgctattaatattgttgaaattttatgacctaaataaaacctaatttcattgtaatcttatttactttcaataaagattagaaatcatacaatgacttagtcataagctttgttaacatgcttgatgtatgattataggtttaatatataagttcatattaaatcccgaacatatagctattcacaatcacagtgaggtcgtcacaatagaaaataattataattatatgcttcaaattatttagtcctacgattataagcgcactgaatttatattgacgtgataatcaacaatggggtttacttatacttaggggctgtttggaatggattaatgtgaggagaggaaaagtaatgtcaatgattaccctgtttgttatgaggttaaaaattttttgtgtcatgtaatgcttttaccctagtattctaactaccctaaaaatgggtaatgttgatccttcaaaaaaggtgggattcaaatattatatcagttatttgaatgtatagttaaaatttttattaaaaaaaagtcacataataattttaaaaaaattaaacactatacgattgctttaagaaaagatgtttataatatatatatatagtactccttaatctgttattaatattatcctcaccatcttcttctatttgctccttcaaacaatacaaaattatcacaacttaatctgccatttttattattctcaccatcttcttctatttacttcttcaaacaatacaaaattatcacagcttttttgttaaaattcaacattgcatcgctct

SEQ ID NO: 273958 - DNA, 1460 bp, Cannabis indica
tggagtgaagaagatgaagagagtgaagaagatgaagagagagagatggattgttatttttagggatattatttactgtgcattagagttatatggccaatcaaataataatttaaaggttgtataggtggaccccaattttactaaggtttgattctctacaacaagccttaccacaaaaatttttcatttaatagctgtcaccaattatattttgtgatattggacatactggtgagcccataaaaggagtgtctattgaagaattttccattattatatttaaaaaaaaaaaaaaaattaacaagcggaaggtagtgtggaaagttgaaaataaaaatgttaattatttgaaaaaaaaaaagaaaaaaaagaagaagaagatgataccacgtgccactaagtcacagcactgtcagccgctctgtgcctcaaaagggacaacccatctgactgtggtcggcctaggtatccactcactactcactactatacaattcaaatacaaataccctctcttcttcactaccccattcaacttcaactctatctattattaataatttctttaaataatgaaattattgaagatgttaggggacaactaatataggttgtccataactatagtacataacctacctaaagtctaaatctaatactcttaattttttatttttttttgaaaagaacaatatattgcaacttgaaaatatgaaataagttgaggttacaatatattaagatttggaatattaccattctaaatggcctctctctcaagtccagagctgttctagctaacttataatactcttaatttgttaactgatttccgtattaataatgcaaaccacacaaaatcttttatgtggtggtgttgccaattaatagggatttctattttaaacaaattttattactactttaaatgatctataaaaattgctcctttttattagtttattatagaatcaattcttcattgtttagaaagtttattgtaaaattaagtctaatgttttctttaaagaataataaattttaataactccactaccacaagtcttataataagctaggagaggccaaaaaccaacctttattttttagttaaggaataatgtctctttagcatgtaatattattaactgaaaattaaaataaaaaagctataataaaaataatgtaggtaaccattggttagtaatttgtttttattatacaaaattccaaacatgaacctccaggggttccagagccctccccacccaaaaaaaaaggcacttttactatgttgctgaggtagtaagaggcctaataagatgatggtggccccagtttgtgatcagtgtgattggttttagttttgctttttgccttttctttttttttttttctttggatgagaaagaatgattcttgagccagagagctaacctcaccaccacaacaaagct

SEQ ID NO: 273959 - DNA, 702 bp, Cannabis indica
tagtccatcctcttcaagtgaccgactttccaattcaagctttgaggactgggaggtgagtagtgaatgctcttctactccagaacctgaagtgcaacaccactattacttcgagcagattgctggagaggggtacaatcgcttcatttgggagttgaagaaaggtgggaggcattatctatcgtccaactagacatacattgtctggccaagtgttgctgacactcttccagttggtcgtccaagttcacggaactttggcatccccattgctactcctgctgttacggttgcccgacattcacgccagtatccgaccagcagtaggatgatggcttgaaaaaaacaagcaatgtggaatgtcaatgcatctgaccctcacgtggcccaagttgccacattaccaagctccgaacaggatctacccgtccaagaggagggagttcatgagggggaccttaaggtccaagaaattaaggaacagggcgacgtccgtcctggcagcccttccgaggtcgaggagaatgaggaagctgaaccacaaaactttggaggatacaatgacgctaaggagccagtatttgcgaagggcaaagtcttagtttaaggagtagactacgtcaccgaggagcttattgaagcagttcctcacaggaggcaaggtgccttaggtgccagatgggtgagtcctctgtccaagat

SEQ ID NO: 273960 - DNA, 1165 bp, Cannabis indica
catagtgtagaaatttggataatatttgccccctatgtccgtgtgagatctatttggtcgcatgtggacttattcagctaggaagctgtccagatgggtgacgtgtgtctggttgtcatctttgatccgacatgagctgattgaacatcttttctgtgtttgagatatttaatgcgaattgaaagttgtacctaaaatcacgcactcacggtttacacgatacaacatgcatgtttttatactgctgtaataagtgctaacattcctttttggggagaaactcaaagaacattcaaattttaaactaattaattatccctcttaaatacctataaaagggttttaaatctttttagggattctttgatccattttaactttcagaaaattagagcaaataatttttcctttttattttcaaatcttcgaaaaaatcatactagaatctccactgttgaaaccctccgagcacgttcagaagacttcagacagtgagtaagttatctcttcatcttttttatgcaattttctattgaatacatgcattatttcctgaatttcttgctgtaaaatttctgtgttcttgaactattcttgactaatcatagagtagaaaatattagggattttaacttttactaacacgtgcttaggtcttttgattccctaatttcgtactgattttggcttgaaattgttcatattcacccattcaagggtttctaagaatttctagatattcttcgtgattttgaacttcttagtttgggaattccattttggaataaaattgtttctttttatcttgaatcagtctcgctggcatattaaatatgtttttctccttgcccccgtccaactctcaccctctatcatatcgactaagattttcttcaactcctttacaagaatcatcctcagttaggtgcgaacttgtcttcgtctagtgacaacctttcgaattccaattttgaggattgggaagtcagcataaatcatacagaattcgtagagcctgtggtgcagcaccatcaataccccaaccaaatacgtggagaagggtacaatcgttttatctgggaactaaagaaaagttggaggccttatcttccttcttcttgaacgtatagggtccatctgagtgttgtggatacacttctagagg

SEQ ID NO: 273961 - DNA, 915 bp, Cannabis indica
ttatacatatgtgcccacaaaagatttttaatctaacaactactactaatactactacttcttctcttattattattattattatataagtagaaagaaatagtagtagtagagtagtaatagtagatagatttatccatagatagatagtagtctttagtcttaacttacttgctcactatgattatcattaattaggctcccacgtgtcaacgtgactctttctcaattaaacagcgtgtggggaacccctttctttctcactgctgactaggacagttgaccctacaacttaacttaatcacccattactcctaatttactacactttcgatttgttgcagtgttatatcatattaaattgtataaatattatttaatataaaattaacatggattaatagtttctgtaatattatatttaccataaactcaaccccaattttaaaccccgtttaggtcaggggtcgaggattgggttcaagttcagattctgaatatgagttgggttcaaatttagattaaggttcgcatttagatctaatttcggagttttagtctaagtttggggtatgtgataatttattcatcactcctaatttaatacactttaagattgaaaaaatgttaaaaaatatcaatagtatgtgtaattaaggttcgccgaaactgagctgcatttgttagtttcttgtcaatttgcttgggcttgctgggagttttctgggtttaatgcagctgatagaaatcccgtttccttgctgtcatggcttagctttaatgctgcccgaatggatgatgagaagttaagccgagtcgtcatgttgtgttgggcaatatgatcagccagaaatgatttcctttggaagaatcgggctcgaagtgtaaaaagtgtggttgattttgctcaatcaa

SEQ ID NO: 273962 - DNA, 469 bp, Cannabis indica
attgtaatatataaacgcttaaatagaaaaaagacctttttttcaatgataaatggagtcacttttataaaatttgaagtttcatatatttattcttcagtaaaatcattgtaatatatagttttgaatcttcatatatgtatttacaaattaaattttagatttaataagtcactctacttccagaattaaatatttagtatttgtattttgaatcaagtatctctaatctcttaatactatttattaagtttatacaataaaaaatcataaaatgttgaagaagataaaaaaaatatttttgctttttttttaaaagaaaatatatatatttttttgagaaaaatcacaaagatcacctttcaagcatagagtcagggctggtcttaggctaaggtgggttaggcccgcacctagggctcactcattttaggaacccaaataaaaaaaatactttttaaaaaataat

SEQ ID NO: 273963 - DNA, 817 bp, Cannabis indica
aggttgtgatgtttgagtgggatctctgttcatctggttgtgggttttggtttaagatttacatttttctcgacaattgagaggtttttgtgattttagattgggttgttgtggacttttttggcctgagagtttctgtgattttactttttgtcactcccctggttgttgagctgtttattgcatattctgggagggagtaacatttggttagaagtttggttccataacattaatgataattgggtttttgctacctttgtggaggttttggttcaaggtggggttgtcgaacatcacccactggtttcatgaaaggggttgcttgcaattataagaactctaattcgaggttctaaaagaatgtggttaaggctaaggatgttctaaagaagggtgcttgctatgtgatagctgatgggaaagatatcaacatttgggaggatctgtgggtggcccatggtatcgatttatgccccattgcaaatggggtttcagcccccagctttatgactgtggcaaatttattactagaaaatggggagtaggatctttgtaaactaaataggttgtatgatcatgacacaatgagtgccactttggtaagggaaaggccactaggacatgggagggatcgctggatttgaattaaagaattgaatagaaaattctccaccaaatctgcttaccttttgcaggctcttgagagagaccaacattgtcaggtcgctccttctctgtggaataaattttggagcaacaaaacacttgaacgacataaagtgctttggtggagcattctatccaatgcacttcc

SEQ ID NO: 273964 - DNA, 1434 bp, Cannabis indica
gagtgcatttcaatttccacttttcaagcattgcaatctagcaaccagaattttggatctttccaggtataaataacattatgcagcaccagaaatgttattccaaaaagccaattatgacatattttccaccaaacatacaatacctctactagtcaatatctgaccaaagttctctgagataactcttccaaagaagaaattctttgaaatagaagaattagggaacaaaaacttgtaattctacatagttgaaacaaaagaactgacgaaattaatgtttaatccgcgcacaattattatttaaactgttctctctctctttcttcaaaagatgtgttggtttcgaaatactggaaatcaaatctatgcagcagcaaccgcttgtttctgagcaaatccaaagcccttttcaatgctggccttcaactctggcttaagagcttccaaagccttttgttcgtactccgtcaacccttgaaggtctgatggtattaaagcttcaacaccatctcttccaagcttaattcgtgatgcaaagaatggaagctcggtcagatcagactgcacataggcacattcatagacatcaccgtctccatcaagtgcacgaagagatgactcgacaaatctagctgctgcatatgccatcgacaaagttgcagaccctgcacctgctttagcctctacaacttctgttcccgcgttttgaattctaacggttagctcttgaatttcttcatcagtgaaacttactgatggtttagtctttgataacagtggcagaatagttataccagcatgtccccccacaaccgggacatcaacatcaatcagtttcaggttctttttctgagcaacaaatgtattggctctcacaacatcaagtgtggagacaccaaaaagctttttgggatcgtaaacacccttctgtttaaggatttctgcagcaatcgggacggttgagttgactggattactgataatgtggataaaggcatcagggcagttgtcagcaacagcctcaatcagtgtctttactataccggcattgatgttgaataggtcatcacgagtcattccaggctttctcggaactccagcaggaatgacaacaacatttacgcctttcaaacaattggctaactcaccatgtccagtgaaatcaataacttcagagggtgtgttgcagtgactaagatcagcagcaactcctttaacatttgctatatcgtaaaggtgcagggaagaaaccaatggagacatcttaataagaagggacaatggctgaccgatccctccagcagctccaagaacagctactttgtaagaagcttgaggctgcaagagattataagaatttgacgaatttgcgaatgcctttcgaggttttagagcgaaagagctttgaagagctgcactgctttcccttcc

SEQ ID NO: 273965 - DNA, 2288 bp, Cannabis indica
aattagggttaaaaagtagaaacgtaccctgacactcatttaatgtaccccgagacccatctaatgtactacgaaatacattccatgaaagtacatcacgggacaaaatcgtgtccctacatagataatagtgttaaaatataaagttaattaaattttaaataatattttcataaaattaatacaatatattattatgttaaaatattttatttaagtttaattttatctttatttttaaataataattagtatttatgtcataatggagaaaaaaataaaaagttaagaaaatacattgattttattaaaagaattacaaattaattagattttaaataaatattttcattaaaattattgtaatatattttatgttgaaaatattttgtttgtgtttgattgaaaaaacaacaattgtgaaagaaagaaaagaaataaaaaatggcaaaattgtggcccaaacacatgaaattgtgacatttttgaaatatgtttctcatagttaataaattgtaaataaatatattgtaattaagtactatgaagtatataaagttgtaaattttcctttttttttacgtataatatttttttgggtgaattattttattattattattattattagaaaattattatttgacactttagagatatgacacttaataattagttagcagtttactatattattcactaaattaatatttgtgagattcgatattgaaatgcaataataacggtatgtcaccatttatggtgtttagcatctcccttggcatttttcttatcattttttttgctaattttattaagctaaaaaaatgagtcaatattatatttgatcaaaattttataacagtactccaactcatttagggtagaattaatccttttttatagatagatgtaaaaaaatcaacaaaggcattaaattattattaaaagcatataaaattctattaaatatataaatgaaatgtaaaaaataattaattatattaataagtgggaaaagagtaaataaaaatgtaaaatttattgtatataaaatttggtccatcatatattttgtgctaaatttggcataaattttaacatgtgttaaatttttatacacaaacattggagttcaagtttatgaaaattgactaaaatatatatatatacaccacacttttagctatctattatataaaaatgttcttcattagaatttatacacatattcttgtacattttaattagaattttaacttattattttttaaaaaattatatataactttataagttttattttttttacttattgtgcaccgcttatatgagattttcctatagttcaattttgttaattattattttatttttcttacaaactttacatattagtaggtaatagtagagcaaatcacatgagctgatatttagatatgatgactaatgatcttagctttaataagtgaacatgtgaacttataacgcattatatctttgtttaaacataaattttttaatatttttaaaatataattaatgaaaataagatatataattataacttacatgttaaaacagttgttaggtgcctatagcacatacttcacactagtatatatatatatataaacgtaaaagttcatatataataagtttataaacaaaacttacaaacaaaacaaaaccctcgtcctctgtcaaaatcctctctcctcttatatctattttttttttttttattttcaacctaaaacctagcgatctaagttccaatagtagaaaaatagttaatctttgaagagggagagtttaaggtaagaatttgttttgttttgagtcgagcacaattgtttttatatagtaattttgcgaattagaattgttataaatgttcagaccttagaggattgttctcaggtagtcatgggactagttctaatgttttcttgttgtaataatgagattttgagttagaaattgagtttagaactttttataacttaagtccgaacactagtggcatttgccatcaagggcttgattttagtttctattgcgtaagtatggtagtatgtatggtatatatgcgccctataaagtttggggtggtttggacaagtttcggtagcgttttgatgagtgcttaaacttggaaaatcacattttttacccgtaaaaatcggtcaaccggttctggccaaccggttaactgtttcgggcagcctcgggaacttgagaattatatttttgtcataacttttcactcgggtgtccgttttgga

SEQ ID NO: 273966 - DNA, 626 bp, Cannabis indica
tagtgttatgcctaaaagtttagcaagtgtaaattcaaaatacaacgaaggggatgtgttggtaggaggaggagcaaaggcatggatcaagctccccgtgccgacgcccgcaagcccagccctccccgcacgcctaggctccctgcaagcaaccctccctgtgtgcctagcctcatcgcattcactcccgcgagcagaccctccctgcgccccctttaccctctttgcttcccctcatacaattagcatatgcacataaggtcagcatgaatgtcttgagtgtttacataatcttatggacatatgggatgaggagtaataaattagaagtattcaactatcgagagggccatcttcggtacgatgccatctaccatttgggccaccaaacctcgacactttaaggaataggtccagaaaagaaaagcaagcatactcagtgagttcaagctgtcaggcttactgatacgaggagaaaataagtgacctttgcttgaagaacaagtggatagaaactactgtagctggtatgcaaaaactgttgagtggcatactcaaaggaaaatcccaagcctcacactttcgtcacaaaagccattgagtggaaaacgagatctcaactacat

SEQ ID NO: 273967 - DNA, 1124 bp, Cannabis indica
atcagaaattcaatttcccgcttcaggttattgcactcatttgtgtcatggccatagtctccatgaaaacgaaaatttttggacatgtcccttttacttatgtcctttttcatggagtagattttttgaatgggaccatagactaggttgccatgtagattgtctctaggtcttcagttaggacagaaaagacagtaaatttggagacattctctctaggggtttgttcggctttgcctacgaactttcccttcttcccatttccttgcctgccattattgttggatcttttatcgctcagagtttagttgctagtatattgcaggctttgagtggttgctcctgttgaggggacctgtggttggcccgacctaggttcgacatccgcccgttgaatggcctcttcaagcttgataaagccatctgctcagtctagaaactctaccatagagcctatatggccccttttcttaatgtctttccacagttctcctagtacttcaatgccccccagtatggcggccagcctcccctcttcgttaaccttgctactttcatagcttctgttatgaatctaattatataggcttcgagaggctctcttggtctttgtttcacgtcgaccaggtcttgtaaatgtaacgaaagtttgcgagaagaagagaaatgtacatggaactccgaggagaaagctttccatgaattaagccttcctggtggtaacttaaaataccattgatgtgcggctactgagagtgtaccagggcatactctacatcgcacatcacctcataccccttgtagatccatttgcatttcaaaatatttaagatgtgacaagggatcctccttccctgtgtacatcttccaggtcggcattttgaacttgaggggtagcttcaggacattgatctcgggagtgaagggtgatccgcatgctcagtccaactcaagattagtgagtttttgaccggctaggccttggaacatatttttttaattcatctaactatgcttgcacagatggtgaactagttcagcctcttggccgacttgcgtcacatcaggatctcttagagttgggtcttggatgcagatactgggctgagcggctggttgaacat

SEQ ID NO: 273968 - DNA, 1151 bp, Cannabis indica
cttaattttgtatcacactttataatagcatatacattatacatatgtgcccacataggatttttaatccaacacttaaagctaaagcttcagccaggaggggctgaatgttgcctgctgcaggagtagataaaccagccaccacattaccacgccagtttgataaccgctccaaaaccaagcttgctttgttctgaacttagagcagcatcagtattaagctgataaaaattttgagggtccgtctttggcttgctaggggagtgcaaagtctggaacgtatcatatttctgcacactgcgctgggcttcctgataatctgaaatgaaagagttaatccaatcaacaacatcaacaggagcgatatttgaattagtatataattttttatttctaaaattccagattgcccacatagtggctaacaacagtgataaattttccttgtcaagctgcaagaaaccaaaaagcaaaaagtcttttacatcagcatgtctgttaaggatatagaagctttccatattttagctgcactaggacaatctagcaaggcatgggtaactatttcaataggactactacagagggaatagcaagggttaggaattgtttatctaaaaaacaaatttagggagacaggaaggatgtggtgataaaccctccaaaaaaagttttaacttttgggggaagattcaagttccaaagagcggtccaccattttttagtgaaagatgggttagaggaagaaggagggagagatgcacgattggcaagatgataagctgacttgacagaaaaaataccagaggactcctgattccagatcaagtgatcatccttatgcaggccaccaataagaacttggagaatggaggagacagtatagtcatcaaaatattggccaagtttagcattattccaaagacccttatcatcaataaagaagctaactttatctgagggaggctgatcactacttctaaagctagattatctaatcccaggaatccagtagtcatttaggctcctgatagagcatccattcccaaccttccacatcaaatattttttaagaagatccctaccccacaaaagactagaccaagtgtaggagggagaaagcccaagtttatgttgagttttgtgcccta

SEQ ID NO: 273969 - DNA, 1572 bp, Cannabis indica
cttatgtaattattccatttaaaagtgctaaaaatgaactttaaaagtcttatttagataaccctaaagcccatttaaatttagcttataaaaaatattattttttttttgcgaactatacagacgtgtgtttgcctgtggtcgccccagtgatgcttaagtaccgttggggcagaggttgctagaaaatttgtgtcgtgtgccccagtgattcactgatttctgatctatattgataaataagattatatttgtcgaataattttatactttcgtgttcatacaaaagaaattcaatatctctgtaaactccaccataaatccaaggtcatctcttattgtgaatcaaaacccataatcaaccaatataagcttcgcacttaattcatttccagaaggcctcttcttgtgaacccaactgtgtaaagccctcattgttatcatacgaacatcagtgatggaagcacgtgcatggccgaggatgtgtgtgagagagaaaagttatgagagggagaaagtgagaaagagcagatctgaggtggtgaacaacgttagagatggcgatggtgatgacaatggcaaatgacagagactgggatctcgggtttgggtcttggtctcgagattctcagtgatggcgacaattctcgatcttattgttctcgggacgggtttgaggtcttgaccactggtgttgggatcggtcgggtgaatagccttgcagccagacgactaagatagtgagaaggagagagaaaatatgttggagaagatagtttaggactttaaggtcacagaaaagaaactgaagaaaacaaatttattttttaaattttataataattttatttaggggaattactccatgtactatgttttaaacttttttttcaaatttacggtttgagtttctaaattggttggagcgctagttgcaagagtttctatacgatttttttgttgcaatttaggttgcagctagttgcaatagggtttctatgtagaattttgtaaaaaaagaaactatttttgaagtgtaaaaatgaaaaaaaactattttatttattatttataattttaaattattttataatatttaaataattaaaaattgggtagactaataaaaatatgtaatgtgtacacttaaatgtaaagtccaaaacaaaacctaatagcactcacattagatgagctataatgctatatttttcaaaatagagaagagaaatatgaaaaaatgacaaaaaactagctccatgagttattttacctcaattttttaaagaatcctgtgctttctctaagcactattcattcttcaaataatattttaatataatatttacttaatattttattcatattgaaaacccaaatcataacgagtgcttttctatacctcaatatggctgatccaacttttgcttcacaatttttatacctcaaatcataacgagtgtgcttttccatgctgcatttgaacagttgtacagagattttgtaacactataaaggtttttttttctttctctaatattccatattatatgttcagtgtgtaacaataca

SEQ ID NO: 273970 - DNA, 1722 bp, Cannabis indica
tgaagcatctcatcagtccgtagttccaaccacgatgttcgttcctccattacgactaaatcggaacaattattttttctagagatcccaagtccttcttgcaatcagagcacatgatcttgaaggaattttgctaaatcgaaatcgccctcaagcaaggattcgacagccactagaatcgacaaccacggtgagtaatcctgaattcaatagatggatgcgtcttgatcgattttctcctttcttggttaatgtcaactatttctgagtctatgattgggcatgtggtgaattgtgctacttcgtctgaaatttggaacacgctcgagcaattgtttgggactgcctctcgagcaagataaatccatctgatgaatcaacttcaatccaccaagaaaggctctctggccattgacgaataccttctcaaaatgaagaacctggaagatggtcttcgtgcagcagggaatccaatctcagatgaacaactcatcttgtatgttcttgctggcttagggactgagtatgaggctgttgttgtcaatctgacctcaagagacaatcttactcttgctgaagtgcaatttatgctccaaagtcatgaagttcgaattgaagcaaatcaagttcataccactattgatctcagtggagccacagcaaactatgcccaattcaaaagaaaccccacaggccgtggctcttcaaatcaattttgaggacgtggacgaggctcgtaaggtggctgatcgaataacaatggtggcagaggatcttctaacaataatccaccagtttgtcaactttgtggccgaattggtcacacagttcacaagtgctatagaagatttgacatctcatacaatggtcctgaagaaaatgacccaaacactgcctcaaatccaccacaggcccttgttgcttcaacaagccctaccacagatgaagcttggtatcttgatagcggagcttctgaccatgtcactcaagacaatagtaatctccaccagcaacacaccttcaaaggcaaagaaaagattgttgtaggtaatggttcttccctatctatacataacattggtaatagcactcttgctgcaagaaaatccctttacctcgaaaacatacttcatgttccagctatctcaaaaaatttgattagcatttccaaatttactaatgacaacaatgtttctgttgaattcactcctaattcgtgttttgtcaaggacaatcaatcgaagatccctctccttcagggtgcccttaaagatgggctttaccaactagcacccaagtttactcatcaagcaaatatgtctcctcagcattacaactcctctgctgcagcaaagaacaattctttgtctcaagcaaatgctgtttctgcctttacttgtaataacaattctgctacaagcactttcaacttttgtaatacaaaaaattccaaacttgtatctttgtggcataatagacttggccaccccaacattcaagttctcaataaagttcttaaatttcttaatatttctactgctgacatgtccatttgtcatgcttgccaatatggcaaacttcaccaattttcatttcactcttcacacaacagtacccattttccatttgaaatcgtgcataccgatctttagggaccatcccctcatcgttcacccgagggtttcaaatactacatttgctttattgatgatttcaccaagt

SEQ ID NO: 273971 - DNA, 1933 bp, Cannabis indica
caacaacttgacccgaagaatttgaatgatgataccaacaccaattttgttacaagagacatcacaagcggcatcaactatttctacgtttttaattaagtccaaagggtgggcagagccagttggggtgagcagccgcacctggagagtctttaatggagttcggtgaagttgaatgctgctgaaagttgcaatatatgcagcagatttggcccaaatttgtgttggtgagaggcctggtttgccatgaataaagttgttcctgtcagtccataaaaaccacatagtgcagagtagttgttccatttccgaagtagatttaagggtagaaagcagcatcaaagaatcatcaaatttcattctagaaaccagatcataatcaaaagaaataccagccacacgccagactttttaagcatgtttgcataggaacaaagcatgctcaaccgactcctaggcattcgaacaaaggctacatgctgcagaatcgataattttgcgcttgcacagagcaacaacagtgggaatggcacaatgaaaagctttccaaacaaagattttaatcttggatggaagttgcagattctaaaagtatttccaccaagtatgctgatcattggaagagttagagagctcagtatcttcaaggtcatttgcaagatgataacccgattggaccgtgtactcattggagcttgttaagtgccagatccatttgtctgaaactgatgaagaagatagtggaattgacagaatatagtccaagtctacaactgagaaatcacgagtaaggagtgggagatttcattctttatcatcagtgatgtagtgagaaactaaattctgagtatctcccgagaagtgaataggtgtgaattcagaatgacgaggaatccacgggtctgagatacatttaacactagaaccatccccaattttgagccttaaacctttcacaaggagatcacgtccccaacaaataccttgccaagtgagtgaagaacaaccagttttcggagcttgtaagaagtcattatgtgaaaaatacctcccttttaagacaggctaagaagagaatgtggatattggatgatccgccaagcttgtttagctaacaacgcttggttaaaatggataaaagaacgaaatcccattcctccatccattttagttttgcaaaggagtttccactttctccaatgtgtctttttcttatctttgtcagaaccccaccaaaagttagccatcatttgttctaattgatgactgaaagtagaaggcaacttaaacaactcataacgcaagtaggaatcgattgaaccaccgcttttaggagaacctctttccccccaatagaaaaaagtttgtcattccaagaattcatcgatttccaaattcgttctttaatatcagcaaaaagttgcttcttatccctttcagagtaagctggcagacccaagtatttttcgtgacaatcacttataggcattccaagaataatttgaaaagaatgctgagcaagtggaggagtatttggagagaaagacataaccgatttatctaagttgagttcttgacccgaagcacggtgatagatgtttaaagcacgtttgatagacccacaagatcgatcatcagcttgacaaaagagtaggctgtcatccgcaaaaaataaatgggatattgtaggagctcttcttgaaacagcataacccttgagtcgaccaactctttcctcatattgtaataaacgagacaatccttctgaacaaatgaggaagaggtatggggaaaggggatcaccttgacgaagaccacgctgaggagtaattgaaccaaccaccgaaccattgagattgaaagaaaaggaagtagtatgcaaacatctcataataagggagatccatcgaatattgaaacccatcttacccat

SEQ ID NO: 273972 - DNA, 1733 bp, Cannabis indica
agagagagagagatgggttagcattttgggggtcggggatgagttttgaggatttgggcgtgagggtttggtgtgcgaacgaagaagaagatgtgtatcgtttttttaatatgtaaaagatttttaggggcgacaaaaagtcgcctctaaaagtcttgaaatttttccaaaaattttgaccgcgaatatttcccacccttcggactttccactagaatttcagaattattagaggcgacaaattgttgccctaattttttcgcccttaaaaatcatttttgttgtagtgttttaccccatcaaagaacctagttgaaccctaaaagccctatcaggtatgggtacgcccatatccgattctcccatataagtagaacattatccctttgtgcaaagggtcagaaattgaatctaaggggggatcaactgagaattagggtttttcaactacgacataaatacttgtaagaaatactttgaagctttaatttctagctcaatactattaactcgtggactagagttctttaacactcgaaccacacataaaaaccttagtattttcttctttaatttacttctttcttaagcatctttattttataactagtttccaaaacccagtagtaaacaattacaaattctgttaaatgttgatttagttaaatagaatgcatacatattaatatgttagcagtgcatttttaaaaaattattaaataatcttaaaataaatagcaatagtaattgaactggtgggaaaaagaacaatgaaatttatgtttttatttatttaatttttataattaaataattattatttagtttttttaccgttttcttatttaataaaatttttgacagtggataattaattgattgacatgtgttatagtttaatcaaatttaataagatttaacaatctggattagaagttgcaagttgcaacaaaaacataacatataatatttaattggtaaaaaaataacatatagtatttattctatcgaaaaaaaaaaatatgaggtatataaatgaaattaaaaaaaaatatttatgttacaaatattctttttttttttgaaataaatatgctgcaaatattcttaaaatatagagaaagctacaaattttatgggtttttatattttctgtgtaaagctatatttttttttttttcaaaaaaataaagattttatgagaaaaattgaaaaaaaaattaaaaacccagttactttatacactttttcctatagtattaaaattttaccataaaatattatttttttttagaaaaaccatatttttacaaacctataccttaaaaactgtaaaaaaaagaccaacctaataaagcaccatatacagtaattctaagtatcacttggtgtacgtacaatgcttttataatttatttatgcgtatctatcattatattttactacctatatatatacatatatattactaattttctatgccactaatatatatgatcaatatatatatgttcccactagttaaaaacatcagattaattgaaagcactatcagtttcttattttattgttcaaaataaatcagtaatattccatttagtgcttgttaagaaacaataaacactatttatatgtaaaaatttgaattattttagttcacttaatgaagccatttttttaaacacctcttctatttatattaatggtagctcactacttgatgaatagtgctc

SEQ ID NO: 273973 - DNA, 564 bp, Cannabis indica
ttttttttttttttgagtttatgtgtttcgaaaaatgtataaaaaaattaaaatatatatatttaggttttgggtgagttcgggtataacccagtttcttcgagttttgtattaatgaaactcaaacccaacccagtgattaaccggatgcaacctgaacttagcatcaaatttttaaaacttattttttttaagtttttcaagtttcgggccgagtgaattttctgagtgggtgagttttcgggtgtagatgtttagccctagctaagatcataaggataattacataaagagtaatttgtagcataaatacttaagtttaactctcatttgcaaataaatagctaagtttaatttttggcggtaataatgcctaagttatatttttagaacttccataagtacgtagctgttaaatgtcaagtcattatccacatgtcattttcttattggtatatttaaactatttttgtaaaaaaaataaaaattttatgatttagactaatcagggattgccacgtggtaacttacttaatacctaagaggtacttatatttttacgtt

SEQ ID NO: 273974 - DNA, 775 bp, Cannabis indica
tttacccaataattaatcttttccaaatgaacacttacgaacaatccagagaagccgcataattattcttatatatacttcatttcacctccaaacattttcatgtcatccacaaaacaacaagattaattcaaatccatattatcacttatcagtccctcccaccaaaatcaaaccaacctctctctctcacacaccacacacactttccaacagctgaacatgtttccaacccaacaataatggcgccaaaaccaactaaactagcccttgcacttctcatactctcaatcatcactgtccaatccaatgccttagttccttacacaacatcgctctgggatatgatgatgaacaacgtccctttcgaagacccattccgaatcctcgagcacacgccgctgtccattcccaaaggcgcagataacacggtggcgctggcacgtgcggactggaaggagacagcgacggagcacgtgatctccattgacattccggggatgaagaaggaggatgtgaagatcgaggtggaggagaacagagtggtgagagtcagcggtgagctcaaaccagaggaggaaaaagaaggagagaagtggcaccgatcggagaggatcagtggaaggttctggagacagtttcggctgccagcgaatgcggagttggatcagatcaaggcccagcttgagaatggagttttgaggattacggtacccaaagtgaccgaagagaagaagaaacagcctaaggtaattgatattgctgaacatgacaa

SEQ ID NO: 273975 - DNA, 839 bp, Cannabis indica
gagcctatgaatatatgtatatacatttaaaaatcaaaaatgtgaggaggggccatggccccagcacccaacaacatagttccgccattgcgaagagaaatttaaataacttatgaaggcgaaaacaaaaatggtgcatgcaaactaatagttcctacttcctaccacattaattttttatattttatatatgtgtgttactcatatgtagggtgttcattaaaccgcctacactgcataaaaaatacaatttgaaatcttttgtggtgtagttatagtttttatttttgccaaaccatccggtgcaatgcgatttgcaattttgaatttagttattaaatttcaaatttcaccgcaatatatattataaagttaccaatttttacgatataatttttattgtatattttcatataaagataaatatatgtgtatattacatcttttttagagacaattaatataatgatttgaagattagtatatatgttatgatattaaaactttaataaaaaatttatattgttaaaactttattagattgactttaaaatttttattataatgtttgataatgatgatagtgtaaaccacatcacacaatactgcatttttacggtgtggtttttgtgcatgggcatcgtgtctgaccaagggggaccaaggcttcaaacacaagatgtctgaattccacacgcagatctcctccttgtctgagggtccgtgcgcgcatggagcaccatgctcgacactcaatgcatcaaattttcaaaaccccatatctatctcgtttttaatcgaaattgagttccgtaaaaaataaagttgcttaatttttc

SEQ ID NO: 273976 - DNA, 867 bp, Cannabis indica
cattatcaagaggagcttcactgtaggaattgtgatgagtagctcctgtatcaacaaaccacccttgatcatcaccaaaatcagggacagtgttggcaacaaatgcagcaggctcatagtcaataatctgctcagtgagatgggcttggggttgagaatttccagtaggagttttgggtgtgacccaactcttattgtagtgacatgtgggggtagtgtgcccatatctcatacaaacttgacattgggggcgattggagttggcaggtcttgaattgtaagcttgctggttgccacgattggcaaatcttgaagaaaaatctacaccagatcctctcactccattgatgttggatctgaaaattccatttcttgagccaaaagtaagattggctgccattttagttgataaatccatcatagtagtgtgcctttcaagtctagtttcatgagccaataacagtgcttgaacttcttcaagagacagagtgtcacttcgagaagttatgccagaaaccatagaatcaaactcaggtccaagaccatttaacagatgaagaaacaaatctagatctgagacaaaatggccagcaacagcaagagaatcgcagacaactttgagtttatcaatatagtcagagatagactggttacctttgtgtgcattagagagttggctcttgagttgtaataatcgagcctttgattgactcgagaatttatgttcaagggctttccagactgcattcgaagtggtatagcttgccacagttccaagaacaccttccgtcattgaagacctgatccaagaaagaagaagctaatctttcttgcgtcattgtgggaaggatgggttcggatcaccat

SEQ ID NO: 273977 - DNA, 2199 bp, Cannabis indica
ggtgaaaaatccccaaaaaatcggatttttgggttgaaaccatggaagctgtccaggagaggttacaaggaacgttagatgcgcgtgcaggaggccatcagtgagctgatccgtgcgcagaagaccttactagcagggttatttgaacgcatcatcgtgtctgaattggggtggcacaccaagttcaaacaaaaaaatatctggtgcatctgcgcacgtctagcttccttatccgagatgctggtgcaagcaatgcaccatcttgacacttgcatgcacctgattttcaaatagccaaatcttcttagttttttatcaaaatcgagttctgtaatgacaaaagttgcgtaattattcataaggaatccaaataaattattttcaaaataaaaattattttttttcatggaaaaatttcgtaattcacataaattcttcaaataacacataaagaaacatgaacacatccaaatcaataaatgtaacatattcatcattttaaatccatattagatgaaagtaaatcattaccatgactctgggactagttgttgagaatattttaccaggatctagatttactaacaagtatgttgaattaacatcctaaatatgaatatctctaaaacaatgaaattaaacacataagagtttagaaaatcttacatttgttgcatgataataatatgactccttctgctagatctctaacccttgttcctttctatcgtatgttattatcaagatctgagcctagatctctttctctccttttggttggttgccactgtcttacccactatgattgagtacttgacttgctatgtgtgggcatagcattctatcactataggacaactatgaagaacaatgcaggaggcttgaaaactttatagaaggtgtctctcatctactagttttagagaatgaaaactagatttgatagggtgaaaagtcaattgttggatgagatgagagcatcatgttccttttatagttgttttattttttgtttagatgatatattgaggttatttgagatggtcttagttgttcttgttggttgttgtggtgattgagcaaggtttaagtttatgaactcaagctttgctctctaatggtggattttgattttggatatgttaggttgttttattgcatggattatgtttattatgatgtatataggtgatctagatgttattgtgtggtttggaattgaattaaggtgcgaagaaggttttgagtgtatcctgcactgaaccggtcgaccagttcagtgaggcccataggaatcagaatttcagtttgtccccaggaagccccacagaaccaaaatttcggttggggaactagtctaccggttggggcattttagggaaccttttttttttcatttttgtatttttagggtatttccatgttgttcatcgatagggaaacttttcgtttcgtgtttaagtccctgaaaagtgatttagcgtgtcacttataagttttacgaataatgtgacttaggggcctctaaattgtcaagcagttgttccgctcaggttggctggcacacctgaattcggaagtgaggtaaaattagtataattgttgcatttatgtatacatgtttaacgtacatgttagttaccgtcagagtaacatatcagtgtatcagtgaggtgtacatagagtttcaccgagatgccaacatatatatgttagggaaatcaatagcaatgagattggcatatcagggcatcagtgagatgtacatagagttgcatagaaatgctaatagatatatgctaggaaacagatagtatgaactaattgctaccacatcagtacgactggagtactgagtataggctggattcgcggttagtcatagtttgtcgagaatgttcctgacgcagttagtagattttgattaggtgtatgggcgcctagttgcgcactagatatatgtttatgtttatgattatgtttttcttacagtgttgttgactcacagatattgcttgcatgtgtaagtaagggcaaggctaaggttgagcagtcgtgagagtgagcggatgaagattgtacatgttggggcggttagacttggagcgtacggtctttgggatagctaggtgttttttgtatagtcgctaggcaaaaacttatgtactagaaaagttttgtaaatattttgtaaaaaca

SEQ ID NO: 273978 - DNA, 552 bp, Cannabis indica
taacttatatacataaattatatagataattatgtttgttcaaatttgataattattgtgcacataggatggtgcaagtccatcaaaatgatatatcgtcatgatcgagtagaatactatagggttgacattatatttatatatatatatatatatattattatatatattggattggataggtagcatcataaaaagttaataatgtgaccaatttgagccatgcatgtgctagtagaggagagtgcatgtggcccctatctagtaattagctatagcaaaactcacccccattaatcttcatggcccagctttaatatatatatatatatatatataaatatatatatatattaattaaacatatatatgtcagaacgcacaagtgtcaattagctagttatttattacgtaattatgtaaagtttcttatatgtttcaatttcaagttttacaagccttgtatatgtatatagctagagttgtgtgtaatatatatgcatttatatatatagtcggcatgagattaattggatcttattagttagcaat

SEQ ID NO: 273979 - DNA, 1177 bp, Cannabis indica
atttaattataaaaaaattatattgtgtaaaaaattgtcactaaaaataacaatttttgtagtgatttttttaataaattttagaaatatttacttaatacaatttaaaataaagggtataacgacaaaagatcaatctttacctattgttttgatgactttttcctataaaaaaaacaaagttaaattaatcttgattttatttaatttatagcgaatcacgtggttagaaattcaaatatcttcttttttttctttgtttcacttatagatgcaacattcaaactactacaatatttatcatttattcacctaaatatttgtcggtgactaaatatcataattttatttattcatcgacataaataaagttagggtcctttctacaatgtactcactgaaatgggtctattagtacaacctctaattgatttggcatctaaaaaaaatttttagtgtaatttttttacaattggtgtacgttatagttatttaagaattaagatattctttaaaattttgaaaaattcggaataatttacaataaagaattcaatgttcaaactatctatttcacatgcgtataaaataaaaaatcacacatgcaacaaactctttaagtcccattttcagtttgttaaattttctgaatttctcaaaattttgcaaaatatcttatataattatagcatatataattatgaaaaaaaatcagactaaaattttgttttcaaaatacggaattaaataagagtgtagcaatacaccacttttaaaggatgcattgtaaaataaactcgagtggtcgtaattttaatttaattttaaaataatatggtatatgtaaaacaaaaattgtgaaaaatactttatttgagatataaccttgcagtcataaaaaaaaacataggatagatagctagacacactctcagctttatgttgatacgttcttgtatataatattggagttttttttaatattatacctaaaattaatttaatttataaaatacctttaagaaaattatttgtataaataccgatgtgtcacgtcaacatatataccgaaaagaggaatatattttcatttcggtatacgtgcctgaaagctaattgaaatgatagcggtatttcaattaattaaagtgatgaagataattttacaaatatttta

SEQ ID NO: 273980 - DNA, 875 bp, Cannabis indica
ttaacgtgtcaggattgtagcaaggaacctacgatgttacaatttttatttctaactctcttaccaaagggattaaaaaccacctccctattccaattataaccactagttgagatatctgctaccatcttcaaatgagggtaccgaattcgtacaccataaattcaatgaattcttcaaagtcgagccaaggaatccaaggttacttccataaatcaatcgaattaccccttcctagcaaagccaaactaccctacgatgaatacctcttgaagacataattcccttccacatgggtgaatccgtccccctcatctcagtaccccaaaaagattttcttttacaatatttggcaataaggcatttcatccatagtttttcactaccactagccacctgccaggccaacttggacaataaggccttgtttatatcctcaagtcttctgaatcccaagcctcccatagaaaggggaaggtagagtctatcccaactcaccaaagtaagaaatctttctttctcattacccccgtccactaaaatttgctgatcataccatcaatttctctgcaagtagagataggaacgttacaattagatatagtataaattggcacacttaacgcaaccgatttaacgtgctttctacccgcaaaggggaggagctattagttttccattcttcaattctcttcataactttttcttttaaactttcaaattcttctctcttccaccgtttaaagacaaatagatttccaaggtgtttcatttcatagggaacctcaaagtggctctactttattatattccatccacatctcaattccattcatttaagattggtgtcattgagataagagatgtcgtttcta

SEQ ID NO: 273981 - DNA, 1028 bp, Cannabis indica
aaataaactagagcagctgtatatgacgaaagctttaccgaactggatgtgtttgagtaaaaaaaattatggtttcaagatggatgaaggcaagtctattgatgagtttacaaaattggtaacagatcttgaaacctaaaggttgatgaagaggatcaagccatcttcttgctgaattcattaccaaaacagaacaacatagagatactttgagatatggcagggacactttgacaattgatgaagttgtaggagctgcatattcaaaagtcctagatttgtaagctaataataggggctccaagaataatggtgaagggttgaacgtgagatgcaggcccacagagagaaagggtaatcctaatagaagcaaaagttgaggaagatcccaatcaagaaccagaagaacctgctgggtttgttgtaagaaaggtcatttgagaagaaattgccctcggagaaccaatgatgctggaaaccagaagaattatcaaagaaattaagctcagaggaatgaaactaaccaactcctcgaatgtggtcaaaaatgtttcggatggttacaatataatcatcttagaattttcggttgttttgcatatgttcatactaatcaaggaacaaaaaatcttggagctaaaagtaattattttcttaggttatctaagtggtataaaaggctataaaatatggttgttagaggaaaatatatgtgttgttagtacttagtaaagatgttttatttgatgaaaatgttgtattcaagacaaatatacaatctgtagaatcagccagctttaaacaagctaagcagaataatagctcacaggttttggacagctgcatggatttttaaaactaaacattttgagaagttttcttagatctatgtagagattggaaaaacttagtattggttgatttttgtatattccttggctgaagctggttttagagcaggttttcctaaactcgtgtaaccacggtgttcctccaccatgagtgagggttatatatatatatatata

SEQ ID NO: 273982 - DNA, 876 bp, Cannabis indica
aacttcacttcagtaggcgtaagccatgatggccatggcatgatcaccagtagtgccccacaaacaatccacggacgtcgatgaaggacgttccaagcgtcctctttagtagcaaacgtgaaatgcaaaatgccatcgccatcttccttccaactccaacccttgaaggaggaccaagctttctttaacgtacccgcaattgttattctaccgagtttgcctttgcatataactttacccaacagaactttccccagtggttcctgggtatctatttctcttgggtccaacctataagttagatcgtccgttatgacttgaatggtttcctcgaaaaggtgactaagactgttctctgccatcgtgaaagaggcagtgaaaaacgaagaagctgttaaaaatagttgttgttgtccaaagttaccaacagtaaacttcggtaatcttcctatgaagaaaagctcctagagagcatcgtatattgttagctattcttggtttctcttctccgtctggttcccctgctcttggggtcttttttttggtgtttcttttcttttgattctgtgttgtttgtatttttagctactgtttggcttgttgttggttgtgtattgttctctgttggactggttccctttagttaatgaatcggatgctttgcaccatcttttttcactaaaaaaaaaagagtaatttcttaaaatattatactaaatataatgttcgttacttattaaaaatatgtataatattttttttaagtaatgcatttttatttttattttttttgtagaaaaccttcctatagagtaaaaaataatatatatatatatatatatatatatatattaggtaatgcattaaaaatatttt

SEQ ID NO: 273983 - DNA, 908 bp, Cannabis indica
attttcccttttttttctaaaaaaaatgaaaactaccataatttctatctttgtaattctcgtttttttttcctcaaaaaacattatggaggtttaatccccatgtgatgtattcaccactagtttttcaccttgatgaagttttttcaagaaaaaaaaatgtaaaaaaaataatatatagttatttatttgtaatttttcttccaaaataaatttgttgacattttgcacccctagttttcaattctcccctcataattttatttcttttttttggtcaacactaatttagttgattaaacatagaaaagagataggattcatcaaataaaacttattatctatcatacgagcatgtaaagatgtcctaaaaaaaattagacaataatttaaaattattgtttaatttgtctcactagaaatatactaataaaacaaaaaattctgcttaaaaagttgaaaaagaaccaataaaatacttagaccacaaaaacaaagatagataatgattgttggttctggtatatggtaacatcaagagtttattcagtaaaaagcgcctataagtacatgcaggaacttagtggagaatgaccaaaaatttggtagattgatgtcccagccaaagtccaacaagctgttttagggtgtcttccaacttaagttcaattaaattctaaacatattaatgtggatttaatttgtccattatgtaatcttgttcctgagacaattttccatattctgttcaactgtggatttgcaaagtcttgatggaatctatcaattgttactgtgactggtgtggaagctgctaactttgtagagtggttatgtgatcagttgaaggatcggacaacaacaaaattagtaaaaatgtttaaaattccgtaaaatcgtatttttgt

SEQ ID NO: 273984 - DNA, 1332 bp, Cannabis indica
taggcccataacactcttggcaattcttcaggccaattgtttttgcaggccagcaacttcttctttagggtgacctttaggattttgttgacggcttctgcttgtccgtttgtttgtggccttgcctctgcgaagaatcttttaatgacttcgtgttggttgcagaagtcgggagattcttcgtagtcaaactgcttcccgttgtccgagactatcttgtgaggcaagccatatcgacacattatgttttgatagcaaagtatagtgctttcttagcagttataggctttattggctcgacctctgtccactttgtgaagtagtctactgctactatcgcatactttacccctccctttcttgttggtagggacccaataagatctatcccccaaaccgcaaagggccaagggctagtcatcagggtgatcttgttgggcggggctcttggtatgttcgcgaatctttggcacgaatcacatttcaggacatagtatatacagtctttcttcattgttggccagaagtatccttgtctcaatattttctttgagagactcgggcctcttctatgatctccgtagaacccctcatggacctctagcataatttgcttagcttcagggtccgatacacaccttaggtatggcatgttgagtcctcttcggtagagaatgttatccatcatcacataccggtgcgcttggtactgtatccttctggacagtgtcctttcttgaggcaactcgcctttggttatgtattcgatgatgggggtcatccagtttggctctgtctcaactgctgccacaatattcttggctttgatgcttggttccgtgaggcgttcaacaggcaccacccctagtttctcaacctcgctgtctgatgctaacttagccaaacaatctgcgtgggcatttttttctctagggattctttccactttatattctgtgaactcgtggagtagttccccgacgatttctacatacggggccattttatctccacgcgtttgatattctcccaacacctggtttaccaccaactgtgaatcgctaaagacttctattctcatggctcctacagcttttgctaattttagccctgtaatcagggcttctattcagcttcattattggaatctaggaattcaaaacgaagggtcacctggagtcggagtccgtttggagatatcatcgctatcccagctccggatccatttttgttggacgctccgtccacgaatactttccatgttggggtttgtggcgctggtacgtttgcgctagcttctgcttcattgcactctgttatgaagttagctag

SEQ ID NO: 273985 - DNA, 924 bp, Cannabis indica
gagataccttagcgttcccctggtctccaagagtgtgtggagccttcacctctcctctggcgagcatattctcgttgacactcctgatgccacaagacttagtcgatttatctaatagtcgtgcttctcagacccacgtgtcgttgtcatattggtccacgcattttgggcgaagttaaaggcaacacacaccaatccacacatatttattaaaaatattaaaaaattatatatataattaaaaattttaatataaaaaatagtaatttaaaaatctaatacatataatacacatttattttaaaacttaatagatcaaatgtatatttcattcttatatataattttttttctacatacaatttaaaataaaattaaacatcttttatacatacaatttttttcttcctttgaatttgttatttgttattttattttattttatttgttgttgaatacataaaataacaataatttgttttattttattgctagttatgtgaaaaaaatatcttctcataaatattaaataattatattgaaaagtaaccaatctaaaataactgatcaaatctgtacttttgtgattaaattggattggagttgagttattgtgcggattgaattggatccaaaatatgcactatgagcaaaatagtgcggattggattggatgaatacccctagtatagtaatacccataatattagtttaccacatcatacacaaccttgggcatagacgagctaggcttgtgtctagggccgacctaacccaggatctaattaattttacttttaaaaatacatatttttttaactaattttaaaaaataacacatttttttctaaaaaattgctcaaaagtaattttttttatggtctactaaatttcaaggcttcccgagagagagagagagagaga

SEQ ID NO: 273986 - DNA, 1898 bp, Cannabis indica
ttaaatcgtttaaaatagtcttgcaaagactcaccgggttcctgtttgatgttggccagagttgtgtaggaaggcctataagtcattgtggcctgaaagtgtgtgaggaataaatcgacaaaggtctcccatgtcaatatcgacgcctcaggcaattgggtgaaccaaccgtgggcgttttcctcaagcgttcccgcgagaacgcgacattttgcgagctgtggtacctgatccacttccattacagtattaaatttttcaaggtaatctatgggactagaggtacctttatattttagggattcgaatagtcgaaatcccttgggaagttgagcttgttgcactttcgtagtgaaaagagaggtcccatgcagcttgtatatgggctttctctgctgctcgagcatttttaaagcttgcaaaagcatgctttggttaattcctccagctacaggagttgggactgctgcgactgcaggagtcgtgactactgcggcgaggtttactaggatattgactccagtagtcgctaccggtgcgctaggcggttagtgtgagtgtttacaccttgatcgcccatggggggatcacggggtgtttcctcgttgcggggctcgcgagagagcgctctgaaaaatacattgaggtgatcacgcagatagcctctatgtacctaataacgtcctccctgctgcgtctctacagagtcggaccttgtgtatctgctaggtgtacgaccatgcgaggatgaagaggcggattctgcgtcattgtctcttgatggtcggctgcgaggattacgtcgctcagggtcttcatcaacctgtgtttcctggttaggatacctcgcagattggtctcttgaggttggctggtttaggtccagaccctcaggattggttcttcgttccctgcgaacacgattattacgacgtctagagttcgttacctgagggttatctgtgcgagtagtaggggctcgaggggggcgtcgggccctgttctgtccatccacttcggcctgtagtgcacgcagttgatcctggatcgcagtatattggtcggtggtgagttggacgattccctcagataccaccgccggagtgacaggtggaagtgcattgttgctggtggtgtggacgtttccccgacttgaggaccagctgtttcagggaatagattgagaggtctaatgttacctctccctactccgccattaacgacatccacaggtggtgtcctagctccagataatggcacgttcatcattccgatgttgatggactcgttgttagcacctccgtttgtttggtttccagccatgatggtattcttacttgaactgaatgaaattttaattctcgtttcccacagacggcgccaaatgttgtcgagcaaaattcgcaacaccaaatgtatatgatattattaatgacaagaagaaaattatatgaagaacaattgcgagtattcaacctagagtggcgagtactcgaactgggaatgggaaatgcttaacagaagactggaaatagcaataagacagaggattatagtggttcagtcagatcacggtctgcttagtccactgtagcaagagtttcgtaggtctcatttctcggtggatcacccctttatatacaaagcaggtgtccaattagttatacaaggattgcattcattgtcaatccgtttttacacattgaattacaataactaaactaaacaacgttaacatcaataaatgaataacagttactagattcagcaacgtatgcgcccttttaacatgcgagttgactgttcatattctaatgttaaactcgcgggcccaacacttaattaagtttagaatgtctgcgttcttaggtagtcgcctttgtggacatcgcatgacg

SEQ ID NO: 273987 - DNA, 1167 bp, Cannabis indica
ttaattagcatagcttggaattaattgaggtagtttttacagatttgtatttttgttattgttgctgaatttatagttgaaaatcatgagtttgttgaagatgatgcagttgtgttgcatgttagtgacctttagtttatttaagcatgaatctttgattgtatgatgttttggatttggttaagctttagatggagtattaggggatgttttctagcttgaatccatgtgtttaaaggtattttgctgctggaaaattgattgagttaattggatttgaagttattgttctagagcttgaaattggggtttatgtgatttatatgcaatctgaaattggggatttatgttgaattttgatgcataattatgtgtttaaagtccctaatgtttgctagcagctctagtttataatttggaagttttggttatgaattggaatgagtttgattgtgtttgtgctgattttttgtgatggaggtggctagtttctgggtttggaacccaggtgccgcagcgtggtctgcgtatgccgcgacccgcccctttgggtggaacctgggatttgtcccaggtgccgcggcatggcttttgcatgcccgccctcgaatttctgggcagtttgagtgtaaactttgaaaatgcatatctttgtgatccgaactccaatttgggagttctatatatcgttggaaagttcgttctgagttctatgtgattatctgagttttaaaggccatgactatattttatgagtatcgaatcaggggttaaccctatttgtgaaaatcccaaattgtgtgactaggattactggcacctggtcaggaacacccagggattcagaatctctgctattgcaggacaacaggtaagacaatagtttgcacgtagagtatgcatggtggtgcttatgttgaatatgatatatgtgagtaattgtaaccgggattagggttatcaccctaatatgagcggttaatagcctagggttattaccctagtgatataagttgagtaaatgctatgccatgctaagtgtatgattatattgtgatttaagggttatgcgttcatggcaaaatcaggtggactcggtaaccataacctagatgaaccattctaaggcctcagtttagacgtgtgagagcaacacgtaggtctacg

SEQ ID NO: 273988 - DNA, 560 bp, Cannabis indica
aataggggaattacctcatatatatttttttaatatttttgttaaatttgcgtttggggttgctgcggtggtttccgtgtgggttgctatgtggattttagttgcgatataggttgctccgttagttgctatagggatttctgtgtgaagtttcgtaaaaatataaaaaaaattattttgaagtgtaaaaataaaaaaaaaacccctaataaataatttaagaaaaaaattaactatttattttataattaataattatgtttaaatttatgataattaattaattattaaaaaagtaaaatttctaattatctattctctccttaattctctcatttttctaattttttgttctactttaaattctctccttagttctctcatttttctatttttttattctgctttatttaattagagatcactattcaattaaaaattaaaaaaaaattaactatatatttgtatataatagctaataaatatatatgtattgaaaatattaatttacatataattttttttttcttcagagagagatatagttaatattaactaat

SEQ ID NO: 273989 - DNA, 1093 bp, Cannabis indica
tcagttggttgtagtttcttattagtttttttatagtttaatattgttatgtttgatgtgtttttggatttttattaggtatagttgtttgctgttagtttttaggtatcaatatgattttagatgtttgcagtttatatttgtatagttgtatctgtttggatagtttgttttggttttgttatagttttattttagttgccatactgcattattcacaatttataatttactgtggccattttggttatgttgcaggtctgggactaaaaatttagtccatcttattactacagatctaaatgtgtttgcactagtcttttttctgtaattttaatataaagaaaactttatctgttaatttactgtccatgtttcgtgagactcaattcggtcattttctagatatgcgtgagtttatttttcatctccaagttgttcatagtttattactgagggaagttttccagcccaatcctaaagagtttgtggctaaggttgctggccgttgcatacggtttagtgctgaggaattttatttgattactgaaattgattgtttcggtgattgcaacaagttgttgttttcacaggaatcaaatcagctggtagaaatctgttttcgtggtgtaaaaaccattgaccacaaagctattgaggatgcttttttgggtagtaggtgggctttggatgagtcccttggattgaaaatggttgtgttatattttattgagtgttttcttcttagtaatactcctgataaagaagtatctatgtttgatctagatgttgtggatagcggtcggtgggacgagtattgttggggtagggaatcctttgaattgactattgattcattcaaaggtagaattcagcatgagattataatgaaaaataagaatgtagagaaggtaggccagtatgattgttggtatagggctttgagatgtccgtgggtttttactgtttggttttatgaatgttgtcctgctatggtcaactctttctgtaaaagagtttcatctacgattccatggattctgaattggagcaacaccattgtgaccaaaaatccaactcttcgagacttgaa

SEQ ID NO: 273990 - DNA, 632 bp, Cannabis indica
aaaaaattttaagatgcccgaaatggcagcttataacgggaactcggaccctagcaatcacctgtctcagttcaaccgagtaatgacggtcatgagagtcagcaacgatgccaaatgtttatgcttcccgctaacattaagcaggtctgcggaagaatggttcaagaaactggaaccagcatccgtggactgctggaataagctgcaaaccagcttctggagacagtttgtcgccgcaaggaaggttaatctggaggctagcgccttgactaacatcaagcagctacccacggaagcgctgaagaatttcctaaagaggtttaaggaagaagcctcaaagactaagaaagttgatgacggacaacaacttgctcttcttcaagcagggatccgtacagggactccgttctggaacgagttatagcaagaaggagcctccaaccttcaagatttccagaaaagaggccagaaatacatcaacttagaagaggcccaaatagtggcctatgggggatactacccgactggaatagcagggtatatacccggagcccagctcccgagaaccttaccagcagctaatccaccgatgagcggcatacaatttcctgctaccccaggatataatcaga

SEQ ID NO: 273991 - DNA, 833 bp, Cannabis indica
caataggaccagcaacaacagtagacgaaacaaatccaacctcaccaaccacaacaactgcaagctcaacaaccaacataataaccacttccacaacctctgcagtaagatcagcaacaacaacagccacaaaagtaggcatctactgcccttctatcaatcccttctcttaacttcaaatggcctttgccctaaagaaattaacgccaaggtcctgaagaaagtggaggaaactcatcaatacctcaaggggcatcgtgataaagaagtggcaatagttcagagaaggtccactctcatccaatcaatgaggtaggctgaaatagtagagggggcgctgcaatagtctcagactagtagtagattctactgccttaagcaggtatttggtacttaggattgggactaatgtgataccttttgttgcagaattattgaacaagtggcaaacagaattcgctacctaacagtagagaagtgggctataggtagaagctctaaccctattaccttgtctcacgcagttaaacagcaagtttttggggtaagcacgtcactttaggtcctttattgttattttgttgttgtattatgtgttgacatgtattgctttgttatatcaaatggctccaatcgtggagagggtttcctaggaagttggctctatggttgtagagcttgagcaggcttaggctaagaacaaagctctaacttcaataatcaaagatatcaaagtccaagccactacttagattgaaaaatgaggacaaaggctaaagactaccatcaatgagcatttaatgaggtcaggacaaaatatgaaaacatgtaca

SEQ ID NO: 273992 - DNA, 881 bp, Cannabis indica
aacgttaccttcgaggctgaactaatagagtcgaaggtttgagacatcggagattacgtaggtaatatcctaagaacttgtggtattaaatataagtgagaatgtcgggttagatcggttgctattggcgagttcagctattatccaccaaaacgacttattcgtgaagcatctgaggggactagtggcgaggctagtacgagtggctcgatagggataggcacttaaagcctcaaacacattagggctagagccattatccccctgcgagactactaaaaggacttcctaaaccatctcagaattgccctattctagttggttcctatttcatacagaatcctcgcaagtttaaagaagaattctcctggacgactggtctctccccaatcggcacaacaaccttccgcataatacgtaagtgattacttgcttaagacttggttaaattattccatgtcttttactctggtttttttgactttaattttgcttttttttttcgacatctgtctcgaaaagagcagttgctacctcgagatctctgagcgacgcaggctcctactgggtcttccattcggtcttcggtcaactgagttccttttaagtgaggtcaacctgaggtctgtggatctccttactgataaagagtttacttgtgattataaatatcccaggtattcttcttagtagcaggttcctatcccagccgatgaggaagctcaagatcgcgtggctcaggcacactatctttggaacgccgttcctcgagaagccgaagaaggagcatcctaaggtaatcaatgtgggttgtcacccatagtacttagggccgagcgtaacactttagtatcgttccgagatagtcgttataatttcta

SEQ ID NO: 273993 - DNA, 690 bp, Cannabis indica
aattaagttttggatgctcaacacactctgtttgtgatcgaaaattaagtctaaatcttcaatcaaatttttgactatgatgtgttcactttgaggaaaaatgttgtgaatagaagttctagatctctcttttatctttccaaaacatattgaatcgtctaattacaagcaatattcaaagagttatggccaaaatattatcaatcaacgcagtaggaagctcgctgccaaaaatcgtgcttcaagggccacgacactaccagccgcggccagcctcttttaaattgcaaaaattaggtttactttatctttttttagctatataaatgccttttttcaacacttttcagttgataactttgggagtacaaaaattagaggtagaaggcagctctagacactttcaacattattttctcgaagagttttttcttctactttatttttcatgttcttaattagttgttatcaattatttataatgattatgagtagctaaacagtttattcgggtattgatggatattgtttgacatcaatttatggtttaatgtgatttaatttttttctaattttctatgtattatatttcattcctacttatttcttttaattatctggccatcaattaattatttatgattttgatacgaaatctgagaagtgggtgttaattatgctatagtgaaa

SEQ ID NO: 273994 - DNA, 542 bp, Cannabis indica
ccgcatctcgcactacgggaacccctcgggggtaagcgaagaagtcccgtctcactccgctcctgctggaagcctaacctaaccggaccttctcaaggttcccggagcaagaggtcctggaaaggtagcaaccggacggaggacaagcgccaaaaaagggggtatactccccaatacacctagtacacagagctgacaaactcacaagagcgtgtgtattttgccacatggaaaaatacgcactaccagagaccgcctcccctgtaccgagatagttcccgaagggatcccaacaagagatgcgagtaccacaacgacattggacacattaccaatgagtgcaaaaacctgaaagatgagatcgaaaatttaattcagttgggtcatctctatgagtggatgaagaaccggctgccccatctcaacccggttccggaagggggacctttgccctaggggacgccaaggggtgcgctcggagcactagcaccagctgcaccctcgggaggacctcagcaaacccttggcctgccaccaagacc

SEQ ID NO: 273995 - DNA, 1473 bp, Cannabis indica
aataattttcataattaaacatgattaactgctaagttccaaattaaactaagcggtctttacaacttggctggccatacatgttggtacaactctttgatagcttgcttaactcctttcgcttactacttgatggttttgccataccttgtaaggagactctgtcttgcaattggcaaggatgtgttccacctgtactctatctttataatatcctgataagcctaatggtaaataattagagtttatatttatattataggttaatcaagtaataagtggaattatgatcctactaatctaatttaacataaattttaaattttctacaagtgggtaaataagcgtaatttgtaaattatggagatttatatagcatgtgtgaatataatatgagctatttgtagaataaaaaatatttttcaggtttggcgactttggagactcgatcgagggctaaatatatcataacaggtttaattattagatttgacaggaatattataataagttgatggtgtaagtattggggttattagaagtacttgagatttggcctaattttctaggattagagatttcttaatgactaagaaatggtaaataacttttattaataaaattttattattattattattaaaatttaaagttatcatatacatatatgttagaatttcgaaaaagaaaaaaaaacctaacctatctccctctccctctccctcatcgtgccataaaaaccaccactagcatcaccctttttcttcaaatttttcagcctaaaaccagctctagtagcagctgtgagcataggaaagttcaaggggggaaaacttgagggcctgggattattgatctttctccaagcaggttggtgaacataccttaactggaatttgaggtaagaaaaatataatgtaccacatggcgtgagaggttctgagattatcgattgtctaattaggcaatgataatgtgaggatactatgaacataatatatgggctcacttgattaggtgatgcggtaaacctaacgacgtaccaggcgtaggtacgggcgttagtgacgtatgatgagtaccgagcgtaggtacgggctcacctgattaggtgatgcaatattcctggctacgtatcgggcgtagctacgggcgtcagtgatatgaaattgcctggttatggcatagattaaaactattatagggttcttcctgacaacgtatctggcgtaggtatgggcgtcagtgacatatgataagtaccgggcgtaggtacgggctagtctgattaggtggtgcaatgatattatacatgatattgtattatcacatgggcttgcctaattaggcaatgcaaatatgtgagcatatttatttctatgcatatgactggttacattatctattattgtggtttaatcattttatgataataaaatgtatatttagttatttaatgtatctttctttatt

SEQ ID NO: 273996 - DNA, 1326 bp, Cannabis indica
atggtttagtacataaacaaccaatgaaacagtaatattgaatgaaattagagagaagtccttaaatctaacaatctcaatagttgaggaggaatttttaatggccaaaaaagttcagggggcatgatttggtatatgtcaatggtttgggggggggggggggggggaagattgctaattagtctttaattaattaaaaattaacaaaaattaattttattctgataattatatttttatttgaatatttagattctacacaaaattctactaaaatttaaatttatttcattaaaaaataattttgaaactcaaaatatcacaaaaacaaatttggcacagggagtgccccaagcccccccaagggaacaaatgggggggtattgaggttccacgcagccttcttgaggggcaaaacttggtcagctagggcctaggacagccctagtctgagaaaactttgttatgggcttatctgaagccgtgtgaaggccacgtgatgcttgttcgcgcgcgcacaagtgcaataggtttgagatattttcataaaaacttcaaaaaatcataactaattcaataaaaatccaaattaagttctataaaagcctaaatttattaaattttcatctaatttctagaacaaacacttttagaaacgaaactaaaaatatttatcattgtaaaatcataatttccacacaatcatcaaatatgcacataaaccaacatgaacacatccaaatcaacacaacaaacaatatcatcattttaaatccatacttcatgaaagtaaatcatcaccatggctctaaggctagttgttgggaatattttaccaagatccagatttactaataagtatgttgattaacatcctaaatatgaatatgtctaaaacaatgaaattaaacacataagggtttaagaaaaccttacattgattgcagcggaatgtaatgactcctttcgttcaagatctctagcccttgattcctttttgtagcagagcattatcaagatctgaacctcgatctctttctctccttcgggttggttaccaccatcttactcactatgattgagtacttaacttgctatgtgtgggcatggcactctattactcaagggttcgaatggtgataaataatgaaggaggctgaaatcactatggaaggaactttctcatctactagttggtagagaatgaaaattagatttggtaggttgaatagtcaagttgacaagagcatgagatgagagcatcatgttccttttataatgtttcaactagggcttagggatgagttatatggattaaaaaagaat

SEQ ID NO: 273997 - DNA, 1407 bp, Cannabis indica
aatctcttgtgtcaagttatttatttttctacaaatattttatattctgcctgttccgttttgctgtagcagaattactttctgcttctgcaaacgcttccagtttttatattttcttatatacaactgacatttgcagagagagagggtttgaagagaaagagagtgtggcttgatttacttagtgaagttatataattccttcttgaataatctaatgacttcaacatataacactttgtttttcaccaaaatccactaaaataataattcttgaataatcttaggttaaaaaagtcaaaagtgcccttgccttaccactaagtaaccttcataactaagagtaaaatggtcataataaattactccacataatcctaatattctaactgttcaaaaatattgccttgttaaatcaaagatactcaatcgtataaaagtgacactaatggccaaaccgtcgaattttactgttaccaagcataaaatataaaaatatcataattcataaataacatgtatgacacacctagaattcaataaaatctctataatggagaaattatttcactaatgcctatttctaacaatagagcttatttcattttaatgcacatatatcataaataataataataattaaattgctaataaactgctaaatatctcctaattttcatgtctaaatatacgatcattacaattatatcccagttaaaaggattctatcctcaaaatctaatttgaacaactctgggtattgagccctcgtatcggactctaactccaaaaaagcttcctccaccttgatgttcctccacgattcctcatttgacaagtctggctgcaactttaaagcttcataactaaagacatgagttggatttaacacatacttccttagcattgatacatgaaaaaaaaaaagtgtgcattgctaacaatgtaggaggtaaagctaggcggtatgctacttgaccaactttctcaagaatctcaaatggccctgtaaacctagggcttaattttcctttcttttgaagtgcttcacacattttattggtgaaactcgtacaaaaatatgatgtcctacctgtaactctatgtttttgcacttcggatgtgcataacttttccacttactttgagaagcaagcattcaagccttgatcttttccatagcttcactggtcttcttaaatgattttggacccaaatactttctttcttgggtttcatccaagtgaatcagagaacgacactttctaccatacagcatctcatagagagtcatccctattgtactttgataactgttgttataggataatctatcaatggaaagaacgtactccatgaactttcaaaaatccattacacatgctcataacatgtcctctaatatct

SEQ ID NO: 273998 - DNA, 577 bp, Cannabis indica
ctccactagtaataattaagagtgataatagtacttaggaaaatttgaatttttatgtattttttaaagcataataggtttggtaaacaaaaattaaaggtaattgttaaaatatgactattttacttaaaccccaaaaatacccctctcataatcacctcccccttttttctttgcccgtgcgataccccatcgcaagaacacaccgacccacaacgcccacccctcagcaccattccgcctgacccccacccaccatttggatcgatcgattattgcaaggagtcaaccgagtatcctgaccgactactgcatggaggagaaccccaaacctaatttgttattttttgggtacccatcgagccccaatcggactcggtacaacaattttgggtttggggttctcctccgtgcggtagtcggtcggaatactcggttgactccgtgcggtaatcgatcggtctaaatggtgggtaggggtcggttggaatggtgttgtggggtgggcgttgtgggtcggtgtgttcttgcgatggggtatcgcacgtgcagagagaggttaaagggaaggagagag

SEQ ID NO: 273999 - DNA, 817 bp, Cannabis indica
ggcacaaaacccaacaattttgtgggttaaagagctttttgattttggttccatatcaaaggtgggggatagaaagaatattgcaatttactttgatatttggatttctctcaattcaatttctttggctttgtctcctatgtaccttggtggtgatagtgtggtctccatgcttaaatcaaattctcaagagtgggatggtgatctcattcgtggtttattctttcttgatgaagttaattaaggttgttctacctgtatttaacagttgggtttcaatcgtgcttctacctctaattttttttgggttggtggaaaaagttatggagtcgtaaaattcctcccaaaatgaagatgtttgcttggaaaacttttttgagttagattcctattaaagagaataaacttgatcaaacacggccttattgcaaatggtctttgtctggtgtgtactacccatgtggaatcaactcatcatgccctttgcggttgtcctactcttcatgattgttgtaaactttgtgatttcaagcttttggacctgaatttgactgtgtagatttttttttcaatttattcatgttaatagtgatcacttttcaattagcaaaatagagattgtgtgcttgtaattttgtggcatatttggtacaaaaggaataaaaatgtgcaaaataatatggatacccaagtgacataggtggttaattgggcatgcacgttccttagggaccttgaacatggtatgccttcatgtgggggactgatttgcactagaatgtttcagtgccatttgcattgcgatggcttctgccac

SEQ ID NO: 274000 - DNA, 1282 bp, Cannabis indica
tgtccatacctagtacggaaagccgtctttgggatttcctcctatcggattctcaactaatgataacctgatcggatatcaatattttaaaagaccgtcttcccctaaagttgatcaaaaagatcatcgatcctagggaaaggatatttattcttgattgttagcttattcaattcccggtagtcaatgcacatccggaaggacccgtctttcttcttgacaaacagtaccggagctccctaggtgacacactaggccgagaaaaccctatgtcaagaaacccttggagttgaatttttaattcttaaagttctgctggagccattctgtaaggggccttaaaaccggttctgctccaggtgccaaatcaataacaaaatcaatttctctctgaggtggtaaacccgaaagttcatcaggaaaaacatctagaaattcccgaaccaccttgtgtcttctggctgaacaaagtcatgctgagtggtatctaataccacgactaaaaatcctagacatccatctcgtaacaattctttagctgttagtaccgaaattactgggatccgagatccccgaaccgatctgacaaaaacaaaaggttcttcaccttctggttggaaaattaccatcttcctcttacaatcaatactggctgagtacttggacaagaaatccattctcagtataatatcaaaatctgctaaactcattttcattaagttagcactcaactccctatcctcgattgtgatcggcatatacctaatccaccttttggagatagctaactctccgccaggtagtagggttccaaaccctgattcataattatcatgctgtctatcaaatttactaaaaattttggctaccacagaggaatgagttgccccagagtcaaactacacagagaaataatagttattgaccgagagctgacctggtaccactaaagggctggcttctacgtcagccttagttatcgcgaacacccttgctggagtgggttttgatgcagtcttatgtgcttcagtctagagttggggacaatcccttttataatgccctggcataccgaactaaaaacatccctaccctctgcactcccccagatggtgctttttaaaactagggaactctgggtaagtgtatcgagtctcagagctaccttgtccactacctcgaccctggttccctcagaacctcttgttctgacctaagccactggatgcagtaggtgcctttcttttctgatcagtggccgagccactacctcccctactaa

SEQ ID NO: 274001 - DNA, 897 bp, Cannabis indica
tacaagggaaatttacgtatcatactgtttttttttttttttatttcaattttaatgctataaggaaaatattacatttttactgtattttttatactatgtgtactgttttttttatttatttattttctttacttttttacttggcatctgcctaacacatttttttttttgaaaataagcgtgaatgtaccattaataattagagttagacctcgcggtcattacataaaaggttctccggaaccgaagaaaccggaataatctcatacaacttgttaataaaagcccaattagccatattatgggctgcaaaattacaagttctgttaacatacatgaaattacaacaagagaaggagggagaggacttaacacaaaatgagatataattgtcaatcgcccaatgagactccgatccattgagagcattgataactgatctcgagtcactctcaaccaaaataaacatctgcctatcacattaaatatatttatatatatatattacataaacggtaaaaaagtgtgggagtgggtttttttaatttaaattatattatattttaaaagtataaaagtgtgatgtgacttgtgtagtcactttagtgacatatatttttttttaattaaaattgatgataaaaatatgttaccttaaatatttaatactcatttctatcactttaatctcacttccccattattctctcttactattcatcatcttcttcatttttttcacttctctacttcctcaagttctcctaattttctccatcaaatataaatttttttaaattttcttcatgcacgttcttcttctttcatcttcttttcttttctttttctttcttttttttttcttttttaatttttttgtaagtttcttagttt

SEQ ID NO: 274002 - DNA, 1807 bp, Cannabis indica
ggtttttatttaagtaattttagaaaacagttattgaattatatttatttcagaaaatgatttttgatttaattgattcaatgaacttgttttaatcaagttgttttgggaatcgatttttgatttagttaaaacaaggaacctaatttttaatttatttattttatttaactattttttgtgtgtaaatttttatcttggttgctttacataactagtttatttatctcagatttttaattagttgataaatataacaggtttttttatcatataatttaagttattatgtgttatttattttttacttattttattatggaatcgattcagtttagattcatgcctcggtatttttagaattgatttccattttttttttaaaatataattgatttttgaggaattatgtattattcatttttactaaatttgttgttgaactaatttagtttttaatttatgtttcagtgttttatgaactgattttctttttgttttttaattttaactgttttgagttgttctgtgttatttatttttattcattatcttatagaactgattatattttaattataattgatttgagttatttactgttatttgttttcattcattataactagtttgagttattttatgttagttgtttttattcattatgttatagaaccaattctatttttaattataaatggtttaaattattgtgtgttaattatttgtattccttatgttatagaactgattatattttaattataactagtttaagttattctatgttatttgtattcattatgttatagattaagttctactttaattataatatgttttcagttattttgtgttatttatttttattcattatgttatagaactggttctattttaatttatatatgagatttctacttctagtgacctttctagtgatggtgacttttcaggagattttttcggtgaatttttcggggacgataactaatctgacgacttttttggtgatttttccgacgaatttatcttttctgacgactttttcggtaccagtgactttcccgatgacttttttgataccggtgattttcttgcgatacttattattataagttttatcaaatttatttattgtattttttgagtagataccattttggaccttgtgttttgtaaaagttatcaattggactctctcttttgttaaataacaaaataaatcctatatttttcaaaatagtaaaaaatatggaccatgagctcaatttttaacaattttattttttaatataactaaatttaagacaatttctaacacaaacagacacaaaaaatgtaaccagttttgccataacatctctagatcagattattattaagttttatgttgacaaaaaatcaattcagggtcttatatgtacaattttagaaaatacgaggtctatttgtcatttaacaaaacagagggtccaattggtaacttttgcaaaacataggatccaaaatgacatttaccctattttgtttaattttccatattttaaactttaattatttttttttatctcgtatctttttgcattatttatttatgtcatataaaagtaaactttattaaattttctcatatttatgaaaaaccacatattaaaaattaggtgtgtaattggatattcaattaaaaaactaatccaatctaattagtagttggattttcttggattagattttgaggtcaaattaaattggattagatgatgatttttaaatccatttactaattgaattggacacgtaagaa

SEQ ID NO: 274003 - DNA, 645 bp, Cannabis indica
tatgcccagggccgggcctgcacatactcgtgagtatgttgaaagaataaagacaaaattcccagcatggttcatctcacaattgtcttactatgataagtgtctcgtacatttatggaagaacgcgagaagtactacttaaagtaaacttaggcattgataatccatttttatgataaagtgtcttaaggagattggctgaattgtgagaagaataagacatagtcaacataacctcttatagataaatttaagagagcagttatgagaagttttttgcttttttccttgtgatgtaaatgtgaaatgtgaagattgtctatgtttcacaaacaattacaatgataagatcccaagaaaataattgtcactctaaactcctataaatagggacgaaacccaaagaacaagggatggccaatttgagaaaaagagagtatcataccagtcttatattgtattttgtatacaatttattaatcctagaataagatggactcgtggactatgaaaaattaacttcaaaaccatgttaaaaatcttcttgtcatttattattattatttttgtcattattattattactgttcatttaattcttgagtacatttattacaaaaaggcttatttattagttaacgaaaa

SEQ ID NO: 274004 - DNA, 812 bp, Cannabis indica
tgatattttaccattttttttcatttttaactgctatacggcaattattatatttttaatgtgtatattgttttttttttttaattttgttcaaacctatttaatttactgatggataaattttatgtcactttcatgtcagattttttatttaatctactgattgttttttatttattttttaaatttaatttttaagtccgacatgtggtcccatttttaaaaatttatatatgtgtttaggtgattgatggcttatatcacttttttgactattttttattactaaaatttgaaaaagtgaaatacccacgtgatctctattaattccaaggctttacatatatttttttatttctctctctatctctttttgtgggttggtgtctattaaaaatttcttgagatttgtgtcttaaataaagaaaatttcttgagattagtgtctaaaatgaagaccatcaaccaagaactttagataaaacccttctccccactctttactatttcaaaaatttacaaaactcactcatttcattcatttttttacttgggttttgagaaagaaaatcaagatatatatatatagagagagagagagaaagtttttgtgggtgtgcttcagagagagatagaaaaaacttgaaacgagagtaggctgatgaaggagtgtggaggctctcttggtgaagagagtccatctcgtgagaatatcttcaagaagaacaatacagaagaagaagaagaagaacaacagacaactcaaactttctaagtaaaatttttttttttttttatttttttactttttt

SEQ ID NO: 274005 - DNA, 399 bp, Cannabis indica
ttaatcatttctcattcctagtttgagtactcgccactctaggttgaatactcgcacttgttcttcatatagatttctttctgttattaataatatcatataaaatttgtgttgcgaaattcactcgacaacacccgtgatctaatttaaaagaatataaagtaaactatattcaatatgtatatattagataaatactaacaattaaaaaccctaaaatctaacattcgaagacaaacagatctgactccccctctccctctctcttcttctccttcaattcccaccaaaacggatcccctctacctctctcttccctttggttcccccctcacctgcaatttttaacagtggttagtcgtcagacacccctgcttggacgttggatgctagtcacca

SEQ ID NO: 274006 - DNA, 671 bp, Cannabis indica
atatatatctattctatatataacatgctatataacaaaatttttaatttataaaaaattatttgttgatttttttcttaagtaaaaaaaaataacaaattattagatgttgccacgtaaaggatcagcattcatatagttagttaaacctaaatatgattaatccacctaaagtgttgcaattaataataaatttgttcatattgtgtatttttttattattaaaaattattttcaaattttgttatttagaattagtttaattttaaatattattttaaattaaatttgaatattatgatagtttaaccaaatgagcattttcattaattccaaagataaatttaggacgaataatatttttttttaatttctattacaaagtataatagtaatttttatttaaatcactattatgcttttaaattttaatgattatcactacattgaatattattgactttaaaattatgatattaaaaactaaaaactaaaataaaattaacatacgtgacttggcacgtaacaaatctatatatttggaattttttagtcaaattttttcctgaatagtttagagagataatttaacaaatctaacaatctgaatagttcagggggaattttaacagacaaaaaaagttcagaggcatgattggtacatgtcaaag

SEQ ID NO: 274007 - DNA, 633 bp, Cannabis indica
tggcttcaaagttgccgaagttccttcatacaactgctggtttgcttgacgttgctcgaacctagaaattcgaatctttgattaagtttccgattttctttatgcttttctttgcatgtttacgttttgaatgcaactatgctgtagaaaaatgctttggaaaccctagggctagaaacttctgcaactcttctttatcatgtcttcatgtgggtttacagccatagagcttgtctcagaaccgcattgcgtctgtctttcatcttccttattctaagctttatgaacttttttgccctaactcaagaaaactttctgacttcttgagttttgacttttctttagacatagccgtcctctaatctgttgagtatgttcggtatatttgcttgtttttcgtttgatactctgtccaacactcatcttgtgtgttgtctgttgtagatgaacccaggtgagtcttgggaaggcatcagatcgactaagatcagcttcaacttctgcacgaagattattctcgtcttcgtgctagtcctccttctagcgaaggacattctcctgaccttgtacccagccatagaatgatggctcgtacaaagaaaaccacacctctggtcgacgcttctgatcctc

SEQ ID NO: 274008 - DNA, 511 bp, Cannabis indica
gatgcattagtttcttcgttccttccctctaggttttgattatcacaaccatagtttcttctcgaatgtgtttttccagaagtatggagtctttgagaatccattggttccttcccagggcgatgtgtagttccccaaggacgacttctatcgttttgattgttatcagtcatggatatatttttgtttgtaaggagggatttttctgagttctatcatgtaggctctcaatgaaagcaccaaactattaacattgattttcgttaaccaataataagccttttcgtaataaatttaaacactgaaattataaggaataaagtataaataatatataagtacactagatatttttacgtggttttgtagttaaatctgcatactctacgagtctatttattcaagatatttcctgaatattcaatacaatatataattaatcgtaattatgtttttctctcccaaattcttcgtcccttttttgtggcatctgccctatttataggaatat

SEQ ID NO: 274009 - DNA, 825 bp, Cannabis indica
ctaaacccatgtcgtcgccgatgaccaccgttccaggtgcacggcgttgctgaggatgtcccccgacccaggtaagtcgattgcctctctctctctctcagccctcttctctgtctctgtctctcatccctcttctctctctttctctctctctcgatgatgcaggtctaggaccaggacccagttgtcgtcgacgaggaccactgagccattggccgttgacgaggaccccgacctaggtaagtcgatcgatcacttctctcttagccctattctctttctctctgtgtctataccgatttcctctctctctttctctctctctcatttaagggttttccataatttttctttgcaatcttgttaatacttcttgtgtataaatattcctttttgggtattattgtgatttttattttcagatctgtggaaaagataatatggttgtggagaaataaatttaggattttaaagtttgagtttttggactaaaattttgtatatatatatttgtgtgtttgtttgttgaatttagatttatttaaatttggtttaagtttggtttgagctttgtttaatttttttgtgcgatatggatttgaaaaataggttgtggtggtagtatcggtaatggtgagtggtggtgtttacggtggctatgcatggttgatggtggtttcggtagtgggtagagtggttacaatggttatggatggtactggtaatgacagtatatagattaaagaagaagaataaaaaaaatatttttttaacaaatatatgatatggtagaaaaaaaaatatatcttttttattttaattttt

SEQ ID NO: 274010 - DNA, 1237 bp, Cannabis indica
taaacaactgctaatttccaaattaactaagcgggctttacaaagatcttctcgcaactccatatcacctggaattgggtgtgctgccagaaaatcagccaaagcttgtccttttattgctttttgtgggacaaagttgatttcgaattctgagagcatcatggaccatttggcaagttgtccacacaacacgggcttcgataggatatatcataaagggttagcttttgacactaaagtcacaggatgtgagagcaaatagtgtcgtagttttgtgacggcaaaaattaaagccaaacacactttctcgattgaagggtaattttgttctgcccctactaaagttctacttagatagtaaagagcaacttcttttccttcctcattattttacgccaacatggatcccaaggagcgttcgagtgaagtgatatataatatcaatgactttcctaagattggagctctcaacacaggtggatgcaacatgaacttcttaatgctttcaaaagcattttggcatgcctcatcccaaataaaatgggacattttttttttgcatcaaccgcgaaaagggttgacatctactggacaggtttgagatgaatcttcagatatacgcaagtcttccctgtagttcacgtagttgacgtaaattacgcgggggaggcatttccgaaattgctttgatttttgcagggtcgatttcagttcctcgatgtctaacgataaacctgaggcacattcctgatgttaccccaaatgcacattttaaagaaatcatcttcagattgtgttgcctgagcctgtcaaagactcgttttaaatcatcaagatgatttgtcctttcttttgttttgaccactaaatcgtcaacataacattcgacaatattgtgcatcatgtctttaaaaactgtggtcattgctctttggtaggttgcccttgcattcttgaggccaaatggcataactgtataacaaaatatgccttttggtgtccgaaaagcagtgagctcttcgtccccgggtgccattttgatttggttgtacccagaaaatccatccatgaatgataaggcatcaaaaccagtggtagcatctatccataactcagtgatggggagtgggaattcatctttcgagcaagcccgattaagatctcggtaatccacgcatatgcagagttgcccatttttcttcatcacaatgacgatgtttgcaagccaaataggata

SEQ ID NO: 274011 - DNA, 650 bp, Cannabis indica
ttaaaaattgttttcaatttttaaaaatagaaaacaattttaaaactaataggggttgtttggtaaaaattttaaaaacaatttttaaaacttgagtttaaaaaattaaaaaacaagaaacatcaaaatgttagttctcaattttcaaaaataatattttgtctaagatattatattttatatttttgctcacatactcggatcctagactcggagccaaatggggttcatattattatatggtgttaaaatattgattttttagtaagaaaaaattaaaaataatttaaaaaatttatgtcaaacaccattaaattttaaaatgacaaaattatttctattctcacttttaaaaatacaattttaaaaactgaaaaactgaaaacactaaccaaacaagctctcaatatttcagcaacaatacagataaacaactaattcatgtccaagtacaagaagaaagaagaggacccggggcatcacgaataatcaccccaacaccaattttagccaaattattacataaacccacgtgataattgattttaaccaccttagaagatgatttagaccatcagctagctcgtctccaatgtttttatcaggagtaatagagtgacaattagccgaatggaaacgctctaaataat

SEQ ID NO: 274012 - DNA, 730 bp, Cannabis indica
cctgattaggtgatgtgatttttttggcgacgtattgggcgtaagtacgggcttcagtgatatatgatgagtacggagcgtaggtacaagctcatctaattaggtgatgcgatttttctagcgacgtattgggcgtaagtgcgggtgtcagtgatatatgatgagtattgagcatacgtacgagctcgtctgattagacgatgcgatattggtgccagattatgacacaggctcacctgattaggtgatgcaattatatgatatatgtgtgtaggtttttggcacaggctcacctgattaggtgatgcagttatgcgatatgtggatgctgggctatggcacgggcttgcctgattaggcaatgcaatacagaattatcagattaaagcatcaacttacctgattagccaacgtgatgttatgaagatggtcactttatgaggtaacatatatataatgtatataaataaatgaatatgaattctattattggtataataattttgtattaccaaatatctgtatactgatgtttattcgtggcaaatgccagtagtgatttggatttcatcttatgaacaatgggtgatggtttaagtcctattgtgtataaatgacaatatgcaaataacaaactatgtgattgttattattacttttcttgttgagtccttgtgactcacgggtgctatatggtgcaggtaaaggcaaagaaaagctagatcaccat

SEQ ID NO: 274013 - DNA, 763 bp, Cannabis indica
agggtctcggtccccgagctcctcactcattctgttcatagcagcaaaatccatctaaagagagttgagagagtgaggaagcccaattacccacatcaatcagtttccttcgcagatcaaaacttgtgtgggattgaagctcaaaaattcaatggctggaggtatttcgatccttattcatagtgtatatatgtttgatttgattccgcattttatacataaaaatatatgtttaagtttatacatataaatgtctaacatcatattgtagtatactatgttaactttttactgttgttctactgttatttttttgttgttctactgctgtttttagttgctctattttgtattttactggtgttttataaaaatacagtatttttgaaaaaatttccgtgtgacagtatttttgtaaaagttatcattcaaaaaaatttcagagggcctagtagtttcccaatacatattcctatactctaatatcaaatggcaagaaacacatatgctatttccatttccaatttatacacaaaacttttcacaaaacaaattattcacaacaacaacatagatatcaataatccatcatataaaccaactctataaatttatatatactcatatttactatttaaactatcatgataagtacaatatatacttagaacacttaaaaaattatagacatgaccattacaaattttaaagaaaatatagacttttaaaatcatcattaaaacaaagcaactattttgatata

SEQ ID NO: 274014 - DNA, 660 bp, Cannabis indica
taatgagttattccataaaaaacaacaccgattcacattccttttatcttgagacatgtcctccagccgaatttcaggtttaacaattgccccttaaaaaattcttttttagtaaaaagagctttttaataattatggagggaattttcgccaaagtcctttcttggaaaggatgcctcctttgattctgcacgattcccagccgttagatttcttaatctttggctttcttgtcactgaacttcgtgtataaaaggacaactcaagcttgtcatttttcacaaaccttctggctcttttgtgaaatccattttcagaatggattacttccttcctgtcaaaatgtccattctaagtttagaagtttatctttcgagactcataatacccagatgcaccaacaaatttccattcgttcctacagatttcaagcctcaaatggagcctgaaatgatggattgcaaggctgaggagcttttgaccaatccaaacaaggggaacctcatgacttgccatgaccgatcctcacaagtgatccctgagggtacatatcttatgagcgatctcaaagatcctcctcaagctgatgaataattccaaaggaagatcgacatggtttcaggtagatttggggaggaagttggtgtggtttctatcaga

SEQ ID NO: 274015 - DNA, 599 bp, Cannabis indica
tcaatcataacataggtgagtgacacgctaaatcacttcccggggacataaacttgaaactaaaagtttccctatcgataaataacatgacaataccctaaacaacacaaaatgggaaaaactagggttcctaaaattgccccaactagtagaccagttccccaaccgaaattccagttctgggggaattcctggaagccaacccgaattctggttcctgcagggccctctgaaccggaatttcggttcactgcaggaacgaccaaatgtttcataacttcaccaattcaaccccaaacttaaaaaaaaccttccacacctgttatttagaccatacacaacatatctaaagcaacaaaacaaccacccacgctcagaaccaaaatccaccattaatgagccaagcttgagttcaaaaactccaagcttgcttaaacaacaaaccagccaacaccataagcttaaaacaacatatctaagcataattcatccactgaaaacaacaacaaacccaagcagcaactacagcaactaaaaagcccaaaacatgcataataccaaaacttaacacccaagaaaatcaaaaaaaaaaaaaacga

SEQ ID NO: 274016 - DNA, 667 bp, Cannabis indica
caaataaatataataattctaacagtagtaaaactttttgaaatagtaaaaagtttgaaagtacaatcatctaaagtaaattaaaaagtgaatgttcagaattcatcccttactcctacgttaaaaaacactctctaccaagatattaaatactattttggtgtatttctttattatttaatattttatttatatacaataaatttttttcacaattttagtgccctaagtgttcgaaagcctaaagcgcatgccttcctcacctctccttagggctagccttacctggcgtagatggggacaacccgcttaaaaaggtcttgacgaacattcattaacgggattaaaattcccatgcttaccccaagagacaagagcgacacctggtagcccttaagggtgttcacaaatgactaaactgcatatgtggtttttgtaatttttcaaactgcaaccacaccgcgagatcttaaaactgtaaaaaacccaccgtaaaaatacagcgtagcgcagtacaatttaagcggttcacactatcatcattatcaaacattataataaaaatataaaaatcattctaataaatttttaataatacaaaataaaaaaaaatcatattaaaattttaacatcataacatatatactaatcaataaattattatatt

SEQ ID NO: 274017 - DNA, 606 bp, Cannabis indica
aaaaaaaaaaaaaaaaactttgccactgttatggcacaaattactcaatttataataaagtatctaaactagtgcatgaaattaaaaatttaaaaccacacggctgtgttgcctagtagtgtactacttattgtaatgtaaattttgcataagatattattactttcattttggattaactaagtaagaattgataatagacaaaataaaaacaataaactaaaagataaaatgtctgagcccgggttcgaaccggggacctctagtgtgtgagactagcgtgataaccaactacaccacccagacgacatgctatgtttcctactattttacgatttatcatttatttttgtttgtcaacttagatatagaaataccacttcgggaatacgcagtatattatttctacaagctaatcttgcatttgcatgcattgccttcttttaaagagaaatatatagaggctgtttgatttcatactttaaaaactaccgtttttaaaaactagtaggaccgtttggtaaaattttttaaaaataattttttaaaattgagtttaaaaaaattagattacaaaaaacatcaaaatattattttcaattttca

SEQ ID NO: 274018 - DNA, 604 bp, Cannabis indica
cacttgaagaactgatgaaaatagaattcagaagctctcagaaaggcttggacgtgtgaagtaatgtgggaagtgagaaaaattcgattgaaagctctcttatttataggtgagcttaatatcttaatcctaatacaattgggagtcttttaaatttaaagcttaaaagaaaacataaatgataagaaaaagatgaaaatcttttctcttctacttttggcttagtaatttcaaaattcctatgagaataggaatatgaattctaaatttaaaaggtaacaacaattcctaatgctattaagatttaaggtaaatctagaatgtcatgttcagcaaggaatatgatttcaatccaattaatcctaatgccataaaaaatatatgaaaattttgagttttcaaagaaaaagataaaagataagtgaaaaataataagtttttcctctttttctatgcttaacaatttttgaaaattcctaaacacaagagaaagggaattaaaagtcctaattttgttaagaatgcttgaagaatagaaattggtagtttgaagagaaacaacatcggttcacgtcatcaagtcaactccacacaagtgtaaagt

SEQ ID NO: 274019 - DNA, 632 bp, Cannabis indica
acgaagatttcaattagacgaaaattgctcaatggttggccgaaggttacattagatgaaataactgttggtaaaatatttatgcaactataatgcaaatgttatgaaacattaaaaatcagaacagtgtttccacgtacgtaattttatctacatgtctcttaatgatttaatataaacaagttcaccattagaaattttgaaaacaacgaaaaaatacatcaggataaatattttattatagtattgatgtaattttttttttttttggattatacttgaattggattgtttcaattttttgagatctgtatttcatggatctaaaaattaaagtcaagacattaggtttatgtaaattaaactggattttcggttgaattgcgttggattgctacgtggtttcacgatggttgctcagaaagtataaatcctgggttgaaagtgtgtgtaagtggtatttgtgtaatttttttttatttgggttgtatatttatttggatagctgaaaatatttttgggatattattgcttcaaatagagtaatggtagatccaataaagaaggacggaagttttgcttattttttttctttcttaatgtaaactaaaattaaataaaattaattatgt

SEQ ID NO: 274020 - DNA, 786 bp, Cannabis indica
caacgtaaggttttcttaactttatatgtgtttaattatcattttagaaagttcatattttgggtgttaaacaacatacttgtgagtagatctaagatcctgataaaataaattccaacagtctcaacatgcctttcaacgagacgtctttgcaatcattgcaacgagacatctcagcacgccttccaacaagacatcttggcacgccatgcgacgatttgtttcgacacgctttgccacgagatgactcgacccgccttggagcaaggcatctcgacacaccttgtaacgaggcatctcggcacgccttgcaatgtgacgtctcagcatgccttgccacagggtgtcttagaatgccttgcaatgggacgtctcgacatgcctttccacaccctaattgtcatggcaagccctgcaacaagacgtctcaacatgtcgtacaacgagacatccacgcatgcctctctacgaaatgtctttgtatgcatgctcgagtgcctaagttgtatgagggacaccattatgcatggaatcacaaggacaaggtatgcacgtggatgggtacaagttagagtacgaacacaccttcaagatggtctgctaccgagagaagggtgcgagagtagtggaggcacctcacctacataccctgatatctcaagaataggtaggctacgccactactcctacatgttgctaccacctgcaagggcatgactgttgggaatattttacaaagatctagatttactaacaagtatgttgaattaacatcctaaatatgaa

SEQ ID NO: 274021 - DNA, 699 bp, Cannabis indica
catgtaagttgcagtagatagggtttttgttttaaaccttagtcccgattgtgatttagcgagtcacttatgtgttttgttatcgatgtgatttaggagcctataattgaccgagcagttgttccactcaggttgaccggcacaactgaattttgaattgaggtaagattagtataatatcatgcatatgttattacatgttcagcgtacatgttgttatgcctattagattacgttgatagcagtaatagtatacatagagttgtgttgattactgataaatgtatgttggctaaaatattgatcgatgttgtcacatcaatatggctagagtataactagcatattgagtataggatgacattatgatcgatagtattgtcttgtgaacgttctagactcagtaccgtgtgggacacggggattagggttatgatcaggttataacccaggttatttgaatgttatatggtatgcttttcttactcagtctgtcgactcacagtgctatctttatgtgtaggtaagggcaaggttaaagttgaggagccgtgagtacgagcaggtgaagattgtacatgtcgggcggttaggcctggagcgtacgatctttggggacattgaggcttctgctgtatagtcgctgggcgacaaacttttgtatatttgtatagaaaacttttaaaaagtattttgtaa

SEQ ID NO: 274022 - DNA, 475 bp, Cannabis indica
ccataacctcatcttgaaccttaattagcttgggatccttctaattgtgcctttctgattctctctaacagatcagattgaagtgttaagttatgcaactttccaactacgaactcaatccctgctctaaccatttcagaggctaattgaggggctatcagaaccgtagtacaaacttgcccgggaccctttctactcaaagcatcggctacaacattggccttccctgggtgatacagaatctcacaatcataatctttaaccaactccaaccacctcctttgtctcatgttcaaattcttttgggtgaaaaagtatttcagactcttatgatcagtataaatctcgcacttctcaccataaagataatgtcgccatatcttcagagaaaaaaccacaacagcaagctctaggtcatgagttggatagcgctgctcataatctttcagttgacgagaggcataggctatgactc

SEQ ID NO: 274023 - DNA, 634 bp, Cannabis indica
ttgctgctgaggctggccgcctctccaagaacataattaaccatggcttcgttctgtctgattttggggacatgaacgaagtcaggaaggttcttcaggacctcactgcggagaggcagctttaccaggaggctgctgagcgccgggaggctgctgccaaggccaatgaggaggaggccaagcggagggaagcccaggcggaggccatgatccgggatgaggcccagcggagggacaggctggaggccaagcatcaagaggagctgagggcggaaggtgaggccgctgcaaaggccaagcgggagctccgggaggccagggaagccttggacgagatggttgccaaggtgagatccttagaggaaactcaccaagcaaacttagagtccagggccgctctagccgcggagctgaaggagctcagggacttcaaggaacaagcctccaagaaggcaaaaagagccgagcttctttctcccgtttcctgcggccggtgccctaagcgcttcgatgatggagtcttcatggcttggtctaccaacgaccaaaatatcaagcttactttctaccccaaacctgaggaaatgattgccaaatttcgggagaagaagaagaagcttgatgccatggtaga

SEQ ID NO: 274024 - DNA, 512 bp, Cannabis indica
ggcatagttgcccctttggtgttggtcattgagaatctctctaaaaccttatctatgtaagttgtttgagagagagcaagggatctgttcttccggtttctgataatctgaataccgagaacataggcagcttcacccaaatctttcatttcgaattgagtgtctagccattccttgatgtcagtcattttcttgacattgttgccaatgatcaaaatgtcatcaacataaaggaccaggaatactaccacttggttttccttgagttggtaaacacaaggttcatcttcattctgaagaaagccgtaggtcttgatgatttcatcaaaccttttgttccaggagcgagaagcttgcttaagtccataaatggacctattgagtttgcaaactttcttttcctgccctggaagaacatagccttctggttgctccatatagatggtttcttcaagaattccattaaggaaggctgtcttgacatccatttgccagatttcataatcgaaagc

SEQ ID NO: 274025 - DNA, 618 bp, Cannabis indica
tttccagcatagggatgagatggccgaacaggtgaaatgggatcccttatgcgaatggcatgttcaacaggcctgggcgtggctgggagtttcttcttcctcttcaaaggagtcacctgctcagcctcagcctcaacctcggcttcatcttcaggattcatagactcctgagcatactgctttgcccgggcacctcccttcaacttagcctcacgcttaagttgaatgagctcatcctccttattagctcgttcgggccgggcagcatcagatttccccttcttccccgccacggacttaggagaaaagtcctcagggtaaagcccgtactgcaccagattctcgtcggaggtcaactggatgatatccctgtcttccgccggcaaccgggcaagtttttgagctctatccctaagagcaagagtgaggggaggacggtgatatgtcgggatctgctgaaaccgagtccgggtgatgctcggatccttcaccatgaagtactcatcaataaaacgccctattttgctgatggccttgtggttcgtcccgctcaaccacttgaagcctggctgagagaagtaaaaataccccgacctgccttgcttaggggtagacttc

SEQ ID NO: 274026 - DNA, 651 bp, Cannabis indica
tggttccctccgaagtttccctcaggatagctggagctcgtaaacgagttctatcaggtaaagccaatgattagaggcatcgggggcgcaacgccctcgacctattctcaaactttaaataggtaggacggggcggctgctttgttgagccgctccacggaatcgagagctccaagtgggccatttttggtaagcagaactggcgatgcgggatgaaccggaagccgggttacggtgcccaactgcgcgctaacctagaacccacaaagggtgttggtcgattaagacagcaggacggtggtcatggaagtcgaaatccgctaaggagtgtgtaacaactcacctgccgaatcaactagccccgaaaatggatggcgctgaagcgcgcgacctacacccggccgtcggggcaagtactaggccccgatgagtaggagggcgcggcggtcgctgcaaaacctagggcgtgagcccgggcggagcggccgtcggtgcagatcttggtggtagtagcgaaataattcaaatagagaactttgtaaggccgaacgaggggaaaaggttccatgtgaacggcacttgcacatgggttagtcgatcctaagagacgggggaaacccgggtacctgatagcgctgcgagcgcgagcgt

SEQ ID NO: 274027 - DNA, 635 bp, Cannabis indica
ttttttttgttttttgaataatagtaatgatattaattattagggcctatcatagcatctaaagatgtgtgataataaattagtaattatttattactaaaaaaaggggtgcacgccacattgatacagtaataaattagtaataggcttagctgtcaaatactgaagaataccaatagtacagtaggcttctttttgaaataatattaattattaaattactaattaaatattaataaaaaaaatttataattttgggttacgggttataacccgaccaggaaaaaaacaaataatcaaacctgaactggaaacccatttggcgtcttttcgggttgaacccgacccgaccaaacgggtttttgggtgatcagtttttctggcagcaggtcggggcgggtagtccgatttttcgggtttacgggtctaaatgtgcacccctaaacttgatgtgtgtgggcacttactcaatcactaatggctgaaattatttagtgaagaaaggctataggtttcgaattgaagaagaaagaagaaggaagaggtctgatcaaaaagctaggtttttagctttggaggcattagtttggatgaagagaccatagccttctttttatactatcttcaatagggtt

SEQ ID NO: 274028 - DNA, 592 bp, Cannabis indica
aaaactagatggacgatcgagaatgaatcataattagataagcagaacccagcgcaccagaccatttgtcaacttgggcatttggtgcttattttggagctttcaggatgtcattttgatacttccaaggttctagaatttgacgatgaggtctcctaccccatttttaccattttggagagaataattggatcaaatttggcatttgaatgatcgaaactagcgcactgctgtgttaaaattagatacgcaagtgcacgtagtcacaaacaagtaatacagtgataagtaatgagtatcgtctccacaaggactgtgaaaataaaatttctattgcaaaaattaattaccaagcaacaagcctaaaaactaaaattaaatgattaatgaatcaactaaaggagtaagaaaataagtaaattaactcaaaagtagatgcaagatgaaaataaaatttagttgtaagcttttgaaatgtgaaaggcttgaactattgaatccccctatgtttagcaaaaactgtgcgtttttgctgcagcaaaaagttagcaaatctttagcaaaaatcccaggttaacaagaactccattaa

SEQ ID NO: 274029 - DNA, 220 bp, Cannabis indica
attaggattataacaatggataattaatagcgtgtctatatggtggaacatatagagcgttctatatagctgagagtgcaattctaagttctatgcgtggattcaacgaagaattaataagtcagtgaatttaagaggtaaattcttgatctgcttattggaagctcggatatataggcccatggtccccacactagttgagacaatactacttgtaaga

SEQ ID NO: 274030 - DNA, 644 bp, Cannabis indica
tttcgtttctattagactctcccctacgatgactacttagaaataaacttacataatatgaaacaatggtggaagctcataaaatgtgaataaccttgactctcgcctaccgggacaacgttgaattcttattttgatcgaataaaaggttgctaaaatggtgtccattttagatgagctgactattctattcaactgatgttatctttgattttcgcctaccgagacactagtatttcattatgttgaaaaccttggaaaataattaatatgtttagtttttagtatttttacaaacatatttacttcaacttgttattttctgaacttgtgtatgaatttattgtaaccagtgatttatttttgtttattgatatttgtagtgtcaaaatgtacaacccacaccccaatcctcatctagagtatgcctttaggaatgaactccaaagtgtgaagatgactcttggtcaaagtatcacttcacatttgctcatgatgaacatgaaattcgaaaaagcagctatgcttgggtaattattttatcttggagagtaaagagtttcattttattctcaataagcttatcacctgagtttaaccaatatgtgattaacaattggaactcgtctgacatagacaagctg

SEQ ID NO: 274031 - DNA, 596 bp, Cannabis indica
tatattactcaaatatacattttttttattatatgttcttcaagttttatcttccgattaaattattgggaagtgaataatttaattgtgttatatgtgtgaatcaaaacccaaataaatgagccaaacatataggtgattcttgaaaccttatcatttttgttattataattttctaccaattttatttgctttaaatttattttcaaaattttctcaaaaaccaccaacgatttatttactttttgcgcttaaagttctactaatcactttttgataagatatctctctgtggacacgaccgcccatgctacactacaacaaccgctttgtgaagacaagtttgggcgtaatcaagtatactacgtagctttggccgatctttcaccctgatggtgattcttacatttcggacattcaagatatgacttgaaagaggattcgtgaccttgacggtcacctcaatttccccgatactttctattactccctaatacttcgaaagcctcaaccttccgtttgtaatcagggttgccactgtcggtccccttactgacgttaccactggcaggcggattcgatgtcatgacggcatc

SEQ ID NO: 274032 - DNA, 609 bp, Cannabis indica
aaggttgctgccctgagccgttgtatctcccgatccacagacaaatgcattcccttcttcaacgtcctaaaaaaatgccagaaatttgaatggtccgacgagtgcgaggaggcattcaaaacactaaaggagcacatggctaaacccccaatcctatttaaacccattctcggagaggacttgttcctatacttggctgtctccgagaatgcggttagcgcggccttagtacgggaagaagaaaaaattcagtatcccgtgtactatgtcagcaagcgcatgataggggcagagacacgatacccagtgatcgagaagatagttttttgcctcctaatggcctcgagaaagctaagaccttacttccaagctcacccaatcaaagtactaaccaaccacccgctccgacaagtcttacaaaaaccagaggcatctgggagacttctgacagtgggccatggagctaagccaatttgatctacactacattccctgcacttccaataaaagggcaggcgctagtagacttcatcacggagtgccatgaagcagaggctaccgctagcatacccacaccgcaacgtcccgacatggaaagtgttgcgcctg

SEQ ID NO: 274033 - DNA, 560 bp, Cannabis indica
tttcggcctcattgtgtgcagcaagagtttgtgatttttttcctttgtgattcaagctcattttgttcagatttggtgttcacaagttgttggtatgatttctatagtttttctttaagtttcttgaatttttgagaaagtgtgattattgcatgctttgagttttgtggctgtagtgttgctaggttttgattatgttttcagaagcttaattatgtctaattgaatggattagataggttgtaatgcatgcttgttacccttgtttaagtttgtgaatttttggttcaaaacctttggttttcaaagagaaaatgtgaaaatagttgctgtaaagtttggttgtgcttgagtacagtttctgcagtttttatatgcatgaatatgtagttttatttaggttttgatgcttgtaggtgagctttaaccaagtttgagtttgaaactcaaagcttggagctcacatggcatttttagtagctgtgtgttctggattgttttgttgcttttgaaatgtgctatggggtatttagaacaggtctggaaggttttgtgtgatt

SEQ ID NO: 274034 - DNA, 203 bp, Cannabis indica
tagtctaattgtcaatagatcttatgaataatttgtaacaagtaaattttgtacttctttcatctattaacatcgtaatatgaattctaaaacaatgaaataaacagagaagaaaagagagagaggggcggctaggctttttctgaaagaaagccaacactttctatttaagaatgccctctaggtttaggttagaattgtat

SEQ ID NO: 274035 - DNA, 638 bp, Cannabis indica
aaacaactctagatattgagccttcatgtcagactccaactcccaggtggcttcctccaccttactgtttctccagagcaccttgaccaatactatggtcttaatcccaaggactttgtcttttctgtccaagatttgaactggttgttcttcgtacgatagatctggttgaagttccaagctctcataactcagcaaatgagtgggatctgaaacgtatttctgtaacatagagataaggaatacgttgtgaaatgctcaaagtgctagagtcaaggctagacgatatgctatcaatctaaccttttcgagaatctcgaaaggccctgtaaacctagggcataacttgccccttttttcaaaacttttgatccctttcatcggagaaacccataggaatacatgatctcttacctaaaaaattctacatctctacgcttcgaatctgcataactattttgcctattctgaaaggtaatcattttggccttaattctttctatgactttattagttcgttgcactaattttggacctaggtatttattttctccagtttcatcccaatgaattggagatctgcatttcctgccaacagctcatagggagccatcgctatagtactctgataactgttg

SEQ ID NO: 274036 - DNA, 588 bp, Cannabis indica
cccaagaagaaagggagtaaacctcataattctggaaatggtaatgggacgattaaagctgaggcaaaccttgcctctacttccagacctaagacaaagaagaagtggaaaaatagcaagaagcctgttcaagctgtgaaaacagttaaaaagaaaaaggctgctactcctggtgatacattaaaaggaaagtgcttctattgcaatgaaaaaggacactggaaaccccaatgtcctaaacttcttgcaaagaaacaaggtatttcttttcctataaactgatgagttttagtgaattattatccatttggattattaattctggacctactaaccatgtttatttgtttttcttcttattacagcccaagctgcttgaactcggatgctatcttagcgagttgaatcggaaagttggacaaaggggtggagttcgtccaagataaagatgaagctcgtttttttatttatttttttaattaattgtttcagtttcaaaacagtttggatttcaattattagtttgggattttattccatttttttttcatattgttgcaaacaattcctttaattttggaagatttt

SEQ ID NO: 274037 - DNA, 802 bp, Cannabis indica
aagctttacaagagctaaaagcacatcttggaaagcccccccgtactcataaaacctctggacggagaagaacttggaatatacttagttgtcacggagaatgctgtgagtgccgtgctaatcagagaagagaacaacatacaacacccagtctattacattagtaaaagactcattgaggccgaaggctgatacccattgatagaaaaacttgcttattgtcttattctagcaacatgaaagttaaggccttattttcaagctcaccctattcgggtgtacactgaccaaccactacgccaaatattgcaaaagccagatgcctctagacggcttctcaagtgggtggtggagttgggccaatacaaaattactttccaaccccgaacaacaatcaaaggcctagccttagcagactttgtggtagaatgcacatgcaaggaagaaaatgtaccagaaagtaaccccgagccggtacaaacacctccaccaagtaacagtgaagataagtcgacttggaaattacatgtagacgggtcggctatagatcagctatctggtgcaggaatttcccttgtcacacctgggggcaacacttccacgctacagtcaagtttggatttatagcatctaataacgaagtcaagtatgaagctctaatcgctggcctaaaactagcccgagagatgaaagctgaacacattgaaatctgcagtgattcacagctggtggtaatgttgggttttatgccctaaataaaactctttacaatctgatcagtaatcaatataagaaatttgaa

SEQ ID NO: 274038 - DNA, 538 bp, Cannabis indica
tacaggtataggtcgccccccaagtgaccgaagagatgtatgactcttggtcacttgtcttttacaaatatattgcttatctgttcggtgttttgggtttgaccaaaccttttgtacgcattgtatgacaaattataaacatgttgataatttcgactcaattgaattttgacatactatctttattcatttattgatcgaaaagtgtatttgttaccgtagtaacttctttggtgttcaggaatacccttctcagaaccatatctcctacgaataatttctgagctttgacttgtttgttggaataccgagctactttttgttgatgggccatcaactttaagttttctgttgctcatttttcttcaatttcatcaagtgattctgcaaggagtatgtgattggtaccttgatcatacatcaaccttctatgggaaagtggctcgagttcgacgggcagcatagcttcataaccgtatgccattgcgaatggtgtatgtccagttgccgttttttcagttgtacagtatgaccatag

SEQ ID NO: 274039 - DNA, 514 bp, Cannabis indica
ccgtatgccattgcgaatggtgtatgtccagttgccgttttttcagttgtacagtatgaccatagaacttcaggaagctcttctggccactttcctttggcatcttcaagttttttctttagtgtatccttcaaggttttgttgactgcctcaacttgaccatttgcctgaggatgcgccactgcgaagaaacttttgatgataccatggttcgcacaaaaatcagtgaaggactggctcttgaactgcttgccattatctaaaactattccgtatggcagtccgaaaaggcatatgatgtttttcacaataaagtcttgaactttctttgatgtaatggttgcaagtggttctactttagtccatttagtaaagtaatcaaccgctaccactgcatactgcaccccacctttacctttaggtaattgtccgatcaggtcaattccccaaatggcaaagggccatggactttgcatctgtcttaactcgttgggcagagctcttggtatctttg

SEQ ID NO: 274040 - DNA, 521 bp, Cannabis indica
tctgggatggtgtttactcttggggggtggagcactggtttggagaagtgctaaacaaactgcaatttcagactctaccatggaggcagaatacatagctgcagcagaggcagccaaagaacttgtttggcttagaaagttcttcaccggactcagtgtcattcctggaatgaaaaaacctctggttttgctttgtgataacactggagtcatagccaacagtaaggagcctcgaagccactagaaaagcaagcatatagaaaggaaatttcacatcatcagagaatatgtggaaagaggggatgcattggtagagaaagtggacacagaggacaatcttactgatccattcaccaaagtcttggcaggaactgcattccaaaagcaccgtcaaaatttaggattaattaatatgtactgattagttttatattagtgcaagtgggagtttgttgggttttatgtcctaaataaaactccatttcaatgtaatctctattcttttaaatatcaataaagaa

SEQ ID NO: 274041 - DNA, 432 bp, Cannabis indica
ttcatttttcaaataaacaaggcttgggggtaaatgttgcccctgatttcgcccaatatacgtggaccaaccggacagggacacgtggaccaaaagatcctaacatttaaattaattactaagtctagatgaagaaaggcgtctttcgggacctgcctcccggagaaggcatccggagtcctctatgctcctggaggcctaagtaacatcaaagcatctccgcgaggtgtcaggcttcccctgagcagtcatctcgcatttaatgccgcatgggaggaaacgtgttgggactgccacacgcaataaagtctgacgacacaacccccaatctgcacctacgaagctatgatcacttaagtctattgacggctacactgcgaagagtcacgtcagtcaaaaggcaataaggacattccacataaaaaccctaca

SEQ ID NO: 274042 - DNA, 120 bp, Cannabis indica
tggaaaaaacataacacttatccaaggtgtaagtataccttatcactgattatcatgctagtctaaatctagtggactgaaaaatcatgagaattaaacttttaaacatataatcatgat

SEQ ID NO: 274043 - DNA, 679 bp, Cannabis indica
aatgaactcgacaaacaggggctatttcaaggtggtttaaatgggaaacttagtttttgtgaggagtgtgtttatgggaaaagctgcagtaaaatttgatactagtcaacacactactaaggagaaattagcctacattcactcgaattcgtgggggccttctagagtcaaaactcttggtggagctagctattttattagcatcatagatgatttctctaggaaagtttgggtattcctattgaaaataaagatgaggcatttaatgcctttgtcaattggaaaaggctgattgagaatcaaaccaagtgcaagatcagaaaactgagaactgataatggttgggagtattgctctaatcaatttgataaattttgcaaagaacatgggatagctagacatctcactgttagaaatatacgtcagcaaaatggtcttgctgaaagaatgaatagaactctcattaagagagttaagtgtatgttgaaaggtgctggtttggataggccatttccggggtaaagctgttaagacaacttgttacctaataaataggtgtccatcagttcccttgaaatttaagactccacaagaactatggacaggtcatgcacctaaccttttgaccaccgtttgacggggtttttttggcgttgctctacggcctacgtccgatacc

SEQ ID NO: 274044 - DNA, 623 bp, Cannabis indica
tcatgtagtagttttcataattttgcattccggtgcccggtattatggaactcggtgtttggctcagtaaaatcacaacttagtatgttagtagtttgggacggtttattagacgttgggaatgtcgggattggccgagaatttagaatttcccaaaaataccccttttagtgttatttatgtgattttaatgtggaggggaaaatggtctttttgccccaatgatattttgtcctttagtggacttagaaaataagtttattatgtgtttttaattatttattggctgaaataaaagatatgtttgcttgcatgttccccatttattcaaagttagaaaaaaattacaaatttctcaaaaaacactctctcttttcctctctctttttcggccccttgagcagcaagaaaagaggatttcctcttgaatttcaagctgagttttgcattgattttgacctcttgttgttggtatgtttcctctagcttctcttttaaattttcttgttgaattttgatgaaaatgatgtgttgcatgcttagttttaggttattgttgttgctggaatgttgtggatattttcagaggtttaaagcttgtttatttgagttaatttgagctg

SEQ ID NO: 274045 - DNA, 965 bp, Cannabis indica
tttttttttttggttttgtaattaatttttcttggttcggaaggtgagaggttaattgtgtggtttgatttgttataatatttatattatataccaaccactcttaactagagtactacgtacatctcaattattattaatttgacagtactatatatatcttcttctatatattatataatctctatcttaattactgatgttccatctatttcagttataataatttttcattaatcagtttacttgttcgagctaaattgaacaagtttatgcaatgattaaaaattgacacgaaaaacaccacattcaaataatttggagacatcttgcatttagagacatttttcttcacaatgcttaaacttcacaaaagtgatgatcttcaagaatttattcttatttttttcgataaatacaattaacttaattaaacgtttggaaaatgacaatgaacttacacttaaaatttatgaatgacaaaaacttttaaatgagttattataatcctttagaaatggtatatcttgaattaaattcaagaatcatgttttgaatataaaaagaaagaaaaggggattattatttattattatataaaagaaaatattatcgttttataagatatcaagtgactttttggttgaaaaatagggtttagaagaagtgaaaattacatgaaatatgggatttcataacaaagttagaaaaatatggcatttttaggtttgtcacttttctatggcattttttcacatttaagttttttatggtatttgatatgccatatttttataaacttattatccaatcccatattttatgtttttgtttttagcttaattagttttatttatttttttaatttattttacacttacattttaggatttctttttatttgaaaaatttacaccaaatactacattttttttcaaacgttacatttttaatttgacaagaac

SEQ ID NO: 274046 - DNA, 427 bp, Cannabis indica
taagttttggataaattgaaaaaaaaaaaatagatataagaagagaaggttttgtcgaaaggagagaacgaggattttattcctttcgttcgttctgtactgttataacttaaaacttaatatatatatatatttttaaacaaaacgaaatcactgtttcgtttttatatatataataataatataatattaataataataatataatattaataataatattaataagtcaatgctctaataccatttgtaacgcccccgcttcaagcctccattgggtccttacacccacggaataatgactcttatacacgagtatgtcactctggctgcttcatggactgacgactgaccctacaaaccaacacgagtgttttcaacatgctttgtcctcactcgcacgcttcgttgggttttatgccctaaa

SEQ ID NO: 274047 - DNA, 478 bp, Cannabis indica
cctagttcggttctagttccatttacgattctgagttcgagtttgggtttgagtttgggtcggagttcgagtccttatctgattttgggttcaggtccagattttagtctaggtccaaatcaggctcagggtgtgggtttgcgtcctgggtattgctctaggttaggtgcgagtcccaagtgccaataccgatctgagtctggattcagttctgggtctaagtccttggttctgatcctggtctgggttcgagtttgggtccgggttcgggtctagctttgggtctgattctaggtgtgggtttgagttcgggtccgagtttgtgtccgggtttgtgtctaggactggaccctaatctcggtctaggctcgagtccaggtcgaagttggggtcccgagtgcgggtctaagtttgggtctgggtcaggatctcggtccagatctgggtcttcgtccgagtccatgtttgtattcggatc

SEQ ID NO: 274048 - DNA, 584 bp, Cannabis indica
tggactttggacctcaggaatgctacagcagcagtgatcgggaagcctcttgcatccttagttgtgttgttgaagctctcagcccagttgctcgtcattacattgtaacgtacccctggaaagtacgaccggacccatttttcaaatccaatttcctcaagatattgtgcaaccgctggattcatggcccgaatgttctcaaattctctgtgaaactctgatcttgaatacgtgtaggcacacgtgtaaatgtgattcgtgaagacgtcagtcttgaacttgtggttgacgttcataataatgtggtggtagcatgcaccgtggtgtgcatcagggaacacgatatccaaagcacgaacaatgctttgatgcctatccgaaacaaaagctaagttctcaacatcaccaatcgtttctttcaattttctcataaaataggtccaggaattgtggttttcactgtcaactatagcaaaagctatcggaaagatatgactccctgcatccaaagccactgcacacaacatttgcccaccatacctagtcttcaagaaagacccatcaacgcatacaacaggtcgaca

SEQ ID NO: 274049 - DNA, 696 bp, Cannabis indica
ggtagcagtcttggttgttctgacactggtcagtcttgacatacttctacaggtgtggattgtttttccttatcagaaattcaatttaccgattcaagctgtagcattcgttagtgtcgtggccgtagcctccgtggaaccgacaaaactttgtcatgtcccttctgttggcgtctttcttcatgggcctgggtttcttgtacggggccagcgactaagttgccatgtatacactttctatatcttcagtcagaatagtgaatgcagtgtacttggcatgattctctaggggagtctgttcggacttttcggtgaactttcctttcttcccgttcccttgcttgtggttcttgttggaacgcttgccacatgagcttgaattatttgggtagttgggaagttgggcggatgatccagtggaaagagcctttgacttgcctagcttttgttcaccttccgctcgttgaatggcttcttcaaagttgatgaagccttcggctcggtcaaggaaatcacttattaaatctaccggtccgttcttccttatatccctccaaagttcaccgaggacttcgatgccccccagtatcgtggataactttccatcctcggttacccgtgaaactttggttgcctccgtcatgaatctgctgatgtatgcccggattggctcgcctggtcgttgcttaacttcga

SEQ ID NO: 274050 - DNA, 232 bp, Cannabis indica
gttttttttaattctatattattttttagtatgtacaacactaattgcatgaattttattcatatttggttgataattttagtattgtggcatatattttgtgatatatttcaacaattagtgcttattttcttggctatcgtaagattaagcttggaaaattatttggtaatgaggaacacttaaatattaatttatttaagtattgtattatcttccaaataacattaag

SEQ ID NO: 274051 - DNA, 445 bp, Cannabis indica
atatctaagtgaaaaaattcataagctagacatagtctaattttagaattataactgattaactaaaatcagttaactgagtcttacaagcattttgtctcaactagtatggggaccatgggcctatataaccggatttccaataagctgatctagaatttaccaagtaaatccactaacttattaattcctcattaaatccaccataaaacttcgaattgcactttcagttacatagaacgctctatatgttccatgatatagatacgctattcattatccatttttataatcccaataatcaatgatcatctatagatgatctacattgcatagggattaatataccgttacgtccttcaatgtattcaatccttaaaatacttggccacctataaatgatatttcaatgaactaattgttggaatttattttaccaggatct

SEQ ID NO: 274052 - DNA, 633 bp, Cannabis indica
cacttgtcttcacattcttcaatctttcattaatgtcttcttcctttcaaacaacttttaactaaaattggagtcttcttcaccttgtcactttccttcgcactaactaaattccttttgtgacttgactccaccttcacagctccactaaaaatggtcttcccgattaatttatacaaatttcgctctttcttacctttcacaactaccaagtcacctttcttgataattatttaaccatcttttgtgaattagacacaacctcgagtatccaaagctcccaaaaagattaagcccctccttaatgttggaacatgtctcacatcagttagtgttctcacaattgttggaaattattttaccaggatctagatttactaccaagtatgttatattaacatcctaatatgaattctaaaataatgaaaataaacacataagagtttaagaaaccttacagtgggtgcagcggagtaatatgactccttccattcagatctctagcccttgattcctttctgtagtagagcataatcaagatctgaatctggatctctttctctccttcttgttggtgctgattttccatagtcttacatactatgattgaggtaccacttgatgtgtgtgggc

SEQ ID NO: 274053 - DNA, 556 bp, Cannabis indica
catatggtaagtggtcgtactttcattaagaacgtttttaaccatttggtgagcttggttgatgagctcaggatggcttaagcacaaagacgatagagcattgctttcatatatgttatgcatatcttactgagtctgttgactcattagtttgctaccttgtgtaggtaaagggaaagctaagctggaggaacaatgagttggagcttggcagtgattgtacatatggcggcagtgcagcctggagggtttcgatctttcaacatttttgagctgtattttgtagtttcctgttgtaaaatatatatatacatatactaatgatagtttgcaactttgtatatagtaaaatgtaaattttcaactgtgttttgaaaaactcgggatcccgactataaagttttaatatctataatataatttagattacgtatttgaatttagcaagtattaaatacgggcgttacagaaaatgcacatatcgaccctttcggcctgtgtggctaagttgccataagttatttttgttgtatctgctgtgtattttgacttacta

SEQ ID NO: 274054 - DNA, 754 bp, Cannabis indica
tcactataaagtcttgaaccttctttgatgtgatagttgcaagtggttcggcttcagtccacttagtgaagtagtcgactgctaccactgcgtactgcactccgcctttacctttaggtaactgcctgattaggtcaattccccaaatggcaaaggcccacggactttgcatttgtgtaagctcgttgggcggagctctcggtatctttgaaaatctctggcatttgtcgcacttcttgacataggctcttgagtcttcaatcatcgttggcaagaagtagccttgccttagaattttctttgataagctcggtccggcttcgtccacagaatccgtcgtgaacttcaaaaagaagtcgtgcaacttcatcttgtgtaacacatatgagtaatggcatcgagaatcctcttctgtacatgaccccttctactatgatgtactgtgctgcctttcttctcattttccgagcttcatttaggttatctaggagttccccagagttgaggtaggtcgctattggcgtcatccagtttggggatgtgtcgatcattttgatttcttccgtgccagtgatgctaggctcttcaaggaactagatagggactaagtttcccttgtcacttacactgctgcttgccaatcgagccagcgcatctgcagttgtattttcttctcttggaatttgtctgagaccatagcttttgaattgtgtgagcaggtcatgtattttgctcagatatgctatcatttttt

SEQ ID NO: 274055 - DNA, 640 bp, Cannabis indica
accagatcaattttgatggcaaagtgtcctaccttaccctttttatgtttaaacgagtgaataatctcttggactaagacattattgtcattgatacttcgaacaggaacaaaagctgcctgtgtagggcaaattaatctaggaagcaccgaacgaattctatttgcaatgatcttagaaatgaccttgtaaaccacattacaaagagaaataggcctaaactggagactttcttcaggttagcaactttcgaaatgaggatcacattagtagcattaactactctgtgcatggagcaagagatgaaaaaatcttccactgcctcacagaaatcagtaccaaccgaattccaatagtgcttatagaacagcactgacataccatcaggtcccggggcctttagactacccatggaaaagagagtatgtcttatctcttcagagtttggaatggtaaccaaatccctttgctcctggagggagaagtggtccgaaattaggtggtctaagcattccagcggtccataaatcgtgcttttgaagatacttcccaagaaatccgagaattccttcccaatgtcccttctgttactcaaccacaccccatctttgttcacgatggcctcaatctcattccttct

SEQ ID NO: 274056 - DNA, 515 bp, Cannabis indica
aaacttctttttaactccatgtattataatattgccttctttgtctgccttttcaagtttcacataacctgatgcaactaagaccggatctttttctttgggatcaatcacgtacatatcacacctcaatctcttcatttgcaaacaaaacaagagacaaacaaaatttattttaaaaagaacttaaataattatgatataaaaattaaacatgcataatgaaaattattttaaaaagcaagtaaataatacattatcagaagtaaccggagatggtgctggtggagcagctgcacaaggtgtggctggtggggcaacaagtggaggtgttggaatagtggccttgggagctggtggagcagaggccttgggagctggtggagcagaggccttgggagctggtggagcagaggccctggcatttggtggagtagaggccctgccagttggtggagcagaggccctggcagtaggtgttgctcctagaactgaggtaacagcagcaaaagctggtt

SEQ ID NO: 274057 - DNA, 588 bp, Cannabis indica
gatcactccacaaaaacactataaataccccccaaactcattaaagaggggtcaagaattatgggtttcataagaactagaagagtaaaaactcaccaagaatattctctgtattaaatactatcataaatacacagactcgtggactaaggctcattaacgccccaaccacgtaaaaatccctctcttaatttcttatagctctctaaattattattattatattggttgccgaaaacctcggtcaacattttggtgctttcattgagagctgaagaaagtatctgtaagtagacactgcattacaacaagacaacaatggtggagactcgaagcacacgtcaatctcgccctcttcaagatgctcaagatccaaatgatgaggacgtggcctcaagagcaactgtgggttctgaagaagaagaaggaccccctgatgacgactacgaaggaaatttcgatgagtacgcctatgacgaaggtagctactcagaattgtactcttgaggcaaaaggcagtcgatcatgaagctgagatcgcagcccaaaaagagcaaaaccaaaagatgcaagaggtgatgctggcca

SEQ ID NO: 274058 - DNA, 714 bp, Cannabis indica
ctcacatttgtatcagtgctctacaatacaactgttaaaagacaatttcccaaatcaacctccctctatttcttgcccattgtcatttgcctaactattggatccattgcttcatcaatagtggcttacatgttctctacaagagccacaatgccattggagaccaagtatcctccatggaaatttgctttttatgcgtttctctaccccttgctctacatatgttattttgttctcaatggggttataattatatactatagattacgtaatagtgtaagtagtatcattgtcaatttaatatcttgaatataaattgtcatgtggaacaaatttcaattcatcatcacttttgcttttaacaaattattacgtgaatttcttaagaatcttgtggttcaaaaaaagcctgatttagtcgtaagaaagtggttgaaagagttcgtgtttctttagggttcgtgtttctaattcgcaatttaaattctgtttcttgggatcaacttcggtctctttgagaatcatggggttccaactcaaaaccaattggcaatgagtggagtagcccatgtttcttatatatggctcaatactttcacatttaatccatatgggacaatattctccaatatcccctctaaagatggtggctatttttgctcaccaatcttgaatcaccttatcataagtagtgtcatttgctcgcttattttt

SEQ ID NO: 274059 - DNA, 633 bp, Cannabis indica
ttgcttctattcacttaaacatactcatactattgtccacaaagcaaatcatgagtggattgtagtatcatttgcatactctgtgccttttatgttgcttgatcattttataatcccaacacttcacaaaaactcgtatggtccttgtcgttccatgaaattcttctagatgtatcactcatgatctccaattttttttcatcctttacgaagctatatctatgatctccaagttgtcaagtttgaattgttctgtatagttgtcctctgtgttgcctctcattcatgttgtacccaaattgttagccgtgtctaaatcttctttttcttcctcctttgaaattgtctttatcgaaaccatgcgcattttactttattgtctcctcacaaagtagctgaccttgagtttgaagcttacaattttccttcggtaatctaatatttgttgatgctctacttatctcttggtgttcaagataccttcataagtcattactttaaaaaaattatatcaggtttctttctaacttcttattctagattctgttcagtacgctacagtcagtagtcctgtgatccgtaaggggaaataccgggtaagctgtgcaatcccacaccgcctggggaaggtca

SEQ ID NO: 274060 - DNA, 881 bp, Cannabis indica
atcgatataggaaactcaacaaagcaacaagaaaagatcacttccctttgcccttcattgatcaaatgctagacagattagcggggcaagaatattactgttttcttgatggatattctggataccaccagatagctatagcacctgaagatcaggagaagactactttcacatgtccctatggtacctttgctttcagaagaatgcccttcggcttgtgcaacgcccctgccacttttcaaaggtgtatgatggctatcttttcagatttgattgaatcttgtattgaaatttttatggatgatttctcagtgtttggttcttcctttgatcattgtttggaaaacctggaaaaagtactaacaaggtgcgagaagtctaacttggtgttaaactgggagaagtgtcactttatggtaacagaaggaattgttcttgggcacaaaatttcaaaagcaggaattgaggtggataaggcaaaggtctcaacaatagaaaatttgccacctccagtttctgtaaaaggagtgaggagtttcctgggacatgctggcttctaccgcagatttatcaaggacttctctaaaatctcaaaacctttatcgagcttacttgtaaatggagttccatttgagttcggagaagattgtttaaaagctttcaagattttaaaggagaaattgattacagcaccgatagtaacttcaccaaattgggaactgccgtttgagttgatgtgtgatgctagtgactatgccattggagcggttctgggtcaaagagttgacagagtattccacacaatctactatgctagtagaactctgaatgacgctcaattaaactacgccactacagagaaagaaatgctggcaatagtg

SEQ ID NO: 274061 - DNA, 672 bp, Cannabis indica
tttttttttttttgaaaaaatagccacataaacatgatatgtgagccacttttatgttagaattttttttaaaaattattatctattaataaatttaaaaaattagaaaaaaaatatgagaaagtaaataactatttatgaatttattaaaaaattaaaaagaaataagataattaaaaagagaataaatagggttattatgagtgattatagagtgttatatcatcgtcttatatctctatcatatatatagataagaattaaaatttatatatattaatggatattaacaatgaacgcgtattattagaaaaatttaagtttctatatttaattttacaatctaattaaaaaaatctctcatttttacattatatgggcagagactgttccatcgtttgagaaataataataaaaaaagctgagtttgagttagatattttttatataaacatatttttggtatattgtaaatagagatttttttaattaagtagctaaattaaattcaaattttccttttattattgaccattgaatcaaaatctaattgtttaatatttttaaaattgatatttataacttattttagtaactattaattggtattacctattaaaaaatatttcgaatatttgtgagggtaagtaataaaaattaagataacataag

SEQ ID NO: 274062 - DNA, 701 bp, Cannabis indica
ggcagcataacggttgtaattgaatgcccccaaaaattttaaacatgcctgtataacgacaaataacacatatataacagtagtttgttcatccatcccaccgcagcacatatattcgcagaacctacttcactatggttgaatattgaagatattcaaactccactaatcattaataattaatttataagagaagttacctcggttgttagaattaagtgtttaggccaaggaaggaacatctgtgatacgtccctaacatatctgcacccttcaattgggattgggatttcagcgtcctcttgcagcatttccgaaaccagaatccgggcatgtgaatcatcgtagtccgtgcagtgaacagtgattttaccaacatgctcgtacaaatacgctcgggccacaatgttgtcgatgttgtcagagcagagatgtacttgctgattaagggccgcatggtcatcgaaattgtacaggagaccttggtcgttgagggaaataaactcctcagcataagtttgtggttgtccctcatcctcacgagcgtatggttgtggaacatacgcctcaccagccacctctccttcttcctcttgttcggcagcgtttctcttctgcttaagggattggacttcggcttttaatttttcaatctccttcgcttgccgagccacaacatcagacacttcccttttcttcct

SEQ ID NO: 274063 - DNA, 911 bp, Cannabis indica
aatgttttaggaactgattttccccttattttttaattgtaatcggtttgaattattgtgtattacttgtttgtattcattatgttatataaccggttctattttagttataatcggtttttgagttatttcgtgttattgatttttatttattataacacagttatagaatgggttcgttattttatgttatttatttttatttattatgttacagaaccggttatatttcaattataaccggtttgagttattagtttttcttcataaaaccggttatatttttagttataactgagatatttgcttgtggtaacttttccagtgacttttccggcaacagtgacattttcggtgacttttcggcgacgatgattttttcgacgactttttttggtgactttttcggcaatactaactttttcggtgtcggtgacttttgtggcaaaacttattgttgtttaatatgagatttctacttttttcttacaaaaatatggcataaaaaaactcatataactgtaaaaaataaaaaataaaaaacccataaacctatagtgttatttatttatgccataaaaaaagtaaactataccttcaattctcatatttatgaaaaattccccttttggtgttgtggttagagtagaaataatttttgacatcaaatttagtgatagtcatggctggctatatggctattcaagctgggctattgtacaggggcccaaaaaataaaaggtctaatatattttttctttaatatgtcttttgaggtttttttttttaaccttatttttccaagagtataacaacttatctcaaaatgttttatcgtctattttcaattttttaaagtcacattttgaaaaaccgtgttttttgcaaatgtcagttatatataagaaaat

SEQ ID NO: 274064 - DNA, 594 bp, Cannabis indica
cattgtttggttaggtggtgccgtgttactggttttgttcacacacaatgggtaccttgtgaaatcaacctccttcgttaatagctttatgtagaacaacagacttttgtcatccttgatttgtagtggttggcctccttccttcagttgatatttcagttgtagttgtgttgattcatggttgcattggagttcttccatcattattctcattagttcctcaaaagtgcacttggtcgaaattaattctccacttgattcataatcaacatagtttttgttgtcatcccaatgcccattgctctgcaccaatatttgtaatggttccgtttcctgaaataatgtaaattatttacttggttcagtttttgtagttgcaaacaactattttaatctgtcaaaacaaccaataaacaactctttccagcaataacttatgcatctaacactttcatctggccgactatttatataggttaaatcaactatcaaacaactattttaaaactgatcagtaattaataacaatagattcatattttccagtttgtagatcccaaacaactattattccactgtaaaacaacttgtaaa

SEQ ID NO: 274065 - DNA, 610 bp, Cannabis indica
ttataaccggttttatgaggtattatgtgttatgaagtattttattatgaaactagttttgtctttaatttatatttcagtgttttaggaactgatttcttctttgtttttaattgtaatcggtttgagttattgcgtgttacttgtttgtattcattatgttatataaccggttctattttagttataaccagtttgagttctttcgtgatatttatttttattcattataacactattatagaaccggttctattttaattataactggtttgagttattttatgttatttatatttatttattatgttacagaaccagttatatttcaattataaccggtttgagttattagtttttattcatataaccggttatatttttagttatatatatatatgagatatttactttggtgacttttctagcaacgttgacttttctgttgacttttcggccacgttgacttttccagcgatttttctgtcgacttttccagcgacttttttagtgccggtgacttttccggcgactttttcggcaaacttattgttgttttacaaatatgggacttctactttttttacaaaaatatggtatgaaaaaaaaa

SEQ ID NO: 274066 - DNA, 606 bp, Cannabis indica
attggtttaatatgatgtttgcaagtattctggaagttatagaaaagtttgggcttgatttgaattaaagggatcaaatttttgtccccagctcagaaccggtcgaccggttctaagaagccccttgaaaccggtcgaccggttggtacccaggaactggggttccggttgggaaccggcctgccggttgggaatttttcccgagcccttgttttcccgttttcaagtaatttagggtgttggcatcccttttatcgatagggttaagcttagtctatattttaaatccccgtaatgtatttagcgtgtctctcatcagattttgaacgttatggtttagggccctgtaaagcgtctagctgcgtttccacccaggctgaccggcacacttgagcacggaatgaggtaagatagcgtaagaatatatataagaatatatgtttgtttattgttgcactactaagactagtttatatatgatttctgcagtgttagtatagtgttgttataattgtggttacagtgttaccagcacgagtaccatgggtacgtcgtgatcgtggtacaacacttagtaattcccgggagtacagttaagactctacc

SEQ ID NO: 274067 - DNA, 729 bp, Cannabis indica
tcttacttcccatactacctttaagcacaagtcgatactttatttaagcagttcattttatatccaagcgcaaccaaattatcaatacctatcttgttcttttcttcttatttccccacttctagttggatgatcttcaattgtttgtatagacgtttgttaatggagtattctgactttggaaagtccatctaaaagtccccatgactagccttccaggtcgagaaaatctcctaatatttgtcaaaattcttagatcttaatggctttatctttctaagagatttgttgtcattctcttctcgagcactataagacctaaaatgccacctctttaaccaaaaattggcactcattgaaagtttacctcttaattctccttgcggtgacactccaacatacttatgctattttccatgaatcataagtagattgtagtatcatttgattattccttgaatccatgtatgttgcctgagaatttaataatcccaacacttctctgaaaccagtatcgtcctttccatgccataaaattcttcaagacatgtcactttagtcttagttgtgtctcacttgtctctcatccctaagcgaggctttccaaacctctcctccttgagtgatgctccacacagttgttgttgtatcgatgagtattggaatctagggatgtcaccttgaatgtaaatttctccttttcctcaagttttgaatttgcgatctact

SEQ ID NO: 274068 - DNA, 882 bp, Cannabis indica
gtttctgaagcctttgcgcgtagtccgcccaagaggccattcacttagaagcgaatgttcaatagtactttaatgtggtctacccgacctgagtactttgaaatggtctatttgacctgattactttgaagtggtctacccgacctgagtactctattggtagtatttccttaaatgttctccattccaatatcgtggtacgagaatgagttgcattttttcgtcatacttacccagtttgtatgctccggagtcgagaatttcgaccacctggtatggtcctagtacgcctaacgtgctgtctttggtgtttaggaatacccttcttaggaccatatctcccacaatgaatttccgagctttcacttgtttgttgagataccgagctactttttgttgatgagctaccaactttaagtttatagttgctcgtttttcatcaatttcattaagtgattttgcaaggagtatgtgattggtaccttgatcatacatcaaccttctatgggatggtggctcgagttcgacgggcagcatagcttcataaccgtacgccattgagaatggtgtctgaccggttgctgttttttccgttgtacggtatgaccatagaacttcggggagttcttccggccaatttcctttggcatcttcaagtttcttctttagtgtatccttcaaggttttgttgactgcctcaacttgaccatttgcttggagatgtgccactgcggagaagcttttgatgatgccatggttcgcacagaaatcagtgaaagattgactgtcaaactgtttgccgtttcccgaaactattttgtacggtagtccgaaccggcatataacgttcttcactataaagtcttgaaccttctttgatgt

SEQ ID NO: 274069 - DNA, 1100 bp, Cannabis indica
aaaaattcaaatttcccttttaattttattaattaaaaataaaaaagataaatatgtcctttaaaaatctataaacagaaaataattacatgttctgataataacaattttgtcaaattacaacattctaattaccgtttctagttatgtaaacaaaataatatgattctaatttttttccggacagtttagtaaacagcttaataagatattatttctaattattttctgtttttaaccaatacatttctcccattgattattctgattccaattacagtttagtaaatgtgccattaaagtattgcaatatctttccaacggaatggtcttttcactattttggtgaaatgactattctattttaaaaatagaagaaaaagaaatttaaaaaaaagaaaaagtaaagtaggacaactattccaatacaacatgagaaaaaatttaataattttttattcaattttttctatgttttcatcccaattaagcgcaatcttacattcatctcattccgataatatataactacatgatcaaaaaaaacagtagagtaagcaaaacccaaaagagagacaggtttggagaaatgaatgggcggagttgggcattcgtgggtatgaatcaggtggaggcatcatgcactcatctccattgaaatagatctttcgagggaacgcccaaccttctctaaatgtgaatgtctctaaatctttctccattattatctctgtctgaacattcccatttggcccagcttccattaagacatcattgaagaatttcataccataaaacagaccactatcatctgaacaatcaaattaaaaccaaaaacatgttacaattccaaaatagtacattttgctatatatatttatatatttcactattgaagatttattgtaccatttcaatgatagtaattaaaatattatgaaaacagaaaaagatatatgactcactcttggattggaagggcacaattggcttgtagttgaaactgaaaacttgggtgacattgttgagattagggtgctgagcaacaagggtccactgtgtatagttatacctataatcgaaatttgtgatggcaatct

SEQ ID NO: 274070 - DNA, 551 bp, Cannabis indica
acttactcaacttcccagatctggttgttgcttgagatatatatagatatagggtttctatttttgcttctgaatgtattagttaggtagttacagaaattagttaggtgtggattaaccaaatccattctaactaatttctgttagggttttagagaccgaggtcaacttagggattttgcatgtatttccttttctgtcctttgtattaagttgtatttagtctcaatatcagtgtaagtggaggtttaattgaacagaaagtatttttgtaatttacaatagttgatgagaaggatttccaatccttccatatctcttctttctctccttccatccctcatcaaacaaattgattttaggtctccttccatcttttatgtccattcctcaactttttcctcctaccaaacaaacattgtgtaaatttccatttataaatatacaaagttttcctaaaagtgtaataaatattgtcatgaaagcaaatcaatatagggatacgattttgtcccgtgatgtactttcacggaatgtattctgtggtacat

SEQ ID NO: 274071 - DNA, 866 bp, Cannabis indica
tgcacgcagttggtcctggatcgcagtatattgatcggtggtgagctggatgattccctcagataccaccgccggagtgacaggtggaaagtgcatggttgctggtggtgtggacgtttccccgacttgagggccagctgtttcagggaacagattgagaggtctgatgttgctcctccctactccgccattaacgacgtccacaggcggtgttctagctccagataacggtacgttcatcattccgatgttgatggacccgttgttagcaccaccgtttgcttggtttccagccatgatggtattcttacttgaaatgaataatattttaattctcgtttcccacagacggcgccaaatgttgtcgagtgaatttcgcaacaccaattttatatgatattattaataacagaaagaaatctatatgaagaacaagtgcgagtattcaacctagagtggcgagtactcaaactgggaatgagaaatgattaacagaaaactggaaataaaaaggaggcaaagggttatagtggttcagtcagatcacggtctgcttagtccactgtagcaagagtttcgtaggtgccatttcacggtggatctcccctttatatacaaagcaggtgtccgatcagttatacaaggattacattcattgttaatccgtttttacacattgaattacaataattaaactaaacaacgttaacattaataaatgaacgacagttactaagttcattaatgtatgcgtcttctgaatctgtgagttgactgttcatattccgatgttaaactccaaggtttatcattatgtttaggatgtctgcgtccttagatagtcgccttttgtggacatcgcatga

SEQ ID NO: 274072 - DNA, 571 bp, Cannabis indica
gatgttaatgaaacatacatggtagtaaatctagatcctagtaaaatatttccaacacctactgcatccagtggcttaggtcagaacaagaggttccaagggaaccagggtcgaggcaatcggcagggtagttctgagacccgatacacttacttagagtgccccagttgtaaaaggcaccatttgggggagtgtagaggggcaggggtgtttctagtgcggtatgccagggcattataaaagggattgtcaccaacggaagactgaagcaccaaatactgcaacgaacccgctccagcaagggtgttcgcaataactcaggctaatgcaaaagccagcccctcagtagtaacaggtcagctcttggtcaacactcttatttctctatgctgtttgactctgggggccactcattcctatgtggcaccccataaatttttagtaaaaatagaaaagaccgcatgatagttatgaaatcagggttcggaaccctatacctggcggagagttagttatctccaaaaaggtggattggtctaaggtcgatcaagattgaggatagggagttgag

SEQ ID NO: 274073 - DNA, 654 bp, Cannabis indica
ttctaactctggaaatggggaaacacccaaccgaggcactgaaatggacaaaaattgagaaaacgaagtgttcgggattcctgccaaaaccggctagccggtttttgtggcactgcaaaccggctagccggtttgcaccagtaatcccaaatcatttcatctcttgctcaattttccaccaaatgttaccaaactttccagagtacctattcaatgcataaacaataaaacccagccagtatttcacagaaaaacaaaccaaatcaatttatgccattaaagctcaaagctttgaactttaaacctaaaattgcataaaaccaacaacacccactaaaaccagcagctaggacttagaatcaactcaactaaaccctaaaattcgaattctaaatataagaaaacctaacagccactaaacctagaaatttcacattcaaccatccataaaattcaagaactagagagggataagactagggcttaccttagcttcaatacccttgaatctctactgaattcccagcaaaagaagcaaagaactcccctgatttctccttggtttggtgcagctcgaagggaaagagagaaagagaaggaattctccaatttttggtttttctttctttttttttttaattaagtaaatgattt

SEQ ID NO: 274074 - DNA, 328 bp, Cannabis indica
taggttgttaatccaacatacttgttagtaaatctagatcctgctaaatataatttccaacaaaatattacattgaaatagagttttatttagtgcacaaagtccaacaaactcccacttgcactaatataaaacaatcagtacatttcaattaatcctacattcaatcggtgcttttcaaatgcagttcctgccaaaacttcggtgaatggatcagctaggttgtcctcagtgtccaatttctccatcagtacatcccctcttgccacatattctctaatgatatgatatttcttttctatgtgtttgcttctcttgtggcttcgag

SEQ ID NO: 274075 - DNA, 501 bp, Cannabis indica
taatgcgcctattagagataaccaattccccgctaggcattacggttccaaaccctctctctaaaacatcacaaggcctacccaaaagatcgattactcttgtagctacatatgagcgtgtagctccgaatcaaataatactgtaaacaataagttgttgacgggaagctaccctgtcacaacagaaggactggctgcagcatcaggttgggtgatagcgaacactcgagcaggaaccggtttcaccttagctttaggctcctctttcttcgtctggggacaatatttcttgacatgccccaccatgccacacaaaaagcatgtcttttggttacattctcccggatgatgtttcttgcatcgtggacactcagggtagagtaaccctggcgtccacctctgccttggttcccacagaaccgcttactttgccctgagcccccacaagctggaataacttttcttttctgctcggtggtggaatcaccaccgtccctacca

SEQ ID NO: 274076 - DNA, 640 bp, Cannabis indica
tgtgtatgaatttatattgaattatgttatttgttattaatgttgtagtattaattttgaatcttcattgttggtgtaacttagcttgttatttttacagggacaaattccaaaggattttcatccattagacaaacataatagtgttagatctcgatagataagtatttataaatgcaacatctagttgtacatccaaagatgaaaacttagactagtgtttacaatatgaaacaataaagaaataataaaataagaaaaactttgactctcgtccaaataagaaatcgttagattcttattttattcaaaattatcctttattaatttcctcgtagctttttcatttagaattttcttagatagtatatcattggatgaatggtttataaatcatctgcttaataatgtcattctattttcttctatgaaattgaatggcacagatgactatattcccgatattcaatccttaaatgatataaatcctcgatcttagaaatctcctacttgtatatgtttattttaggcaacctagatttagagttagattagtagtggtggtccaggtaagaatcattactcaagaaatatttgctataaattgaagtctttgactttaaattttagattccaaata

SEQ ID NO: 274077 - DNA, 702 bp, Cannabis indica
ggtcgatatcacggggtacttgcactcccttagggttaccagggacattcgccacaagaactgggcaactgccgggttcaggtatctgatgaactcaattttcagattccgaaataaggctacgaagaatgtgtctggctgcaccttattcctccaggtacattgattttgttatctttcatttatgtaaatgtgtttattaagtttataatataatattgtgatttattagtcgaatgtattactaatacattgtttgtttgtcacagttggtgtacttgactcacgtggagtggaactttggatatgtcgaccgaacagtgctccccgttgatttttggggtagtaaacaatgtaagtccgcttacaaatttgtgaaagacaatgggggtcccaacagcgacaaggtacatcgaattttggttataatgtggtaatgtgatttcagttgatattaattattttgggtttgaaaaattaaatttgtttaatttgttatgtttaacagataacgctcacttcgaatcccgtaatactgcccaactactactccgactcggaaggaagaaagagcagtgaccactttgtcagctctatcaacgagttgaaggagtacttctccaatgagttaaagtctcagttgagatcattttctttgaaatttatggacaaaggagaaggtgtaggtggtattgaccgaga

SEQ ID NO: 274078 - DNA, 721 bp, Cannabis indica
gatttaatatttttagaactttaaacatacttggttggtaacttggtataccctgttatctgagagagacattgttctttgagtaactctccattggctgatagggacatatttgtaatttcctcttcgataagtggaaaaacaacaaaatttcgatcaagctaataagtgaaaattttgaatcaagatgtttgcagtttgcacggaggtaatctatttataaaagcaaacatttaactaaataattttacagatttcatttttttttttttaagtatttaggtggcgtttggttggaggtaatgaaatggaataaaaaagaaacgaaacaatttttcatttcattcatttgtttgattggattgcatattaaaatgttagaataaccttttcactattttagtagaatggcaattccattttgaaatggaagaaaaaattattccaatacatgatgagaaaaaatttaataattttttatacattttaaattttattctcattctcatttccattcctattcttatattttcattcctcccaattgttagaatttgggataaggtgaatggggttccatctcaaaaccaattaacaatgggaagagtagctcattcctcttatatattctattatctttccacacattggcaatgtgcgattctctaacacccccctcaagatggtagctattttacttgctcaccatcttgaacaactc

SEQ ID NO: 274079 - DNA, 843 bp, Cannabis indica
ttttgtgcccaacactttgactttcccaaaacttagaagtaaaaactgaacctctatcagatacaatggtctttgggactccgtgtagccttacaatttcttttacatacagttcagcatattgctctgcattgtaattagtgcgcacaggcagaaaatgtgctgatttagtgagtctgtcgataatcacccagatggaatcctgttgtttgctgttcttcggtaaccctgtcacaaaatccatagcaatatcttcccatttccactcaggaatatcaagagattgcaacagccctgcaggtctctggtgttcggccttaacttgctggcaggtaagacattttgctacaaattctgctatatcatttttcatacccggccaccaatacctacctttcagatcattgtacattttggttgatcctgggtgtaaagaatagggtgtagtgtgcgcctcttgtaagatttttgattgcaactccgctttcttaggtacacacacccttgccttgtatagtagaataccctcttcattaactgagaagtccccggctttcccattttgtagttcgacccgcttcttgattaaaaactcatcttgggcttgttcttctttgatattctctaataaatttgattcaattgtgaggttagctagctttcctgttactaactctattccagatctctcgatttcctgttgcaacggcacttttaatgcccttaacattgataagcttgcatagttgcgtctgctaagtgcatccgccactacattagcctttccaggatggtacagtatctcacaatcgtaatcttttaccagttccaaccaccgcctct

SEQ ID NO: 274080 - DNA, 549 bp, Cannabis indica
aagcgaagtcaacatttttggtgcttttcatttgagagtagaatcgtagatcgctcttttaaagattcgacacgatggtgcaaactcgtagaggcctgtttgacccaacaaactcacagacgctggatccgacattgcaggacccagggagttcaagggttccacccgctgtcaagcctggatagacgggaagcatggtgaatggttggacaactcctgttactgaaactgcgcctggtgtgcaagagactgggaataacagttccgcacacagccagggcgttcataacacgacaattccaccaggcatcaacgcccagacaaccatcagagacgcaaccaaattgcaaaatcttcgtgctgtgctcagactcatgcagggtcatagcaatactctgcatcatgatcaggaggaactgcgtgccgcagtaaacctcgcgtttgacgaacagaggtgtattttcgccgaatggagggacaaagagatggaggcgttaagggctcaccatgtagagatcgaagatcacagtcggcaagctatgtgctgat

SEQ ID NO: 274081 - DNA, 596 bp, Cannabis indica
gaggcatttcaaaaagctaaaagagcacatggccaagcctcctatcttatcaaaacccgttctcggagaagacctatttctttatttggctgtctccgaacacgcggtcagcgctgccctagtccgggaagaagagaaaactcagcatcctgtgtactatgtcagtaagcgcatgataggagccgaaacaagatacccagtcattgaaaagctggttttttgcctcctgatggcgtcaaggaaattgaggccatacttccaagcacatccgatcaagatactgaccaaccacccgctccggcaagtcctccaaaaacctgaagcatccggaaggctcctcaagtgggcaatggagctaagtcaattcgacttgcactacataccccgaatttctataaaaggccaagccttggcggacttcattactgaatgcaacgaagccgaggctaccgcgaatatgccggtaccgccaatccccacatggagagtatttgtagacggagcctccaatgaaaatggttccggagccggagtggcaatgatatcaccaaccggactgcgactccaggcggccctacggttcgacttcgcagctt

SEQ ID NO: 274082 - DNA, 851 bp, Cannabis indica
ttcttcttggctggaggcactggtttatcacgacttcgagatgatcgaagttccttctcgatagaggcttactgggcacgagttcgagtagaaggaccggttggagtggtagtaggaactgatgcagcaggaggaagaactgcagtaggtggaggagattcctttgaagatgaagacgatgaagaccaggttctgtaaggacgcaaagattttcaagccacttgcttaggaatgcattttggcttctcgggctgagattcacgctggggaagcgatgaatatcctatttttgcagcagcaggaggcacggatgaagcagcaggatgtggattcgagggggttgcatcggtttccaccatctttttgggatgccctaggttcttagttctcaccttttttgatctgaaagagacaatgaacagtagcaacaagagagacaaagaaatagattcgggtaggtggtgagtttaaatgacaaaaattggtttaaataagcatggaagcaagaagagaaaaaaggaaaccaattttgaaattttgaaaaataaccgccagcccatgaacaaaaaggaaaccgcccactctcttgcaactcccttcccatttttttaaaaaaaaataaaaggaaactagaaataccaacattatttccaaaaatatcctatttaagacaatctttcaagattaaaaacacattaccatataaaagatcaacctttaaatggaaacatatcaaaataaatcaaggaagaataaatattgatacttaccaattaagcaaaaatttccttagcccatgaatcaagtcaccaacgcctcccttttttttattattttatttatttattatt

SEQ ID NO: 274083 - DNA, 743 bp, Cannabis indica
tggggggcacatagacgacctggatgaatgtttcaaagtcctcagaaaatataacatgaaactaaatcccctaaaatgctcctttggagtcagctcgggaaagtttctaggcttcatcgtcaatgctcgaggaattgaagccaatccggaaaaaatccaagccctcctggatatgaactcgccaacaaaaaccaaagaggtacaaagcctaactggtcgaatcgccgcacttagcagattcgtgtcaaaatcaacggataaatgtgtcccattcttcaacatcctgcgaggaaacaaaaagttcgaatggacagaagaatgtgaaagagcttttcaagacctaaaggcacagctcgcaaaacctcccgtcctttctaaacctctggacggtgaggaactggggatatacctagcagtaacggagcatgccgtaagcgccgtactaatcagagaagaagacggcgtgcaacatccagtctattacatcagtaaaagactcatcgaggccgaaggccgatatccgttgatagaaaagctcgcctactgcctcatcctagcaacaagaaagctaagaccttactttcaagctcatcctgttcgggtgtacaccgaccaaccactacgacaaatactgcaaaagccagatgcctctggacggttactcaagtgggcggtggaattggggcagtacgaaatcaacttccaaccccgaacagctatcaaaggccaagccttggccgact

SEQ ID NO: 274084 - DNA, 589 bp, Cannabis indica
acccgaacccagacctagacttgggacccaaaattagaacctgaacataattcgccgaaccaggtccctagaacaagactgggaccgtgacaaggacccggacccagacctagaaccgagcacagacatagcctcagaccaaaactgagactggaactcgggcccggacacggtcatgtaccaagaccagaattgaaaccaggacagggacctaaatctgggaccgatcccaaaaacaaacttggacctagatagggatccaaatacgaaactggactcggaccaagacccagactgggatcgaaatgcttgacctagatcttgaccgagatcctaacccaacccacacttggacccgcactcaagacccgaacttggacctcgaaacgaacctagacttagatcagggtccagacctggacaaaaacccagacacagactcggacccgaactcaaacacccacacctagaatcagaccgaaatgtatacctggacccggacccaactcgaacacaaaccaggatcagaaccaaggacatacacccagaactgaatccaacctcagatcgggattggaagttgggactc

SEQ ID NO: 274085 - DNA, 539 bp, Cannabis indica
catttacttaattaaaaaaaaaagaaagaaaaaccaaaaattggagaattccttctctttctctctttcccttcgagctgcaccaaaccaaggagaaatcaggggagttctttgcttcttttgctgggaaatcagtagagattcaagggtattgaagctaaggtaagccctagtcttatccctctctagttcttgaattttatggaaggttgaatgtgagatttctaggtttggtggctcttaggttttcttatatttagaattcggattttagggtttagttgagttgattctaagtcctagctgctggttttagtgggtgttgatgattttatgcaattttaggtttaaagttcaaagctttgagctttaatggcataaattgatttggtttgtttttctgtgaaatactggctgggttttattgtttatgcattgaataggtactctggaaagtttggtaacatttggtggaaaattgagcaagagatgaaatgatttgggattactggtgcaaaccggctagccggtttgcagtg

SEQ ID NO: 274086 - DNA, 135 bp, Cannabis indica
tgtgtgtgggcactactctaacactaagaatttcgaaatctttaggaagaagagagagagggagtggtcggccaaagatagggagagagagaggctctagttttttctgaatagaaaagtggaaaattttagtgt

SEQ ID NO: 274087 - DNA, 362 bp, Cannabis indica
cttgagtgatagagtagagcacacacacatcaagtggcatctcaatcatactctggaagattgtgaagaatccaaactgaagagaaggacattcagactaaagatatactttcaagaaatttggacttaaaacgatttttctgtgatttggatggtttcatgttgatctgtgtgttatttgatgattgattgatgtttgtaaaattttatgaaaaataatgaaattttcgtttctaaaattatttttgttggataatttggaaaaaattaagcaattcacttttttacagaacttaatttcgatttatttgaattagttatgactttttgaaaatcgaaaaattagggtgacatcactcacc

SEQ ID NO: 274088 - DNA, 652 bp, Cannabis indica
aaatacctaagtcctatttttggcggtataaataccttccgtcactactctggaacttccgtaggtacctctccgttttttgcattgtaatgtgccaggtgtcgtgccatgtcattaaaatgtatgccacatcactcacaccacttaaacttaaccatgccacaacatacattaaaaaccctcttaaaataaaaattaaacattaaatttgttacacaaataatggcaatttaaattattaaaaaaataacttttaattaaaactgatttataatctaaatgaggaaagaataaataaaataattaaaattaaattttacatttaaattaaaaacaaaacaaaattgctgctcagtttctgaaaagagagcagttaccatttttgcaaaaaaatcccaaactttgttgagagagtcgagagaaacttagggttcgagttgaagacgaacgcacattgacccaaggttgaagacgatcgaaggttcgactgtaaaacgcaacagtccaaggttgaagacgatcgaagattgaagtaaaacgggacagtgtcgagggtatggccttttacagggacgatggaggtgatccccctgactacggtaagtttccctttagtaatttcttttgtcagttttgaaagtggaattgatgg

SEQ ID NO: 274089 - DNA, 552 bp, Cannabis indica
ttactgtgttttttataagtttcatactgcagtatactgtgttaaattttcactggtgttctactggtattttttagttgttctactgttgttttgagttgttctgttctgtgttctactagtgttttataaaaacacagtatttttgaaaacttttccgtgtgatagtatttttgtaaaaagtaaccaaaattccagtatttttgtaaaatttccctcatatttagcctttaataatggatttttcaagttacaatttcaataatatttaattctatttagggttgaaatgaaaaatggccctaaatttggtaactaagttagtaaatgtccactttttgaaaaaattaagaaaatggccaaatctaataaattagctaataaaaattataaaaataaatttatcacatattttcttaaaatatatatatataataacaaaattaagttacataatttttttagtattgcatattattatattgtaacaaaaataaataaatatattagatcatttaaatatatacagtagtattagatatatcgtagtac

SEQ ID NO: 274090 - DNA, 425 bp, Cannabis indica
ttttgtcgacatgctatcgacaaactgtagaccaaatgtcgaaaacttttaagtaatatgttgattgctttttgtcaacatgctatcgacaatcagtcgacaaaatatcgactcatcactgacctttcctcgtacaattatcgacaaaccatcgataagttatcgatatatcatcgataacaactggaaaacccagattttgactaaaaaccagatctgccagatctcaaccatttcagaccaaaaaacagcagttccaacaaatacgacacatataacaattttaaaatacataaagtctaacaaaatgcttaaaacacaacttacccattgtaatggtgtaagattcttgagtgatattggagtgtgcttcggttttccaccaacacccaccgagaaacaagcattcaagagggaagagagag

SEQ ID NO: 274091 - DNA, 636 bp, Cannabis indica
gaagatctggcggcattacctttatggagaaaggtgtgaaatttataccgaccacaaaactcacaaatacttctttactcagaaagatttgaatatgagacagaggcgttggttggagttagtaaaggattacgattctgagattctttatcaccccgggaagcccaatgtagtggtcgatgacttgagcaggaaaggtcccgggcagatagctagcatgattcagatctcaccctagttagcagaggacatggtcagatctagcattgagtttgtggtaggcaagcttcacaacttgatgctgcaatctgatctgttagaaagaattaaagtcgctcagatgactgatccagagttagtaaaaatcagagaagaggtttcagctggtcaagccaaggatttttcagtatcagacaacgggatgctattgtataaagctagggtttgtgttccaaatagtatggaacaggaatgaaatttttaaagcggctcatactaccccttattccctacatcccggtacaacaaagatgtatcaagatcttaaaccttacttctggtggagcagtatgaagaagaatttggtagaattcgtatcgagatgcctaaccttccagcaaattaaggctgaacatc

SEQ ID NO: 274092 - DNA, 129 bp, Cannabis indica
agggtgttacggtaatttagtccctttacagtgtaaatcatccatatagaggatcattgatcataaggataaaatacattgtagggtgttacggtaattaagtccctttacaatgtaaatcatccatat

SEQ ID NO: 274093 - DNA, 486 bp, Cannabis indica
gtcccgtacagacttagggggcacatgttatcccaattttgcactctgacgtggcatcacatgactggtgacacgtggagtccacttggaatatctgctcgggaagaatggtacgagcaggacatatcgctggcacgctcagagcgaagtattcagcaatctgtgcagagcgaccaacacttagcgaattcagctttcgcatcatgagtcattagcacaatccctataactcagggatcaatttacgtggatatggcatacacacgatcccactatcagtgtattctgcctcaatcccacgatccttgcattcagtagtgatcccacgatctttctgtttatacgtattataaggagaggggaaactcttcctccccaagccacctagccctataaatagtgatgtatgttcactgagcaggggatcggtcgaaaagcagttgagctaagactatactattatctaagaattatatattcaaagat

SEQ ID NO: 274094 - DNA, 599 bp, Cannabis indica
cccctaaagctcattaaagaggggtcgagaattttgggttacataagtgctagaagagtaaaaactcaccaagaacgttctctgtattaaatactatcataaatacacagactcgtggactaaggctcattaacgccccaaccacgtaaaaaatctccttcttactttctcacagctctctaaattattatcattttattggttgccaaaaacctcagtcaatattttggtgctttcattgagagctgaagaaagcgtctgtaagtaaacactgcgttataacaacacaacaatggtggagactcaaagcacacgtcaacctcgccctcttcaagatgctcaagatctgaatgtggaggacgtggcgtcaagagcaaccgagggttccgaggaagaagaaggaattcctgatgacgattacgaaggaaacctcgatgagtacgcctacgatgaaggcagctactcagaactggtactcttaaggcaaaaggttttcgatcgtgaagctgaaatcgcagcccaaaaagagcaaaaccaaaagatgcaagaggtgatgttggccatgcaaaaagccatggaggcagcaggaatccacgtgc

SEQ ID NO: 274095 - DNA, 889 bp, Cannabis indica
ggttacattttttgtgttacaactaaatataacgatctatttatgtaacgtaccctgcttcaagcttttactggacccttacacctacggaatgaatgactcttatacacgagtatgtcactctgactgctttctggactgatgactgaccctacagaccaacacgagtgttttcagcatgttttgtcctcacttgcacacttcctgagaaaaattttcaggagttcaccaatcctgaaattatcccaggctaagcatgcttaactgtggagttctttcgtgatggactaccgaaaaacaagatgcaccttgttgatataggtagtaccaatcaatctatttaagccctctttaactgtgtagttctatacctacaccgtctcagaatcatcccacttaacctcccccaggcagtgtgacagcttacccggtatttccctttactgatcaatttttgtgttgatatggatgatattttgtaaaactttattctttttgttctcttttttgcaattataatgttgtgaacttaaagatgataaacttcttgttcatactttagttaaaattattttaaatgataaaaaaattaccatatggaataggtctttgtctttttgtttcacaatttgtatgtaaattttatcatttgcatctctataggatagacaataagtaagattggccctgaattttagtggatcataggaaaaataaatatttgggcccttattttaaaagaaatgtggtattttgaaaagggaaatttgacatgttatgcttaaaaatgtgtaatggtgttaaattataccatcatcctaagaatttggtaactatgccaatcttttaatggtaaccccaaaaatgccctctcctcaaacccaaaaaa

SEQ ID NO: 274096 - DNA, 534 bp, Cannabis indica
ttattttaataatcatttcccacgtaatttcgaattgcatttatttattttaaatgcatatattttgaattttttttttcaattttgaaaattagattaaagttgaaattaattttaattaattttagatcaacttaaatcaagtaattttcattaatgttttattaaaataaatagactaattaaaatatattttaattagaaaattagtaattagtttatgaattatctagatagatagtttctaggtagactttttggtatttttctagatacatttaattaaataagaaaattaatatttaagttgatttgttcaagacacttaaatatttgatgtttttcttaagaatttaattaaataaaaaaattatatttatgttgaaaattaatttatttaattttagaccaacataaattataatattttttctaattttattttattatattttatatgaatttcgaaaaaatgtatctttatacattggattttgaattcaactatatatttatagaaaattaaatttgatt

SEQ ID NO: 274097 - DNA, 686 bp, Cannabis indica
tatttcttcgacatcctccattggttccacgatcctttcggatcctatacgaggatccaactcatcctcttcagccatctctggctcagcgtgctcccggaccataagtacgggtaggtgggtggcaacattataacattgccttgcttccccctgattccccctcacagtcccgactccggcctcctgggtagggaattttaggcacagatgtcggatcgaagtgattgcaccaaagtccactagggccggtcagccgaggattgcgttgtaggctgtcgggcagtccaccaccacaaaggtgcaatatttaaatgtgctttggggagtatccgggcacagagtaaccgggagcctcacctttcccatcgggataagtgtcgtcccgttaaaccctgtgagctgggacccactaggcgagaggtcacggtcggtcaagcctatcgcggtgaaggcttctttgaagagcaggttcacggaactcccattgtcaattaagactctggccaccactttattcgcgatgggggtctctatgaccaacgggtcgtgatgagggaagcgcaccgtcttggcgtcttcttccgtgaacgtgatgggttggtccatcagccgaggcctttgagctgggagttgagtaacttcccatatctcattgtgttttgcggcctcggcgtatcgttttc

SEQ ID NO: 274098 - DNA, 515 bp, Cannabis indica
gaaaatgttggtgtcaagtattgctcaaaatcaaacagtcacagatccggtgatccaagctcggttggacgagttaacccgattggtcaaggaccttactgcaccaaaacccactggcttggatctggaaaggaggagagggtctgccttttcccaaatgatcaatgacctccctattccagcaaagtttaagatgcccacttgtaagtacacgggtagtgaagacccactaactcatgtggagaacttcaaaatccaaatggactttcaaggaatcagggatgaccttaggtgtcaaatcttccctgcaaccctcacggacacggcgcaataatggtttactaaactacccccaaggagaatcacttcttgagatgagtttgaagggttattctatacccaattctcttcagcccgacaaatccagcggagttgggtgacttggtcaccatcaagcagaagcccgatgagccactaaaagactacattcaacgctttatgcaggaggaaaccaa

SEQ ID NO: 274099 - DNA, 589 bp, Cannabis indica
actatggataaatcttggacttcttggagaaaacgtggtaaagaatattgggagtgtttacaagcatttttggcaatggcttcagcatataaaaattctgatggaaaaattaggtgtccgtgtgttagatgcttaaatacccgatttgagcctttaaatattgtagaagcccatatatttgattggggttttgataatggttatcaaaagtggatttaccacggggagccagaagtagaagttccacgaggtccaatgcagcaaacttctccgggtcaatttttcggttcacaaaatccatatttttttcctggtcagtttcagcaacaacccccaaacttctcgccacaaaaatctccaaatgtttcgtaacaacaacaatcttcgaatttaccacaacaacgacagactcgacaatttgtggagattttatcttcccagcaaccatattacccatcaccgccagtatcgcaagctcaggacaatgcaccaaatcctgatattaacataaacgctactggctcaaattttaaagatgatttgtttgatcaagacaataataattagtttatcttaattttaattatgt

SEQ ID NO: 274100 - DNA, 812 bp, Cannabis indica
atctagacaccgactactggtctgttccaggccccgttacctgaatcccgagttaggatctagatcactgtcacggttctcggtctggttctagttcatgtcccaggtcccatttctgagtttgggttcgggatcgagactggggtacgattctaggtcccgaccctggttctgtgtccctagtctagttccatgtttgggtctgaattaaggttcggtcggctcccgagtcaaggttttgggtgggatccgggttcggctcccaattccggtctaggtcggattttgagtccgggtccttgtccggttacggttctagatctacgtccaatttcagttatgattccaagtccaagtccgagttccagtccagattaacttctggttttggtttcaattttgggtcacagggtacgggttcatgtccgggtgtgggttcgggtcgttgtaagggttcgagtcctgagctgggtcccaaatccagacaccgactacgggttttgtcaagttcgcgtttgggtcggttactaggtcccgatcctagttctgtttcccaggtccctatcctgattctgggtccaggtcctaattattgtgtgggtttgggttccggtctaggttcgggttcgagtcctagtctcggttggggtttaggtctctgtctgggtttcgatctgggttcggttttgtggtttaggtcttggtcctggccctagtcctagttctgttctagttccatttgcaattctgagttcgagtttggggttgagttcgggtcggagttcgagtcctggtctgagtttgggttcggg

SEQ ID NO: 274101 - DNA, 765 bp, Cannabis indica
ataatcagatttattaatatagatcagaaataacatttaatgttgcatggttcacatgatttatttcatgattatatgtacataatgtataaattcatctgaaacccttttcacatacttgatcctgtttattgtgccgtcaacacattggaaagtaaacatgactatgtgaataaagtttcctagatttatcagacatagggttttactgatatgataatctacaacagagtttacttgcatttggagaagtgctatgttctttccagagcattggttaaagtaaagctcaggttggatgcatggagtatgcatcggaagggaccgatattgaactttgacttagatttattaaacttaccgtaatatctattcaagtcaatatcgcctagttgatcctagatcaaatgttcttaatcctgttatgattaggctcaatcttgaaaggctattcgtgttctttgatttgttagttaagcctacttttaggtcagggtgatacgtacattttgggaacacggttgtaacgcccgtattttatctttaataaacttaaaaattaattttaacaatttatagcttaataatcatatgggtcgagatcccgattatcaaaatacaagttaaagtactttactattgtgtacatatattttttttaaaaaactaactcgctaaaatgcaaccccaaaatacagactccaaaatattaagagatcaaaaccctccaggttgcactgccgcgatatgtacaatcatgccgag

SEQ ID NO: 274102 - DNA, 793 bp, Cannabis indica
gtcttcacagtcagagttggagtcatcacctttttgtctctgggagactcgggcaatgtcttttcagagtatgggaagctttgccatgattccttcgtttaacgttcctatagagattgcgggcacgtgtttcttttggtctaggtgatcccagaggtcaccgtgtttttcgttaatctgatgtctcagatcgacgggagggcatttctggccccttcttactctccctctgggttcttggtgcacagaaacgctctttcaatcctctcgatcctgagggccaagactccctttttggagtttgcccctttgtggacctttccctttcgggaaatctcagcggacctttcgcggatcctgcacccttttctttttcccaggagtggaagtagggtttttctgctggttcccttcagagggataccttatagggctaggttccctaaatttctgcttttgggcacttggcgaggattctcctggtgtctctccaagtccagcaggaatggctttatgatgcacgtggattcatgctgcctctatggctttttgcatggccagcatcacctcttgcatcttttggttttgttctttttggactgcgatttcagcctcgtgatcagcagccttctgtctcaagagtaccagctctgtgtacctgccttcgtcgtaggcgtcatactcatcaaaatttccttcgtattcgtcatcatgggttccttctccctcctcagagcccacatttgctcttgaggccacatcctcatcgcttgggtcttgagcgtcttgagga

SEQ ID NO: 274103 - DNA, 812 bp, Cannabis indica
agcgtcttgaggaggacgaggttgacatgtgtttcgagtctccacctttgttgttttgtaatgttactatctactttcagacgcttccttcaactctcaatgaaagcacaaaatattgactgaggttttcggcaaccaatataataataatatttaggaaagctgtaagaagttaatgcaagagatttttacgtggttggggcattaatgagccttagtccacgagtctgtgtatttatgagagtatttattacagagaatgttcttggtggttttcctctctagttcttatgaaacccagaattctcgacccctgccttaatgagtttgggggtatttatagtgtttttgtggggtgatccctagaattgaggtacatgtctttctgtaatattcagtaaaggcacacattcccaatggatacatcataggaaatgcatggtctaatccctaggctttttaggggtttaatggatgtaatcctttatcctttcttgactgatgtgatttctcataaagtagccgtcactaggctcattaatcatagcgtagtagctgcagaaggggggttacgccgtcagactttaatacttatggcagtttcaatacgccttctcccatgcgacattaaatgcgaggtgactattcagataggatttgacacctcccggagatgctttgttgtagctttgctctccgggagtatgtgaaactcacctgccttctctaggaggcatgttaaatgctgattcctttgattaaagagacttagttgaattatccttagaattgaggtacatgtctttctttaa

SEQ ID NO: 274104 - DNA, 596 bp, Cannabis indica
catatacatacactcagatattgatatcatacactatattcagttcttaccttctttccgaattctagtgtgctggtcgactttaacggaaagtctcgtgctagatggatgtcctaatcacaatatgaaaccgggtaagttacatgatcaaaaccctaatctcaggaaacccaaaaccataaccctaggttctattatactttctaggggttaatctaactctagaaatagggaaacacgcaaccacgacgcagaatggacaaaaattgagaaaatgaaaggctcggggaaccctgccaaaatcgattacccggtttgcaccagttcacccaagaaatttcatttcttgctcaatcctccaccaaatgcaaccaaaccttccagagtacctaattagggtatacacaatatattccacccagtatttcacagaaaaatccaatgaaacttaactttccattaatgatcaaagctttgagttcaaagctcaaacttgcataaattcaacacaacaccactaaatcagctattagaagtcaaaattaatccaaatgaaccctaaaatttgaaacctaaacatcccaagccctaacagc

SEQ ID NO: 274105 - DNA, 206 bp, Cannabis indica
tgtctttttgattactaatgtttagttacattaaaaagttcaaactctaagtcagatttgcccatacaaataggagatttctaagattgaggatttatgtcaattggaaatagaatttcgggattataatcatatgcatttattttctgaagagaaaaaatagaatgactgatatgttattgagctaattcgaaatgaataaacta

SEQ ID NO: 274106 - DNA, 499 bp, Cannabis indica
aaaataatttccaacaattctgaccacttttttgacgcccgcaataactccagcgatttttccgacaacgacaactactctgacgacttttccggcactgacaacaaactctagaatagttgtcggacttggcattgtcaccggtaaaattaccgaaaaagtaccaagaaaccggtttcctcatcaagaaactagtttcttggtgacttttccagcgacaatgctaattttgacgactttttcagcggcagcagcaactccggcgacttttccggcaccggcggctactctaacgacttttccggtgctggcagtaaactccggtgacttttccagcacgagtgacaatttcgacgatcattataattttatttattttattttttaaacaaataaatatgaagggaattttaatattttttatggtaatttaattaagtttttatgtttttatgaatatcaaattcagatttctttttaatattttatatggtttttt

SEQ ID NO: 274107 - DNA, 535 bp, Cannabis indica
cttgaactttctttgatgtaatagttgcaagtggttcggcttcagtccacttagtaaagtagtcgactgctaccactgcatactgcactccgcctttacctttaggtaactgcccgattaggtcaattccccaaatggcaaagggccacggactttgcatctgtgtcagctcgttgggcggagctcttggtatctttgaaaatctctggcatttgtcgcacttcttaacataggctctcgaatcttcaatcatcgttggccagaagtagccttgccttagaattttcttggataagctctgtccggctgcgtgatttccacagaatccgtcgtgaacttcagataggagccgtgcagcttcatcttgtgtaacacatctgagtaatggcatcgagaatcctcttctgtacatgaccccttctactatgatgtaccgtgctacctttcttctcattttccgagcttcattttggttatctgggagttccccagagttgaggtaggctgctattggtgtcatccagtttggggatgt

SEQ ID NO: 274108 - DNA, 164 bp, Cannabis indica
attttgtccctacacaatgtagatcatctatagaggatcattgattattgggattataacaatggataattaatagcgtatctatatcgtggaacatatagagcgttctatgtaactgagagtccaattccaagctctatggtagatccaataagcaattaata

SEQ ID NO: 274109 - DNA, 504 bp, Cannabis indica
tatgaaattaaatttgggatttttgattctattgtttatatactaaaattgatggtgcaaatctcattaccaactaatttacaatgtttctacatcatttaatttgaattcggctgcaacaaaaatcaaaatcgggcatttttttttgttcttagttttcggattgaacacaatccgatcgagacccttatcatcattaatacccgaaattaataccatagattgatgagaaatcgtgtcccgaacaaaacccatcaaaaatcgcaagttttcgtggtgttttttggccggaattcgtccagacccgcctgcggccgaaccgggtcgtgcgacccactggagatccggctcaaggtagaagatgacatccagccagcaacgcccactcgcgcaggcggcgcgtgggggcgcgtgggaccccgtcggaggtcgtttttcgacgtttttttttccagcgtgcttaaaattcaatttctaatttttctatgatttttaattaatttt

SEQ ID NO: 274110 - DNA, 797 bp, Cannabis indica
gggtctctcctgtcgcgatttcccctgatggggggcggcttcttgaagactccgtttctttcttcaattgcgtagatatggtctcgagggactgcgagttcagtataattgacgaagcgaggtccacctttcctttttggcgaggattccttctttggaggagacttggccagcttcggacttcgctgtcttcgcgggctgcgtcttcttgggcttcggcccctggagttcttccctcgtggactgcgagatcgtgaccgcggtatgggtgaccggcgcttgtccttccctttctctaactccgctagagaattctcgattcttttgtgaggttcggccatggcgaagaactccactaaggattcgggccttcgagcttgtagttccttccaaaagtcggtcctcggcaagatacctgttatcaacatgcaaacaagcgaagactcgggggccttctcgacctttgttacttctgcgttaaagcgtttgaaatagtcttgtaaagactcaccaggttcttgtttgatgttggccaaagtcgtataaggtggcctatacgtcattgtggcctggaaatgtgtgaggaataggtcgacgaaggtttcccacgtcgatatcgatgcctcgggtaattgggtgaaccaatcatgggcattttcctcgagtgttgccgcaagaatgcggcactttgcgagctgcggtacctggtccacttccattatagtattaaatttttcaagatagtctatcgggttagaagtacctttatatttgagggactcggatagacgaaaccc

SEQ ID NO: 274111 - DNA, 647 bp, Cannabis indica
ggattgagtctacgttgtgcgtcgattgttggtttggcattgtcttccattagaattcggtgcatcaccgttgaaggactgattcctttgacatcacctagtgtccaagcgatggccttgttgtgagctcggagtaccctcagcagtctatcagtttccacatcagaaagagaggctgacacaataactggcagctttttatcttcacccaaaaactcatacctcaagtgactaggaagcaccttcaattcaagttctggaggtttttcagtagatggcatcagctcttttggaactgctcccaattcctcataataccttctgttcaagggcccataggagtcaagccatttcacataacccatgacatcttgtccctcttgctccgtcaattcatcttcagttaagctcagttcgagaggatcatctagcagctttttctcactcacaattgtatcaatcaaatcaatgaagaaacagttatcacttgcctttgggtatgtcatagcctttagcacattaaagaccacttcttctccttggactctcagctttaattcacccttctgaacatcgatcaaggcttggccagttgccaagaatggtctcccaagaatgattgggacattgctatcttcttccatatc

SEQ ID NO: 274112 - DNA, 515 bp, Cannabis indica
ttttttcgtcctttctccgtgggtttttccttgtattctacagtgttgtcaaggaagaatcgtgggaacagattttccagaagtaaaggttagttttcgaaacttcactgcattccgttttctgtttgagtgggaacactgttttctgagtttttaatatgcatgagggggtttgagaatgaaggtttgtaggggtagtgtatgtaggctacgttttttaggtaaaaaccttggtaatttcataaaaaatgaccgtgtaaattggcataaccgcatacggtataatcaatacttgaataggcactgtttcagtgctttgaatactcgcatatttgcgagacttacttgcttctgatcgtcgcctagatctttaggattttgtatactgtgaatttagtcgggagaacattaactgagtctcccaaatggtggatgtgtcaacaatattctaatggtcatatatgcggttatatgcccccttgagatactgtgatacacccagccatttgcgacat

SEQ ID NO: 274113 - DNA, 581 bp, Cannabis indica
aagtgtaagaaagaatccaaaaaaaaaaaaagaaaaataaagggaaaagcaaaattacaaagcacttaccacagtgagggagtggctgaggtcctggacctggaagatagagttcagggaggcacaagttgcgaaccgcttaggcgcgcaccgggtaagctgagaagcaaactcgccagtcatctccgcggcgaagggagccaaggtgggcccaaggaagcgacggaaccagtccgacagggggtccaagtttaggtcccacggatcctggtactccgggttgttgatggtttcttgcacctcaacccgcagaaccctcctaagggcttccacctcggcaaacccccgggagtattcgtccatggcatagttatgcttggctatccggagctcttgcctcgcctcgtctccaggaaccggagtcagcacaatgttgggaggagcaggatgctcttccatgggagagaccccaccatcaagaccgtgggccggagtgtcagctctccgaggccgcttgggctcttcctgggcaatcattttgcccttacgcttgcgaatcagagcaatttcttgctcttctt

SEQ ID NO: 274114 - DNA, 812 bp, Cannabis indica
acccgatcccaaacacagacttggacgtagatagggaaccggatacgaaccttgactcacaccaagaccaagactaggatagaaatgctggacccaaatctggaccgagatcctgaccaagacccaaacttggacaagcactcgggacacaaaataggacctatacccgaacctagacccaaatcagggtccagaccttgacacaaacccggatacagactcggacccgaactcaaacccacacctacaataaaacccaaagctagactcgaacccggacccaaactcgaacacagaccaggattagaaccaaggacttagaccaaaaacaaaatccagactcagatcgggattagaactttggagccagacccaacctagaccaggacccaggacgcgaacccacacccgagcctgactcaaacccaaactcaacttcagaaatgcaaatggaactagaacccaactatgactaggaccaggaccaggacctaaacccatatccgaacccatatcaaaacccagagagagacctaaacccaaactgacactaggactcgaacccgaaccttgaccgggacccaaacccacacaataaccgggacttggactagaataaggaccgagaccttgtacccaacccagacccgaactaggaccgagaccttgtacccgacccagacccgaacttgaacctaggacccaactcgtgaccccgcacaagaaatggaaccagactggaacccgagattgagatccggatctcgacccagggcttagaaaaaacccgtagtcggtgtttggatttggga

SEQ ID NO: 274115 - DNA, 645 bp, Cannabis indica
gatgaccgtattgacttgggtccaattgaagaacttgaagaagttactcttaacttaaaggagccaaccaaaaccgtaaaagtggggaagcacctaagtaaggagattaagaaggctgttattcagttcctccgtgacaaccaagaagtatttgcttgggcacattctgatatggtaggtataagtccaaatgtcatgacccacgtgctgaatctaaacaaagacgtgcccgccaaacgacaaaagaggagattacttgatgaggttagagctgtggccttgaaggaggaagtaagcaaacttttagccaacaattttattcgtgaagccttctaccctgtatgggttgcaaaccccgtgttggtgccaaagccaaacgggaagtggcgaacatgcatcgatttcactgacttaaacaaggcatgtcccaaggattgcttcccacttcctcgcattgatcaactagtagatgctaccgctggtcatgaacttatgtccttcatggatgcgtattctggatataaccaaatacccatgaatgtggcggaccaggagcacacgagcttcactactgacatggggctttattgctacaatgtgatgccctttgggttgaagaatgccggtgctacctaccagcgactt

SEQ ID NO: 274116 - DNA, 580 bp, Cannabis indica
taaatgagtatgtcatcaatgaataccaccacaaacttgtcaagatattccttgaatactctattcattaaatccatgaaggctgctggggcattggttaacccaaatgacatcactagaaattcataatgcccataccgtgttcgaaatgccgtctttgctatatcttcctctcggactttcaattggtggtacccagatctcaagtcgatctttgaaaagacgatcgccccttgtaactgatcaaacaaatcatcgatgcgaggcaagggatacttgttctttatagtcactttgttcagctctcgatagtctatacacatccgcatactaccgtccttcttcttgacgaacaacactggcgcaccccaaggtgagtaacttggtctaatgaaccccttgtctaaaagatcttgtagttgagccttcaattccttcaattcattgggagccatgcggtatggagccctcgagattggtgctgtgcctggcgctaactcaatcacaaattctatctctctatctgggggtagccctggtaggtcttccggaaaaacttcttggaattcacatactatgt

SEQ ID NO: 274117 - DNA, 605 bp, Cannabis indica
tacacagaacaaaaatagtatggttagaaaacagccatcagaaacacaaggcatgaaaatcaagaagcacaagaacaagagaaagtaaaatgcaaaggtgaccgcccgcacaagactcggaagtccatcatcacctgacatcaatcttatctcagacatgacagctttcccttttctggcaaaggggggagatggtcgaacaggtgaaatgggctcccttatgcggattgcatgttcaacaggcctgggcgaggctgagagtttcttcttcctcttcagtggggtcacctgctcgtcctcggtctcatcttcaggattcaaaggctcctgagcatactgcttggctctggcgcctcctttcaacttagattcacgcttcagttgaatcaactcattctccggatgagctcgtttaggctggccaacatcagacttcctcttctttcccgccacggacttaggagaaaagtcctcgggatagagcctgtacttcacaagattatcatcggaggtcaactggataatactcctgtaatccctcggtaaccgggcaagtttctgagctctatccctaagagcaagagtgaggggaggatagtgatatg

SEQ ID NO: 274118 - DNA, 814 bp, Cannabis indica
ttatgaacaaagtgtgatggtttgattcttattgtgtataaatgacaatattcgaataataagttatattattgttattattacttttcttgttgagtccttgtgactcacgggtgctatgtggtgcaggtaaaggcaaagaaaagctagatcaaccatgaggtggcagtcttctccagcaatgtacatattgacctcgccggcctgcgtgcggagttgccaggagttgttttagactggctgtatctgctgtatattttgattttatgtttaaatggttgtcgtatatatttttttagcaaaactttttataacagggattctcggaacacactttttatgctgttataatgtccatttttagtgttttattttagtcaagtttttaatattatcacggtttttaataattaattattatattagtattaaactagtttataaaatcacacacgtggcgtctctatagattagggcgttacacatcaactgggtggttacttttgtggattgaggattttttaaagttttccgaaccgacttcactgtcggagtgatgtattgctgacactcatttgaaatcattcggtgtcaccaccctccgatgggatttcggcgggcgttcacgttgggtgattgaggatgtttgaaagccatcttgaccgacttcattgtcagaaggatgggggacactcgtctaaaatcatccggcgtcacaaccatcaactgggtggttacgttggttgattgaggatgtttgaaagctgtctgaaccgacttcagtgtcaaacttatgtattgctgacactcattt

SEQ ID NO: 274119 - DNA, 672 bp, Cannabis indica
ctaggtgtacgaccattccatagttctaaaagtgtcttagggactgacttagatggaacatgaaacaccctaactagcataggcgtgttaacgtgattttcaacgtactgtgcagctcattgctaatcaacgaggttattggaaaaacgtgaataattaaaattttgctttttaattaaaacataacataatatacttataaaattctgggatcccgtttacaaaatacaataacaaaagtatgctatttaattacaaaagatttgtcgcccagcgactatacaacagaagccctaatgtcccaaggatcgtactctccaggcctaaccgcctcgacatgtacaatcttcacctgctcgctctcacggctcctcagctttagccttgcccttacctacacatagcaatagcactgtgagtcaacagactcagtaagaaaagcataacataataaacatactaaaatctcgggttataatcaggcgccaatacacttaacgataaccctaattgaatcaggaacgctcttgacaaagtatgactaaccacgaatccagcctatactcagtactctaatcgcactgatgtggtagcagttaatccatactgtctgatagcctagcatatatctgatagcatctcggtgcaactctatgtacacctcactgttgc

SEQ ID NO: 274120 - DNA, 812 bp, Cannabis indica
aagtacatgattgattgataaaaaaaaaaattcctcattcctcgttttttcatgctcatgtgggagtgtactactagtgaaaccttctataacttactacctcatttcatttacttactggtctagacatgaccacatttttttattaccatccaatgaacctcggtgttatgagaggactctccttgagaggtccgtttcctaggaacatggcatgagacaccgttctcccccagagggtccaacacttagaaaatatatcaagagagtgtaactctagccaggagcatatgttgaggacaatctacggttgggggtataaaggaaatgtagtaaggaaaaattataggtgtaactattatttcaacaaagtttgaagcaaggtagtggcgttacaaagaggtaccaagggtacaagtagtggagataccatttttatatgttaactagaaccatctctcaccaaaccacgactaccttagtaccacatgcagctcagctctttcacttgacgcccgtcagagtactatcctatccccttaggacaacttgtatactagggccaatagagtctctataaatactctctccttccatttgtatgagagttgaaattttgtgtcataaaacattcagaaatagaaatataaagctttctctccatatgatgtataatctttataaagtatattgttattcatagtttattatcgggaaaaaaacagaaaaatacaaaaaaagaaaaaaaattacaaaaatactatgggccggcccattaaacatttatacagtccacatacaaatatttacaa

SEQ ID NO: 274121 - DNA, 496 bp, Cannabis indica
ttgttgtttaatttcatctctttttttttttatatatgcggtacatgggtactcgcacttctgtacttgaacaaatttattttaccttttggacaaatttctatcctcgcggggatagcttatactttaatatttacgcagtacacgggtacttgcgattttatatatttttaactttgattacagctcggtgtaatcgcaattttatatacatatgcgactttaattacagcttggtgtaataaagtaggaaaatttttaaagttggtaaactaaatttaaatcactcgaaaaacttagcaagtaattttattcatgcaatcagtagtacatgcgggcatacatccccctatacttaggattttttgaacaaaaaatatctaagtataagtactcgaattaacataatcgaataacgcgaatattactgataataaaatttcaagctctcgctattccatgctcgtggaatcgcggttccatcgagtgttgcgag

SEQ ID NO: 274122 - DNA, 517 bp, Cannabis indica
aaggtgataaatgaagagatacaaaaactaatcgacgtgggatcagtcagagaggttgactatcctgactggttagcaaacgtagtagttgtgaagaagaagaatggaaaatggagggtatgtatcgactttactgatctcaacaaggcatgtccgaaggattcgtccacttcctcacattgacatgatggtagacgcaacagctggacatgaattgttgagtttcatggatgccttctctggttataaccaaatcttaatgcatcccaatgatcaagaaaaaacatcattcataactgagcgaggactttttgctacaaagtcataccgttcggactaaagaatgcaggggccacgtaccaaaggctagtcaatcgaatgtttgccgacatgcttggaaagacgatggaagtttacattgacgacatgcttgtcaaatctttagcagcagagaatcacctcgatcacctcaagcaagcattccaggtactagaaaaatacaatatgaaacttaatc

SEQ ID NO: 274123 - DNA, 573 bp, Cannabis indica
gggcataaaacccaacagcccccggctgtactcatcaagggcgtagttgtgcttggccacgcggagatttcgcctatcctcatcagcagaaaccggggtcaacactatgccgtgcggcacagtgtattcctccgcctcggaaggaatcccagagtcattgctcggcgctggagtgtcccccctccgggtccgcttggaaggttccgcctccaccatcttgccctttcgcttacgctcaagggtggccacatcctccacctctccttcctcgacttcctcctcgttgtctatcaagacgatcgtgcctgaaggggcattggaggaggacctcccgggggtaaccgactgggagggagccggaggcagagaggcatcgagactgtaagcctcgacaagagtagccaaaagatcgtccatgggtctgactgctgcaacaaggaaataagctaagtgttaggatattcatgagaaagacaaacactcaacaaagaagcaataaaactagtcctaccctgactctctaattcggccctagcaaagtctcgaatcataacgttgttgggttttgtgccc

SEQ ID NO: 274124 - DNA, 237 bp, Cannabis indica
gttagaccgagctcgcggaactccattctcaccagagattaatctcctaccactgcctcacaagttcaaaatgccaacgtggaagatgtatactgggagagaagatcctctttcccatctcaagtactttgagatgcaaatggatttaaaaggagtacggggggatgtatgctgcagaatcttccccgccactctgtcggaagccacacagcaatggcattttaagttggctcctgg

SEQ ID NO: 274125 - DNA, 775 bp, Cannabis indica
aaaatatgatttttgaactaaaaagatccaaacttggttaaaccatctagcatgcttcacacctactcaaattcatttaattcaaacatatacaatcacagaaaacagcctagaaccacagcaacaacaacatctcaaagctaagcatgcaacttataaacattttctcaaaacttcaaaaaaacttaaagaaaagctaaggaagacataccaacaacttgatcactaaaaccttgctacaaagggcttgaatcaccaagaagaatcccaccttctttctgctcaagggggccaaacacaagagggaaagagagagagcttttctttttcttttaaattttctaacttttctaattttgaaataaaggaaatcatgcaaatccaaccttatattcagctaacactttacaattaaaaccgtataatttaaccaaataaagtccactaaaggacaaactaataatggggcaaaatgaccattttgccccttcacacaaaaataacataaaaagcactaaaggggtattttgggaaattctaaattcccggccaatcccgacattcccaaagtctaataaaccgtcccacaatactaacatactaagttgtgattttactgagccaaacaccgagttccatgttaccgggcaccggaaatgcaaaattatgaaaattactaaatgacataaaatgcatttcagaattcaataacaacagtataaataattatttaaatagctataaataattttccataaataaacataattaactg

SEQ ID NO: 274126 - DNA, 640 bp, Cannabis indica
ggaaagatgtctcattcatttgagagtctttgggtgcagagcatttgttcatattcctaaagatgagagatccaagcttgatgataaggcaaaaccatgtattttcttggggtacggtcatgaagagtttgggtacagattatgggatccagtgaacaagaagattatcagaagcagggatgtggtgtttcttgaagatcaaatgtttgaagacagtgacaaagttcagaagcaaaagttccctcctaatgttcctgtgagtactagctcagttccttcacccatagtgcatgatgatcatgggggagatgaacaagaaaaccatgaagagcatgtcaatgaagaagcagatgaacaagaagatcgtggtgagaatattgattatgatgttcatgatgatggtgagccaactgaacaggatcaagaagcacctccaccaccaccagttgagactccagtaaggagatccacaagagagcgtaaaccaacttcaagatacaatcctcatgagtatgtaatgctcactgatgggggagagccagaaacttaccaagaagccattctacatgagcacaagaatgagtgggatggagccatgcaagatgagatgggatccctgcatgagaatcacacatatgac

SEQ ID NO: 274127 - DNA, 508 bp, Cannabis indica
cgccagatcttcaaagcaaaaaccacggcgaccaactctaggtcatgagtcgggtatcgctgttcataatcttttaactgacgggaagcataagcgataaccctatcggcttgcatcagtacacaccccagaccctgtctggatacatcgcaataaaccacaaacttctctttgtctgaaggcaaagctagcactggagctgtaatcaacctctatttaagcttctgaaaactagcttcgcatttatctgaccacacaaaccgctgattcttcttcgtaagtttggttaagggtgttgagatcttagaaaacccttccacgaacccacgataataaccggctaaacccaaaaagcttctaatttctgtcacagtcttcggtcttggccaatccctgacggattcttgaatttggcataaagcttgtgttcccgaagccgttgtagaaccatctgaaggtgaaacttgtgctcctcttctgattgagagtacacaaggatgtcgtcgat

SEQ ID NO: 274128 - DNA, 608 bp, Cannabis indica
cctctccagaaccagccaccatgtgttttttttttaacaaaccaaattagggtgttagtgaggcttgaaaaggagtgtttccgttgaccttatggtggaaataggttgtgaaaataaatttaggggggaaaccgaatttctttgaaaacgttagaaagtatattaaaattggggagcatatttcgtgcttcctctcaaatatttgcttcaaagtctttggtgcactatacttatatacaaaaaagtagtgtcaatcaatcacaagcagtccaatcaaattaaaataatattttatgttaactctatgaacagttaaaagtacaacacataaatatttctccccacatgaataaaccacatatacagccggtttagtttggtttaatggaattgtatgaactttcttatattttaattttatgttatgtccaaattttgttatggtttggttcagtttgtacgtgtaagaaattagtacaatttgtgagagaaaaagttgttattagtttgtattggaattctaatttccaataatcagttgacatgtgtaggatgtattaccttctttaataaaataaaaaatacttatttaaatatacaaacctttg

SEQ ID NO: 274129 - DNA, 477 bp, Cannabis indica
atgcgctctctgaggttaggtcgctgaaacgcgagtcgcagcaaatttaacctcacaaaggtggtgaagtctgatttggaaaccctcgaaattaaatcctcacacgcgaagggctcattcagctgggtatcgtcaaccgaatctgtcccactcccttccgcctcctcttcgtcctcacctgactcgcgaactggggtcgtccattcatcgtccatctcctcgacctcgatgtcaggagcatgcctcgagtggataaggtagtcgcgggccgacaccgtggactcgctgtctcgaatgtcgatggtcccaggttctgcgagttcctgcaccatcttttcgatgtccacagaagacatcgggcctagctctattggagcggcctcctcttcggaaagcgaggtggggagaaagctgtcctcctcctggtcaacttcaccgtcgaatgcacggcctccggagccgagctgttggctatcc

SEQ ID NO: 274130 - DNA, 537 bp, Cannabis indica
gaagtgggctccccactaccctttatttcctcctcggaatttttcagatgcttgccactcctcaagtgaatggatttgcattgttccttcccatccctccttggattttccgtgtcactaggcaaagaaccttgcggcctagcttttaattcattggccaaatgtccaagttgcaactctaagtttcgaagagaggcagcttgactttgtatcaccgcatcatttttggccatataatcccgcattagactctccaaagaacttggttgggaattttgagcatgttgtgaatgtcggggttgttgtgaaaaacccggtggatatgcttgtcttccttgggctggtgcggtgcttgagcttgctccttgacccccccaagacaaattaggatgattcttccaagattgattgtaagagtttgagaatgccccattgtttctgttaaaattctgatttcccatgtaacaaacggactccggattagatggacacttctcaaacgcatgcccttctccacaaaacacacatgagacatca

SEQ ID NO: 274131 - DNA, 553 bp, Cannabis indica
aataaatactagatattgatgagccttgtcttgatcatcgcttttgtagtgttagatgtacttttcatataaatgggtgactggtgagggtgtaataaattaagtatagtataagaagaagctggtagggtcgatggagagagtgacatgatcatccattcatgttttggcaaaatcaaatgagggttttgtgttgtgggatggggtatatatatattatttagagaatatataagagtacaaaagcatggtaggtccatatttggagcaacttgtttccgcacgctttacattattatattattcatccaaataatacaaagcgtcctctcgcttctctcaaagtgtgccttactacttatttatgtataaacacatttaaaaatatacataaatgcttttgtggaggagagcagaacatacaagaacaaaaaacacacaatagatacaaatttaaatattatacaatacactactttttggtcgtgagatatatatatatatacataaatatatattaaaaaatcctataaaatattagagagagagagag

SEQ ID NO: 274132 - DNA, 752 bp, Cannabis indica
catcaacatatagtaataggtacacaaccttaggtgttcctagttccttgtagtaaagacaagagtcaaattttgaccttgaaaaaccaatactctgaacaaactggttaaacctttgattccattgtctaggtgactgtttcaacccatacaatgaccttttaagcaggcaaaccagatcagttttgccattttccacctgaaaaccaggtggttgttccatgaatatctcttcatccagaaaaccatttaagaaggcagttttgacatccaactgctcaacttccaagtcattgtgtgcagcaatggctaacatcattctaatggtcttgtacttcacaacaggtgagaagatatctgtgtaatcaactccctcaacctgtgtgaatcccttagctaccaatctagctttatatctaggtggttcaccctctgacattccttctttctctttgaacaaccatctgcaggagacaactttcttgtcttttggtcttggcaccagaatccaagttctattcttcttcaaggaatgcatctcttctcccattgcagcaagccatttcttctttgatttgcatgcaattgcttcttcataggtagttggttcaggttcactctcagattgtatcacagccagggcataggctatcaaatcagcttcagcatacctactgggaggtctaatttctctccttgacctgtctctagccaattgatagttggtcaaatctggttgatcatcttgactg

SEQ ID NO: 274133 - DNA, 632 bp, Cannabis indica
tcaattaatgcatcaaaattagtattttgtaaaataaggcaaaatattggggcgttacagttggtatcagagccgatcgttccttagcccgaaggatactcacagtatacatacagaagactgaaaagatccctctcactataacgtaagtgttagttttaatatgcttagtattgctattaatagttttatatgtgatacatagatttttgttaaaatatgtttcctagaattagagcctcatctgtagtgggtgcttagagaaattaagagtatattacctcttatgattgattacactttttacgaagaagatgaataggttttatatttctttattgccttgaattgaaactaggaaggacagtgttcctttcttgaaaatttagaataaattatattaggaattcataagactttgtttgataaatagaatattactagttaagcttgacaacattaagtttagatatgttcatggaatcttctctccctataattgaactcttttgtttctattaaatcaacctttcttgtaagagctcacacatgcaactagaagatcagttagaatcaatttgaaaggaacgaccagtagaggtgggggctaaggatgtgtgttccgctgaccc

SEQ ID NO: 274134 - DNA, 509 bp, Cannabis indica
aataccatagcgatgtgtgccttataattaattagcaattttttatattatttattaatttaagatgtgtaatatcagataataattgcactaataattatatgatatctttctagtgcttgagactttaatgtgttttttagtatttctctacacataattcatgaccgtaacttaatttgagtacttctattcttcatgactgctagatgtttaggacgacatgaacacttctacagaatttttcaatatgagcacattcatcacgattagaattttttggactaccgatttatatctttttttatatgatcacactctgttagcgtgttttcaaatctgcagaaaatgttagaaaaaaataataatttaaaggcctcgtgaattaaatcaggattaaatctgacaagtcaatgatgataatcagatcataaattaatatcacttcttgaatattgttgataatgtaaagatgtgaaagtacacagctagcagaagattataaatga

SEQ ID NO: 274135 - DNA, 786 bp, Cannabis indica
acatttatactttttaataattacacacaatcatataaaaaaacaaaactataattgttataatttgagcattactatcattttaattgaaaaataattatctatcactattattatcaaattattgagctttttaatgtgttatgcttttgagctaatctattcgttcttatatgtcgtgtttttggacttgtcgagttgtgtcatgtctaagtccacccatatttttcgtgtggtgtcgtgcctaagtttatatttttcatgtcatgtttaaacatatattttttcatgccaaatcgtactcgtgtctcttagattcgtaccgattacgtgcagtattgaaaactcaacccatatttgcaacgttaatatgaaccacattatttaagtagggcaaatattttttaaaaaacttatgtatataaaaaagaataaaacatgcatattttttatagtgatttatatataatttaataactatgggggaatttagtaataatttaatttttcattttttaatcacaaaactaaaaataaagtttgtattttgaaaattttgtttttaaaaaataaaaatgtgttctgtaactatttttatttttaattttaaaaattagaaaataaaagtgtgttttataactttcaattttatttttattttagttagggtccaggttcgggtctggggctgaggccgtggtctgagtctgggattggggctggagacggagtccagatcccaaggtctaggttggggtaggagctaaaatattgattaaaaaaact

SEQ ID NO: 274136 - DNA, 802 bp, Cannabis indica
ataataatatagttctattaagcacgtaattaaattaatttcatcattttacccttcttgggtcataattactaaaatgccccaagctcaccaacggggtcttaacatataattaatcaaataaattctcatatattgaactatataattaaataattcctcaattattcataattatctaattagggttttgctaatccatttcataactctaaggtattacaccttctgttcacttttgtttgttaaatgtcaaaatgaactgccattctctgtacacaagtgtacacgcagcaaaattttattggtccacttaatattaataatttaaaatattaaaaaaatatttaaaataaaaaataattaattttttttcttctttttttccgtttccgtttcccttctcctttttttttccttctttctttttctagaaatcctaactactttctcccgctctatctctctcgattgagccacaactgaaatctatttgcaccattgatcccaaaccccaaccaccacctgcaaacccaaacttcacccactgctagtgaccccaacaacctatgataaccttgacgaaatgagtgacctgtaaagagagagagagagaacaagttcgaatataatcaaatcttaaaaaaatgaatttaagaaaaaaaaaaagaaacaacaaccaaatagggtctcatcttcggctctgccaactatagagctgaggacggctttaacaaccacccacggcaaaattctcccacgaccgtcgacctacataggagagagagagaaaagagagaga

SEQ ID NO: 274137 - DNA, 593 bp, Cannabis indica
ttttacaagtttaattaaaaagtaaaaattttaattaatcacgttttccataaaccgtgttgattagcaacgagctgcacagtatgtttaaaaatcatgtaatacgcctttgctagttaggatgttacataacttgcctcttttcccgaaacgtttgatccccttcattggagacactcgtaaaaacacatggtcccctacttggaactcaacatctctgcgtttcggatctgcgtaacttttctgtctactctgtgaggcaagcattctagcttttattttctctattgcctcattggtccgctgcactgactccggacctaagtatttcctctcccctgtctcatcccagtggatgggagatctacacttcctaccgtataacagttcatagggagccatccctatcgtactctgataactgttgttgtaagaaaattctatcaacggtagatatttattccaagagccttcaaaatccataacacaggctcgtaacatgtcctccaaaatctgaattgccctttcggactgaccatctgtctgaggatggaatgatgtactgaatttaagttttgtacccattgctcgtt

SEQ ID NO: 274138 - DNA, 922 bp, Cannabis indica
gatccctgaaccgaaccgacaaagacaaacggttcttcaccttctggttggaagattaccatcttccttttgcagtcaatactaactgagtacttcgacaagaaatccattcccataataatatcaaaatccactaaattcatctctatcaaatcagctctcaactctctatcttctattctgattggcataaacctaatccaccttttggagataactaactctctgccaggcagtagggttccaaaccctaattcataactatcatgcggtctatccaatttactaaaagttatggccaccacataagaatgagtggctccagagtcaaacaacacagagaaataagagttgttgaccgagagctgacctgttaccacagaggggctggcttctgcatcagcctgagttatcgcgaacaccctggctggagtgggtttcgctgcagtcttcggtgcctccgttctgagttggggacaatccctcttgtaatgccctggcatgccacactgaaagcacccttgccctttacactcccccaggtggtgctttttacaactagggcactctgggtaagtgtatcgggtttcggtgccactctggtaattgcctcaaccctggttcccccagaacctcttgttctaacccgagccactggttacagtggatgcctttcttttctggtccatggacgaacaactacctcccctgctaaaacctaatgtaggaggggtaggagtcctaccaaccaccggagtcccaccagactctatcatgcatcccactgcgccctcagctcgtagtgccttatccaccatttcaacataggtggttctgtcgtcagtagtaatcatcaggtcatgtctgatcttcgcatttaatccatccagatatttttctttcttactgaagtcaattggca

SEQ ID NO: 274139 - DNA, 536 bp, Cannabis indica
ttgatattgattcttttgtgcttcatctccatagctcatttattaaattgttattcatcttctaattttttttcccaatttaatagtatcttttacagtcatgcttttcttatgtaagttaggctattaattattttggtgtatttattatattgtatgtcatttacagcattctgccaacagtggtattttatcgatttatgatatataacatgatatgttgttaagttagaggtgagatttaatttatgcaagattaattaatttgtgcttttaacatttatatcttccggttgtaattaatggtgtagaattgcaactgcgttcgaattaatatcggtattagaataggatttgcataactacatttctaccttaccaagctctttatctgatcaccctcactctcactcatcattttattatttttaattcatttatatttttaccatattctatttatactaatctttagtggtaatttgcctccctgtggatacgacatagcccgtttactaccgcgaccgctgtgtaac

SEQ ID NO: 274140 - DNA, 524 bp, Cannabis indica
gttttattggctattttgctgcttaaaattaaataagtatgtgttgggttaaagttcaagttcttgaacttggagttttgctagttgaatcatgatttgtgattattgtgcaatctgaaattatggggtttattgttggattttgatgcataaatatgtgttttagaccctataatatttgctagttactgtaagtggattaattgtgattttggttgtgaaaagcatggaactcaagcttggtgctttaatggcactttttgatttttagtgcaattgttgtgtttaagttgtggaatatgtttattatggcatatattgatgctctggaaagtttgggaatgtttggggatgatttgagtgagttttgggggtttaaagattgagaaatttcgtgttctctgcccagacaaccggaatttcggttggttcatacggaattccagttggaagttcatcgggaaatgctgaattttgttttggccataacttttgactcgggactccgtttgggacgttcttta

SEQ ID NO: 274141 - DNA, 1334 bp, Cannabis indica
ttgtctttccacgtaaatttcttcttgttactaataatattatataatttggtgttgcgaaattcactcgacaacatttggcgccgtctgtgggaaacgactaagattttattcatttcaaagaaaaaataccatcatggctggaaatcaaacaaacggaggagctaacaacgggtccatcaacattgggacgatgaacgtaccgttatctggaactggaatgccacctgtggacgtcattaacggcggagtagggagaagcaatatcagacctctcaacctgttcccagaaacgactgaccctcaagtcggggacacatccacaccaccagcaaccatgcattttccccctgtcactccggcagtggtatccgagggaatcatccaactcaccactgatcaatatactgcgattcaggaccaactgcgtgcactacaggccgaagtagatggacaaaaccgggcccgacgcccccctcgagttcctgctactcgcacggataaccctcaggtaacaaattctagacgtcatactaatcgtgtacgcagggaacgaagaaccaaccctgaaggtttggacctgaaccatccaacatcgagggatcaatccgcaaggtatccaaaccaaagcacacaggttgatgaagaccctgaacgacgcaatcctcgcagtcgaccatcaagagacaacgacgcagaatcagcctcttcgtcatcgcatggtcgtacaccaagtagatatacaaggtccggctctgtacagacgcaacagggaggacattaccaggtacatcggggtgatctgcgtgatcacctcaacgcagtttttagagcgcgttctcgcgcccctcataatacggagacactccgtgatccccatgcggacgatcagggtgtcaacacttacaataacccgcctaccgcgccgatcgcgaccactgggatcaatgtcccagcaaatctcgccgcagtagttgcgactcccgcagtcgtagcagccccgactcctgcgactggagggattgaccagagcatgcttctgcaggctttgaaaatgctcgagcagcaacggaagcccatatacaagttgcatggtacctcgcccttcactacagaagtgcgacaagctcaactccccaaggggtttcgtctatccgaatccctaaagtataaaggtacttctaaccctatagattatcttgaaaaattcaatactataatggaggtggatcaggtaccacagcttgcaaaatgccgcattcttgcggcaacactcgaggagaacgcccacgattggtttacccaattgcctgaggcatcgatatcgacatggg

SEQ ID NO: 274142 - DNA, 543 bp, Cannabis indica
gggcataaaacccaacagtagtccctccgatgtggggtcctccagagatcatggccactctcccgttgggtctaggtggcaggccgggaatatgctgagcatctctagggggaaccactagagccaatactcctgctgcaccccctagtgctccttgtggcagagttccagcctcctgacctgggttgaggtgaggcaaccgattcttgatccactcgtagaggtgtcccaatcagattaaattttcgatctcgtctttgagatttttgcattcattggtactgtgcccaatgtcgttgtggtactcgcatctcttgttggggtccctccgggagctatctttgtacaaaggaggcggtctccggtagtgcgtatagtagcaaagtacacacgttcttgggtgtccgttagctccgtgtactgggtatattggggagtatacccccttttctgtcgcttttccttcgtccgggtgctgcctttggaggaccttttactcctcgagccctgggaaggacctgctaggttggctgtcggagcgga

SEQ ID NO: 274143 - DNA, 480 bp, Cannabis indica
gtattatcaagatctgagtctgaatgtccttctcttggatttggatccttcacaatcttcccaaactatgattgaggtactgcttgctgtgtgtgggcactactctttcactatggtatttcgaaatcggaaaagcaagagaagagaaaaagggttcggctatagagagaaaagggaaggctcaaatttcagtttcctgattgcttaattgcttgatttggtgtgagccttcactttctatttatagacaactgctaggtttaggttagtaattaattggcattaaaataatgaaaataataattggaaaatgcatgcacaagtagccgaccatggtgttattgggcctcacttggattttacagtttccacaattttatttctattttctcaaaaatgccactttccaattttaaccatttaaatgctaaaactaattatttaataactaaaatagattattacttaatattgtcattt

SEQ ID NO: 274144 - DNA, 508 bp, Cannabis indica
caattcagcgggatgccaactgaggatcctcacctccatctccgttcattcttggaggtgagtgattctttcaagatccaaggagtgagtgaagaggtgttaaggttgaagctattcccattctcactacgagaccgagctagatcatggctcaacactttgccgcctgattctgtgaccaattggaatgaccttgctgagaagtttctgaggaaatactttcctcctactagaaatgcaaaattcagaagtgagatcatgtcttttcagcaacttgaagatgagtccacaagtgatgcgtgggagaggtttaaggaacttttgcgaaagtgtccacatcatggcattccacattgtattcagatggagactttttataatggcttgaatgcagcttctcgaatggtgttagatgcatcggccaatggtgctattttgtcgaagtcttacaatgaagcatttgagattttggagaccattgcaagtaacaactaccaatggtccaaca

SEQ ID NO: 274145 - DNA, 580 bp, Cannabis indica
gttcttaattgtaattttgaaaagtgagatatgttagcgatgcatattggtcattgtagtgtcgaatatctatatggtctgtaatttcaatttatttttgactttattgttcctctattcaattgtagatgtttgtgccggtgttgactctagaaggtgcaccacattggtttggtgccgaagtaaatatgaagtcgaaggttgtctcatttatggactccctacacaccgcaatgaatgagaagtatcgtgtggaggctacgaaagaaatggtaaacttgcaaagtttcattgtttgatgtgaataactcattgtgtacttgactctaactaattgtatacctttgcagttgtcgacgttggaccttttgtttgaggagaataggtcgaagaatgtgactttcgtggatttcagaattgacaggaaagatcgcgggcttcctcaacaagacaatgaccgagattgcggagtatacgtcatgaagtacatggacgctgtggccaatgaggaagaagtagttgatgaggtataccactttttaaatatttcagaatgtactacgcaagtttgattgagatt

SEQ ID NO: 274146 - DNA, 516 bp, Cannabis indica
ttgataccgaggttgaataagcttaccatcaagaacaaatatcctttacctcaaattgatgatctttttgatcaactgaaagggaagatggtcttctccaagatcgatcttcgctcaggctatcatcagctgagaattcgagaggaagatgtcccgaaaactgctttccgtactcggtatggacattatgaatttctagtgatgtcttttggactcgctaatgccccgacgacattcatggatcttatgaattgagtattcaaggattccctggatagatgtgtgatcgtgttcattgatgacatcttggtttattctgaatcagaagaggaacatgagttgcatcttagatctgtattgcaacggttgcgagaccacaagttgtatgctaaattcaaaaagtgtgaattctggttatctcgtgtctctttcttggggcacatagtagataaagatgggataatggtggacccgactaagattgaagctgttcgggattggccaacaccaaaatcg

SEQ ID NO: 274147 - DNA, 589 bp, Cannabis indica
gtgcgccatgagccattattaggcacgagtacggggttcgctaaccagttggggtaaaacgactcccgtataaagccgcaggcaaggaggcggtcgacttcttcttttagcgcttggtacctcgcggggtccattttgcggcgcttttgtcggacacctcgcacctcggggtcaatgttcaagcgatgacacatgacttgcggagatatcccgaccatatctgagtgtttccaagcaaaaacatcaagattttgctttaaaaagtcgttaattgttctcgcagctgaaaatttaatttagaaccaatttttaaaactttattattatctacaggatctataggtacctcaattgtgtcttccgcggcttgggctgcggcggtgtgatcgaggattcttggatccaagtctggttcatctatgtgcggcacctcctcgattctgaggatctcctggcgaggaggtggtgcctccaaaaggtagataacatttaccgtccttttctctgcgagtttaactgctgcgttgtagcattcccgcgattctgattggactccccgcacagaacctactccagcgggagtagggaa

SEQ ID NO: 274148 - DNA, 695 bp, Cannabis indica
ggaataacagtttcgcacacaaccaaggcattcataatacgactgtttcgcctggaaccaatgcctagatgactatcagagatgccactgaattacaaaaactccgtgacgcgctcggactcatgcagggtcataataataccctacatcataatcaagatgatctacgtaccgcagtaaatctcacattcgacgaagaaaggcgtatgctcgctgaatggagagatagagagatggaggcattaagggctcatcatgcagagattaaagatcgtagtcggcaagctaccgtgctgatacgaagagcctaccaaactgtaggtcagcaatcgccgaacgtcattcccctgggagaaacgaatgaggatgcaacaatggacacttcccagactgcaaatggtcagctgcccaatctccggtcacgagttccactcgtgggcccagtggtaggcgcacagaccttgtctggtaattcatcagcaggagtcatacctgatggctccaaccaaatcaatggtgccattccacccgtcaaccaagcgaatcaatcgctaaggcaaccgagcgcttctgtgttcgaaaggttagggaaaacccatgacctaaggaatgatctaaacagaaggaggggagcagacgatcaaaatgtactaaaagcttccagccagagcccgtactcaaatccctgctcagaa

SEQ ID NO: 274149 - DNA, 550 bp, Cannabis indica
acagcaaccatagcaacgaaaatcaagaatttgctttgaaaaccaaacttttgagctaaaaatcacacaacttaaacaagatagcaagcatgcattataacctagttaatccattcattttagacataattaagcttctgaaaacataatcaaaacctagcaacactacagccacaaaactcaaagcatgcaatgatcatacattcaccaaaacttcaaaaaaacttaaagaaaagctaaaggaaacataccaacaacttgctaataccaaatctgaacaaagtgtgcttgaaatccaagagaaaatagcaagaatccttgctgcacaaggaggccgaaagagggaggaaaagagagagcttgagagttttttgtaatttttcctaacttagaatttttgaataaatgagaaacatgcaaaatcctactctttatttcagccaacaaaatatattaaataatcatttaattaaccaaataaagtccacaaaaggacaaactaataatggggcaaaatgaccattttgccccttcacactaaaatcacata

SEQ ID NO: 274150 - DNA, 653 bp, Cannabis indica
aaacaactttcaaaaaaatacagtaacaacactgtcacaacttataaaaaaaaacaaatactaacaataaacagaaaaaacaactaaaatattaacaacactgtacaagctcgttgttatgaaatttcgaaaatggtagtcgataatagtagtgtgacaaacaaccgagaaaaaactgacaataaacatatacaaaactaaagaataaacaacactgaaagatcttgttgcaattgaaattagtaaaatgcttctcaataccaatagtgtgtaaaacaaccgaaaacaaattcacaataaacatataaccaaccaatggggaaaagcaattcaaaactgtaacaaaatacgaattgaactgggcaatttttcaacaaccaaacaacaactgaataaaaacaacaaaacaacatcaaccacaatacatgacagaaatacataaagaacaccaaaaaaacataaaaacatcctaataaacacctaaaccagtgacctaaaaagctcatgtaaaaattaacacaataaaatgaaaccaagcaaatttaaattacctttgattcaactttgggcttttggtcctcaccatgcacttcatcctcaaaatcagaatctgaggaaacctagaacaaaaaatggggaaaactttaaatcat

SEQ ID NO: 274151 - DNA, 988 bp, Cannabis indica
taagtgagcctttacaaaaaaaaataataataataaggtgtaacaagagtgaccctaacaccagagaagggaaatctagacgtattacgtaaaaactcaaggtgaaaagttcctagaaacttcaaacactaaacccagaaaaacaaataaacagtaaagcatgccacgaacaccaaacagtaaagtgagggatgcgagaaacttacgtgaagtgttggaactgggggttgctgttgatcaacaaagaaatgtagactgacagtaacgaacaaaggttaacaaagaaatctgtaagtgtttgaaggttttctggtctgaggatttctttctctctggaaaactcgaagaaagttggcgaaaaaaggaaagtaaccaaatgaaggaaaggtggtggcttttataggccaaggtgcatgtggaacaggcacaatcacctaccaatcgaacggctggggaggcgcacgattcgaattcccaagaatcaacggttagattgattcgtaattaaggcggtggaaacgtttgagtatccgtctgacacacattaatgcgccgtatcaatcaatgggcatgaaacgaatcaacgcctgcaaaaagtgaatcgctgcattaatggtgatcattaaatacaccctcacgcgcccgaagcacgtgccaggaaaccgaggagtcaaccggaggcacttgaacaagccttgattcatttttcaaataaacaaggcttggggggtaaatgttgcccctgattttgcccaatatacgtggaccaaccggacagggacacgtggaccaaaaggtcttaacattcgaattaattgctaagtctttatgaagaaaggcagcatccgggacctacctcccggagaaggcatacggaagtcccctatgctcccgaaggcctaagtaacatcaaagcatctccgcgaggtgtcaggcttcccctgagcagtcacctcgcatttaatgccgcatgggaggaaacgtgttg

SEQ ID NO: 274152 - DNA, 599 bp, Cannabis indica
aatatagccctaaaactagaaacaaagagtgaaaactaaccgaaaatatgacccgaaacttagactaattttagcctaacaaattcccccaaactagattcttactcgccctcgagtaagatgaatactactaactactaatctactaactacgctaagagttaatcacaatactactgctcatgtgttgttctcttccattgctcaaactagaatttcaattctaccaactctaacaattaaattagatgcttagtttgtcacatactgtacaaacacaagatgacttcacaatcgaaacaatgttataatggttttactcttttcaaccattccaccacccgataactcatatgcttgcatgcttacctctctccactaatattgacaacatcatttcagaatcaatagggctttttgaggtttagaaagtatggtatagatgtttggaaaatgaaaaacaattttagctaaagatatcataagcacaaaaataacccacaagcttcttctaatttcaaatttcccaaagtgttcccacaactcgccatgattgagaaaaattattttctttctttttctcaacatcactgaatttt

SEQ ID NO: 274153 - DNA, 522 bp, Cannabis indica
ctgcggacctcctcattataatatttggcattaaacaattctcggaactcctcccaggtcattctggtcacatccctggtgagggataccatctcccaccaaatcaaggcatcctcttgaaattgaaacgtggcacatgccactctgtcatttccgaccactcccatgaaattcaatattctttcgataacggtcaaccactgttcagccttaagaacatcaggacctcccagaaatactggaggtgcttgctttctgaatctctcatataaaggctccatacggttaccagcaacatgttgctcagctggcaccgcaggggctgcaggaaccgcagcaggcggttgcgggggaagctcaacaggagcatcccgttgcctgagtcgtcggatctcttcttcttgttgctcaattctagcttgcatcacagcaaacctttgttcccaatcaaccggggcctgaggtggattctcctgtccacctctcgagacacgaccgcggcctctaccgcgtccacggggg

SEQ ID NO: 274154 - DNA, 559 bp, Cannabis indica
ttttgatcgagtccttgaaaactgttgtttgagagtttagaaggtgttctcagtattcttcgtatatttgcaacgttcagtatcaatctcccccctttaaaatatttttattaatgagtatctcagtgattttttccaaacaggtactctcttgcaacgtgtaatggattgggacatgactcatgagttgaagttctggccacttgattattgttattattactattttcctttctatctcaaaaaattactcatcattgttgtagagatgagttcatgaacagatgacatgtttaaataatgatttagcgtcttaaattgactcggatttgcagacataagatgcgatagccaacactgccactatagtggaaggagataacattttcctttttgttcaatggaatctctcgtgcatttggaataaaaagttacatattatatgaaacattattcgattaatttttgtcaatagcactaacattttattaaaacaagggtaaataccattttggactctctgttttacaaaaattactaattggaccctgtgttttgt

SEQ ID NO: 274155 - DNA, 659 bp, Cannabis indica
tcgacaaaccatcgacatactgtcgacaagtcgtcgacaatataggccaaaaaatacacttaaaccaccatcgacatcctatcgacatacaaacgatatcctatcgacatacaaataacatctaaattcaaacagacactcaatctatcgacatcctatcgatatcctatcgatatgtcatcgacaaaccctgtacatacatataatttcgccaaaaataatacacagaatcaaaggaatccacagaatgtacatgaacaaagataaatcacaagtaatcaagtaatccacaaaaatctagcaaaattgaacatttaaaatcaattatttttttttaaaaaaaatggtacctttttgactgaagtgggtgtcgattgaggaggtggtgggtgtcgactggattttgtggtggttgtttcgtgggttttgtcgtcctcgactgggttgtgggttcgtcgattggatgcacacgaagagggaatggagggagagggaatggaggttggggaagtgggtttgggttctcggactttcgttgtggcgagggagagggaatggaggttggggaagacgaagtggaaagagagagagggaatggaggtcgggaacgccttcaatggaggtgcctcgctggttgggtttctcggaggtaggtgggg

SEQ ID NO: 274156 - DNA, 527 bp, Cannabis indica
actatataattcaccgtcttgtttaatttttccagccttgttgtttatcctcgcattcccattcgagtactcgccattctaggttgaatactcgcatttgtcatctctcaaataattctcttttttatcagttaaattatactttttggtgttgcgaaatttgctcgacaacaggcgtctaatcataatccgggatatatgtatgttatatgatttattctttttcttactgagtctgtcaactcacagtgctatgtttatgtgtaggtaagggcaaggttgaggccgaagaaccgtgaggaggagcagatgaagattgtacatgtcggggcggttaggcgtggagcgtacaattctcgggacatcagggcttttgttgttagtcactgggcgacaaatattttgtaaatgactagcaaacttttgtaaagtattttgtaaacgggatctcgaaatattttgtatgtaatattataagttttaattaaatagtaaaattttaattaatcacgattttcattaacctc

SEQ ID NO: 274157 - DNA, 917 bp, Cannabis indica
ggatttacattgatgtgataatcggcgataaagtatacttactccttggatatgtgttatgttctttctagaacattggcaaagtatgatagtttttaatgtatgaagtatacattggacagggaccgatattgatcttcgtaaagatattataatcttaccattgtatctttctaagtcaatatcactagttgatcttagatcaaaagatcttaatcctcacttgcttaggttcgatcttaagagtgttatctgtgttctatgatttgttagttaagcctaccttttggtctgggtgatacgtacatttcgggaacataatagtacaattgagtgggagcgctaaacatagatatggaatctatagcatctatctggacatagaagtgaaacgatgattgccttcgagcttggcttaatagagataaatggaagagctcttatttctgtgattatattagtttatagaaatatcatttataggaagcgaagtgttttaagaataaaatacattgaggggtgaaacggtaaatttgtccctcctcggtgtaaataatctatgaaggatatttaattattgggattagaatgatggttaaatgtttatagcgtatctatatcttggaacggatagagcgttctatataactgagagtgcaattccaagttctatgtggatgcaataaggaattaataagttagggaatttacttggcaaattgttgatctgcctattggaagctcggttgtgtaggcccatggtccccatactagttgagacaacactgcttgtaagactcatttaattgattttaattgtcaattataattctaaaattatactatgtctcatttatgaattttcactaagctaaggcttaattttgaagaaaagagattctagggtttatttgtta

SEQ ID NO: 274158 - DNA, 459 bp, Cannabis indica
aggttccctcccccaccttgagtctgagtaggcgacatggcacggaaagcctcagccatctcagcggcttctgttccgagaagagaaaagtcgaagtctgggactttggaaagagtggtatagatataatcagacactgcctgatcatactgcttcttcccattctctttctcagtctccaaatcgcgggccatctccacgatcgtcgcctgcgatttcttaacttcaacctccgcctgttccttcgccttgctgagttcttcgagctccttctccttggccttgctgagttcctcgagctctttctccatcctcgccacttcttgcttcagcttttttatgttctcctgaaaatgagcgttttgcctcttcagcgagtcggcttccttcgaaggagtagcagcagcttttatgaacagagccatcgactgcgcggccagttcggcagatcgcgtaaca

SEQ ID NO: 274159 - DNA, 541 bp, Cannabis indica
agcagatttcgtaaatcggtccaccactacctagattgagtcaaataaatccgtggttctaggtaatccaaccacaaagtccatcgtgatatcttcccacttctactcaggtagggttaaaggctgcaacaaccctgccggtctctgatgttcagccttaatctgctaacaagttaggcatttcgatacgaattctaccacattcttcttgattccgctccaccagaagtagggtttcaaatcttgatacatcttggtggtgccgggatgcaaagaaaagagagtggtatgagcatcttcgagaattttatttctgagttccatactattaggaacacagactctagtcttaaataacaacattccactatctgagactgtaaagtctttgggttggccagccgaaacttcctctctgactttaactaactcggaatcaattaactgagcaactttaatacgttctaacagatcagattgcagcgtcaagttatgaagtttgcctacaacaaactcgatgcttgatctgaccatatctttt

SEQ ID NO: 274160 - DNA, 678 bp, Cannabis indica
cctgttgcacaaggatttggaatcttatggaattctcttttctacatgaagtaaaagaagagattgattttaagaatgttttactttatgcttctgaggtagtggacagagaagcctttgcaaaattcattatctgttcgtgggcaatatggactgaaaggaataagattactcatggtcaacaaataagacaaccacagtttgtggttgagtggataagtagttattacgagtcgattctttcaatgaaggagggccccaaaaaaagttcccaaactaatggaagaaatagggaagcgtcagctggaagttctacaagtgctcaagaacagaggttatactctaaacttatggtggatgcagctgtattgagcaccacgagtatagttggattaggtgcggtggtattctcagaagataatagagttcacgctgcgttaagtaaaccactcaaaggttagtcatattaggtattttaaatattattttgttacgaattttattagtgttataattccaaaagaaatgttgatcgttcaggtatgggtgaattataaagatcttgtaatttctagatatcaaataagaatacttaggtctaggaaggataacaaagctaaggtgattacgaagtaaaatacatgagttaagttactactagccaaagggtctcccttt

SEQ ID NO: 274161 - DNA, 545 bp, Cannabis indica
tcgacatcctgtcgacagtcagtcgacaatacaaattaaattcaacatgtaaatataatcgacaatatatcgacaacatgtcgatatgctgtcgacaaattcaatcagaccatagtttcacaacaagtcgacaaaatatcgacatactgtcgacattaagtcgacaatacaacctaacaataaacaagttgatctaatcgacaaaccatcgacatactgtcgacaagtcgtcgacaatatagggcagaaaatacatttcccccactaatcgacatcctgtcgacatacaacgatatcctatcgacatactaataacagctaaattcaaacagacacccaaaatgtcgacatcctatcgacatcctatcgatatgtcgtcgacaaacactgtacatacatataatttcgccaaaaataatacacagaatcaaaggaatccacagaatgtacatgaacaaagataaatcacaagtaatcaagtaatccacaaaaatctagcaaaattgaacatttaaaatcaatttttttttaaaaaaaaatggtaa

SEQ ID NO: 274162 - DNA, 535 bp, Cannabis indica
gttaatcaaacatacttggtagtaaatctagatccttgtaaaatatttccaacaattctcgacccaagaaatcccacaaggtgtgtttacattgggaaaaacctggacgagcagctaaactagcagctaataagtttcttaagggcgaaccaggatcagttcgcctggagccatgaagatatgattgggattgaccctaacattatctgctatcatttaaatgtcgacccaaacaacccagcaaagagacagaaaaggattctgagagataagtggcactaaaacaggaagtggacaagttattagtcaatgacttcatacgcgacgtgttttatcgctcgtggatagccaatcctattttcgtcccaaagcctaacgaaacttggagaacttgtattgagttttcaattctgaataaggcgtgcccaaaagactgttttccactacccaggatcgaccagttaatggatgcagctgctagacacgagcttatgtcatttatggacgcatattctagatataactagataaaaat

SEQ ID NO: 274163 - DNA, 599 bp, Cannabis indica
tcgggtcccgagtgcgggtccaagttttggtctgggtcaggatcttggtccagatataggtctagcatttcaatcccagtctaggtcttggtccgagtccacgttcggatccgaatctctatctaggtccaagtctgtgtttgggatcgggtccaacatttaggtccaggtccgagtctcagttcagagcggggtacatgaccgtttccgggccccagttccagtctcagtttgggtctgagcctaggtctgtgttcggttctacgtctgggtccgggtcctggtcacggtcatagtcttgtactagggtcctggttcggcgattcttgttcaggttctaattttgggtcctaggtctaggtcttggttcgggttttcttcttcgtctgggttctggtcctagtttgagtcccagatctagacactgactactggtttgttcaaggccccgttacctgaatcgagtcaagatctggatcactgtctcgggtctcggtctggttcttgttcaggtccctggtcccatttctgagtttgtgttcgggatcgagactggggcgcggttctaggtcccgagcctggttctgtgtccctagtct

SEQ ID NO: 274164 - DNA, 750 bp, Cannabis indica
agtttttttttatcttactcgggggcgagtaagaatctagtttgggggattttgttaggttataattaacctatatttcgggtctttaaagttagcattatctcgtctattggtgtcttttggagcagttttacgcttgattttcattatttcaggttcccggggtgttaaagttcgaattcagtcaaatggcgaaaaactgggacaaacttggaaaaaattggaaaattcggttccagaagcatcagtagtcgcgacctccagagagccaggtcgcgaccctttttcctggtcgcgaccctggtcgcgacttcgtaagtttggcagaaactcggtttttcgagttttgcctgtagtcgcgaccagcttaaatgctagtcgcgactaggtacggaaatcgcagatttgacctaattttgatttttcactcaattggaggctcaccactcatccctatataaggaatacgacattgaaggtcagaggcaagcaaaaacagacctaatagtggaggcaaagtggagaggaagctatcttgaagacccggagcgataccaccttctagtttctttcttttaccctttttattcttctttatgtttgtttttatttctgaattaatcatggatgtttttagagttattatgaactaaatttcccaataagggaggatgatgattgttgtttaagtttatgcctagttaataaataattgccattccttcatctatgtgtgaatactatctttat

SEQ ID NO: 274165 - DNA, 522 bp, Cannabis indica
accttatcgctgattatcatgccagtctaaatccagtgaactgacaaattacgggaattaaacttttgaacatataatcatgattatattccatagtgctgatgacactataatcatgaacaaatatatacatatttatatatgttctagactgaatagattttatacattaagtataatcatgaaataaatcatgttaaccatgcaatataaaatgatttctgatctttattaattagtacatctgattatattgaaattggttttatttagggggaaaaacccaatagttggcgagtttagctgctacccaccatgtaataccctagaattaagaaagcaaaaaccctaattaaataattaagaataattgaggaattatattattatatagttaaatatatgtggattaatatgatttataacatggtaagaccccgttggtgagctaggggcattttagtaattatggctcaagaagggtaaaatgataaaattaatttaattacgtgcttaatagaa

SEQ ID NO: 274166 - DNA, 605 bp, Cannabis indica
gcagttatctttcatagcttgaacaaggaggtatgggcaacaagagccagagtttcacgtttggattttctcttcttcttaggtccatgttgaggagcaaaaggaaagttaccctggccagatttcttattgataatgtttgtcaagtaagttcagagtttgtaacatcttggcctgatgtgacctcttttattacagaagtgacacgttggaacaaatcgatctgccagcctgtttgacccttgatttttcaccaacaggaactcttttaacagaattggacttagattcatcaggtattttctccggttgatcatccttgatagttggagaggcagacacaaaatttattttatcaccagaggatgaagctgagttgtcttcaatagtcaaatcatgaccttgattgtataacagtttgtatccaattgaggttctgtctccatatggcttctgattttggagagcttgattcagggcagcagtacccgagggaacatgagaaagagattgcttagctctcacaagttcagcagtcaatttatatatctcactatctttggaacacaactccaacgtcagcttcttgagtttatcttctagtt

SEQ ID NO: 274167 - DNA, 692 bp, Cannabis indica
aattttgttattattttatgttgaattttttatttttcgatcttaaaagtttaggggttttattcctcattaaattctctttcttttgatatattacttgcataaaatcattgagtaaattaggagaattttaagattaattttttagggtttatgtattttttctttatgaaattcaatttgggatttttgattctattgtttatacattaaaattggtagtgcaaatctcattaccaactaatttacaatgtttctacccatttaatttttcgaattggataacacacattgtaaaatcggattgttgtttgttcttaatttttcggattgtttttgccatgagatctagacattgagccttaaaaactcgaaattagtagtctagatggactagaaatccaataccgatcgaaacccctcaaaatcccaaagttttccgtcggttttcgccggaatttcacgtccagacccgaccgcctgcaaccgggtcgggctcgacccgtttcacccaggctggaggaagaagatgactcccagccagcgatgcccactcgcacagcccgcgcgtgggggcgcgtggagccacctcgggtgtcgtttttcgacgtttttttttccagcgtgcttaaaatttaatttctgatttttctatgatttttaattaattttttgactccgtttaataatta

SEQ ID NO: 274168 - DNA, 630 bp, Cannabis indica
tcctgatttcagtctaggtccagatcaggctccgggtgtgggttcgcatcctgggtcttggtctcagttgggtttgagtcccaagttcaataccgatctgagtctggatttagttttgggtccaagtccgggtctagctttgggtttgattctaggtgtgggtgtttgagttcgggtccgagtctctgttcgggtttgtgtcagggtctagaccccgatctgggtctaggttcgggtccaggtccaagttcgggtcccgagtgcgggtccaagtttgggtgtgggtcaggatctcagtccagatcttggtccaacttttccatcccagtctggatcttggtccgagtccatgttcgtatccggatccctatctaggtccaagtctgtgtttaggatcggttccttgatttaggtctagattcaggtttcaattccggtctaggtacacgaccatgtctgggcacgagttcccgtctcagtttgggtctgcggctaggtctgtgttcggttctaggtcttggttcgggtcctggtcacgatcctagtcttgttctagggtcctggttcggcgattcttgttcagattctaattttgggtgcaaggtctaggtctgggttcgggtttggttc

SEQ ID NO: 274169 - DNA, 541 bp, Cannabis indica
aattttaactctttttcagaatcagaaatgtctgcatccagttcaaaatcttccaagaagggaggaaaacgtctggccaccttggaagaagtcatggtgggtcccgttgcccaggaggggtatagaccccgtgccacgggatgggaagcagctgagcttcactctactctgacttgtcctcaccaactggagaacatcgtggaggtggctggtatcaagcccgcgacgtctgggacgtaccaccggccgccccgagatgcggagacccctaaccacaattacggaggcttcggggcttggagccagacgcatctgatgaccggggctatgcttccccttcaagattattttattaatttccttgtatttgtcggccttgcgccataccaacttattcctcaagcttaccgcctgctttcaggcttatttattttttactccgcccggggatggggctctcccagtccggcggagattttgtatttttacgaacttgtttctgtccccaagaagggggacaaacttaaggatggtttttatg

SEQ ID NO: 274170 - DNA, 645 bp, Cannabis indica
ttttttagtttttcatttgtttcgttttattttccttgttctattttacgctttgtttgtttgtcttggttcctttttcaaggtacttgggatgtctcatcgacaagtccttatgaattttgttcaacatgacttggagtccttgtatgaagtatggtggagatacaaggcactcctaatgaggtttccatatcatgggttgtccaaagaatgtcaactagaaatcttcctaaatgggttgaatccaagcacacgaaaatgggtagaaagaggaaatggtaccaccaatttctaccaactatcaattgatgaagcctattggatgttggaagacatggcggagtacaatgagtggtgttgtaattgtccaaacaatgaccatgtttgggaggacaactacaacaatttggagccaaattttgacacttacactcaagtaccaaatgatgagaaattgaaggattttcaagagttcaacataaaagaagagcctcatcaaatggttcaaccaagctcacttgaggcattgatgatggagttcatggcgaaaaatgatgccttaattcaaagccaagcttcatccttgaagaaattggagaatcaatttgagcttttggtcaatgagttgtatgctaaaccccatga

SEQ ID NO: 274171 - DNA, 461 bp, Cannabis indica
  modified_base (375)..(375): a, c, t, g, unknown or other
tcaagaggcaaaaaaactaagtttttcgtatcactggatatcgtgtctaccgcccctatcatgcgtttgctgacatagtacacgggatgctgagtcttttcctcttcccggacaaaggctgcgctaaccgcattctcggagacggccaagtatagtaacaagtcttctccgaggacgggttttggtaggatgggaggtttagccatgtgttcttttgattttttgaatgcctcctcgcattcttcggtccattcgaatttttggcatttcttcaggatgttgaagaagggaatgcacttgtctgtggatcgggaaataaaacggctcagggcggcgacctttccagttggctttgcacatcttgtgcttctgggngaaggcatgttaggaggcttgaattttttctgggtttgcctctatcccccgctggctgacataaaatcccagaaactttcctgatt

SEQ ID NO: 274172 - DNA, 560 bp, Cannabis indica
acggccagtatagtaatcttctccgaggacgggttttggtaggatgggaggtttagccatgtgttcttttgattttttgaatgcctcctcgcattcttcggtccattcgaatttttggcatttcttcaggatgttgaagaagggaatgcacttgtctgtggatcgggaaataaaacggctcagggcggcgacctttccagttaggctttgcacatctttgtgcttcttgggagaaggcatgtttaggagggcttgaattttttctgggtttgcctctatcccccgctggctgacaataaatcccagaaactttcctgatttaacctcgaaagtgcacttcttctggttaagtttcattccatatctctgaaccacttcaaagcattcctcgaggtcatctgcgtggcttgcacatgcttttgacttgaccaacatgtcatccacgtacacctctatgcttcgtcctataaggcctttaaacatccggttaaccatttgttgatatgtggcaccagcgttttttagcccgaaaggcatgactaggtagcagtataccccct

SEQ ID NO: 274173 - DNA, 550 bp, Cannabis indica
agtttccacgctaacaaaatacctcccgcattacccacagctggaacagtaatattaaagtaaaaatgaagggattttagcatacgtaccaaagaagaagcatccacttttagttcggtcagaaaaatgacatccggcgagcgcgaccgaattagggacttcagctcacgaactgtagaggtctgccctaaccctctacagttccaagcaatgcctctcatggctcctgtggaggagtagaattctcctccacaggggtatgagagtgagccgacccaaaagaaccagagtcttcaatcacaaaagtgccctccattggtcttgatgaaatcacattcttgccttttgtcttccactcgtccgggcccgtaaaatcattattagagagggaagcctcttctgagggctcctctttcgactccatagtatcattagcgcaatcctttgaatcccagggaaaatcacggatagcccaaggatgaggacgaaggagcttccgaaggacgagaacaaagcgaagcggtagtctcatcgaaacttttctcttttt

SEQ ID NO: 274174 - DNA, 516 bp, Cannabis indica
tacacatctcaatcttcttctctctcaacaagcaaacaagtaaacatagtacaaaaatttatgtaggatttgtaaaattaaatattggagaaaacattttctagtttaaatattttactaatcacctgtttacttaccagcaccaaacaaaaaattcaagcactaaatgtaatagaataattcttagaataagaacaaagagctaaaaaaataaagctactcattttttttttctttttctaaccataaaatcaaacaacttaatttttttttccttaactctaaaaaaaaaaactcatcaaagagtgttagagtgaaatatcaccaatgacccttataatttaataaatttctattgttggtgtaaggataaagtagtaatttaaacaaaataagtaagtttctaaaaataacttttaattctttaatactattggttagaattattattccctattattaaaaaaaatatattaattttttttaaaaaaatacttgttggtaacctgctatagg

SEQ ID NO: 274175 - DNA, 702 bp, Cannabis indica
gcgcccttcagtgtttttattattttttctttttcctccggatccaggttcttccctagccggagtactttggtggagtcgaggtcgcacactgatacttcctcgacgtcctccattggttccacgattctttcagaccctatacgggggtccaactcattctcttcagccacttctggctcagctgattcccggaccattagcacgggcaggtgggttgcgacattgtaacattgtctcgcttccccctgatttcccttcacagttccgattccggcctcccgggtagggaactttaggcacagatgccgaatcgatgtgactgcgccaaagtccaccaaggccggtcggccgaggatcgcgttgtaggctgttggacagtccactaccacgaaagtgcagtatttgaatgtgctctggggggtgtccgggcaccgggtgactgggagccttacttttcccattgggataagtgtcgtcccgttaaaccctgtgagctgggacccactgggtgagaggtcccggtccgtcaagcctatcgcggtgaaggcttctttgaagagtatgttcacggaactcccgtagtcaattaagactctggccaccactttattcgcgatgggggtctcaatgaccaatgggtcatgatgagggaagcataccgtcttggcgtcttcttccgtgaacgtgatgggttggtcc

SEQ ID NO: 274176 - DNA, 491 bp, Cannabis indica
taaatctaactaacatgcatccaaatcagttcaaacctacttaaacatgcatattataacctctgaaaactacagcaagcatcaacaactagtgcagcaacagatttcatcattttctttaaaaaccatagttttgagtttaaaattctatatattgataaaaccaactaatcaccaacacaatcatgcttgaatcaacaatttaaatcatgttctaacatcaaaaatcaactgcaacatacagcagcaagtacaacaacaaaactaagcatgcaaccaacttttacttgatttttcaagaaactaaatgtgactgtcagtagtcccgtgatccgtaaggggaaacaccgggtaagcagtgcaatcccacaccgcctggggaaggtcaactgggatgattctgagactgtgtaggtatgggactacacagttgaagagggcttaaatggattgattggtactacctatatcaacaaggtgcatcttgtttt

SEQ ID NO: 274177 - DNA, 733 bp, Cannabis indica
ctcggttcgggtttaggtctctgtctgggtttttatctgggttcgggcttggctttagttccttgtctagtcctagtcctagttcggttctagttccttttgcaattttgagttcgagtttgggtttgagttcgggtcggagttcgagtcctggtctgagtttgggttcgggtccggatttcagtctaggtccagatcagcctccgggtgtgggttcgcgtcctcgttcttggtctaggtttggtccgagtgccaagttccaaacccgatctgagtctggattcagttcttggtttaagtccttggttctggtcgtggtctgggttcgagtttgggtccgggtctgagtctagcgtttggtcttattctaggtagtgtgggtgtttgagttggggtccgagtctgtgtccaggtttgtgaataggtctagaccccgatctgggtctaggttcgggtccaggtccaagttcgggtcccgcgtgcgggtccaagtttttgtccggctcaggatctcggtccaggtccgcgtctcaattccggtgtgggtacacgaccgtgtccgtgcccgagttccagtctcagtttgggtctgaggctacgtctgtgttcggttctaagtctgggttcgggtccttgtcacggtcctagtcttgttctagggtcctggttcggcgattcttattcaggttcaagtttttgctcccaggtctaggtctgggttcgggtttggttc

SEQ ID NO: 274178 - DNA, 615 bp, Cannabis indica
atcggcctcccttctgaagatcctaacctgcatctctctaacttcatggaactttgtgaaacttttaaagttaatggagttagtgatgatgccattcgactgagactgttcccattctctcttagagaacgagccaagagttggctaaactccttgccacccaactctattgccacctggaatgatctggcaacgaaattcttgtcaaagttctttcctccagccaagtctgcaaagctgagaggagaaatcaataacttctgccaacaagataatgaatctctccatgaggcttgggagaggtttaaagatctgatcagaaagtgccctcatcatggttagagaagtggatgctggtccacaacttctacaatgggttggtaggaaacactagaactctaatagatgcagcagctggtggagcctttatgagaaagagtgctaatgaggcttatgatctattggaggagatggctctaaacaatcagcagtggccaactgaaaggagtcaatcaaagaaggtagctggtgtgttagaggttgatgccatcacaaagttgacagctcaggttgaggcattgacaaagataattgcagggcaagctaaacaagccc

SEQ ID NO: 274179 - DNA, 801 bp, Cannabis indica
gatctctgttggctcaacagaaattctaagggttcttgaagaccctattgaatggccagacaacacttcaaaaatacaacaagaagagctgttagaaacagctactgggatcataattttcaacctttctgatgccattatcagattggttgataaagaagaaactcctgccaagatttggaagaaacttgaagaacagtttcaacaaaagtctctaactaataagatctacctaaaggagagaatctttgggttcaagatgagtcatactaaaaccctagatcagaatcttgatgagtttctcagaatgcatattgaattggcaaattcaggagagaatgaagctctaagtgatgaaaatcaggcaataatcattttgaattcattgcctgattcatacagagaggtaaagacagcaatcaagtatggaaggacttcaatcacacttgatgaagtcatttctgccctaaaatctaaagacttagagatgaagagtgagaaatccaattctggacatggtgaaataaacctaagtagaggaaggccatctcacaagaaaccctaccagaacagaggtagaagtaatagcacacatcatcacagaaactcaaacagagggaagagtagatcaccatcaagagattctggtgattctacaggttgtttctattgtggaaaaactggacactacaagaaagactgctatttctacaacaataaatacaagaacaagaaaggaggcagattcccagaaagaacagatcaaaacaaacatcaaaatgacaaacagcaagaagctaa

SEQ ID NO: 274180 - DNA, 541 bp, Cannabis indica
agagtgcaattctaagttctgagagtggattcaacgaagaattaataagtaggaatttacttagtaaattcgattacattctccgggatggtgtttcatacaacgtgggcactcagggtaagaataaccctggcatcctcctttggcttgaaaccttcgaaaccgcttatcctgtcttgaacccactactgatgacgtagatttccctttccgctcaatcagggagctcctaccactaccatcataacctgggatcaggcaggtgatatcctgaccctctgccataatctcctgaggtctcacaataatttcctcagggctttcagcctaagaagcgttctccatatttgaatctccttgaaagactgaagattcatggatccaaatcttttcatgcaatgattccacttgattaccagccattccatgcttcgctggtaataccgattcagaaatgattggcatttgtggtaaagatactacaggaaacctttgttgcttcaacctctggatctcttcttcatgtcgttgaatcacagct

SEQ ID NO: 274181 - DNA, 676 bp, Cannabis indica
gattgggcattttgctgatgagtacttcatggtggatggcacaggaatcactcgcactcggttccagcagattctgacatatcaccgccctcccctcactcttgctctccgggatagagcttaaaggcttgctcgactgccaggggaagaccggaatatcatcaagttgacctccgaggataactttttgaagtacgggctctatccaaaggacttcattcccaaaccaatgaacgggagaaagaggaaatctgatgctggacgggttgaacgagctcatccggagaatgagctgattcaactgaagcgcgaggctaagttgaagggaggtgcaagggcaaagccgtatgctcaagagcccttgaatcctgaagatgaggctgaggaagagcaggtgactccgctcacgaggaggaagaaacttctgatcccgcccaggcttgttgaacatgcgcactactacaaattacactattcacgtcaatcaacgctactattcacagcgttgaccgacgtgaatagtgcccaagttataagatgcgtctgtttaaaaatgacagtaataatatctaattagcgtcgtttgataaaaagaggctaaaagtaaaactgacgtaataaagtgaattttttttttaaaaaaaaacttattatcatttagcgtcggttattaatt

SEQ ID NO: 274182 - DNA, 991 bp, Cannabis indica
atcttggaagaattataggaagagaatccttcataaaaatgaggattactctttggaagaaatccaaaaacatattcgaatcgaggaggaatcgatatgtagggataagcttgtggaggggtctaatgaagagacttccaaagcaaatgcaacttccaaagttcctaataagaacaagggaaagaccaaaaagggtaataacttgggtccaaagtctaaaccaaaccaattcaaaggtggaaaaggtccatgttttgtgtgtggcaaacttggacactatgctaaggattgtaagcatagaaaagactttaagggacccaaagtaaatgctatcgaggaggatatcattgctactcttagtgaggtgaattccgtgcaagggaaagtgaagggatggtggtatgatacatgtgccaccgttcatgtcacatatgacaaatcattgttcaagacctttgaagagtcaaagggtaaccatgagatccaaatgggcaatgaggtcaaatcaaaggtactaggcaaaggtaccattgatgtgtttttcacctccggtaagaaagtcacattggtgaatgtgctttatgtgcccgacatgaatagaaacttgattagtggtgacttacttggaaagcccggcattaaggccgtttatgaatccggtaagctcatacttaccaagtctaatgtatttttgggcaaggggtactcttgtgagggaatggtgaaattgtgcaccaatgatgtaacttttaatgttagcaataataaagcttctagttccacttatatgattgagcatgattctttatttttgtggcatcttagattagctcatatgggtttttctactatgaaaagagttaaaaaaatgtggtatgattgattgtgatataagaaattatggtaaatgtgaaacttgtgtaaaagcaaagatgattaaaaaaccttttccaaatgttgaaagaaattcaaaattgttagatttaattca

SEQ ID NO: 274183 - DNA, 603 bp, Cannabis indica
atatatatattataatacaaatatagaaatatacagttataggctatatttgcagtacacacgttaaagtatgatcatacatacatacatatacatatatatttatatatatatatatagggaccggattttgtcccgttactgtacggacacggattgcaatccgtgatgtactgtaaccgtcggatgggcagttactttgatccaaaggttggggttcatgtaggggttgatgtaggggtatgtagggttaaataaatggataccggctacttttttgaaatttaaatttattaaaaaatggaaaagtgaacagttacatccatcaatcaagtcctatcaacctatcaaccgtcgtccctctccactcactataccatttcattgttatttttattttgttgtttattttgcaaagttctttcatttccattttcgtctctgctagggcaaaagcaaagttctttcatttccattttctttttcattttccattttgtttttccattttccattttcatttgagttggtgaaacccatactgtacattttgttcactgtggtgtacattactcgaagtctgccattgttggagttgttaca

SEQ ID NO: 274184 - DNA, 686 bp, Cannabis indica
aatgtacacggtactctatataatgtacttaatccatcccacaaatacatatgatcttatgaatgaaggaaaataccaaaatagccttaatccgacacatggacccactgcctacagtgttttcgtaccatcaactgccaggaacagtgaagagtgatgtacctttttgtactctaactaacacaaacagtaccattttgtactttttccgtacctaattattttataattaaaaaataaaatcccaaccggtaaccacacctacaacaaccggttaccacttacattttaaaattaaaaacatttaaaagtacggtggggcccccctgccgtacaacggattccaatccgtgttttgcatatatgggcacaaaatcggctgcctatatatatattaacgtatgtaggagggaaaaggaaaggatttaagtggaacgtgatggcagctacacatatatatgtcgtgaatcccatgtctttaattatctcatcactttctcatcataattagaggtgttcacaaagtatccgatccaatccaattcgcacgatccaatccaatccaatctgcaaaatacggatatctgcacttgtgcggattggattggattgaaaaatctaaaatccgcacttgtgcggattggatgttgtttgacctcaaaaataaccgatccaatccaatccgc

SEQ ID NO: 274185 - DNA, 525 bp, Cannabis indica
ctcaaaacttaggatatgcattgcattggctacatacttcctcagcatggaaacatgaaatacattatgtacagctgacaatgatggaggtaaggctaatcgataagcaacctgcccaaccctttcaagtatttcaaaaggtccaataaatctaggacttaacttgcctttcttcccaaagcgcctgattcctttcattggggacactcgaagaaagacatggtctccaggttggaatgtaatatcccggcgcttaggatctgcatagctcttctgcctactctaggaagcaagcattcgagctttaatcttgtctattgcttcacttgttttctggaccaactcagggcccaagtatgttcgttctcctgtttcatcccaatggattggcgatcgacactttctaccataaagtagctcataaggagccattcctatggtactttgataactattattgtaggagaattcaatcagaggcaaatacttgctccatgacccaccaaaatgttggaaattatttta

SEQ ID NO: 274186 - DNA, 630 bp, Cannabis indica
ctttaacttggtacccatagccttctgaagactcacccaaaacttcaatgtaaactttggatctatgtctgacacaatagatttaggggctccatggagacgaactatctcctttacatacagttcagcgtactgatctacgaaatatgtaactttcactggcagaaagtgagctgattttgtgaatctgtccactatgacccataccgaatcatacatccccgtggttttaggcaatccagttacaaaatccattgcaatgttctcccacttccattcaggaaggactaaaggttgcaataaccctaccagccttgatttgctggtaggttaaacatttggacatgtagtccactacatctcttttcatcccataccaccagaagtagggcttcaaatcctgatacattttggtggttcccggatgcagtgaataaggtgtggtgtgagcttcatccagtatctctttcttaagctcatcaataccaggtacacaaactcaagccttgtacaacaacattccattattcgagactgaaaagtctttaggccgaccagccataacctcatctcgaaccttaaatagctcgggatcttctatttgtgcctttctgattctctccaacagat

SEQ ID NO: 274187 - DNA, 747 bp, Cannabis indica
aataaaatggattacattgaattggagttttatttagggcataaaacccaacaaactcctcatgtcgatccattggtaattaccatacaactcgctaataaaaggatcaagagggtattaatagaaaatgggagctcggtaaatatcctttataaagagactctacggaaaatggggcacgaaaaagccaaattaagaccttatatggtaaacctttacggattcaccggggacagcattgccagtctaggcagaatcgagctcgcattaaccttaggcgaggcaccctaatctgctactgttatgcaagacttcttagttgtcgacctgccatcgccttatagcatattgttgggtcgtccaacactgatcggactaggggtagtcagttcgatcaagcacctatccttgaaattccaaacaccagatggcgtgggagtggtgcatggcgaccagatgctggctctcgattgctatcgcatagagctgcagcataggaaagccggtcatcagttgatggaaatcttggtagaagaaactgaaaagaaagacgaagatcttaacccccgagttcaagatgagagaaaccttttaaaaccaatcgaggaattagaagaggttattctcgatccaggaaatcccacaaagtgtgtatacattgggaagaacctggacgagcaactcaaatagcagttgtaacaccctaatctatagggatgtcacgtgtgtgattttataaactagttt

SEQ ID NO: 274188 - DNA, 656 bp, Cannabis indica
gatgcgctaaccgtctggcgggctgcctcagttgttgtaacctgttgctccaaggtggtgggctgtctaccatcaccggaggaggggaggttaaccccttgagctgtctgcccattgtctgaaattgtctgggcttctggtgtcgttaaggttacctgtccacctgcattaatagaagagtttggtgtattagtgacaatggttggagtttgttggttccttaccaaggctggcggatccatctgactcgatccgccaatagaggagttgggagtgaggctccccaaggactgcatcggactgattggaactcgaaagcgggatggaggtggcggagggtcggtcatgttctgggatgacaaggtctccatcctcaccaacaggtctgcgttttcagcttgcagcttttctagttgctcacggtctttagccgcttgctctcgatctttggctgcttgctctcgctccttggctgcctcggcagtgaggatagcgatctgggaagctaggtctggagtctcagttacgtcggccatggtgctcaaggtgaacctttggagtctttgtcgaatgaacgattgctaggttcccacagacggcgccaaattgtagagggtgaaatctacaatacggaatttgggcaccagcaacctgtc

SEQ ID NO: 274189 - DNA, 566 bp, Cannabis indica
aaatccaatgtattttgaaataatacatttttcgaaatcacttaaaataaaataaaattaaactggaaaaattattttaatttatgttgatctaaaattaaataaattaattttcaacataaatataattttcccataaaattaaacctcttaagaaaaatatcaaatatttaagtgtcttgaacaaaatcaacttaaatattaattttctatttaattataaatatctagaaaaataataaaaagtctacctagaaaataactatatagataattcataaactaattacttattttctaattaaaacaatatattttattctatttattttaaataaataattaatgaaaattacttgatttaagttgatctaaaattaattaacaaatgaattttcaactttaatctaattttcaaaattaataaaatttcaaaatatcaacatttagataaatgtatttcgaaattgtcaaagaaatgattcttaaaataaaataaaatatactatgaaaattattctaatttaagttgatttgaaattaaaaaatttctaccttaaatataa

SEQ ID NO: 274190 - DNA, 639 bp, Cannabis indica
agttccccagtgttgaggtaggtcgctattggcgtcatccaatttggggaagtatcaatcattccgatctcttccatgccagtgatgctaggttctttgaggaattggataggaaccgaattcgctctatcacttacattactactcgcaagccaagctaacgcgtcagcagtcgtgttttttcttcccttggaatttgtctaagagcgtagcttttgaactatgcgagcagatcgtgtattttgcacaaatatgctatcatcttttctccctgagcctcgtattctccagatacgtgatgtacaactagctgtgaatcactatagatttcgatatgttcggctttcatatctcgggctagttttagaccagcaatcaaagcttcatattcggcctcattattggatgctttaaatccaaacttgactgcagcgtgcaggtgttgcccccaggtgtgacaagggcaattcctgcactagatagttgatctgtagccgacccgtccacatgtagtttccaagtcagcttgtcttcactgttacttggctgagatatttgtactggctcggggttgccttccgatatgctttctttcatgcctgtgcattctactacaaagtctgctaaggcctggccttt

SEQ ID NO: 274191 - DNA, 781 bp, Cannabis indica
agagagaaaaaattctcagaccaagaaaacacttttgaacactttgcaaatttcccagtccatcttcgttcactactgtcaatccttcttatctttgtttgatctacagcagaacccccagtctcaacacttcactgtaagtttcttgcaccccttgctttactgttaatgtacatggcatgcttttacttatctgttcgttttttctgggtttggtatttgaagtttctgggaatgcactcttttagatttttcacgtaacaggtctagattcaccatttctggtgttaggactgctcttgtcacgtatttgttactatttttctgcaaaggaccatacgttcttcgtatactggtcgtctagggcatagaggagactgctttttctcgattttctgccctttctttttctttaatgcgcaatgtcgtcttctgtgaatttattgcacccgactcttgtccaggaaatccttctagggtttcctatttggcagatgtccggagggggcctctttccagcggttaggggacccccattccctttttcttggtttagggtttggtatggggcctaactgctggaatcttaactcttttttcagaatcaaaacatgtctgcatctggttcaaagtcgtccaagaagagtggtaagcgtctagctaccctcgaagatgtctccctgggtcccgttgcccaggaggggtataagtctcgggccaccggatgggaggcggcagagcttcactccaccctaacctgcccccaccagctggagaacat

SEQ ID NO: 274192 - DNA, 603 bp, Cannabis indica
tatgacgtgggggcttatgccggtcatgtcttcttgacaccacgcaaaaacatccgtggcgcccctcagtgtctttattattttttctttttcctccggctctaggctctttcctagccggaggactttggtggagtcgaggtcgcacactgacacttcctcgacgtcctccatgggttctacaatttttttggatcccacacggggatccaactcatcttcttccgccatttctggctcaataatttcacggaccattaggacgggtaggtgggcagcaacgttgtaacactgcctggcctccccttggttccctctcacggttcctattccagcctcttgagtagggaattttaagcataagtgcctaattgacgtgactgcaccaaagtccaccagggccggtcggccgaggattgcattataagctgttgggcagtccaccaccacaaatgtgcagtatttgaaagtgctttaaggtctgtctgggcacaaggtgattgggagcctcacttttcccattgggataagcattgttccattaaaccccgtgagctgggaaccgcttcgtgaaagatctcggtccgtcaggcctattgtgtg

SEQ ID NO: 274193 - DNA, 815 bp, Cannabis indica
ttgagcctttcaagcctaccatgaaatgattatccttagttaaccctcttgagcctaaacttgttttgttcttcacctgttgaaccgaaatatgtatccacactgttaattttgtcctcactattttatcaatgatatcataagctatataattagtttgggggagcaaaatgcatggtgtgagagaagatagaaaaaaaaaacttgcaagattgagaaaaaagagatatgttgtaagatcaatatcactaaaaaaaaaaaaaaaaaaataatagaaaaaaaaacatgattcaagaaaaataataaaattcagtgatgttgggaaaagaaagaaaaaattttctcaatcatggttagttgtgggaacactttgggaaatttgaaattagaagaagcttgtgggttatttttgtgcttatgatatctttagccaaaattgtttttcattttccaaatatctaagccatactttctaaacctcaaaaagccctattgattctgaaaggatgttgtcaacattagtggagagaggtaagcatgcaagcatatgagttatcgggtagtggaatggttggaaagagtaaaaccattataacattgtttcgattgtgaagtcatcttgtgtttgtgcagtatgtgacaaactgagcatctaaattaattgttagagttggtggaattgaaattctagtttgagcaatggaagagaacagcacatgagcagtagtattgtgattatcttatagcgtagttagtagattagtagttagtagtatttatcttactcgagggcgagtaagaatctagtttggggg

SEQ ID NO: 274194 - DNA, 547 bp, Cannabis indica
atttgggcatgaaatagatatttgaactgatttagtttgtatttattggtgatgatataaatatatataatttgacttttcttatcttttcatttgttttcatttctcttaaattacacaccaaaattatgtaatttgcatgtggatcttttgtcaaaatagaatggtcttacttttcttttttcttttaaataagttgaaaaataaccgatccaaatcaacaacaatttcatcagctcgagtaaattttcaagcaagattgaatttttgttcgcgaaactatttaatattcacataatttatcatcgtatattaacaaggttcacttgatgagtaattaacaatttcactcatgtcatcataaattaattaattaataagatatttaataataatagagggcaagaaacaagattggtttctgaggaaacaattatgtaatttgcatgtggatcttttgtcaaaataaaatataaatacacacatcagaattaatgtttttgatgaaaagtattttataaacatttcctctcttgtaatcatgaga

SEQ ID NO: 274195 - DNA, 100 bp, Cannabis indica
tttaggagcctgtaatccgccgctcagctaaagttccagtcaggtattagttatgtatattggcttcgaaccatccaaccctgtcacgtcggtacaggct

SEQ ID NO: 274196 - DNA, 376 bp, Cannabis indica
gccccattagtattttgtcttgtgtgattttatgaaatggaaaataagtgtttaattgattatttgttggctgaaataaaatgtgatatgtggcttatattccttttttcacaaaaattcttcacttagttaaaattagaaagaaaagtccaaattcactcactctcatttctctctcattttcggccaagcttagggagcagctagggctggatttccttgttgaattcaagttattttagcaagatctaagtaatcctagacaaggtaaaccttgctctagcttctctacatgttctttgaaattttggatgagttttaatgtgatgcatgcttgattctttgattttgttgctgctgaaatattgttgttgtt

SEQ ID NO: 274197 - DNA, 620 bp, Cannabis indica
tgcgtttagcaagtgaattcaattctgcttgaattgcttctttccattttggccaatcttttctattttgacattcttgatagatttaggttcaagatcctcgttttcattcataatttctagcgctacattataagcaaaaatattgtcgacaattacttcgagtcggttccattcttttcctgtattgacataatttattgagatctcattattgctaatattttcaggtacctgaatctcttcaagagatttgtttatgtcaacatcttcctcgaaattttcagcctcttcattagggccatcttgattatttgctccctttctttttcgaggatttttatctttggaaccgactggtctaccacgtttcaaacgtgctttagaatcattaattaattgtccttctgggacttcaattcgaattggagcattttcagctggaatatgtgattttgtaattttctttgggtcagtgaatgcatttggtaattgatttgcaatattttgcaaatgaattattctttgaacttcaagttcacattgatttgtacgaggatcaaattgagataatgattgtgcattccatataatttctttttccagctgtttcttttccc

SEQ ID NO: 274198 - DNA, 641 bp, Cannabis indica
aataaactgtcaatttatattttccatgaaataattctttaacaaaatgtaaaatttaaatttttatttaataaaacaaaatgttcaaccaataaattttgctcaacacaaactctaaaatggtatatatttatcctagatttaggtataaaaaaatgttaatggtgaatttctatcaaaagtagtataaatcaaagaaaaatattactacataccactattagaatattttaatactttgtctcatatattttaatttaataaaattataatggctaatcaattataaagtgttatatcagtaatcaaaacaaaaaaaaaactttgaaaaacctattttgccatttaatttttttttactaagcgattgttttttttttttgaaggaaaatggtaaactttattagaatgaactttcaaccattacaatagataaaagatcagcaggagcagtactctcactgaaaatacgatctgaatacaaacaagagctacgagcaagacagtgtgcagctttgtttacagaacgtttaacaaaattaatagtgactaaaggtaaggaagccaacaatgtacgacaagcagacacatgttgaccaaaaggagatggaatgaataccgaacctcgaactgcttgaaca

SEQ ID NO: 274199 - DNA, 588 bp, Cannabis indica
gatactctgctacaaaaaggatatgagggttagagaactgagtggaaggagacattatattctgctgcaaccactgtaaggtttctaatactttatatatgtttatttcatatcgttttagaagttcatatttaggatgttaataacatacttgttagtaaatttagatcctggtaaaataattccaacaaggagtccttgggcgacgagggagattgttcaggcagtatcgaatggggcatgatagaagcgttggcacgttaacttggtgttggcatcttgccacacatgctaccttggtcacgagtgacaaggtgagcgtcagtgttgggatttgccttatcatagtgggaacctatggacagtgcgagtattttggctagagagcctcaatgcaaggatgcaatcatggatgcttgcgagcatgactcgacgggagttgttccagagacggaattgtgcacgaggcacacggtcgcgcaaaaaatgagcccattgttactcggatggttgtaaggctgaccttggcttagagaagtcaaggtgccgcacgggtgttctgctgcctgaaaaggtgagcctgtgaca

SEQ ID NO: 274200 - DNA, 638 bp, Cannabis indica
tcctgttcagaagatcaccgctcctcgtcgtagtgggagggttctacaaaaccttcttgttatggcttggatggtgaaatcaatagggtcattggtgacggtattgaagacgacccattaacctataaacaggcaatggaaagtccgcaacggaagcgatggtcagccggcatggattcagaagttccatgaaaaagaacaaagtctgggaatatgtagatccacccgatgactatcgtccaatcggatgcaaatgggtctacaagaagaaaagaggcgctggaggcgaagtcgaaacttttaaagctagactggtcgccaagggttatacccaaagagaaggtgtggactatgaggaaacttttagtcctgtcgccatgctcaaatccatccgaattcttctctccatcgcagccgctttcgactatgaaatctggcaaatggatgtcaagacagccttccttaatgggcttcttgaagaaaccatctatatggagcaaccagaaggctatgttcttccagggcaggaaaataaagtttgcaaattaaataggtctatttatggacttaagcaagcttctcgctcatggaataaaggtttgatgagatcattaaaacctacggctttcatcagaatg

SEQ ID NO: 274201 - DNA, 552 bp, Cannabis indica
ttcctctctagcctctctctctctctctttcggcctccttgagcagcaaggatccttgccatttttcttggatttcaagttaattttagcaagagttagtgatcacaagttgttggtatgtttcctttagctttctttttaattttatgaagttttgagaaagtttgatagttgcatgtttaagaaatggtggctgtggttaattgttgttgcattcagagatttatatgtgtttaattgagtgaattcatgctagttgtgttgttagttgatgggatttaaccttgtgtagagattttaactcaaaactatggtttttcaaagtgaaaatgtgaaattagttgctgtagagattgttggtgcttgagttcattttctgcagttttattatgcatgtttatgtagtttgaatcaagttttgatgcttgtgagttagatttaaccaagtttgagttttgaactcaaagcttggagctttaatgttggattttgattttatggatgaaactttgttttatcacttggaaaatgtttattagggtctaattagca

SEQ ID NO: 274202 - DNA, 575 bp, Cannabis indica
aatgtcgccagatcttcaatgcaaaaactaccgcggccaactctagatcatgagtcgggtatcgctgttcataatcctttaattgccgagaggcataagagataacccgatcggcttgcatcagcacacatccgagaccttgtctggatgcatcgcaataaactacaaacttctctttgtctgaaggcaaagctaacactggagttgtaattaacctctgtttcagctcttgaaagctagcttcgcacttgtctgaccaaacaaaccgccgattcttcttcgtaagttcggttaagggtgttgaaatcttagaaaacccttccacgaacctacgataataatcggctaatcccaagaagcttctaacttctgtcactgtcttcggtcttggccaatccctgacggattcgattttccctggatccaccttgatcccatttttgctaacaatgtgccctaagaaagacacttgagatagccaaaattcacatttcttgaatttggcataaagcttgtgttcccgaagccgttgcaaaaccatctgaagatgtaactcatgctcctcttctgattga

SEQ ID NO: 274203 - DNA, 620 bp, Cannabis indica
cacgatgggcatgcaaatcataattcctctcactttcaaacttacgggttgcatatagattccagtcacgctcattgtctcgataataaaaacgaggacagccagaaagagaggaagggatattaccagatgaaggatcttccatgggctgcttgcctttggcagcagcagaggcctttgctgcagaagcagtttttgaacgaggaggctctggctcgagttctgtgtcctcactgtccttctcagtatgcagagatactgatttgtctgaagagacttccattggatcctcttcttctgaactggaactcgatgaagccgagggaggattagtcttgagtttcttcttggctggagggacagtcttctctcgagattgagaggctcgaagttctttctcagccgaggcttgctgggctcgagttcgagtggaagggcctgttggagtggagccaggcattgatgcagcaggaggtggaacagccaatggaggaggagattcctttgaggattcagacgaggaagtccaggtgcgatagggccttaccgatttgcgagcaacttgcttgggtggacgttttggcttctcggcttgagattcacgctggggaagcgatgaa

SEQ ID NO: 274204 - DNA, 596 bp, Cannabis indica
gccttattttttagcttgctgctgaggccggccttctccccaagaacataatcaatcatggcttcgtcctgtctgattttggggacatggacgaagtcaggaagattcttcaggatcttactgctgagaggcagctttatcaagaggctgctgagcgccgggaggccgctgccaaagctaatgaggaagaggctaagcggagggaagcctaggcgggaggccctgcggagagacaggctggaggccaagcaccaggaggagctgagggcggaaggcgaggccactgcaaaagccaggcaggagcttcgggaggccagggaagccttagatgagatggctgccaaggtgagatccttagaggaaactcaccaggcaaacttagactccagggccactctggccgcggagctgaaggagctcagggacttcaaggaacaagcctcaaagaaggcaaaaagggctgagcttctttctcccgtttcctgcggccggtgcaccaagcgttttgacgatggcgtcttcatggcttggtctactaatgaccagaatatcaagcttaccttctaccccaaacctgaggagatgatcgccaaatt

SEQ ID NO: 274205 - DNA, 687 bp, Cannabis indica
actaagaaatgcatgtaatgaacaaactaaataataaagggatatatgaacttcccttaactagacttatctaatcctatttcctttcctatagaaactggaaaataagttacgagtacaagctcaagtaccaactttattgctttttcacaaggataatacctccgtttacattggatcttatgttacaattatcttcaaattattgccaggattgtcttgatgatgtttcaatttgcaattttgtaggtggtttactattctattctgttttgttgataaaagatcttgaaaaaggaaaaggaaagaaagaaatacctctccgtcagatccccttacagtgagacgatacacaacagtgacagagccgttgtcagagaatataacatcacgtatttctccacaccaacctgcaaagccatcatcaaagaaagatgatatcaatttgaaaacacacacacacacacacacacatatatatatatagctaaatggaatcccaaattcccaatcacataagtgcaaaccaaaacaaccctaacctacacagagagactgagagagagagatcgagagagagaacgcaagagaaaagagagggaaagagagagacttacggaggtacggaaaattgccggttcgaaatcacagagagcttcagaccttcgaaatcgcaagagagaaaga

SEQ ID NO: 274206 - DNA, 428 bp, Cannabis indica
gccgaggcaaccgcgaacacgacagtaccgccaatccccacatggagagtatttatggacgaagcctccaatgaaaatgggtccggagccggagtggcaatgatatcaccaaccggactgcgactccaggcggccctacggttcgacttcacagcttcgaacaatgaggccgaatatgaagccctaatagcagggctgaaattagcaaaagccgtaggagccaaaagagtggaagtctacagtgattcccagctggtcgtaaaccagatatcgggagaataccaaacacgcggcgagcgaatggccgcgtatgtaacaatagtccgggagctgctccacgagttcacgcactacaaaatagaaagaatcccccaggaaaagaacgctcacgcggactgtctggctaagttagcttcagatagtgaaat

SEQ ID NO: 274207 - DNA, 877 bp, Cannabis indica
acaaaaccgatcaagccgttcctgcacatgcgcaacaccttgccttttattaagccatgtaaaacattgcccctcgaaccccatatcaaccaatgaacaactatctagagtctgttggaaatcattcatagcagaaaaactacgatcagcaccgcccttcttctcattgatggagaggatttcattaaagtcacccccacaaatccaaggaagatcaaaaagatccttaaggcgccccaacaatctccaagaatcggacctctcactagctttaggattcccataaaaccccgtaaacctccataaccttctacccggacattgcaccaaagcatcaatatggcccaccgaaaacgactttaccgacacctcccagtcctcattccacaatagtaacaaaccaccactcttccccacacaatcaacatgaaaactattctgaaaattaacatgtcgccttataccttccgcccaaccaccataaagtttagtttcagataaaaaaactaaacttggggaaaacttacgaacaatcgttcgcaaggcagtcaacgcaccgggattccccaatccccgggcgttccaacatagcagactcatggctcttggcgagcctgctccgcaggcttcgccaataacatattcatatcttccggacccatgtccacttgctcacccaatcttccttttttcacactttcggtagcaccctctacatccattttgcgcttcccaccaccattgaccttcggactcaacttgtatttagcattagcaaccataacatgtgataatttaggactaatggggaaagaagatggcttggacacacctttagacccacggctagaagaagtgactctcttccaagttttgg

SEQ ID NO: 274208 - DNA, 288 bp, Cannabis indica
tttgtagaaatttgaaaaatgcttaatttgagatattttgacttataattaggataattattatttgtttattattttattcttaaaataataattccctaaccatatctattttaaaattagtttattttgttattctaattttattaaattacaagattagaaaatgatattgaaaatatctatttggttatttccaaatcatttatctgataagatacttaatttaattcgataaaataattcaaataaacttagatattttaaaattagtttaactttaaattt

SEQ ID NO: 274209 - DNA, 450 bp, Cannabis indica
agtattgatcaccctaatggtggcgactatttgtaagacttacaaaagtatgaaacaatggtagaagctcataagatagaatgacattgactctcgcctaaacaggacaacgctggattttcatcttgatcgaatataaggttgctagaatatttttcattttagatgacctgacaaatctattcaatggatgatatctttgcctctcgcctaaacgggacactgatatcagtttaatgaaaatcttgcaaattatttaggattgtatgttttagtattttcacttgtcattcctacttgctaagtgctaataatttctgaatatgattttgtgttaaaccttacttgatttctatttattgttaattgtagtatccagcatgactatgaacaatcccatggtgaaattattgactaataacaagctcaatggagctaactttatcaaat

SEQ ID NO: 274210 - DNA, 722 bp, Cannabis indica
gagaatgcaaccagacagttaaagaaaagttcgagcgttggcagaatgctaacaacaaagctcgatactttatgctgtctagcatggtcgacaccttgaaaacaaggtttgcaaacactctcacgactgtagaaatcatgaaccaattaactgaactgttcgggatggcatcaattcaagctcgctttgaggcgactaagaatttcatcaatgcacggataaaatctcatcagagcgtgcgtgatcaccttctccagatgactagttacttccaggaagctgaggatcatggagctgttatagatcaaacaactcaagtaagtttgatcttgaacagtttgactccagcctttgtgcccttcacttcaaattatatcatgaacaagttttagcttgacttccacgagttaatcaacaaccttcagacatttgaaaatttgattggaggaccacagaaaggaggaactaaagctcctaattctggcacaactaatggtacggctaaggctgaggcaaacattgcctctacttcgaaacccaacaacaagaagaagtggaagaatagcaagaagcctgttcaagctgtgaaaacagttaaaaagaaaaaggctgctaatcccgagggaaagccaaaagaaaaatgcttctattgcaaagaaaagggccactgaaaaccccaatgccctaagtttctagtaaagaaacaacgtatttctttctat

SEQ ID NO: 274211 - DNA, 687 bp, Cannabis indica
tttgattttcaagctgtttttcttcaatctaagtgttcttcaagagcttggtaagacctttgtatcttactctttaagtttctttaaattttgatgaaaaagatgatgttgcatgcatagtttaggttgttgttgttgctgtgatttttattgttgtttgcagagaattaagcatgtttaaatgagttgaattgagctgctagtaatgcatgatagttaggttgattgagttatggtttttctatgcaaaagcttgagttttcaaagtgaaattgtgagttttgttgctgtgtttgttgaggtcgatttcttgtgttttcagaggctattatatgcatgtttaagtaggtttgaactgatttggatgcatgttagttagatttaaccaagtttgagttttgaactcaaagcttggagctttaatggcatttttggtatatgtgtgttctggactgtgtagttgctttagaaatgttctacgggatgtttagaacaggtctggaaggtttgtgatggtttggatttgttttgaaagagttatgaatttttgagttctgcctgcgaggaaccggaattccggttgtgcatccagaattccggatgggttttgaaaatttccagaaccagaattccggttggacaaccggtctgccggttgggtgattttcagaaaccctagatttcctc

SEQ ID NO: 274212 - DNA, 609 bp, Cannabis indica
caggattcttttccctaatttctcatccttgattaaacacctttattgctttctttaattttcttgtttttctttatttcaaaatctatcaaaattatctatctaccaaatagaatcataagtctaatttagtggtattcagttcaattccctgtggttcgacctcacctgcgtgagtttactacttgattacgtgcacttgcgtattgttcataattttcgtaacaagtttttggcgccgttgccggggaattgtttaaaaattgatattgcataaaattagattaaattctactttggttattttttttttgcttattgctaatctttttctcttagattgtcttatttcaggcattggaggtgtatgcgacgtcaaggacaaggtgtcatattgccggttgatcctgatgttgagaagacttgtagaagaaacagaataaacaagaggcaagaaagagtttcagcaactgctgaaacacaagaaatcatggctgagaatgctaatggcggtaacaatggacgcaacaatggtaataatggaggtgccgttgaagatcaaattaatggccgcagtcttagagactacattcttccaactcttacggg

SEQ ID NO: 274213 - DNA, 1129 bp, Cannabis indica
atataattttactaagatatttttgctgaaatgaaaagtaaaatacaagaagttgaatgtgcaatatagaaactagtttagatatatatatatagggcaagactatggtaggacctagcaaaagttccctaccggtagggaactttttttgaccattgattttagatcatgtggttattatgatgtaaggtgtatactcttacgataggactgcttgtatacgattaaaactttatacatattataataatatttaatgatatttattttttaaaaaaataatattaataattaaaaattttattaatttttattttgaattattattatttttgtaaaaaaataatattaataattaaaaatttattaatttttattttgaattattattattattttttaaagttactttgatttattttatattggtatttattttcaaaaaaaattatttttcgaaactcatttttttttcttatttttggccttttatatttactgctagttttttttatgtttacacctagtcttttctttgttttgccctttaggctgtgcgtagttctggtgttattgaccgtttttcagtgatttttatcttgttatttggctgctatttgagacgccacttataaaaaaaaaacttaaattaaattaggtttgattattattttttctggccaatataattgagtttaagagaagaaggttggtacggttccaattaaagagcatctaaaatcattcaagcgatcccacatcaaaagaatttttgaaaataaatattttatataaaaataatttaaatttattttagaaaataataataataattaaaaaattaaaattaataattttttttagatgaattaataaattttttaattattaatattattttatttttaaaataaatatattattaaatatttattataatatggataaagttttaattgtatacaagcagtcttatagtaagagtatataccttacatcataataaccacaagatctaaaatcaacggttaaaataaaagttccctaccggtaggggaacttttgctaggtcctaccatagtattactctataaatatatatatagatctatatatataaatatatata

SEQ ID NO: 274214 - DNA, 867 bp, Cannabis indica
ggacagaagtatgtgaaagagcttttcaagacctaaaagcacagcttgcaaacgcccccgccctttctaaacctctggacggtgaggaactagggatatacctagcggtaacggagcatgacataagcgttgtactaatctgagaagaagacggcgtgcaacatccagtctattacatcagtaaaagactcatcgaggccgaaggtcgatatacgttgatagaaaagctcgcctactgcctcatcctagcaacaagaaagcgaagaccttactttcaagctcatcctattcgggtgtacaccaaccaaccagtatgacaaatactgcaaaagccagatgcctctggacgattactcaagtgggcggtggagttgggtcagtacgaaatcaacttccaacccagaacagctatcaaaggccaaaccttggccgactttgtggtggaatgcacaggaaaaaccgaaagcatcccagaaggcgatctcgagtcaacaccacaaccgagcaacactgaaaacaaaccgacctggaagctacatgtggatggatcagccacagatcagctatccgacgcaggaattgcccttgtcacacttgaggggcaacacctgcatgcagcggtcaaattcggattcaaagcctccaacaatgaggcggaatatgaagccctaatcaatggactcaaactagcgaaggagatgaagtccgagcgcatcgagatctgcagtgattaacagctagtggtaaatcatgtatctggcgaatacgaggctcatggagaaaaaatgatagcatatctgagaaaaatacatgatctactcgcgcaattcaaaagctacagcctcagacaaattctaagagaagaaa

SEQ ID NO: 274215 - DNA, 726 bp, Cannabis indica
aactttaaagacccgaaacataggctaattataacctaacaacctattactatatgttgatgatatgatgatcatcaacaaagacaaggctgaaatacaagttattaagaacaaactcaactctgaatttgaaatgaaggacttgggagcagtcaagaaaattttgggaattgaagtcatgaggaacaagcaagaaggaaagatggtgctaactcagagaagctacattgagaaggtgatcaagaagtttaacttagactcatctaaggccactgcagttccacttgcagggcacttcaagttgtcaaatgagtactgccctaaaactgaaactgaaagggaaaatatgagaggtgtaccatatgctatggctgttggatgtctaatgtatatcatggtcagtaccagacctgatatagcacatgctctaagtgttttgagtaggtttatggcaaaccctgggttagagcattggaatgctgtgaagtggctgattagatacttgaaagggacaatcaagtatggtttgatctatcagaaagacacatctgatgtgaggttagaaggctatgttgatgctgattatgcatcaaatagggacaatagaaggagcaccactgcctatgtattcatggttaacaaaagctgcatatgttggaaatcacaacaacaaccagtggtggcactgtcaactactgaatcagaattcatggccaccactgaagc

SEQ ID NO: 274216 - DNA, 709 bp, Cannabis indica
aaagaaaatcttctcaagagaaacaaaggagtaaatttcaaaccaggacaagcctcaactgatcaaaagggccgaggaattaagtgcagagaatgtgatggatatggtcacattcaggctgagtgtgccaacacactaaaaaagaaaaaggcccttgcagcaacttggagtgatagtgatgaggaaaagaactccacagccagtgaaggatcagatgaggaaaagcaggtactggcattcatggcccaaagctgtaatccagttgagtctgaagatgatgcagtctccacctcatcagaagcagacagcacaggtcgtcaacatgcttatgaagaaatgtttgcacaatgggagtacatgactaaacagatccgtgccctaaagaactctctagagcaagtggagactgaaaaaggaaagttagaagacactgtcaaaaatctcaaccgacttcttgatgaaaaggagaatgagatctataaactcacagctgatctaattcgaaccaagcaagctttacagttcattcccccaggcactgctgctatcaatcaaaccctacagcttcagaagccctatggtgatcgaacttcattaggatataagatgctatataaacaagggaatgacctgtctgttgagcattctttaccctccaatgtcaattcatcaaagaaggaagatgggttacctgacacctcaatcacca

SEQ ID NO: 274217 - DNA, 430 bp, Cannabis indica
ctgtctgttgagcattctttaccctccaatggcaattcatcaaagaaggaagatgggttacctgacacctcaatcaccattaacgaatctgactcatctgagaggagacaggttccaactggacccattaaactcaagtttgaaggaaggaggactgatgctgacaatcttctacagaatgacaatttcattactacatgtcatttctgtaataggagaggccacattcgtcctaagtgttacaaattgcagaactacttgaaagccatgatcaatcgaccaaatagtttccctccaccaaataagtcacatggacgcaaacctcgtcgagagtggaaaataaagtccaaaccaaatcctgatgttggtctggttgcaaacctatccctgtctgcctttgttgaaggtcagtggtacttcgatagtggat

SEQ ID NO: 274218 - DNA, 539 bp, Cannabis indica
tttgctaatcaaagaattttctcaaaaaacgtgtcaaatttaaacttttgtattaaatattaaactttataatataataaaatatttataagtgtcgggatcccatttttttttaaactttgtaaaattaacgatccaaaacatacatttttcataggtcgcacagcgactaacaaaatacaatccccagatgtcccgagaccgaacgctccaggtcgcgccgcttcaacatgtacaatctcatccgagttcaggttcactcctattcagccttcacctttcctttacctacacatgaaagtagaactgtgagtcgacagactcagtaagaaaagcatataacatatcatataacttccgacctgtaactaggcacccatacacctatttacaaggcttaacagatgagcaagaacgttctaaatagctgtgctattgaccatgatatcacccactatcagcactgtgatcgcactgtgggatatcactcttaaccagtactgtgcccgtactgccgaaccgacacaattattgtgccg

SEQ ID NO: 274219 - DNA, 625 bp, Cannabis indica
atttatgaacaccattaaaccaagccacaagatcctaaccttacgaaagagtccttcagaccatataagtctacaaggtcactctaaccattttattttttataatttttaactatcgggtatttaatatctaggttatttaaatatatatataatattatttataaatttctaataagtaaaatgatataatattataataaattttatttttctaagttatgatttataaataataaattatatcataaaataactaatttatgaatttaaaattattatatttaggatatgtatgaaaatatttaggttaattttaaatttattattatttaatttatcatataagataattttaatataatatttcaaattaaaaggataataatatctttcaatttaaaatatatctaatattaaaatatctaatcttattattaaataatttgaaagttttaaaaaattaacaatttttaaaaatctcaccataatttaaatataaagtaaccaagttttaaatttaaacttcaaactatcaaaaaaaaaataataacctattaaaataattaaaaatataattaattttaaaatttgatatttagattcaaatattaaaaataatatt

SEQ ID NO: 274220 - DNA, 606 bp, Cannabis indica
ggtaaaattaattccaacactttcctccagagtctttgaatctttcgaaggcagcagcatcaaaatcatccttgacggtctgctcaacttcctcttttacaatagctgggagttcttctccccaaaagttgatatcttcaaacgactcttcagaaacaaccttctcaattggaacaacgacattatcttctgatagattaagtgaagggacactcagtgcatcatcgacatcctctttggatttatccttcgccccttcaccatccttttggtccacacccacatcatccttcttctcggtctcccccttgaaagaaagcgagctctgaactttgctcgtctcaggtatctcgaacacttcattcatattacccttcccaaggtaacttgagactaccttcagtaacaactcttttgtgttgttcaccttcaaatcaaggcagaagacctcatctttcaactcacaaacaactttgtataatgcgtcatttgttggttgcccaactgcactggattcaaaacttggtactagcacatatgtgtctgtcaatttcacctgcttagtacaccaaaaaaattagttagcatatctcccaaatcaaattc

SEQ ID NO: 274221 - DNA, 513 bp, Cannabis indica
ctcttcatcttcttcttctttcttctcatctactttatattattttataacgcgttatcagcacgagtctctgcccaagcttcaatcatgagtctctacccaagccccaatgtaagtattttgttaaagttcttaaattgtttgaaggtcacgatactctaaatatatatttatatatactcatctaactgaaacaatttcaagaatcctttattttcttttctttttttatctatttatctatatattatatatgtatatatttttatatgtttattattgatttcatatatatattatgttcatatcatttataatatttataatatatgtgtgcatatgatatagtagagaaaatctgtataaattatacatatatcctgaagattatgtatcatcagtaaaaacttgcatatatcctgaagattatacatcctcaataaaatcttgcttatatcctgaagattatgcaaacgtaatattcatcatatagttgacggatatattatgaaa

SEQ ID NO: 274222 - DNA, 632 bp, Cannabis indica
cagcctttctggatttgacgagcatatcatccacgtacacttccatattttgcctgatctggtctttaaacattttgtttactaatctttggtatgtagctcaagcattttccagaccaagcgaccttactttgtagcaatatagacccatatctgtttaaaaacttgtatgttcttggtctggtggatgcattttgatttgattgtagcctgagtaagcatccatgaagcttaatatttcatgccctgctattacatctacgagctgatcaatccttggtagtggaaaacagtctttggggcatgctttgttgatgtctgtgaaatcaatacagactcgccaattcttgttcggttgggcactaatacaggatttgcaacccaagccgggtagaaagcttcaattataaagttgttgttgcgtagcttttcaacttcttcctttagggctactgctcgttctttgtccagcaaccttcgtttttgttgaactggctggaagttgggatcgatattcagaacgcgtgaaataatagaaggatcaattccaaccatatccgaatgtgaccaggcaaaaacgtctaggtttgctctcagaaattttatcaattctgattttacttggagcaaca

SEQ ID NO: 274223 - DNA, 537 bp, Cannabis indica
ttcttcacagtcttacacactatgattgaggactaacttgctatggatgggcatgcactcaatcactaaggcttaaatttaatggtgaagaacactaaaatttttgaaatagtagagagaaaagaagaagaagtctcaaaacactagttgtctgacagaatgaaaactaggtttttaagcattagttggataatgagacttttcttttctttttatactaattcacttagggttaggattgaattatttagaataaaaaaatgataaaataatagcaaaaataggaccctatggccggccacatgtgggcccactactagttagatttttgtcatttttcttaatcatttatctattttcacaaatactactttttgcaatttcaatcctataaatgccaaaactatttatttaataattaaaattaattatcaaataaaattttcatatacattatttattaattagactccataaagtctcttaattaacaaataaaccctaaaattctatttcttcacaatcaagccatatctt

SEQ ID NO: 274224 - DNA, 677 bp, Cannabis indica
tgtttaaacaacatacttgtgagtagatctaagatcctggtaaaataaatattccaacactttatttcttagcggggaatattttagagaaaataaattatcgggattgagcggggttatgggatttgaccattttacccctaatcttggaaaatatttaagtttgatttaaagggtaatttagtctttttctaggagtggattagtggctgccctaccttttgacacctagcattttaatgaattcagcaaaggattagataaatccttttcatttgagaaattaaggaagtgagagaaaaagccaaaattgaggaaattcattccatttcctctctttctttgttcggccagcctagaccagaaggaaattcagttcttcttctttgttttgctgcaatcaactagggaatcaagcactcttgaagctaaggtaaaatcctagaaccctagaacatgtttatttaaagttttcttcttagtttgagcttgtgattttgagtgatagtggctgttttgatttgaaatgtttagggatcaaattctaggtttggtttgggttaattaagggttataacagctgatttggttggttgatttaggtgttgtgttaatttgagcataaaaaccttaacttaggtctttaatggcataatttgaattattggtttgttctg

SEQ ID NO: 274225 - DNA, 629 bp, Cannabis indica
ttttttaaaaaaaaaaaactagatttagcaaacaaatgattaacaaatctgagagggagagagtttggattgcctaatggtgattccaaggtctagaatgaaattgggaaactcaaaatggagcactgccattgcactaccacgcgttatggttgtccatgtttgagagtgacgaaaggggcagtgaaccatgagatcaagaagcttaggacaaggacaacacaaaaatggtgattatttttcaaaacaggtctagaagccaccgattctgaataataaatcttggaactccgtggatgtctgctaatatctatttcaatttcgacgatcttcaagcccatctgtttgagaggttttgtgcttttagatctcacgagcttggttgtacctttctttctttgaaacgatgctagagttacaccaaaaaattattgaaaggttttcgaagttaggacttaactgagcagtcctcctcgttggtggctcatgtcaggcggggcttgcagagacagaggtgtaagagtctggtggttcatatcgtatggtgcgtgtcgccgactaatggtcgacaaccggtgttgggcctggaacaaaaggggaaagagggaaaccgagagagagagagagag

SEQ ID NO: 274226 - DNA, 450 bp, Cannabis indica
aaacccaagcaacgttaacattaataaatgaacgacagttatcaagtccatcaacgtatgcgtcttccacatctgcgagttgactgttcatgttccgttgttgagctcgcaaggtcatcagtacgtttggaacgtctgcacccttaggtaattgcctctggtaaacatcgcgtgtttagctggcagagcccagacatgcgaatctatatcggctgtcagggctattgggtcgttgggaccaatatcgcatcatagagagttggtctctatgcttccgcataagtatagaggagatactcgcatatgtcctgacacatgcgagttggggtctaccctgcataatgcgaattacggttatgcgatctgaattacgtactcgcagtatctcgctggctttatcctgggcgaggtttaaacatcgaggagtctctcatggacatttcagctttc

SEQ ID NO: 274227 - DNA, 814 bp, Cannabis indica
atataccgtttttcttaccgttttttcttggatcgacttctatataagtcgtatcagaacaacgtaagaatacatcttttcaatataaaaaaaaatcttttctttctttacgatttttctgagagcaaacagtagggtgttacagagcgatacagttcggtgcagaacgtatcgtacttatacagaggctgttttatcctggggacgccgtggttgctagactgccgtgcacacttcgggcagagccgcgaaacgtcttaaagagagcgacattgtccgcgactcagccagattattctatcggtaattcgttccaattttactgtatttaatttcggtataacaattttaagacgttcagttctgctatggctgctaccgatgaattttctggttctgcttctaacgatattaacaagcctttccgttttgagggattacattttaagcgatggaaacagaagatgttgttctacctgacgatgaagaaagttgctttcgttctcactgctctgaagccagtcgtctctgaagcttctaccgacaaggacaaagaggctgaacgcgagaagcaacaaaaggatttggactcctgggtcgaaaatgacttcctctgtaagaattttattcttaacggtttatctgacgatctgtatgactattataattcagataaatcagcaaacgaaatatgggatgctctgcaaaagaaatacgatactgaagaagctggaactaaaaagtatgctgtcagtcgctacctcaagtatcaaatggtggacgacaaacctgtggaagcccaatctcacgagct

SEQ ID NO: 274228 - DNA, 530 bp, Cannabis indica
tgatgttcagccttaacttgttgacatgtgaggcatctagctacaaattcagctacatccttcttcatccctggccaccaatacaaggtttttaagtcattgtacattttggttgaccctggatgcattgagtagggtgtagtgtgtgcttccatcatgatctttcttttaagctctacgtcattggctacacacactcttcccttatacctcagcaagttgtctgtacctttagagaaatcctctgtctccttctctggcaagcctgctctcttcttctgtaagaactcatcaagaatctgtgcatctttaagttcttgtagcagcgttgagacaatggttaggttagctaatttttgtgtaatgatctctataccacttatttggagttcctgttgtaggggcttctccatttgtgccagtattgccaagctggcataactgtgtctacttagtgcgtttgctactacgttggccttccccggatggtagtggatttcacaatcatagtccttaacaagttctagcca

SEQ ID NO: 274229 - DNA, 378 bp, Cannabis indica
tgcacccaatataaggttttcttaaactcttatctgtttatttcattgttttagatttcatattaagatgttaatgaaacatacttgttagtaaatctagatcctggtaaaatatttccaacacccttctcatgtcctctatctcttgaggatcagtgggacactattccttagatagacggatacgaaatctagaaggcatttgtgcccctttggcattggtcattgagaatctctccaaaagcttatcaatgtaatctgtttgagagagaatgcaagggatctgtttttccagtttctgatgatctgaataccaataacataagcagcttcacccaaatatttcatttcgaattgagtgtcaagccattccttgat

SEQ ID NO: 274230 - DNA, 770 bp, Cannabis indica
agtggatacatcagctgacattactttttttttgaaaaaaaaaatatttcatttataagtaatagtaacaataatttaaaattaataaagttaacttgaaataagaaatattaacttgaaattaataattgtatgtattacaaaataaagtgattgaaaattaatcatccatatcactatcattattaactaaatgatcattcacatcatcttcacaaaagtcaactaaaatttcttcgtcagattcttcagtagcatcttcgtcgtccatgttgcggtcatcttcgttgacatgcaaacttggttcagtgccaatgtccatcggaggttgattaggtagcaaaattaactccccaagatcaactgttaacacaaaattggatgagttggtgtcgtgtaccaaatcagtttcgacattagcatcatcatccacgatgtcccaaatttgtcggtgatttacattctcaactattttccaatttttccctctcaataaatcatcgagataaaacacttgctttgcttgactagcaagtatgtatgggtcatctttataccatacaccactgacattaatactagtgataaggttctcgacgattgttttcttccgtcttggatttgtattgtaccacttgcacttaaataatgtgacagagtaaacaccagtgaaggttaactttagcacttcagtgagtgtgccgtaataattaaaaccttctgttcctgccacaaacactccactattttgtgtgctcctcttctcatct

SEQ ID NO: 274231 - DNA, 410 bp, Cannabis indica
aaaaaaagaataaaatcttgggcaaaaatcacttcatggccgtacacaataatggaccattctctagttacaattttgccactttatttcaacaaaattaattaactgagtctgcaagcagtattatctcaactagtgaggggaccatgggcctatataaccgagctttaaataagtagaattggaattcaccaagtaaaattcctaaattattattaattcctccttgcgccactatagatttggaattgaataacactctcaactatatagaatgctccatatgtaccacgatatagatacattatgattatctattgttacaatcctaatagtcaaagatcctctatagatgatctacactgagggacaaatttaccgttctacccttcaatgtaatttatccttaa

SEQ ID NO: 274232 - DNA, 509 bp, Cannabis indica
gatgccctgagcaggaagggtcccaggcaggtagctagcatgatttagatctcacctcagttagcagaggacatagtcagatctagtattgagtttgtggtaggcaagcttcacaacttgactctgcaatctgatctgttcgaaagaattaaagtcgctcagatgactgatccagagttagtaaaaatcagagacgaggtttcagctggtcaagccagggatttttcagtgtcagacaacgggatgctattgtataaagcgagggttcgtgttccagatagtgtggaactcataaatgaaatcttcgaagaggctcattctaacccttattccctacatcccggcatcaccaagatgtaccaggatcttaaaccgtaaatctggtggagcggtatgaagaagaatttggtagaattcgtatcaagatgcctaacctgtcagcagattaaggctgaacatcagagaccagcagggttgttacaacctttaaccctacctgaatggaagtg

SEQ ID NO: 274233 - DNA, 509 bp, Cannabis indica
taaattattaaataaacaaatatctaacttttaaatttaaattgtgatatttctacaaaatttatagatctttgaattatctttccaacgccactagaatcacctcagtcagagttataaaactccagatatggtcgttttagtaaaacagtttctaaacctgcgaatttctctaaacttacgaagtttctaacattaattaaataataatattatttaataccacttatacaattatttaaatcaaacaaatatattatatagaaaacctaatgactttcatatcgggctttaattaaacgattacgtacttatgaaaataccataatattttactttcgtagttaatacaactttaactctctttagaaaattggtacaactactctaagcaatagtctctactcactaacaacacaaataaatgagataattatcctcgcaccattaatatccaaaaaaaaaattaaatactattttaatcttgatattacattctaccctcctta

SEQ ID NO: 274234 - DNA, 604 bp, Cannabis indica
ctagcgagatggagtaagaacagtaaaaatcgaacgtcaaaatgaataaaatcaatggcaaacaaccgtaaaacaacactaaaataaataattaaaaaaacataagaaaaaaatgattaaaataaactaaccatcttctgcacaatctcaaacactagatgcaatagagactatatttacaagctcaatcctaaaaatcaaaataaaaaaaatacactcttatcttttccaattcttcttcttcttctttttcctccttcacattactttttttttgtagtaaatcatgtgtattgtagactcaaagttcgtagataccaaggaaaaaaaaaaaaaaaaggtgactgtgacctaaatgagattgtctacctgtttaatggccaactctcttctatatatatttattctatataaaatgtgtctatataacaaaattcttgatttataaaaaaattttaggtgaattttttttgtaaaaagttttattcaaaaataacagtttttttaggcttatacttttaactcgttaactttcaaaaaaaattagaaaatatatatataaaaaaaaaaaaactttacgattgtaagctatttccccgaaaat

SEQ ID NO: 274235 - DNA, 444 bp, Cannabis indica
tagatctactcacaactatgttgattaacaacctaaatatgaacttctaaaacgatgaaaggaaaacacaaataaagtatgaaaaaccttacattgggttcagcggaataatatgtctccttccactcagatctctaacccttgattcctttctgttgtagagtataatcaagatctgagctcgaatgtccttcttttggatttgatccttcacaatcttccagactatgattgaggtactgtttgctgtgtgtgggcactactctctcactaggatttcgaaattgtatctttcttgtatgtgagttgttcaagaagaagaagagatgggcggctatatataaagaaaaggaaaagctcaactttttgaaagaggcagtttcctgaattactgagtaattgtttaattgccttatttggtgtgagccatcactttccatttat

SEQ ID NO: 274236 - DNA, 606 bp, Cannabis indica
gcggtgtgggattgcacagcttacccgctatttctcctcacggatcacaggactactgactgtcacagtccaagtttgatcattgtttgtattttaagcacctagaagagtcaacaattgtgtataactctatgtagatgatgtgttaataatgagcaaagacaaggcattaattaaaggaattaaagataaactcaaggcagaatttgacatgaaagaattgggacaagtaaagaagatacttggtctagaagttcatagatcaaagagtgatggagtcatgcatttgaagcaaaagaattacattgagaagatcctaacaaagttcaagatgcaagattctaagagcacttcagtacctcttggaggacagtttgtattaaccaaggaagaaagccctatgacagcagaagagaaagaagagatggaagaaattccatatgcaatggctttggggtgtctcatgtatgtcatggttagcacaagacctgacattgctcatgctttaagcatattgagtaggttcatgtcaaatcctgggataaaccattggagggcactgaaatggttgttgagatatttgagagggacatcggaaactggatt

SEQ ID NO: 274237 - DNA, 863 bp, Cannabis indica
aattagacttaataaagtctcttaattaactaataaactctagaatctcttttcttcacaattaagccctagcttagtgaaaattcataaactagacatagtctaattttaaaattataattgattaattaaaatgaattaactgagtcttacaaccagtatagtctcaactagtatggggaccatggtcctatataaccgagcttccaataagcagatctagaattaccaagtaaatttactaacttattaattcctcattgcatccaccatagaacttggaattacactctcagttacatagaacgcgctctatatgttccacgatatagatacggtattaattatcaattgttataatcccaatattcaatgatcctctatagatgatctacattgcatagggacaaaattaccattacaccctttcaatgtattttatccttaaaacacttggccacctataaatgatgttttagtgagctaatataatcactaaaatgagcactttatcatttatttctatttagcctagctagaaggaaatcatcgttgcacttctatgtccagataagaagctatagattccatatctatgattagtgctcccactcaattgtactattgtgtacccaaattgtacgtatcaccgtgactaaaagtaagcttgactcactactagaaaaacgggttttagtgacacacattgagtaactctaaaactatatagtgacactccaatgcgcgtcactaatgagggtgactggaaggacagtttttagtgacacttcacacgtgtcactgaacttttttacattcattttctgcgcgtcactataagcagtaacagccacacacatgaa

SEQ ID NO: 274238 - DNA, 541 bp, Cannabis indica
aaatatatgtttaattattttggctgaagtaaaaagggggttaagtggtatgtcatttctaattttcaaaacttaggaaaaaattacaaaaaaactctcaaaagctctctcttttcctctctcctctctcggctggtatggtgctttagggctgagatttctttgatttgcaagctcttttccttgcaatctaagtgttctgcaagctttggtaaggtttctaacctttcccttttgtaatttatgaaaaaatgtttaaaaagatgattgttgcatgtgatttgttgtgatgcttgctgctgtgatttgttgttgttttcagaggattaatcttgttattttaagtagtttagagttagttaatgcatgatatttgctttgtttcaagcttggaaatttttagctcaaaactatggttttcaaagagaaatggttaaaatctgttgctgtgattttgttgatgtttgtagtagttttctaagattatttaatgcatgtttaagtaggtttggactagtttgaatgcatgttagtagtgttt

SEQ ID NO: 274239 - DNA, 697 bp, Cannabis indica
catttagtgattttcataattttgcatttccagtgcccggtaacatggaactcggtgtttggctcagtaaaatcacaacttagtatgttagtagattgggacggttgattagacattaggaatgtcgagattggccgggaatttagaatttcccaaaaatacccctttagtgctctttatgctattttagtgtggaggggcaaaatggtcattttgccccatttatgttttgtcctttagtggacttaataattggaaaatatgtgatttatgtgtattatgttggctgaatataaaggatttatgcctattttcttttattttcaaaagttagaaaaatttagaaaaagaaaaatcaaccattttctctctagtctctctctctctctttcggcctcattgtgcagcaagggtccttggatttttccttgtgatttcaactctttttggtgttctaatcaagctaggttagcttctaatcttttcttctttaagtttgttgaaaatgatgaaaaatgagtaatgcatgtatggtttttgatgttgttgctgctgttaattgttgttgttgtttcttggattataatgcttgaattgaatggattagataggttgaaatgcatgttgtttgctttgattcaagcttggtagtttttagctcaaaactatggtttttctaagtgaaaaggtgaaaata

SEQ ID NO: 274240 - DNA, 813 bp, Cannabis indica
actaagactgcacaggccttaagaggcaaggcagcaaagggctttaaaaagaggcaagcccgggcagtgaaaaggtctgcagcaaaggttgccaagaccgaagggaggccaacgaagactggctcccccgtaatgatccaggaatgggagcgtatcttgattggttctgttcctattttcttgcccactaccgtctcagtgatggttacctctgcggaggaaactgaggcaacaccgacttctcaacctcggagaggtaggaaggcgacaaaagggaggagggggacaaacacttcaccttcaccaaaccctcttgaaatgagggaattagtaggaggcaccccgattaggcctccgatcgtaatctctgtcaaccgccaaggtcaacagggggcatctgctgagatcaatgaacgccctttattagatgaagggtgtaggacgcctttctccttcccaaagaaggctagaagcgatagtgtaagggttcccaaagcaagccctaactcattccgaagagaacatggtgactggatgtttctccagggctaccgaccaacaagggtcacctcaactgctaagcttacctcctacacgggccctgtaactcgatcgaaagctcgtgccatgcaggaatcagtgaatccctcttttcaaaaagttcaggaagaagggtgtacatctgaacactctttagaagacactccccttattgaacacagtgagggggtgtctgctgatctcattactcagttcgaagcactaaccattggcaatgataaaaatatgccggtgttagtaactgggacaatc

SEQ ID NO: 274241 - DNA, 598 bp, Cannabis indica
aaccatttgatacatggaggcctccaaggcaagctgacgcttttgatccttcttataacgtttggcaaaagattgaaactcagaaaacatttgtacctgccagctggaatccgaaagccctttgaacataggagactttcctttactcacttttgttccagagggagtggttgaggaaggcttcctattgaccacagagagaaagctcttactgagaaccggattctgaacatgataatcatgcgttgtaagaggagggtgagcatccataagaactcgttgaactagacatggaaatggtagcttgttacgagtgccaatggtttttgaggcttcaagaatcctttcaaagatgagcgagggcagatcaatggacacattagtgtctacaacatacaagaacttgccaatctcaagtgtaacagcggacacatgagaattaggaaaccaattgtacaaggctactcgatgaagaaccttatagaatggagtcagatgagtgaccaggatttcctgtttctcccaaatataatcatccctggcagttagcactctacccatcaaagtttgatctagattgaagtgtttcccatatgtt

SEQ ID NO: 274242 - DNA, 823 bp, Cannabis indica
tcctcgtcccgaggcagccggtaataggtcccggaggtagaaggcttgatgcctgccaccaccacgatcttctccagctggtgagcgcaggtcaacgtagactggagctcatccgcttcccacccgttggcacgggacttgaacccttcttgggccacaggaccctgcatgacctctgttaggctatttttagcctagattttggatcgattttatgtgcgtttttcactgtgttgggacagaattatgcttgttttctatgttttcaggttctttggaataatagaggtctcaggatgaaaaagtccaataaaagacgagctgagccaagaaaaacactttttgaggaaaaatgcatatctggccgcggctagacacagcttggccgcggctagatcgtgaagcaggtgcaggattttcgaggctacaatcgccgcggcgagatacaccctcgccgcgaccatttgaaacttacagagaggtatttttaggcacttatctggccgcggcgagaggaagcttggccgcagcgagatcccgtatggcccaggggtatttttgtccatcgaaccctaaaattagttataaatagaaaactgcgattggaagtcaagggaagcgatttggaaccctaaaacacagcagaaagcggcaggaagagcagagtgattcaaagtgaagatccagaattcatccaccaacagtttctttctctattcctctttaatttatttatgttgaatattgtcataggaattgttatggatttatttctgaactaaatttcccatttagggaggatgatgattgttgtttaatgttt

SEQ ID NO: 274243 - DNA, 480 bp, Cannabis indica
atctacaactggcgaaacacccttctcactttcttacgggtgcgaggccatgttgccagttgaagttggggcaggttccctatgcagggatagtttcaacgtctcgcagaacaacgagaatcagctgttctgcctagatcttttggaggaaaagcgtgataaagcgcatctaaaaaatgcggcttaccaacagcgaactgcgagatactttaactccaaagtgaaagtaaaacccctgcgagcaggagacttggtccttagaagagtaatgccaaacaccaaaaacccgtcgcacggggtcttcggagataattgggagggaccatacctcatcgcagataaaattggtgatgcaacgtatcgactcgcaacactcgatggaactgcgattccacgagcatggaatagcgagagcttgaaattttattatcaatagtattcgcattattcgattatgttcattcttgtacttatacttag

SEQ ID NO: 274244 - DNA, 513 bp, Cannabis indica
gtgtattgaatcggagacaccaatttcgtaacaaaatcactaaacaaatttgaaatcgtgttctacttagttgtgccgatgtacactcgaagtagtgacactatcactatagatgtttaggggtcccgtcacacaaagttttaatcaagttaggtgtagtgtatcagagttactagtttcgtaacgaaataactaaccgataccgaaatagggttctacttagtggtgtcgatgtacactcgcagtagtgacactatcactgttgatgtttaggtgtcccgtgacacaaagtatgtaatcaagttaggtgtaggttattggagtcaccagtttcgtaacgaaatcactaaccgatatcgaaatagagttctacttagtggtgtcgatgtacactcgcagtagtgacactatcactataggtgtttaggggtaccgtgacacaaagactgtaatcaagttaggtgtagtgtaacagagtcacccactaaccgataccaaactagggttctactt

SEQ ID NO: 274245 - DNA, 860 bp, Cannabis indica
agtatcgcggataactttccatcctcggttacccgtgataccttggtcgcttccgtcatgaatctgctgatgtatgcccggagtggctcgcctggtcgctgttttacttcgaccaaatctcccagatgcaatgggagttggcgtgaggaagagaattgtgcatggaattccgaagagaaggttttccatgaactaaactttccaggagccaacttgaaataccattgctgtgcggcctccgacagagtggcagggaagattctgcaacatacatctcctcgtaccccttgtaaatccatttgcatctcaaaatacttgagatgggagagaggatcttctctcccagtgtacatcttccacgttggcatcttgaacttgtgaggtagtggcaggagattgatctctggtgagaagggagttccgcgtgcacggtctaactcaagatcgttgttacgctgcccggccatgccatgaaacatattcttcagttcgtcgagctgggcctgtacggctgggctgacttgattggcattctggtcgggttggactacgtcagaagaacctggctaccttagcgattgattcgcttggttggcaggtggaatggctccattattttgcgtggatccgtcgaggatgacccctccaaatgaattcccggacaaggtctgtccgcctacctcttggcccacgagtggaactcatgaccggggattggacgactgaacgttggttgtctgggaagcattcaccgttgggtcatcctcagtttctccaaggggaatgacgctcggcgttttctggcctacagtctgataggctcttcgtatcagcacagtgtcttgctgactacgatcttc

SEQ ID NO: 274246 - DNA, 569 bp, Cannabis indica
ttttttattttgagttttatgtcttttaatttttagtttttagtttttattgttttgagtcaattttcttaatatgagtcaatctaaaagtaggtagatagcatgatttgaaaagtttatttattttttgaaaaatccgtgtgcttggtgatgttatactcttgactaattttaattttatacttaaaagaacatagaatcatattagctaattttctagtaattgaattgatttatgtatgctaaatttgacatgtggaaagttgcttggaaaattctagaacttgcttgcttgctatttgaggcgaaataataaattatgcatgactaggaaagtgatttaggcaatttttttggatcgattgtgcctttcaagccatccctgtaattttatcctagttacccttttttgagccttaacttattttttgttctacacatattgagcctaaaaagagaaacccatgaatatccaaaatatttaaccataattataccataagtagatctttagtttaggggaacttggatgggaagtttgttatatgtgtgtgaaaattgagagaata

SEQ ID NO: 274247 - DNA, 665 bp, Cannabis indica
tagatatctgaacggaaggattcattatattccgctgcacccaatgtagggtttctttaactttatatgtgtttaatttcatcgttttagaaagttcatatttagggtgtttatcaacatacttgtgagtagatctaagatcctggtaaaataaatttccaacattttgcaataaagagtttgaagctctcctatccagatatggcgtctgccatagaactgctctaccctaccatccacagagcaatggccaagctgaaatttccaactgggaaattaagatgatattggagaaaacagtgcagagatcaaggaaggactggtcacgaaagttagatgatgcattgtgggcttatagaacagcgtttaaaacacctatcgagatgttaccgtataggttggtgtacggaaaagcctgtcatctaccggtggaattagagcataaggcctattgggctatgaagaccctcaacatagacttagcggctgcaggagagaaaaggctgctgcaattgaatgagctggaagaatttagatatgaggcctatgaaaatgcgaagatctacaaggaaagaacaaagaagtggcacgaccgaagcttagtcaggaaggaatttcaacccgacagcaagttttactttttaattcaaggttgaaattgtttc

SEQ ID NO: 274248 - DNA, 756 bp, Cannabis indica
tccttatatttagaaatagcatcaggatctctaccttgcttccaccgcctcacctccttcttccaatattttatacgagaagcaaaattacccgaataatctttgccccaaaccgaaagagattccccacaccgttgtattttctcttggatacccgctagattatactcctcccaacactcctttaccacctgataacacagaggttcccgaagccagcaattttcaaagcgaaatttgcgactcccggaaactatattatgccgaaccaaatcaagaaaaatgggacaatgatcagaagaagatacctcgagattaataagtttagcccgtgggaacagttggagccatctgtctgtcaccagagcacgatctaaacggacctcgatccaattatcggttccccgacttttctcccaagtgaactgatgtccgacaatgtctaaatcaattaatccacactcctgaatagtgtcccggaagccgtcaactaaccagttaggatagggatgtcccccttttttgtcctcttgagataaaacattgttcatgtcaccaattacacaccaaggaagagtgtttccacgagccaacgtcctgagttgctcccaagaagcccctcgcaaacttctcttagattccccatagaaccccgtaagacgccactccccaacatcagtaggccgcacctccacatccacaaaattcgtggcatagttcaacactttgacgtcttccttatttctccatagtaaa

SEQ ID NO: 274249 - DNA, 555 bp, Cannabis indica
tcaaatgttggcattccaaggattttgaattggcctaaattacccaaggacaaggagggtatggtgaaaatggatgtcatgaacaccctcattttcgatcggtctttgaaagaggtaatcctgttgtttttattatttttccactgttgttttaatgttgtttttgtatacattatttatactttatgtttttattgttgttgttattttataatttcagtttcatgtgcatattgttttttgttggtttttgttgtttcagttaaaattaagaaacctcactccaacttccgttgagagattgagtttgagcctcactgattttttctctggtgagactactcccgaggctgtgaaattcaaaattaaaggtggttccaagcctgctggtcaacctggcttgatgggttcttcttcatcaactgctcatgagaatgtctcccgagttgagtttgaggaatttaaaaagtgtttatctgttgttgtcagccagcaagggattcttatgaaatctgttgctgagatgaacaagaagctggacattcttattgaggt

SEQ ID NO: 274250 - DNA, 774 bp, Cannabis indica
atttctgagtttttagcaaggaaatcaagggagaattaatctaaggtaagccctaatgaactcccctttagttttcaagtttttgcttagttagaaatggtgaatttgtgaaataggggctattaggtttagaaatgcttagggttcggtttttatgttcaatattggttgtttagaggttctggtagttgattttggtgcttggtgttagttctaagcaagcttgagttttgaaactcaagctttgagctttaatggcaagttggaatttattggtttgttctgtgattttctggttggtttaggttgtaatgcaatgtataggtaccctggaagtttttggaaagtttgggattcaattgataagggggttggtttttgtgttcccagcacagaaccggtcgttttggaaagtttgggattcaattgataagggggttggtttttgtgttcccagcacagaaccggtcgaccggttctgggggacctgtaccaaccggtcgaccggttggtgttccagaaatggacttccggttgggaccggtttgtcggttgggggaatttttggaaccctagttttttccaattttgagatatttagggtattgccatgttgtttatcgatagggaaacttttagtttcaagttggagtccccggaaagtgatttagcgagtcactcatctgtgttgcaaataatgtgattagggcatccatctagcgcaagcatttccgttcaggtcggccagcacacttgaattcggaaaacaggtaa

SEQ ID NO: 274251 - DNA, 500 bp, Cannabis indica
ttgaaagtttttactcaaaaatatagctttcaaagaaaaaaaaagaagaatctgttgttgttggtttctgcagtttctataggcatgattatgtaattttattcaaggtttaatgcatgttagttagatttaaccaagtttgagttttgaactcaaagcttggagctttaatggcatttttggtatttgtgtgttcttggctgttttgatgctttggtattgttctttagggtatttagaacaagtctggaacttttggtatgatttggaattgatttgagcaaagtataaatttttgaaagtttcttgcgaggaactggaattccggttgtgcatcccgaattccggatggggttcaggaatttccagaaccagaattctggttgggcaaccagtctgccggttgggtgattttctgaaaccctagattttctcctttttatgttatttggggtattaccatgctttttatcgatagggaaacttttagtttctagttt

SEQ ID NO: 274252 - DNA, 812 bp, Cannabis indica
aatgggttttattttgggcacaaaatccaacaaactcccacttgcactaatataaaacgaatagtgcatttcaaataatcttaacaccttgatatccagatcaagtgcagtatgtagtattctctccgtaataggatctgacaggttgtattcaatacaaaattttctccaccattatatttccttaatcacaaaatcttgatattgtgaaattcctctctatatgtctactcctctaaggatactggattctttactttttagcaactacttttgtgttagttaggaagtaacactagtagttaataaatgttggtacaatgccaaaaattgtatataactttccatagactgaataagcatctttcctacaactttaacattcagtctctctagtagacttagagacttcagataggtttttacacttctccaaaatcactactccacccccaaagtaatcaccatcttattagtagactttctagaaccaaggcaaatcttgaaacctgatttggtgttgtctaacagtattaaatacaacccttattgactaacatatagttcctctttttgatcttaagatttacttgattgtcttccaatgttgcttttctggattaatctcataccaactcattattcccactcgacagcaggtgtctggtctaaagcataacaaagcatatttgagacctctcactattgatcctaaggaattctttctttggcttttatcttttctggaatagttgaaacttttccttagataaatagaatctatgtctagaagtcgagaagcttctatagat

SEQ ID NO: 274253 - DNA, 518 bp, Cannabis indica
tgtgtgttccgctgacccacagatggttgatgttccagagaacccaataatagttaaggctaacgatctaatagaggtattggaaggactacgagcatgactaagacaatttgttgaagagttttcacaggctcagcaaaatatcaccaacactagtagtggaacttgaagcacataatgaaatgtaccaatagccaactaagtaccgacgcatatattttcacctatctatgaatggttgaagaagcggtctctacacctagccatgaatggaagcccaacatataggaagtagggatgacttagaatagtagacgttataccagactgggacagtataatttacgaaacctacttattaagaaggatgaaataatagatctttaaggagaaggtactatcttgttggatattctataagttacacactcttaagttagatggtaagaagtatgagtactgtatgcaaagacattggagataagtatgttatagaaatgagtcaggagaggacgatg

SEQ ID NO: 274254 - DNA, 543 bp, Cannabis indica
gaaaatatggcattttgaagaaaaatagataaatagttgaaaaatggcaaaattgcaagtggtgggcccacatcctatggccggccacttgaggtctattttaccatttattttatcaattttttaatgccaaattaattcaaacataaacctagaaggtttcctataaatagatagtgatgaactcaaaattagaagcttaagcattcacttgccttcagtaaaattttgagccttctcttctctctctattttggaatccttcctctctctttctctcttcaatttcgaaccctatagtgatagagtacatgcccacacataacaagttggtactcaatcatagtgtgtaagactgtgaagaatccaattcaagtgaaggagaatcgggctcagatcttggtgatactctactacagatacaagggttagagatctgagcggaaagagtcatttaattccactgcaaccaatgtaaggtttcttaaactttatatgtgtttaaattacattgttttagaaattcatatttaggatgtttaa

SEQ ID NO: 274255 - DNA, 693 bp, Cannabis indica
ctttgactctcaaacctcgtacagatatacgatgaacgccccgataatcggtaagcttttctcctttcctaatttatttgatggaattttacaaatttctgatgatgggtttgtcattttatagtcaagttttataattgcctgaactttttcgtgctttctgttttttctattttttttttttgggtaaagatcctttgcaaggggatttccctgaagttatagaagagtatttggaacatggggtcatgaagtgcattgcttttaatcgtcgcggcactcttcttgctggtaatattcgcacttttagctatttcccttatgttttttctgtactttactgtgcagagtttactatatatgcgtgttttcgcgagttggtgcaaattggcatgcctttgataatgtggctatctgggtagccttgaaattagttactgtagtggagcttactgtcgcttatttgtcatcatgtagaatttcgtctgtgtaagtttttaattctctgccaaaaaaaaaagtttttcattctacctgactttgaaaatacggctcaagttagtgaaaagtggctttgtttgtctcaacttgtcagttttaggcatatatttgggattagttgtgttaagaaaaatgaattaattctgattaatgttttttacctttgcttcaaatatggattctagtttgtag

SEQ ID NO: 274256 - DNA, 665 bp, Cannabis indica
tattttaagaagcgaaaatcataagcatatattataatgagaatcaaaaataaaaataaatacttaattaaatacactaggtttcatcgtcctccttaataataagggaacttagaaacccataagaaaattaactaagaaagcggtaaactaacactgagcgctctgagcgttttctctggatttttctgtctgaaactgaaactgtgactgaattctaaaaacctaagcttctatttatagaagggtaaaaggactaatacgcaattaaacttattacaaattgcatgtgggtaaaattgtaaatactaaaagttaattttcggagtgccacgtggaaagtggctgaagctactttgggctgaagggaatcggaccagaggagaaccactcgcgcgcctgggaagtggcgcgcacgcacggctaaggagaagccgtgcgcgtcacgcgcgcgtgggagcagagagaggcggctggggtcaggctcctgctgggcttctgcgcgcgaatgggagaccgccacgtgtcgtggctgttggctgggagagaaagagggccaaatgggcttttgtccttttgtgctctcttttgggcttcaaaaatgccatttttcattgctttggatcacattttttaccatttttctttttcttttcctttctttt

SEQ ID NO: 274257 - DNA, 553 bp, Cannabis indica
aatttcttatactgaataaagaaaatataagtagttttctcataacatctttagattggattattattaaattttattttgataaaaaatcagttcagaatcctatttttacaattttgtaaaatacaaagtttattttatcatttaacaaaataaaaagtttaattgataacttttgcaaaatacaaaatccaaaataatatttagccacatatttatttaggaaaatttgattttctatacttaaaaaactaaaatattttattcttaaatcaatacattttaaactaacaaaaatatgacacttttctcaaaaccccaaaaatacccctcaaactctcacagcatctctctttctctctctatctcggcatcccacaccccaggtccgatggtcggaccatggggtccgatggggtcgtaccaatcggaccccactggtccgaccatcggacctacgggcgtttttttttgttttctattcgtatttggagagacacaaagagagaggggtcgcgatggggtccggattggtcggaccccgactcggacc

SEQ ID NO: 274258 - DNA, 684 bp, Cannabis indica
tttgactgatgtgattcttcaaagagtagccgttattagactttattggtcatagccttgtaggtgcagatcgggggttgtgtcgtcagactttattgcgtgtggcagttccaacacgcctcctcccatgcagcattaaatgcgagataactgctcagaggaagccgacaccacccggagatgctttgatgctaccttgctctccgggagaatataaaaccttgcatgccttctcagggaggcatatccaagataatgcctttctttacaaagacttagctattaatttaagtgctaaaccctttgtgtccacgtgtccttgtctggttggtcaacgtacattgggcaaaatcaggggcaacattaacccccaagccttgtttaattgtgaaatgaacaaggcttgcttagatgccttcggttggctcctcggtttcctggcacgtgctttgggcgcgtgaaggtgtatttaatgatcaacattactgcagcgattcactttttgcaggcgtcgattcgtttcttgtccattaattgatacggcgcattaatgggtgtcacacggacaatcaagcatttccaccgcctcgatgacgaacaaattcagccgttggatcctgggaattcgaatcgcgtgccttcctaaccattcgattagtagatgatcgcgcctgttccacatgc

SEQ ID NO: 274259 - DNA, 594 bp, Cannabis indica
catcctatatggagctttagaaacaggttcgactccaggtgccaaatcaattacaaaatcaatttctcgctgtggcggcaatcccggcaactcctcgagaaacacgtcgagaaaatctcttaccaccctgactgcctcaggcccaaatggttcaggtctgctggagtcaattaccactgctagaaatcctacacaggcactgcatagtaaatctctagcccttaatacagaaataaccgagatccggaacccctggattgatccaacataaccaaatggatcttcactttccagatgaaataaaatcaccattttccgcctacgacctatactggccgaatacttggacggaaaatccatttccagtataatgtcaaactcagttaatttcagctctataagatcaacgcttaactccctatcttcgattctaacgggcatagacctactacgcctattagagaccaccaactccccactaggcactagggttccaaaccctcttcctaaaatattccaaggcctacccaaaatgaattattctcatagctacatataaacgtgcgactcctgaatcaaacaacacgatataaa

SEQ ID NO: 274260 - DNA, 585 bp, Cannabis indica
gagtaccaatcaatcaatcaatcttatcacttactaaagtaaactttaaaaagaaatatttttttaaaataataaatttaaaaaaaaaaaacctattttgagtttaatggtccaattactaattgaaatattctcttcctgatgaagaagaggggattaaccagagctcttcattaactacatataatataacacaatattaaatatgaattaaataataataaataaataaaacttcattaatatcaaacttcataatacaataccatgaaaacccatcaaagaaaacttaagacatcacaatctataaatttctacatatatatttttatctttatgaaaataagaacagagcagaataaatattaaataataatgataattaaaaaaaagtatattaatatgaaaataccatgaaaaccaatcaacaaaaactgaaagtagaaccagaggaatgttgttaaaaattgatcttgaatttttcagctactgatgattctgcttctgggttttggtgaacttgttggcaataaattcaagcatcattttcttgaccaactttttctttggaggatttacatcaca

SEQ ID NO: 274261 - DNA, 712 bp, Cannabis indica
caaatccccccgtgtacctcacgaagtatataatcgcaatcttccccgctgatgcatttgagtagcggttgactaaaacttctgcgatacaacctttgatcatacattacataacgggcggctcgttgtcgcagctttcttgcttctaccttgtcatcgggcaagacgcccttttccagatatgcgacgattggagtaatccaggtgacctcctgaacggtatctatctccatgatcacttcacgatttatagttgggtgagctaatacatctaccggaattacatcgagcaattcggcttctctggttgaggccaaacgggccaatgcgtctgcgtgtgaattttgagcacgcggtattcgagacacaattacttttttgaatttctgcattagctcgcatacaatggctaaatatttaaccaatctcccgcctcttgccagatattctccattcacctgacacaccacgatttgggagtcgctaaaagcctgaagatactcgactttcatctcgagagcgagtttcaatcctgcgattaatgcctcgtactcggcttcattgttagatgcagaaaattcaaaacgtaaagcagcatgtaccttaaaattactgggactgattaataagactccgctaccagaaccctcgctatttgaggctccgtcgacgtacaatgtccacagttctctattcgctatagcgatgtcac

SEQ ID NO: 274262 - DNA, 532 bp, Cannabis indica
cagaagagaccctaaaaaattctgtaagtaccacaagcacattggtcacactactttagaatgttgggtcttccaggatgaaatcgaggagctaatccggagagggaaatttgacaagtataagaagaacgagggaagttgtccccaagcggatgacaaaggagaaaaccagaatgcgagtagctccagaatacctcgcaacatcctgactataattggaggacctcacatcgcaggggactctcgcaaatcacaagaacgatatgccagagaagccaagggaagccgcttaccaatgtgaataatcttagtgagcggcccgagaagctatttaagaaagaatgcgacgacatcacctttatggagagtgatgcgagatgggtccatcacccgaattctgatgcactagtgatagtcgccaatattggtggggataatgtccatcgcatacttgttgacaatgggagttcagtgaatctgctgaatttccaagcattcaaacaaatggggttgcaggagaaggatttgcgac

SEQ ID NO: 274263 - DNA, 634 bp, Cannabis indica
ataaagcccaaaaacttacccgagctgactctaaaggagcactttaagggattgagtttcatgttgtatttgttaaggacttcgaagcattcgtccagatcatctatgtgccccccagccttcctggatttgacgagcatgtcatccacatatacttccgtgtttcgtctgatctggtctttaaacatcttatttaccaatcttttgtatgtggctctagcgtttttgagaccaaatggcatgactttgtagcaatatagacccatatctgtttggaaacttgtatgttcttggtccggtggatgcattttgatttggttgtaccccaaataagcgtccatgaagcttaatatttcgtgcccagctgttgcgtccacaagttgatcgattcttgggagtggaaaatattctttggggcacgccttatggaggtctgtgaaatgaatacaaacttgccatttcttgttcggcttgggtactagtacgggattagcaacccaagccgggtagaaagcttcaattatgaaattgatatttcatagcttctctacctcttccttcagggcgagcgctcgctctttgtccaacagcctttgcttttgttgaatcggtcaaaagtttggatcaatattta

SEQ ID NO: 274264 - DNA, 555 bp, Cannabis indica
ctatacgtcagggaagaaccatttggtcgactttaaataatagattaaagaacacaaataatgcaactgaactagaacctaaccatcgcaggatggagatcatttgatctaggatcaactgggtgatattgaattgaatagataatacagtaagtttattatatctagttcaagttcaatatcgatcccttctgatgcatactccatacatccaacccatgcttactttaaccaatgccctggaaaggacattgcacttatccaagatgcaagtaaactacgttgtagattatcatatcagctaaactctgtgtacttataaataatctaggaatacatttaatcacacaatcttgattactttccactgtgttgacaacacaataaacaagaatatcagtgtggtaaggacttggatgaatttattaatcaaataagtaagtaaatgatcacatgaaccaaataacacattaaacacgtaatgaaattaaatctgtttctttattgataattgaatagaaaagattacattgaaatagagttttagttagggca

SEQ ID NO: 274265 - DNA, 482 bp, Cannabis indica
aaacagaattgaccaagataattttcgctagtgtcacttcgaaacaattaaactttctaaaatagaagaagtgtttggttaatgttttttagaaattaattttatcttttttaagttatctaagtgggtgaaaaaagagtaaaaaaaagtagaaatatttttcaaaagcatgttctataaaaatgttttcactttttaattttttaattgagaatcaaaattttaaaaacaaaaaaagtcactttcaatatttttttaaacagttttttttcttaatcaatattttagactccgacgagacccgaacccaaatcctccctccacggccctagtgttgaacttgacctctgacccgaacccgaatccgacaccaaacctaaacccgacttaaataaaataaaaaaataaaaataaaaataaactttacagaacacacttttattttctgtttttaaaattgaaaaataaaagtggttgcagaa

SEQ ID NO: 274266 - DNA, 591 bp, Cannabis indica
tatgaacgagtggaggtttctaaaacttgaaaaaaaatttaacaaaacaggtgtatggccggctccaccaccagggttccccgaaggctgccgtcgctgcaagttaggttatttaaatggtaaacaggtgaagcctggatctctatgcaaatattgcaaggctacatgtcgcttcatgtcgcaaatgtaatcgttaaacgtcgctaaatatcgacttttcactgaataaataaaagttccattaatgtcgctaaatgtcgctaacttaatcgtgaaacgtcgctatttttaattttttccagaattgataaaagttcttcctacatcgcaccatgtcgctagtgtaatcgtggaaagtcgcagtttttaaatttttccataattgataaaagttcttcctatatcgcgacatgtcgctagtgtagtcgtggaaagtcgcattttcaggaccttgtccagaataaaataaatttccaaacatgtcgtgaaagtgtcgctacatatcgcaaaatgtcgtgaaatacacaattatatacaaaaatctgagatagtgagagtaaacaaccacatacacagaaaataatgtccata

SEQ ID NO: 274267 - DNA, 513 bp, Cannabis indica
ctcggttcgggtttaggtctctgtctgggttttgatctgggttcgggtttgggtttaggtccttgtcctggtcctagtcctagttccatttgccattcttagttcgagtttgggtctgagttcgggtcggagttcgcgtcctgggtctttgtctaggtttggtctcagtcccaagttccaatcccgatctgagtttggattcagttcttggtctaagtttttggttctgaacctaatctgtgttcgagtttgggtccgggtcttgggctagctttgggtctgattctaggtgtgaatttgagttcgggtcggagtctgtgtccttgtttgtgtctaggtctggacccccgatctaagtctaggttcgagtccaggtgcaagttcaggtcccgagtgcgggtccaagtttgggtcttggtcaggatctcggtccatatctaggtccaccatttcgatcccagtctgggtcttggtccgagtccaggttcgtatccggatccctatctaggtcca

SEQ ID NO: 274268 - DNA, 500 bp, Cannabis indica
tgtccggctgcatgatttccacagaatccgccatgaacttcatatagaagccgcacagctttcattttggtgtgacacacctgagtaatggcattgagaatcctcttatgtacatgatcccatctacgatgatgtaccgtgctgcctttcttctcatttttccgagcttcatttcggttattttgagagttccccaaagttgagatagactgctattggcgtcatccagttcggagatgtgtctatcatttcgatttcttccgtgccggtgatgctagactcttcaagaaactagatcgggaccaggttcaccttgccacttatattgctgctcgccaatcaagctagcgcatctgctgttgtattttcctctcttggaatctgcttgaggctatagcttttgaattgtgcaagcagatcatgtattttgcttagatatgctatcattttttctccccgagcctcgtattcgccaaatacatgatttaccactagctgtg

SEQ ID NO: 274269 - DNA, 749 bp, Cannabis indica
caaattggcgagctatgtgcgctcatttttgcttaattatttagtgagtctattgcaataattattttaataatcataaataggcgagtccaaagactcatttttgcatgataaaataacaagtttattgcaaacccctgatggtgctcggtacttttaatactagcacatcgtatatatggccaaatctatgccttatttggacgattcatgaaaaaattgcctctccgtcctaacggacagtacagactccaaagagttctgctgacagggcatcttgaaaatataaatgatgatcgatagtcattatgaaaacctcgataaggtaaaactaaagatcacctgcaatgtgacagatcaaatgtccctcaagaaaagttcaacgattagacagcaacatgtcatcgcaagaactaggggcatgataagggagcaattcccacagtatttccttgcatgatcgaaacttgcgagaaggtgcgaccgagatagggtctagtcgcacactatgcatcgcatagtaaaaagaataaaagcgggacgtagagagaagttagcacagtcgagacatatatcgagtatatgtgatgacccggtgtttctccctcaagcctatgtaaagactgcatctttaccagcatttggtccggatgaccaatgtgcacgacaactcgaccagaacccgcgagttctatgttgtcagcacacgaatgcccgatatgcgacccgtttagtcgcaggcattccat

SEQ ID NO: 274270 - DNA, 890 bp, Cannabis indica
tgaactgatgggaagaaaacatctctttttcgtatcagaaaaatacagtttttcataaaattaaaattccatctgcgatatcaaatttttgggtgtattcgacggtgctctacagtgcagtggggttccgatacagtacaacgactgggctgttttatcctggggacgaccggcaatttccgactgcttgcacactcctgggcagtgccgcgaacgtcttaaagagagcgacttagtccgcgactcaacccagaattcttcattcggtaatatcgttcctcttttattttgctagcagtttactcaacagagttacataattacatttcatgaaaataacagtaattgttttattccttggcaaaaggactgcatgctaacattttaatgacgtttaggaatatatgtcactattgggtgatgactaatattcttcaactttggttttgctaggcagaattaaaaggaagagtattggaggcgttttgttgaagttacctttagaaaagtctgctgaaaacgataccatataatgcgaaaacaacaatatcgtattaaaatttcaccttaattagaagattgaaacgacactatattatatatgtttgtgttgcatgtgtcttggtgataagaaattaaaacttatattgttttactactcactacaaaaaatctgacttttagtcacaacgaaacttgtgactaaaagtaaaaagattgtgattgtaaattattatttctatgttgtgactaaaaggtctgtattagtcacaaaaattacaatttattgtgactaaatgtatttttagtcacaatacttattgtgactaaaactaaattagtgacaacttgtctaaatgctatattttagtcacaaataaatttttgtt

SEQ ID NO: 274271 - DNA, 592 bp, Cannabis indica
aattgaatttaaattcaggaatatacaagacattcgttaagacaatttggtcggaaattttaacagttcccgttttgttgatatgaatctgatgaccattaggtaaagtgaccaagttagcaacattatttttatttaaagatgtaaaacaatgaagagagtgacaaatatgatgagtagcaccactatctacaatccataaaaaaaggggaaaagagttgttattaccgaagacgttagagaccacaggaaggttttcactggtggaaggggcgccttggatttgttgattgagaagagagatcagctgttgactgagctggatttgtgaagtgccagccgcggaggggtctggagtgggagtcaccgtggcttgattggcccgagcagtggtggtggtctttttcttgtctccatatccgggaggaaaaccgtggaggaaataacatttgtcaacaaggtgacccggtttgagacagttggagcaagttggtcggggtttcttgtttcgagatggttggttggggttaggtttggccgaagtagcagcaacaacgccagtattgccaaggcagcgttgtcgttcttgttg

SEQ ID NO: 274272 - DNA, 581 bp, Cannabis indica
aaaactcacgtaatacgcctatgttagttagggtgttacatctcttttcatcccataccaccagaagtagggttttaaatcctgatacattttggtggttaccggatgcaatgaataaggtgtggtgtgagcttcattaagtacctctttctttagctcatcaatattaggaacacaaacccaagctttatacaacaacattccattattcgagactgaaaagtctttaggctgaccagccattacctcatctcgaactctgactagctcaggatcttctagttgtgtctttctgattctctctaacagatcagactgaagtgttaagttgtgtaactttccaactacaaacgctatccctgcactaaccatttcaaaagctagttgaaaggctatcaaaaccgtggtgcagacctgcccgagacctcttctactcaaggcatcagccacaacattagctttcccgggatgatacagaatctcgcagttatagtctttgactgattccagccacctcctcttcctcatgttcaaatctttttgggtgaagaagtacttgagactcttatgatcagtataaa

SEQ ID NO: 274273 - DNA, 442 bp, Cannabis indica
aacatacttgtgagtagatctaagatcctggtaaaataaattccaacactaagttcatgagcgaggtctaaaacgtactttctcaacataaagacatggaatacgttgtgaactgctgaaagatttggaggtaaagctaatcgatatgccacttgtccaaccttctcgagaatctcaaaaggtcctgtaaatctagggcgtaacttgcctcttttctcgaaacacttgatccccttcattggagatactcgtaaaaacacgtggtcccctacttggaactcaacatctctgcgtttcggatctgcataactctttttcctaatcttagaggcaagtattctagctttaatcttctcaattgcctcattggtctattgtactgattctggacctaggtatttcttctcccctgtctcatcccagtggatgggagatctacact

SEQ ID NO: 274274 - DNA, 431 bp, Cannabis indica
aaatctagatcctagtaaaataatttcaacaaattattcgcttaaagaattttattttattttttgttaaggttaaacgttaaaaataatgttgttaaatcaatcaattaattatccttttttttaaaaaaaaatagttttaaatatctaaatttaatttatttattaacggttaaaactaacaccattaaacaaatcaatgaattatttttttcaaaaaatttaatttttattacataatcacttaaataagtatttaaaactatcaaaaaaaaattagataattatgtttctttctataaatcttaatttaaatttgaattagaccaattaattaatcatactatataacaaatttattagttatattgtttaaaatatctaaacttatatatttattttattatctaataaattagttagatatatat

SEQ ID NO: 274275 - DNA, 720 bp, Cannabis indica
cagaatgagaaggtggtagcctatgcctctaggcagctaaaggagtatgagacaaggtacccaactcatgacttagagttggcagcagtggtctttgcattgaaaatctggaggcactacctctatggagagaagtgtgaaatatacacagatcacaaaagcctaaaatacttctttacgcagaaagagctcaacatgagacagaggcggtggttggaactggtaaaagattacgattgtgagatactgtaccatcctggaaaggctaatgtagtggcggatgcacttagcagacgcaactatgcaagcttatcaatgttaagggcattaaaagtgccgttgcaacaggaaatcgagagatctggaatagagttagtaacaggaaagctagctaacctcacaattgaatcaaatttattagagaatatcaaagaagaacaagcccaagatgagtttttaatcaagaagcgggtcgaactacaaaatgggaaagccggggacttctcagttaatgaagagggtattctactatacaaggcaagggtgtgtgtacctaagaaagcggagttgcaatcaaaaatcttacaagaggcgcacactacaccctattctttacacccaggatcaaccaaaatgtacaatgatctgaaaggtaggtattggtggccgggtatgaaaaatgatatagcagaatttgtagcaaaatgtcttacctgccag

SEQ ID NO: 274276 - DNA, 219 bp, Cannabis indica
atatcatttaatgtcattctatttttctcttcagaaattaaatgacgcatatgattataatcccaaaattctatgtgaccaggatccacttgcaatattctaagaactctttgatgtaatctaagtcatcaaaagacactaccacattttttaatctatggcatttgagttaatatgcctatatccacagaaagttgttcatctcattcgtagatggat

SEQ ID NO: 274277 - DNA, 819 bp, Cannabis indica
gcgggaagcacaaacatttggcgtcattgctgaccctcatgactgtcatgactcgattgaatcgtgacaggtgatcgcttggatccgagttcccggtgtaagctgccatttcgggcatcttaaaatttttggggagctctgcttccaggatgtgtttggcacacggctcccggtcctcacaatcagagtcggagtcgtcgcctttctgtctccgggaaactcgggcgatgtcctttcggagtatggcaagttctgccatgataccttcgtttaacgttcccgtagagatcgcgggtccgtacttcttttggtccaggtgatcccgaagatcaccatggttcccattaatctgatttctcagatcgatgggagggcatttctggccccttcttcctctcccttcgggctcttggtgcacggaaacgctctttcggtcccctcgatcctgagggccaagactccctttttggagtttgcccctctgcggacctttccctttagggaaatctgagcggacctttcgcggatcctgcgcctttttctttctcccgggagtggaagcagggtttttcttttggttcccttcagagggataccttatagggctaggttccctagacctctgcttttgggcacttggtgaggattcctctggtccctttccaagtccagcaggaatggctttaggatgcacgtggattcctgctgcctccatggctttttgcatggccatcatcacctcttgcatcttttggttttgctctttttgggctgtgatttcagcctcatgatcgataactttttgtcttaagagtacca

SEQ ID NO: 274278 - DNA, 718 bp, Cannabis indica
gttagctattaaattttataatattttttataattaatgatatcttgtaattttaaccaaattatcctaaataattaggggccagccataaatcaggcgcgaaaaccttgaaaggcaccaaagccataaacaatggcgcagctcatccatcaaatttgtacttccatttcttccataaaaaagctaataccactcatccagaaattatttaaaaatacaaataatgtaataattttggtacattcccataatattgagaacaaacaaattccataataatttgacttcccaaatatatctgaagcaatatattctcattagaccattagtgttcccacctccctttattacaagatcctcaagattcttattcttcaatttatttaattaattataatattagaatctgaatactaaaattccaaacacgaaaattccttaaaaaatataaaccaaaatatagctaataggaattagcatttaaaataaaccctcttaaactttatttcagtttaaaatattctttaaatcataccttaactaaataatctttttattccgactaataaatctgtatagtgcataactttaactttaaaatattcttctgtcaaaattttcttatacattcaataccaaaaaacatgaaaatttaaacaaattaccctaaataattaggggccaaccatataataggtgctaaagccttgtaaggcgc

SEQ ID NO: 274279 - DNA, 705 bp, Cannabis indica
ttttcccaggtcatccgtagtgacatcatgtatctgggacaccatgtcccaccagaccaacgcatcctcttgaaattgaaaggtggcacataccaccctgtcatttccggtgacacccataaaattcaatatcctcgtaatcactgttagccactgctcggctttcatgaaatccggacctcccagaaaaaccgaaggtgcctgcttgcaaaacctttcatacaggggttccattctattcaccgttactactggttcggcctggacaacaggggcaggtgcccctggaacttctggcctagacactgcaggagcaccctgctgtctcaatctctgaatctcattatcttgctcctctattctggcttgcatttcagcaaacctaatttcccaattctgggcttcctgattggcttgggcagcctgtggcgggttaacatcatcccgaccacgagccctgcccctgggacctctacctcgacccctaacatttgggggaaaatgagctccctgaccttgatttgacccgaccgagttgccctgactactggtattttgcctggcgtccatctagtctgaacagcctgcgaaaccaagagttggcatatcaggtcatgatcaacgagagcttactaatgtagcttaatttaaaaattaaaaacatgcgcctattctactatcaggctactaacatgcttcctatta

SEQ ID NO: 274280 - DNA, 617 bp, Cannabis indica
gaaaagcataaatcataaaacatacataaatcccaggttatgatcagacgcccatacccctgaccacaaccctaactgtcgtgtcccacacgatactgagtcccgaacgtttgtacgatggtacttttgacaaagaactagggttcccaaattttccccaaccggtagaccggttcaacaaacggaattctggttctgggaattcctggaagccccatccgatagaccggatgctgcaggctttactgaaccggaattccagttcagtgcaggaaataatccaaaattcatatctcattcaattcgatcccaaaccatgcaaaactctccagacctattctaaatacctcactaaacattttcaaagcatcaaaaccgcgcttcatgcaaaaatacacaaatcaccacgtgagctccaagctttgagttcaaaactcaagcttggctaaagctcacctacacgcaacacaacctgctcaattcatcatgtttcaccataaaattactcctgaaaacgaacccaaacataatcaacaactacagtagcttaatcaacatttcaccattgaaaaatacaagattttgagtttaaaagcttcacacatgcatagaccaac

SEQ ID NO: 274281 - DNA, 810 bp, Cannabis indica
aagatctttttttattattattaaacaagttcttaataattgttttagaattagcaattattcataaacatagaaatgaaattctaagtgtttatgtagtattaactcttttcagagttgaatatactatagagtttgtatcaataataaaacacatacacatacaaacattataaatatataaatgtaattggtactggcacacacaagataaagtaaatgaaactcaattcataaatgcaattcatttccaaaagtgaaaactttattataaaattctcaaaattgaaggaattgtttgcaataatatgaaaataagggaataaaatcccaaactaataattgaaatctaaattgttctgaacaaaataattaattcaaaaattaataaaaatagaagattctgagcttcatcttcaatcttggactatttccacccatttgtccacccatccaattcaactcactaggatagcatccgagttcaagcagctggagctgaaataagaagaaaaaaataaacatggttagtaggtccagaattaacaatccaagtggataataattctctaaaacacaagagtttatagtatagaaagaaataccttgtttctttgctagaaacttagggcattggggtttccagtgtcccttttcattgcaatagaagcatttccttttggcttatcactgggagtagcaacctttttctttttaactgttttcactgcttgaacaggcttcttgctattcttccacttgttcttgttctttggtttggagtagaggtaaagtttgcctcagccttag

SEQ ID NO: 274282 - DNA, 535 bp, Cannabis indica
gtcctcttctaagtttgggttcgcaccattttaggtccagatcaagctccgggtttgggttcgtgtcctgggtctaggtcaaggttgggtccgagtcctaggttccaatctcgatctgagtctggattcagtcctgggtctaagtccttggttcttatcgtggtctgtgttcgagtttgggtccgggtccgggtctagctttgggtctgattctaggtgtgagtgttagagttcgagtccgagtttgtgtccaggtttgtctccaggtctggaccccgatctaggtcaaggttcgggtccagctccaagttcttatcccgagtgcgggtccaagttttggtctgggtcaggatctctgtccagatcatgtcaagcatttcgatcatagtcttggtcttgtcccaagtccaggttcgtatccggatccctatctaggtacaagtatatgtttgggatcgggtcccaaatatagctccaagtccgtgtctcaattccggtctgggtacaagaccctgtccgggcccgagtttcagtc

SEQ ID NO: 274283 - DNA, 549 bp, Cannabis indica
aaagagttttatttagggcataaaacccaacaattccatggatgccatcttggccgaacttgccggagctcacactcctgacgctccccttcctttaacttcctcccaggtggccattccctagaaagcttcttccagtgcccctccagacactattgacttagtcgatgaggaggaggcgcttccggaagaaggtcaagaaaagcaatggggcctttctgaggaagttgaagaaggtaaagaagagcaacgggctcttcctgaggaagttgaagaaagtgaagaagagcaagaagttgctctaattcgcaagcggaagggtaagatggttgccaaggaagagcccaagcgtcagcagagagctgatactccggcccctggccttgatggcgggatctctcccgaggtggaggaacacacagcccctcccaacattgtgctgactccggttcctggagatgaggcgagacaggaactccggatagctaaacacaactacgccatggacgagtactcccgggggcatgctgacgtggaggctttgaggag

SEQ ID NO: 274284 - DNA, 602 bp, Cannabis indica
gttcggggatctcggatcccggtaatttcggccatgtcagctagggagttactgcatggcgggtgtttagggtttctggccgtggtgatggacaccactcggccagataccattcggccagaggacatcaaggtggtttgggaatttttagatgtttttcccgaagaacttccaggtttaccaactcagcgggagattgattttattatagattttgcacccggagtggaaccgatttccaaagctccatatagaatggctccagctgagctcaaggaattaaagattcaacttcaagggttactggacatagggtttatccgacctattgtgtcaccctggtgagctccggttttgttcgtcaagaagaaggatggaactatgagaatgtgtatcgattatcgtaaattaaacaagctaagagtgaagaataaatatccactacctaggatcgatgatctttttgatcaactttaggggaagacggtcttttccaagattgatctccgatcgggttatcatcagttgaagatctgagaggaggacattccgaagacggctttccgtactaggtatggacattacgaattcttggttatgtc

SEQ ID NO: 274285 - DNA, 513 bp, Cannabis indica
ccgcactgaccgcgtgctcggagacggccaagtacaagaacaagtcctctctgagaacgggttttgacaggattgggggcttggccatgtgctctttcagtttttcgaatgcctcctcgcactcgtttgaccattcaaacttttggcacttcttcagaatgttgaagaagggaatgcacttatctgtggaccgggagataaaacggctcaaggcagcaacctttccggttaggctctgcacgtctttgtgtttcttgggggatggcatgctcagaagagcttgaattttttctgggtttgcctcaatccctctctgactgacaatgaagcccaggaacctccctgatttgaccccgaaagtgcatttctttgggttgagcttcattccatatctccagaccacttcgaaacattctgctaagtcatccgcgtggttattgcacgccttagacttgactaacatgtcgtctacatacacctccatgtttcgcccaagaggcctttgaacatccg

SEQ ID NO: 274286 - DNA, 505 bp, Cannabis indica
ggggtcctcctgagatcatggccaccctcccattgggtctgggtggcagacggggatatgctccttgtggcaaagcccctgtcgcctgacccagattaaggtgaggcagccgattcttgatccattcatagaggtgccccaatcggattaggttttcaatctcatccttgagatttttgcattcattggtgttgtgcccaatgtcgttgtggtactcgcatctcttgttggggtccctccgggagctatccttgtacaggggaggtggtctccggtagtgcgtattttgcctggtagcaaagtacacacgctcttgggagtctgtcaactccgtgtactgggtgtactgtggagtgtaccccctcttttgtcgcttctcctccgtccgggtgctgcctttggaggatcgtttactcctcgagccctgggaaggacctgccaggctggcggttggagcggagtgcgagggagcttgtccatttatccccgagggatttccaaaatg

SEQ ID NO: 274287 - DNA, 704 bp, Cannabis indica
tttgtatattttaacaagattgatgtgttgttattattttgtcaatttataattgtctttttgttattttatagttgtttttttatatttttgtttaggtgttcaatagttgttttataattagttgtgtatattttcagtttattccagacaatatttttgttgtatatatgtgcatttgttttcctaattttatgctattttttagttgtgttaagtggcttccataatttttttttgttgaacaattattttttattaatttttttattcatgtatattttttgagaaattaccacatatactatttttaaatttattgtttctgttttttcaggtggtttctcaatagtttctatgtgggttgctatacgaattttggttgtgatttagattgctccgttagttgcaatatgagtttctatgtagaattctgtaaaaaatcaaaaaaaaaaaaaaaaaaaaaaaaaattgaaagtagtaaaattgacaaagccctttatttttttatggtgtatatatatttttagtttgttcttgattaattttttttgttgtatgtatgtatgttgctttgtagatgtagatacatatatttagtttattttgtgacaaaattttttaaaatacaaatgataagattttttgttttttaaattgatacaatgtgcagtattgatattgacatatcaattatatattac

SEQ ID NO: 274288 - DNA, 333 bp, Cannabis indica
ttttttttttttttttaattttacatttatataaacttgaggtaagacttaagggtacatttatcataaatagaatgaattggtagtccatactccataataagattaggctatgattgaaccatacattaagaaacaatgaatctaaaacattttgaaaaaaaaactaaaacttcaactcaaacgacataaagatatctataaactcacttataacaaacaaaattgtatagcagaacaaaatttgaagcttctctatgatcctcataagcatgtcagctttgagatgaaagaaaagtattacccttgttagatacgcaataaggatcgtcc

SEQ ID NO: 274289 - DNA, 511 bp, Cannabis indica
ataagtttatttggcatatatgcttatactcatatatgcctaataaacttattagtttattttgacatattgaaatatattttcattctttgtttacatagtagccttttcgtatagcctatcatcgtatatgctaataaatctattagtttattttagcatattgaaacaaatttttatttttcttttcgtatattggaataataattcagttcatttcatatagtctaccattatatatgtcaataaacttagtagattctatttgttggaacaacattttatttttctccaatacatagtaaactataatcaaacatacgtcaataaacttattagtctatttttcatatattgtaacaacaatttattttttatttcaaacacaatgtttgcctataaaataacaaactaattagtctattcttttttaggtcgagacatcaaatcaaatttgattgtatacaaaatacatgactgtaacatgttttacatagtaaatttggataac

SEQ ID NO: 274290 - DNA, 659 bp, Cannabis indica
agatggctattatgagttttcttgcaggactctcatctgaatttgactctgcaaagtcacaagttctctctggttctgatgtctcctctttacaagatgtgtttactcgtgttcttcgcacagagactacctcttcaactcctcttaatagcgccttggtgagtcgtaataattctgcaccggaaagaaactctactccaagtggatttaaaggaggtaattcacaaggacctgataaccgcacaccaaattctgggagcatcatgtgcaattattgtaagaaaccaggccacaccaagtttgagtgtaggaagttacaatttaagaatcgacaacaacactctgccaatattgcaagcactagtgatgcatctgacaaatcggtccttatttctgctgatgaatttgccaagttctcaaggtatcaggaaacacttaagtcttcatcttcttctgtcactgcgattgctgattcaggtaactctaatgcatgccttctttccaaatcctcaaaatgggtcattgattctggtgccacagatcatatgacaggtaattcccgtctcttttccacttttcagtctcacagtcccacttctgttgtcaccttagctgatgggtcaacagcttctgttcttggatctggcactattgttcct

SEQ ID NO: 274291 - DNA, 678 bp, Cannabis indica
actgtagagctcgacataagcttcgaaatggtacatagaatgtctaaaacggacacccgagtgaaaaattatggctaaaatacgaaaatcgacgattcctgaaaattgaccatcgggaattccggttggtgcagccctgttccatccggaattccggttcacaacagcagaaactcgaaaatttcagctcttcaaagtcccaaaacttgctccaaacctaaccaattgttcccaaactttacagaacagtataataacataaatataacatatctcaagcttcaaaacacaaaaattcaatccctaactcaaaatcacatgttcaagtgaagaaattcaactttggcttcatcaaacgaaactcaattcaaacagccataaagaccacttaacaccactcccaacatactcaaaaacctaccctaaacacaccccaaactcagtttgattcctacagcaatagaaaagcaaaaccctacctcaaaaccaactcaaaaactagtgttctcaacccaaaaagtaggaaacctacctcaattcacttctaggctgatttggaattgaaattctgcttggaaaaagaaagcttgttgaagaaaatcccctagggttggctggttcaagcttgcacgagagagagaaggagaagaggtttttttttatggttacttggtttct

SEQ ID NO: 274292 - DNA, 536 bp, Cannabis indica
aaagagatgcgacagctatgcgacgatttggggattaaaaaagctttttccgcagttgcttacccgcagagtaatggacagactgaagccgttaataagataattaaacacaccataaagggaaaattagaaggtcgcaaaggggcttggccagatgaattatcgcaagtcctatggtcctataatacgacccctcgatctacaactggcaaaacacccttctcactttcatacgggtgcgaggccatgttgccagttgaagttggggcaggttccctacgcagggatattttcaatatctcgcagaacaacgagaatcagctattctgccttgatcttttggaggaaaagcgtgataaagcgcaactacaaaatgcggcttatcaacagcgaaccgcaaggtactttaactccaaagtgaaggtaaaaaccctgcgagcaggagacttggtccttagaagagtaatgccaaacaccaaaatcccgtcgcacggggtttttggggataattgggaaggaccatacctcatcgcaga

SEQ ID NO: 274293 - DNA, 232 bp, Cannabis indica
tactgccccgaccgcaactccacaaataagcggcatacaattctctgccacccctgagtatagtcttggcgcccgcatcatcccatttcggcaacccgttcggaatgaatgggcaaactccttcgcattctgcttcggctgctagcctggcaggcccttcccagggctcgaggagtaaaaggtcctccaagggcagcacccggacgggggagaagcgccagaaaaggggtac

SEQ ID NO: 274294 - DNA, 176 bp, Cannabis indica
gataatgtgaaattcctctctatatgtctactctcttgggatactggattctatacttttggcaactacttttggttattcaggaagtaacactagtagttaagacaagttggaacggtgccacaaatgtatagaactttccttagactgaataagtacctttcctgcaactttaa

SEQ ID NO: 274295 - DNA, 572 bp, Cannabis indica
tgttgaaaaaggaagcaaggaagaagtggaacataagctgaaattgaggcagattgctgaagcaatgctgaagcgaattcagcattctggcagtgacttggaaacacgagtttcacttatccacctcagcaaatttggcccagtcactcaaaatacaccagctggctgttgtggaaggagagggactaaacctagtgggccaaagtggaaaaagattgggcttctactttggggtataaattttgtaccctaaaaacccaacaactaaaaagaagaaagaggtgaagtacaccaccatcaacctccaacatgtaaggagcttcaattttttggaagagaagtaaatgcagaaaaagtacagcagaggaggaagagaaaaaggggtccaagctttagtgtttgatttttcttttaccatctcttaattgttttctttctctttctcttttcttgtttcttttacttagatattaaaacttgttaacttgtaaacaaagggcagcatccatggatgaatattttttactttggattttattttcttacttcaatatgagctagacttttgaggc

SEQ ID NO: 274296 - DNA, 518 bp, Cannabis indica
aggctatgactctgtcagcttgcatcagaacacatcccagaccctgtctggatgcatcacaataaacaacaaatttctcttgatctgatggcaaagctaacaccggagctgttatcaaacgttgcttcaactcctgaaagcttgtctcacacttatctgaccacacaaatctctgatttttcttggtcaattcggttaggggcatagaaagtttagaaaatccttcgacgaaacgtcgataataccctgctaacccgagaaaacttcgaacttccgtcacagacttgggcctcggccaattcttcactgattctatcttgtttggatcaaccataattccattcttcccaacaatatgacccagaaaggacacctcagacaaccagaattcgcactttttgaacttggcatacaacttgtgatccctaagtcgctgtaacaccattcgaagatgatgctcgtgctcctcttctgactgagagtatacaagaatgtcatcgataaacactataacgcag

SEQ ID NO: 274297 - DNA, 832 bp, Cannabis indica
acttaacattacagcgactcccaactggttgtaaatcaagttttgggagagtacatggctagaggagaaaaaatgatagcctaccttagcaaaatacaagacttgcttgcccaactggaagggtacaccattcaacaaataccacgagaagagaatgctactgctgatgccttggcaaggttggcaacaagtgaaaagatagataaagccagccttgtgccaatggaatacttacccgagccaagcatccgcactaaagaaaaagtactcctactcgatacgactcaatcgtggatgacccccatagccgcttacttagaacaagggacactgcccaccaacaaaaacgaggcaaagaaaatgagaaggaaggccacccggtacctaatcattgatggtgtcatgtatcggcgagggtactcgatgcccctactacgatgtgtacatcaagaccaagcccaacgactaatggaagaagtccatgaggtttttgcggtaatcacgctggggggcaaagcttatccaagaaggtactgaggcaaggattcttctggccaaccatgatagaagactccatggagtatgttcgaaggtgtgaaaaatgtcaaaagtttgcaaaaataccaagggctccacccaacgagctaacgcaaatgcagagtccatggcccttcgctatttggggtatagacttgatcggtcagttgcctaagggcaaaggaggagtgcaatatgcggtagtagcagtcgattacttcacaaagtggacagaagccgaacccctagcaactataacatccaagaaggtgcttgactttgtggtcaagaacat

SEQ ID NO: 274298 - DNA, 636 bp, Cannabis indica
aaaaaaaaaaaaaataacaaaattgggcccttttcttgcgtgggccctgtgcagtaggtctgcctgcacaccattagggtcgggcctgtttgtcaaatatattgggtcatatggtattttctcgttctcttcatcgatcgagatatcctccttttcgcccaagaaagattaattgaattatcaaaaatttagagcaagaaatgcaatgaagtgcatttaaatatattttttaggggtatacaaattaatattagcaattcaaataatttatggttggcttgtctaggatatgggatctcacgctgcatctttactcttatattggatggtgcatataaacaatgcattaggaattagatttaactattaagattgctgaaacatctagatgggttgcaaaatgaccgtatcatcttctacaatattaaaagttgaaatttgagggcggtaatataatactaaaagctgctattagtggataactttgcttatataattaaatttattaacatgcttcttgcagaaaactatataaatgaagaaactatgatgctcaaatttcattacacctttaataattttctcaacaagtattaatttgtaacttgtctgctcagatctcgtcgacgatggaag

SEQ ID NO: 274299 - DNA, 545 bp, Cannabis indica
gaccccatataaagcctagctgctataaacttccccttcttgacagcagccatgaaactcatcttcgaatatctcttcctgaagtggctcaatttcctccaataccaactaacatctccttttaattcatactcccaaaaatcactccctttcatataaatgttgttaacccatttaacccaaaggatatcatgtttatccattattgcccaaataaatttccccaagatagttttgttccaagtcggcccattcttgaaacctaagccaccgaacggttttggcaaacaaacaaaatcccgggaagccaaatggattttactcttctctcctttaaaaccccataagaaacctctacaaagcttctcaacctattttataacactttgaggaaggataaaaatgctcatccagtaattacgaagaccaagcaaaattgagtggattaactgagctcgcccagcataagacaagtgcctagttgcccaagttgctagccgcaaattaaccttctaaatgatagtctcgcaatcttctattcgcca

SEQ ID NO: 274300 - DNA, 657 bp, Cannabis indica
tgcactaatataaaataatcagtacatttcaaataatcctaaattctgacggtgcttttcaaatgcagttcctgccaagaccttggtgaatggatcagctaggttgtcctctgtgtccactttttccaccagtacatcccctcttgccacatattctctgatgatgtgatatttcctttctatatgcttgcttctcttgtggcttcgaggctctttactgttggctatggctccagtgttatcacaaagcaaaaccagtggtttttccattccagggacgacaccaagtccagtgaagaactttctaagccagacaagttcttttgcagcctctgtagcagctgtgtattctgcctctatggtagagtctgaaatggcagtttgtttagcacttctccaaaccactgctccacccccaagagtaaacaccatccatgatgtagatttcctgtcgtcaagacatgcctggaaatctgagtcggtatagcctacgggatttaaagtaccacccttgtagactaacacgaattgccttgtactcttcaagtacttcaagatatgcttaaaagcattccaatgttcctgtcctggatttgtctgatacctgcttacgagtcctactacataacatatgtcaggtctagtgcataacattgc

SEQ ID NO: 274301 - DNA, 516 bp, Cannabis indica
ctttccagagcatcaatatatgtcataataaacatattccacaacttaaacccaacaattgcactaaaaatcaaaaagtgccattaaagcaccaagcttgagttccatgaactcaagcttgcttttcacaaccaaaatcacaattaatccacttagagcagctaggaaatattatagggtctaaaacacatatttatgcatcaaaattcaacaataaaccccataatttcagattgcacaataattaaaatcatgccttaaactccaaaacttcaagctctaaacttgagcttcaaactaacatctttccaatattttccagcagctcaagaccaaataaaacatgtattttcaacctagaaaataccctaaaatcttactccaaactcaacaaacataagtcccaactaaatcatgcaatttcaccaagattaaacaccaaacttaacaacatgcatacacaagaacacatcaactatacatgctattaaagcataaaattcagcaaggaaaatc

SEQ ID NO: 274302 - DNA, 536 bp, Cannabis indica
tctctctctctttccttcggctgaggcaaaccagggcaaggatcaactttttcatcttgtttttctgggatttagctagaattcaaggaggtttcatcaaaggtaaagccctagaacttttgaagatgtgattttaagctttttctttggtttgaatatgtgaaattgtaaattaggggctgttaaggtttgaattgcctagggttcgaattttagggtcttgttgagttgattttaagtcctagctgctggttttaatgattggtttaagttttgtgcaattctaagtttagagttcaaagctttgagctttaatggaaaattgattttgaatggtttgttctgtgaaatactgcctggatttgttgcttatgcattgtataggagctctggaaagtttcattgcatttggagaagaattgagcaagaaatgaaggttttgggaaacctggtgcaaaccggctagccggtttgcagtgccacaaaaaccggctagccggttttggcagggttccccgggcctttcattttctcaa

SEQ ID NO: 274303 - DNA, 485 bp, Cannabis indica
tttaaatggttaaattggaaaatcggcatttttgagaaaataggattgaaaaatgacaaaatagcaaaattacaaagtgaggccgattatccatatcatggccggccactatacaaagtgttttaccatttatattttttttcattattttaatgccatacaattcaaacataaccctatgtggtattctataaatagaaagtgatggtttcaggaaacatgcacacgcatctcattcctttaagagaaaactttctagccaccacttcccttctcttttcctcttcaatttcgaaccctagtgatagagtagtgcccacacacatcaagtggtatctcaatcatagtgtggaagattgtgtagaatccaatcaagaaggagaatcagcatcaaaggaaggagacaaagagatccagattcagatcttgattatgctctgctacagaaaggagtcattatattctgctacacccaatgtaaggtt

SEQ ID NO: 274304 - DNA, 507 bp, Cannabis indica
tcatacatatcccttacaaacatgcattttctaaaagccccaaaataccaaaacccagaaagaacaccctttctcaaataaagaaaacaagaaatacaatggaactcgaaactaacctttagtttggcaagttgttcctgcggttactcttgattgcttctgagattgaaggatgctttagatgaacggtagaaatctgagcaaaaggtgagaatggttttgaagtttctgtaagggagagcagaagttaagaaacaagagggaaaaataggggatttgattcgtatcaaagggtttaaatacccatatccctcattaattgggatcacgacacgtggcaactggaatgcctaaggtcgcccaatccaacggccaaccatggccacgcctacacgaaaaccgaggagttttagtgacgtggcaccataaatgcaataaaaggtaataattacagccgtcatttttcgaaaccctcgatgggacaaccgaaaggtcacctcctcgtga

SEQ ID NO: 274305 - DNA, 610 bp, Cannabis indica
actccattttggaacgagttacaacaagaaggagcttccaaccttcaagatttccaggagagagtccaaaaatatatcaacctggaagaggcccaaatagtggcctatgggggatactatcctaccgggatagcaggatacgtacccagagcttagctcccaggcactttgccagcagccgctccaccgatgagcagcatacaattttctgctactcccggatatagccaaggccaggccttgccccccgcatcttctcactttggaaatccctcggggatgaatggacaagccccgtcgcattctgctccggccacaagtttagccggacattctcaaggttctcgaagcagaaggtcctcaaaaggcagcaaccgaacggaggataagcgatcgaaaagggggtatactccccaatatacccagtacacggagctaatggactcccaagagcgtgtgtattttgctaccaggcaaaacacgcactaccggagaccgcctcccctatacaaggatagctcccggagggaccccgataaaagatgcgagtaccacaacaacattgggcacagcaccaatgaatgcaaaaatctcaaggatgagatcgaaa

SEQ ID NO: 274306 - DNA, 567 bp, Cannabis indica
cccattagtattttgtcttttagtgtaaaatttatcaaatgaaaattaaatattaattataatgtttacttggctgaaatgaattgttataggtgtcctttactcattttctcattttacaacaaattacacttagaaaaattacaaatttctcaaaaagctctctctcttttcctctctcattttcggccatttgaggcagcaagaagagtggattttcctcttcattttcaattgattttcagcaagttagagtgtttctagttgaggtaattcttgtctagctttcttcctttgttttcttgaaattgtgatgaaaaagatgagtaatgcatggaggattttgatgatgttgctgctgcttgttgttgttgttgttgtttctatgtctaaaatgttgaattaaatatgtttagttaggttgaaatgcatgctggttgttcttgcttgagttggttaattttcttgttaagaagctaaggttttcaaagtaaaaattgaggatttggtggctgtagttattgcatgaattagggtttgttttttgcagtgtttttatgcttgatt

SEQ ID NO: 274307 - DNA, 581 bp, Cannabis indica
aaaaaaaacaaaaatattgtcgcataatgatgtaaagatattgcacacaaatcgcaaaaccattaaaatcgcacaaaatcgcaaggacatcgtttaatgtcgccaaaaagaatgaaagtcatccctaacctctgatttttgttggcatcgcacaacaaatcgcacaatggtgtacaaaattgcaaaaattcgaaaaacccaaaaaaaaaactagcatttgggtatgaactctactttcatttcagatcacaaaaatgacataatacaacgaataatgtgtagatccataaaatataataaaaactaacaatattttgtataaaaaatacttacccattacttttgtagtgaggaaatgaaaatttttgtgtggaaaataaagcttttggaggtccggctgcgtggttgtggtctggcgtggttgaggtgcggctgaggtcatcgtgggtggtggtccggctggttttggtgagtgatgggtggtggtggctgagggaaaacgagagaatgagagagaaagagagaaatgaaggtgaggttttttggttttgataaaatggtattttaggattaaaaaagaa

SEQ ID NO: 274308 - DNA, 924 bp, Cannabis indica
ctagttaaaaatagtggtagagcagtggctcagttggagtatgcaagtgttatagggagctttatgtacgctgcccaatgtacaaggcccgatatatcatttgcggtgagtaaacttagtaggtttactagtaatccaagtgtggatcattggaaggctggagagttttgggttatctaaagaaaaccaaaaacctatgccttcactactccaaatttccttcaattttagaaggatatactgatgcaagttggatagccaaccttggggataatgtccacaactggttgggtatttaccctaggtggaggggcggtttcttgggggtccaagaaacaaacttgcatttctcattccacaatggaagcggagtttatagctctagctgccactgggaaagaggccgaatggttaagagatctcttaattgagattccaattattaaagaggatgtatctacaatatcgatacattgtgatagccaagcaacattggctagagcatatagtggagtatataatgggaagtctagacatattagtctaagacatggatatgtaagtgagttgattcaaagaggagtcatctcaatatcctatgtgagatcaagtgaaaacttggcggatccgtttacgaagccactaactagagatttagtggaaaagacttctaaagggatgggactaaaactccctaaaccggttcacaattgagggtaacctatcttaatactagtaactttactagtgttaggttcaataggtaagaacaaatcaatgtgtgaacaaatgtgataagtactatatgtcccatcctataaagttgtgaagtacttagtgagttaccaatttgagggttagacttttaaaagtctttaatagaattcagtttggaaaacaagtattttggtaacaaatactgta

SEQ ID NO: 274309 - DNA, 537 bp, Cannabis indica
aacatccactgcatccggtggctcagggcagaacaagaggttccaagggaaccagagtagaggcagccgtcagggtggtgcagagacccggttttcttatcctgagtgcccctattgtaaaagacaccaccatggtgaatgcagaggtcagggatgctttcagtgtggcatgcccagacattacaaaagggattgtccccagctccgatcagaggcacccagggctccggcgagaaccactccagctagagtgttcgccatcacacaggctgatgcagatgccagcccctcagtgtaacaggtcagctctcggttaataactcatattactcagtgctgtttgattctggggccacacattcttatgcggcagccagaatctttagtaaattggatagaccgtgtgatagttatgaatcagggtttggaccctattacctggcggagagttagttatctccaaaaggtggattaggtctatgccgatcagaatagatggtagagagttaagtgctgacttgatagagatgagcctag

SEQ ID NO: 274310 - DNA, 662 bp, Cannabis indica
aagcttgatattttggtcgttggtagaccaagccatgaagactccatcatcgaagcgcttagggcaccggccgcaggaaacgggagagagaagctcggctctttttgccttcttggaggcttgttccttgaagtccctgagctccttcagctccgcggctagagcggccctggactctaagtttgcttggtgagtttcctctaaggatctcaccttggcaaccatctcgtccaaggcttccctggcctcccggagctcccgcttggcctttgcagcggcctcactttccgccctcactcctcttgatgctgggcctccagcctgtccctccgctgggcctcatcccggatcatggcctccgcctgggcttccctccgcttggcctcctcctcattggccttggcagcagcctcccggcgctcagcagcctcctggtaaagctgcctctccgcagtgagatcctgaaggaccttcctgacgtcgttcatgtccccaaaatcagacagaacgaagccatggttaattatgttcttggagaggcggccagcctcagcagcaagctgaacaacaatacaagtgtaagaaagaatccccaaaaaagaaaaataaagggaaaagcaaaattacaaagcacttaccacagtgagggagtggcagaggtc

SEQ ID NO: 274311 - DNA, 529 bp, Cannabis indica
gtgaagaaatagtattttagagtgaatttattaattaagagactttatggaatttaattaataaatgttataaatgacaattttatttgataattatgttaattgttaaataaatagttttggtatttatagggttgaaagtgtaaaaagtggtatttgtgaaaaatagataaaatagttgagaaaaatggcaaaaaaaccaaactattaaagggcccactatgtggtcggccactaggttgttattttacactattttttttatcaatttcttattccaaataattcaaccctaaccctagtataaattagtataaaaggaaggctatggtctcattatccaactaatgccttttaagctaaaaacctagttttctctctaggttcatgagacctcttccttcttattcttcttctaatttcaaaatactatagccttcctcacaaataatttcaatccttagtgattgagtgcatgcccacacatatcaagtaagttctcaatcatagtgtgtaagactgtgaagaa

SEQ ID NO: 274312 - DNA, 558 bp, Cannabis indica
actaatataaaacaaaagtgcatttcaaataatctcaacaccttgatatacaaaccaagtgtagtatgtagtatactctccgtaacaggatctgacaggttgaatgaacacaaccttttctccaccattacatttccttaatcacaaaatacttgatattgtgtaattcctctctatatgtcaactcctctagggatactggattctttactattggcaactacttttgtgttagtcaggaagtaacactagtaattaagaaatgttggaacagtgccaaaaatgtatagaacttttcttagactgaataagtatctttcctgcaactttaacattcagtctctctctggtagacttagagacttcagataggtttttacacttctccaaaatcactactccacccccagagtaatcaccatctcatcagcagactttctagcactaaggcaagtctagaaatctaatttggtgtagtctaagagtattaaatacatccttatcgactaacatatagttcctcttcttaatcttaagatttacttgattatcttccaa

SEQ ID NO: 274313 - DNA, 783 bp, Cannabis indica
gttttgtcgttttggcattccgcataaactcatttcagacaatggaaaacagtttgactgtaaagagatgcgacagctatgcgacgatttgggaattaaaaaggctttttccgcagttgcttacccgcagagtaacggacaaactgaagccattaataaaataatcaaacacaccataaaagggaaactagaagatcgcaaaggagcttggccagacgagttaccgcaagtcctatggtcttataatacgacccctcgatctacaactggcgaaacacccttctcactttcttacgggtgcgaggccatgttgccagttgaggttggggcaggttccctacgcagggatattttcaacatctcgcagaacaacgagaatcagctattctgccttgatcttttggaggaaaagcgtgaccaagcgcacctaaaaaatgcggcttaccaacagcgaactgcaagatactttaactccaaagtgaaagtaaaagccctgcgagcaggagacttggtccttagaagagtaatgccaaataccaaaaacccgtcgcatggggtctttggggataattgggaaggaccatacctcatcgcagaaaaaattggtgatgcaacgtatcgactcgcaacactcgatggaactgcgattccacgagcatggaatagcgagagtttgaaattttattatcaatagtactcgcattattcgattatgttcactcttgtacttatacttagatatttttcattcaaaaggaaaaaatcctaagtataggggggtat

SEQ ID NO: 274314 - DNA, 956 bp, Cannabis indica
caattggggtgcaaaaagaaaaaagaggacatagaagggaggctggctgcactttgaagaggagtacgaaaattacagcagaaatctaagtacagagaaaaaagaaagagtacaaagaaagaagaagaagattgagaagaaggagaagaaggcaacctacaaagaaaggatttgagctcaaactcatttctcttgctctccacttcattttgtatcattttcttctctctaattttctctttaactccatgaacaatttattttctggtttgttgtttttaatttcagctatgaactaacttctttgagatttgggtggttatgaacccttgtatggactagtgttttgattttgcaatgatgaagtaatcttgtcttagttcaattagttgtgatgaaatgttgaatgaatgttaatttttggccatttttaacatttagcaagctagatcttacttggaaaagtaagacctagttgaacccttctaattgatgcatgatttttaccttttcttttaggtattaattagtagtgaaataggaatattttgctaccatgtataactaaggatttgatgctttattgggctatttgtgatctaaactgatgtaggaatgcattgtgagattatgaatggttaattgcaagttttggaaaaagcttgctggtttttgttgaaatttgttaactctgccaggattgctgagtcattgctgggtcattgctgtatcaactgggacatacaagtggaaattaatcacccaagtctattttccaaatctgaaattaccaccattttaatcacttttagtttcttatttttagtttatttagtttaaaaaattagttctcaagtttagattcaaggctataaatttttcttgtgaattaatgtgtgactttattttatttttatttgaaattcttggaattacttttagttgatttaacatta

SEQ ID NO: 274315 - DNA, 323 bp, Cannabis indica
tttgtttttacggaactcgattccgataaaaattgagaaagttatgaattttggaaaatcgggatttcgggtatgcatgggtgctcaatcgttgtgcaccaagcactcaggatgcgcgcgcgtgagcctggcccagcaccctgctgatccgcccatgacgacgctgcatccgccgagttttgccgcacatcccaccctgcatcgtccctgtccgcgcgcgtaaggccctgcatgcagcctattttgggctgctcgtgcagccttgctgccagcagtcctaaaattgcgattttttgggattttttcccaaaaatccaattttt

SEQ ID NO: 274316 - DNA, 826 bp, Cannabis indica
atgctgatttattttaaatgaaatatttgatactcaaactcaatccaattattaccaaaagttttgctaaaaatcatgactttgttgatttcttttttttttttttttattatattatttatgaaatttgagaagattatcaagatactaattagtcaaagatggttttatatattgtacttcatctacattatattttctgcatatgatgattaattatgggattttggaccccaagccctaaatattttactctgcatgtggttgaatacttgaattaggattaaaaaaaacaaattaaaagaggaagatagagacaatttatttttctttacaaataagtttgaagaattagttcaatgcatggttttctgcattttttttattaggaaagtgttagccctttggttcatttctttgcctatttttctttggggtactttttgttgccttttctaatcataaagttgccttagtttaaccaatttgatgtaccaaactagtggcaaaccaacataaagttatgaagttgaaatggccaattgcttgtcatttagcaaatataacattttgactgaacactattgggtttctttactatgataatacgaaaaaagagaaaaagaagaattgggaaagatgtctcgaaaagtatgtctttattttaaagcatatgaatttctggtctttgataaagatgggcaccattagttgtcttaattctctttggggtcaaaaaaattgttttgaaaaagctttgtatgctgtgatttttggtatttgaacatcatgaatggtagttgtaaagattggttttttggtactc

SEQ ID NO: 274317 - DNA, 622 bp, Cannabis indica
atctagtctttaaacatcttgttgaccaatctttggtatgtagctccggcatttttaagaccaaacgacatgactttgtagcagtagagacccatgtctgtccgaaaacttgtatgttcttggtctggcagatgcatttttatctgattgtagcctgaataagcatccatgaagcttaatattttgtgcccggctgttgcatcaacgagctgatcgattcttggtagtggaaaacagtctttagggcatgctttgttaaggtctgtgaaatcaatacagactcgccatttcttgttcggcttaggtacgagtacggggttcacgacccaagccgtgtaaaaagcttcaatgatgaagttgttattgcgcagcttttcaacttcatctttcaaggctactgctcgctctttatccagtaatcttcgtttttactgaactggcaagatgtttggatcgatattcaggatgtgtgaaataatagaaggatcgattctgaccatgtctgcatgtgaccaggcaaaaacatctgggtttgctctcagaaattttagcaactctgattttacttcgagcaacaaacccttcccaatttttagctttctggccgggatagctggatcga

SEQ ID NO: 274318 - DNA, 590 bp, Cannabis indica
tagaaccagctagttttttcttcatcaattctaggtgatttctagcagctctaagtgtaatccaagccaaggtaaggtctcttgtagctccttctttgatttcttgggttttaagttatggaagtatgcatgctttgtggtttttgttgttgtagctgctgttagtgtttgattgtgttttctgtagttaaattatgtttggttatcttagtttgagctggttttagtggttgttgattagtttaaccaagctttgagttttgaactcaaacttggatctttaatggtggattgtgtttatgagcatattagctagttttgttgcttgagatatgttctttgtggtctatatagcaggtctggaagttattgtggtgtttggggttgatttggttgaaatatgaaatttttagtcattcctgcactgaaccggaattcaggttcagaggggcctgtaggaaccggaattccggttggtccccaggaaaccccacagaactggaattccgattggggaaccggtctaccgattgggacagttttgggaaccctagttttccccatttttgagatatttagggtattgccat

SEQ ID NO: 274319 - DNA, 931 bp, Cannabis indica
gtttcttgaagtttagaagtagaacttttgcatgcttgatgaatttggtgttatacctgctgtgtatgtttgttattgttttcttgggcttgattatgtttagatgaatggattagagcaggttgtggtgatccttagttgtggttattcaagtttagaattttggctcaaaaactatgattttcaaggtaaaatgatgattttcgttgctgtggttgttgttattatttagtggtgttttctgtggttaaattatgttgaaatagattgaattatgcatgatttggtggttgtttgaagggttagtcaagttttgagtttttgaactcaatcttgaaccttcaatggtgaatcttgtttctgtgtttgaagcttggtttcattgcttgggttttgttatttggggtatttagaacaggtctggaaggttgcatgaagtttggggttgatttgagtgagaatcgaaattttgaagtttcctgcactgaaccggaattccggttcagtatagcttgtaggaaccagaattccggttggtgttctgggttcctcccagaaccggaattccagttgtagaaccggtctaccggttgggactattttaggaaccttagttcttcccatttttgtgttgtttagggtattgccatgctttttatcgatagggaaacttttagtttctagtttaaggccccgggaagtgatttagcgtttcacttatcaagtgttgtgattattatggtttaggagcctgtaaatcgccgagcagttcgttccactcaggttgaccggcacacctgaattcgaaatcgaggtaagattagtatatcagtatgcatatgtatttacatgtttagcgtgcatgttaagaagcctgttagattacataaaaaaggaaggttggcttcgtaccatccgacagtgtcacatc

SEQ ID NO: 274320 - DNA, 490 bp, Cannabis indica
tctatttgtgaatttatcacttattaagggcgaaactgtaaagaaagagtttatacggtatatttgttaattaagagactttggttagtctaattaataaatgtaataaatgacaatattatttaataattatttatagttattaaatagttaaaattgacatttaaatggttgaatgtgaaaacttgcaattttgagaaaatgggtacagaaatgttaaaacaggaacgttgcaaaagtgaggcccatttccatatgccatggccggccacatgcatagcttttatcatttaatgttttcattattttaatgccaagtaattcaactctaaccctatgtggtattctataaatagaaagtaatggctttagaaaagtaatacaattgcatctcattcctttcagagaaacttcctgaggcgccacctctctctctctctttcttcttcatctttgtttcgaaatccctaagtgatagagtagcgcccac

SEQ ID NO: 274321 - DNA, 407 bp, Cannabis indica
aggctatactgattcagattttcaaacatgtcttgatgacaatctacatctgggatgggtttttactcttgggggtggaccattggtttggagaagtgctaaacaaaccgcaatttcagactctaccatggaggcagaatacatagctgccgctgaggctcctaaagaacttgcctagcttagaaagttcttcacaggactcggtgttgttcctagaatggaaaaaccactagttttgctttgtgataacactggagccatagccaacagtaaagagcctcgaagccacaaaagaagcaaacacatagaaaggaaatatcacatcatcagaaagtatgtggcaagaggggatgtactggtggagaaagttgacacagaggacaacctagctgatccatttaccaaag

SEQ ID NO: 274322 - DNA, 713 bp, Cannabis indica
acagagacctaaacaaaaagcgagagtaggattcgaacccgaacctaaaccggcacacaaacccacacaataacccggacctggaccaagaatcaggatagggacttgggaaacaaaactaggaccgggacctagtgcccgacccagactagaacttgaacctaggacccagctctggactcggcaccagaaatggaaccagactgggacccgagatttggatctggatctggacctagggcttggacaaaccccttagtcggtgtttggatttgggacccagccttggaccagaaccctaaaaaggacccaaacccacacccagacctgaacccagtcccaaacctaaaagtggatccgaacccgtaacctgtgacccaaaattggaaccaaaactgcaagttgaccgagactggaactaggacatggacttggaatcataactgaaattggacctagaaccaaacccaaacccagacctagactttggagccaaaattagaacctaaacaagaatcgccgaaccaagaccctagaacaagactaggatcgtgaccaagacccagacccagacctagaaccgaacacaaatctagcctcagacccaaactgaaactagaactcgggcccagacacggtcgtgtacccagaccggaaactagatgcggacctggacctacatctgggacccgatcccaaacacagacttggac

SEQ ID NO: 274323 - DNA, 741 bp, Cannabis indica
tagtgttttgtggggtgatccccagaattaaggtacatgcatttctgtaattatcagtaaagttgtacattcccaatgaatatatcatgggtaatgcatggtctaatccctaggtgctgtagggattttatgagggcagtccttaatcccttttgactgatgtgattcttcacagagtagccgtcactagactttattggtcatagcctagtaggtacagatcgggggttgtgtcatcagactttattgcgtgtggcagttccaatacgcctcctcccatgcggcattaaatgcgagatgactgttcagaggaagcctgacaccacccggagatgctttgatgccatcttgctctccgggagcatatgagaccttgcatgccttctccgggaggcatatccaaaataatgcttttctttataaagacttagctatttaattcaaacgctaaaccctttccatccacgtgtcactgtccggttggtccacgtatattgggcaaaatcaggggcaacatttatcccccaagccttgtttaattgtgaagtgaacaaggcttgcttaggtgcctccggctggctcctcggtttcctggcacgtgctttgggcgcgtgatggcgcatttaatgatcaccattactgcagcgattcactttttgcaggcgtcgattcgtttcttgtccattaattgatacgacgcattaatgggtgtcagcggacactcaagcgtttccaccgtct

SEQ ID NO: 274324 - DNA, 636 bp, Cannabis indica
gcatttttttgttcattctgctttgtgtaattttagggtttcatttgcacatttcgttttatgtttttaaattttttagttatttattgttggttttgaacatttcatttggttcttctctgggtgttgttctttaatttggttttgttttctttattttcagtgtttttttgtgcttataggttctgtgttttgttttcgtttttagtgttttcaatcagtcgtttgtagtttcttataagttttttaatagtttaataatggtatgtttgatgtgttttcgattttcattaggtttagttgtttgctgttatattttaggtttcaaaacgattttcaaatctttgctctttatttttctatagttgtatctgttttgtagtttgtttgttgtttgtatatagttttattgttcttttcatactgtatttttcactattaaaaatttattgtgttgttatgtttgatgtgtttttcgatttcctttagggttagttgtttactgttttttttacgtttcaaaacgatttcaggtctttgctgtttatttttgtgtagttgtatcttattggtagtttgtttgtagtttgtttatagttttattacagttttattcacgattaataatttattgtg

SEQ ID NO: 274325 - DNA, 695 bp, Cannabis indica
aaaaaaaaacataataaaaaatatgggaattattttttagtgacacctcatatttttagtgacgcaaattataggacactaacactgaatttttagggtctttatgtgcatgtcactaaagctcacccctaaccctttagtgacccacacttttgtgcgagtcactaaatagtgtcactaaaatccaattttgtagtagtgattacttgtattatgtgttatttaattcatttgatcatttattacttatttgattaataaattcatccaaatccttatcacactgatattcttctttattgtgttgtcaacatagtagaaagtaatcaagattgtgtgattaaatgtattcctatgatttataagtacacatggtttaactgatatgataatctacaacgtagtttacttgcaccttggataagtgctatgtccttttcagggtattggttaaagtaagcttgggttggatgtctagagtatgcatcagaagggaccgatattgaatttgaactaaatatgataaacttactataatatttattcaattcaatatcacctagttgatcctagatcaaatgatctcaatccggaaatggttaggttctagttcagttgcactagttgtgttctttaattaatctattagttaaagtcgaccaaatagttcttcccgtgacgtataggttaagaac

SEQ ID NO: 274326 - DNA, 567 bp, Cannabis indica
agtttccatatcgatgaatagcgtggcaataccctaaacatctcaaaaataagaaaaactagggttcccaaaactgcccgaaccggtagaccggttcccaaccagaattccagttcagcggggtttcttggggaccaaccagaattctggttcctacaggtcccccggaaccggaattccggttcagtgcaggaaagattcaaaaattcatatctcacttaaaacaaccccaaatcataccaaactttccagacctgctccatatatcccaaagaacatattcaaggcagtaaaacacaactacaagcactaaaacaaaatttgccattaaagagccaagcttgagttccaaaactcaaagcttgctcaaacctaataacatcccacaattcaagcctaattcaacataacctagcataatataaccactgaaaacaacaacaaacactaacagtaactacaacaacaaatctcacaaagcctgcataattcattttcttcaaaaacaagaaaccaaagagtgaactacaagagacttacctagagtttaagatacccttaatatct

SEQ ID NO: 274327 - DNA, 570 bp, Cannabis indica
accgggtcatgacggtcatgagagtcagcaatgacgctaaatgtttgtgcttcccgcttactctaagcgggtccgcggaggagtggttcaagaaactggagccaggatccgtgggctgttggaataagttgcagaccaacttccggagacagtgtgtcgccgcaagaaaggtcaatctggaggtcagcgccttgactaacattaaatagctgcctacggagaccttaaagaattatataaagaggttccaggaggaagcctcgaagaccaagaaagttgatgacggacaacagcttgcccttctccaggtaggcatccgtacagggactccattctggaacgaactacaacaggagggaaaccttcaggatttccagaagagagtccaaaaatacatcaatcttgaagaggcccaaatagtggcctatggaggatattatcctactgggatagcagggtatgtgcccggagcccagccgttaggcactgtgccgacagcagctcccccgatgagcggcatacaattctctgctactcccggatatagccagggccaggccttggcccccg

SEQ ID NO: 274328 - DNA, 654 bp, Cannabis indica
taaaaaagtttagtttttttcccctctatataccaaaccgaacctattataaagaaaggtggtgggtataactccggccaccgattttagcagagaaaacgttgagtctcaacgtccattaaggtataaatatgctttctattcattttattcatgtacattggtattatttcgtttttgtaaatttttttagaatttttttattttattaatattatattgtgtgtgttctagaggtggtcggatttttgtagcattttatcgccggagtgcgtttataaggtaaatatttattaacttgatatataatatatatgtatatattttgtgttttattattgaatatgtgtttatatatatcttgtgtgtatatactatttgtgtatttgtattgtatatatatttgttgtgaatgagaatgagaggtagtaggaatttaattagtttagagataaagtttttaaaataatggtagtgtgaatatataattgattatataggtatatcaatccactaaccttttgtttgtataaataattatcaatgcatgcttagttgagtttgaatatcttaaatattcatccgtagtgaagtaggttctgcgaatacatgtactgcggtcggatgggtggataaattttgtattgtttatgt

SEQ ID NO: 274329 - DNA, 575 bp, Cannabis indica
tcaatgaagcatataattcatttaacctaggttctattcttcatcacaaattgtaatttgtcacaaacacttagaatcctagactattaggtgaatagtaattctaagatgacggtagattaaagttaaacctaatttagcggccgtctaaacaagattaagacagtagtcataacattgaacatagaagaatagaagcaatttgatgtaatggaaactaaaaattaacattcaataataaaattaagaattcatgtttcgagttttgaaataacccttaactaaaagaaaactactcagaactagacattaatgaaaatcataatatttaatttgtagtttttggattcctcctccatttgtagtctaagaggtcttatttatagtaataggaaagtaagttgaatcctattagaattaggattctatttatagtggatagataaatcctcttagaattaggattctatttataatagtattaggaaatatctcgctaaaagataaagataactcatcttttaaacaaaagataaaaaatcgcaacacttcttgaaaatttatctttattttcg

SEQ ID NO: 274330 - DNA, 651 bp, Cannabis indica
ttgaaccactcctccgcggacctacttagagtaagcgggaagcatagacatttagcgtcattgctgactctcatgaccgtcatgacccggttgaatcgtgacagatgattgcttgggtcagagttcccggtataagctgccatttcgggcatcttaaagttcttggggagctctgcttctaggatgtgcttggcacatggctcccggtcctcacaatctgagtcggagtcgtcgcctttctatcttcgggagactcgggcgatatcttttcggagtatggcgagttctgccatgattccttcgtttaatgttcccgtggagaccgcgggtccatatttcttttggtcaaggtgatcccggaggtcaccttggtttccattgatctgattcctcaaatcaatgggaggacatttctgtccttttcttcctctccctccgcgctcctggtgcacagaaacgctttttcggtcctctcgatcctgagggccaagactccctttttggagtttgcccctctgcggacctttccctttcgggaaatctgagaggacctttcgcggatcctgcacccttttcttttctcggggtagaagtagggttttctttggttctcctcagcgggataccttatagggcttggttccctagatt

SEQ ID NO: 274331 - DNA, 613 bp, Cannabis indica
gttaatacaatacatcgcttaacaaaaaaaaaagttaatacaatacatacatgtaaataaatataagcatccatgacctatctaataagcggtttgttgtattaatccaaaattattcaaatttttttttttttttgaaaatgaaatatcaacttcattgaaatgattagcattcagaatacaagagggagattaactcatcccaagcattatactcaaaaatgctacgaccagagagaaaacgagaatgccttgcaacaacatgggcaactcggtttgctgatcgtctaataaaacaaatcctaacattattgagagaagaaagtaaaatttgacagtcatgaataatcaaaccaaaaatagaattcacagagtgattactacgaatgccttgcacagtgagcatactgtctgtctcaatctcaacatcagaccaattgttgctctttatccaactcagagcttctttgactcccattgcttcaacgacttccgcatcatagaccccgccgaagtacttagttttagcctcgatgagtccgccagagctatctcgggcgacaatcccgaacccgtaagaattatcctgtggaaagagagccgcatctacatt

SEQ ID NO: 274332 - DNA, 545 bp, Cannabis indica
caatggaaagcaatttgattgcgaagagtttactgacttctgcaaccaacacagagtagtgaaaagcttctctgcggtggcaaggccgcaaacaaacggacaagcagaagcagtcaatataatcctaaaggttaccctaaagaaaaagctgctggcctgcaaaaacaactggcccgaagagttgccaagagtgttatgggcctaccagacgacccccagaaccacgaacggtcactcgcctttctcaatggcgtacggttgtgaagcgatggtcccggtagaaacgttattcccgtcccacaggagaacgacttacaatccagttacaaatcaagctttacttcaagaagctctggatcaagttgaagagctccgggacgagtcacaaatacggatggcagcttatcaaaagaagggaaccaaatattttaactccaaagttaaaaacaaaaaatttgctattggggatatgttcttaagaagagtcttcccagccacccaagaacccagagtgggggtacttgggccaaattgggaaggaccat

SEQ ID NO: 274333 - DNA, 636 bp, Cannabis indica
tttgtcttttagtgacttgattatttgaaaacatatgttatttatttgattatgtggctgaaatagattattagttaaagccttcttttcatttattttcatttcactcaaaatttcaaagttagaaaatagaaaaaaattgcaaagctctctctctcttttcctctcttgttctctcggctgaagggtgttcaagggctggaatttttgatttcaaagctaatttttcctcaatctaagtgttcttcaaattcttggtaaagttcctaaacctttctttttgtaattttagataaaatggtgaaaagttgagttaatgcatgctttttgtggctgttattattgctgtgttttgttgttgatttctgaggtttaaagcatgtttaattgaagttaaatgagctgttttgaagcatgttagttaggttgtgtgaagctttgagttttctatgcaaaaatgtgatttttggaagaaaatgttgtgaatctgtttctgagttattgttgttgttgttaattgttttcagaggcttagataagcttgattaagtagaattaagttggtttgaatgcatgctaggtggttttgctcaagtttgagtttagaactcaaagcttgagctttaatggcacttt

SEQ ID NO: 274334 - DNA, 539 bp, Cannabis indica
ttacactccctcagatgatgctttttacaactagggcactcttggtaagtgtatcaggtttcggtgccactctggcgattgcctcgaccctggttccctcggaacctcttgttctgacctaagccactggatgcagtaggtgcctttcttttttgatcagtggtcgagcccctacctccctaactaaagcctgatgtaggaggagtagcagccccaccaacaaccggagtccctcgagactctaaggtgcactccactgcgccctcagcttgcagtgccttacccaccatatatgcataggtggtgttgtcatcagtagtgatcattaagtcgtgtctgatcttcacattcaacctgtccaggtatttctctttcttgctaaaatcggttggcacgatccccgaggccaatcttgccaagcgatcaaactgagtcgtgtatttagtaacactcatattttccttctgagtcagctgggtgaattcttttctttttgcgcttctgactacctgattgtaatactttgcattaaatagttc

SEQ ID NO: 274335 - DNA, 697 bp, Cannabis indica
tgtttgttttggttccttggaaaccaattcttattattattccgagaattattgttacggtttggagcatgcttgcgattctgattcttgaaatttttcccagtgggtttcagaatcgcactggatttcgtagtgttgttgtttgacacaacaagcacttcttctttctggtcctgtttacgagcctcctcctcaatgcgaaggcgagtgatcagactttccaaagaaaattcttttgttttgtgcctgagaatacttttaaaatctttccaaccaggaggcaatttgtcaataataacagcaatttggaattgttcatctaaagacataccttcagaaattatttcgtgagcaattttctgaagttcatgagactgagcctccactgacttatcgtcagtcatctggaatttgaggtagcggctgacagcgtacttcttagttccagcctcctcagtgtcgtatttcttttgaagtgcgtcccagatttccttggcagttttgtcagaattatagtaatcatataaatcgtcagataaaccattgagaatataatttttgcacagaaaatcattctcgatccagcttgttaaatcagcagtttgcttctgcttttcatcatcctttgcagtatcagaaacaacaggtttatcagtcgtcagaacataagcaacctttttcgtagtgaggaaaaata

SEQ ID NO: 274336 - DNA, 618 bp, Cannabis indica
catggaggagttattggcgaggagctcaatagccaaagaggagtattttgggcacactaagctcttgactccgtcaggtgctaacgtgcaaagagctccacagctgtcaaattatctcaaggacctgatgggcacgaaccgacccaattagctcccctcaggtacccatgaccatccgggtccgctaaatacgagggacgcgtgctgttagagctgctccgaaaatatagtcaaaaaatgataagtgaagagatatttatttttaaataattattttattattattttgtatcttgaacctaacccaactatagttacgggagggcatacctatgtttaagggattttaagtcctagatgaatatctatataagggaggtgaaatcacctctaaagggagcctgaaattgatactgacgagatcatactcttgagctccctctctcaaattctaaaaactcacttgaggagtgaactcttggagaacataactctagagaactctcctcaagcattgagatcaataacactccaagtggactagcctattaccgctgaaagggggtgaaccactataaaattcttgtgtttgtttttggtgaatttctttttgcaaac

SEQ ID NO: 274337 - DNA, 1310 bp, Cannabis indica
ttcgatacacccttctacaataacgatcctattgtagatttgaatatggacgatgaacatgatttagcagtcgatgaagccgtagcgggaccattgttgaggttagagtgtgtactgagtaaccaaggtacacagcgagaacgacaacctcgtagtcgaccaggcagaactgaagaacatgctcgtcatgcaacgttctcaacgttctcctcttttgaagtttgtaccaagttcaaagctcccatgtggacaaaggaagatataatggaaaatcatgagctaactacttgtttacaaagtaaggaagcaggggtgatagagcttggtaatttttatgaaaacaaggaagaactgagacaagtagtgggtaggtttgcacttaataacaatttcgagtggatggtgaagaagtcatcccctgatgtgttgtacgttacatgcaaggctccagattgtaaatggagattgagggggaggaagaagatgcattctgacaactttgaggtcactgtatttcacaatgaacacacatgtaacttgaatgcgagacgttcagatcaccgtcaagcagcaccatgggtagttggccaccttattaaggggaagtacacccaagacggaactaagtacaaggctaaagacatacagagggacatgtttgacaactacggtatcagtatgagttatgtgaaggcgtggaggtgcagggagatgggacttacgtatgctaggggtacgcctgagttttcatacatgaagcttcctgggtacttgtacatgctggaacagaagaatccaggtaccattactgacttgtacttagaggatgagcggttcaagtactgttttatatcactcggtgcatgtagaaggggcttttctttttgtcgtcctgttttgagtatcgatggcaccttcttgaagacgaagtacggcggtataatgttagttgctgtggcatacgatgcgaacaaccaattgttgccggttgcttatggtatcgttgacagtgagaataacgactcctggacgtatttcttacagaagttgagggtagcaattggcgtggttgagaacttagtgtttgtgtcagataggcatcaaagcattgatcatgctgttgaactcgtttttcccgaagcagtccactgtgcatgctatcaccacattgttatgaacgtgaacgccaaattcaagactgatgcttttcacaaccaaatatataatgttgcttacgcatggtcgaagactgaatgcgatagagagttcgagaagcttagaaagatgaatccggccatcgctgcatatgt

SEQ ID NO: 274338 - DNA, 742 bp, Cannabis indica
ttgctccttcccatccctccttggattctccgtgtcactaggcaaagaaccttgcggcctagcttttaattcattggccaaatgtccaagttgcaactctaagtttcgaagagaggcagcttgactttgtatcaccgcatcatttttggccatataatcccgcattagactctccaaagaacttggttgggcattttgagcatgttgtgaatgtcggggttgttgtgaaaaacccggtggatatgcttgtcttccttgggctggtgcggtacttgagcttgctccttgacctccccaagacaaattaggatgattcttccaagattgattgtaagagtttgagaatgccccattgtttctgttaaaattctgatttcccatgtaacaaacggactccggattagatggacacttctcaaacacatgcccttctccacaaaacacacatgagacatcatcactttgaatggcagcagctggttgaatatttttagcgttcccaatactcaaattcttcaaaacattcgtcatggaagccatttgagctgtcaaagctgttattgcatctacctcaaggactcccgccacttttctacttgttggagctcttgtgttggaccattggtagttgttacttgcaatggtctccaaaatctcaaatgcttcattgtaagacttcgacaaaatagcaccattggccgatgcatctaacaccattcgagaagctgcattcaagccatta

SEQ ID NO: 274339 - DNA, 742 bp, Cannabis indica
cagccacttagagggagaattacaaattcaagactcattcccagatgagcaactgctagtggtagagcaaacacgggtaccatggtatgcagacattgtcaattacttagttggaggtgcctatccacctgattttaccaagcagcagctcaaaaagttccttcatgatagcaagttttatttttgggatgagccatacttgtacaagcagtgcccagatcgtattatgcggagatgtgtgccaatgagtgaagttagaagcatcttggagcattgtcattcagctccttatggtggccattttggtggacaacgcacggcggccaaggtttttcaatccgggtattattggccctctatttttaaagatgctcatgcttttgttcaacaatgtgatcgctgccagcgagtgggaaatatctccgccaggaatgagatgcctcttaattgtattttggaggtggagttgtttgacgtgtggggtatcgactttatgggacctttcccacaatcctttgggaatctctacattctagtggcggtggattatgtgtcaaagtgggtggaggcaattgctagtcccaagaatgatgctcgagtggttatgaaattccttcataaacatgtctttacaaggtttgggactcctagagctttgataagtgatgagggaacacactttgtgaacaaagtgttggctgccctcttggcaaaatatagtgtaaaacacaaaattgctact

SEQ ID NO: 274340 - DNA, 377 bp, Cannabis indica
ttttggttaaccaggaagtaacactagtagttaagaaatgttggaacggtgccaaaaatgtatagaactttccttagactaaataagtacctttcctgcaactttaacattcagtccctctctggtagacctggagacttcagaaaggcaagtctagaaatctgatttggtgtagtctaagagtattaaatacaccctcatcgactaacatatagttcatcttcttaatcttaagatttacttgattgtcttccaatgttcctttcctggattaatctgatacctactcattactcccactcaacagcaggtgtctggtctaaggcatactaaagcatatctgagacctctcactgttgattgaaggaattctttca

SEQ ID NO: 274341 - DNA, 624 bp, Cannabis indica
ataatttaatggcgcatgattcagagagttttaaggataataactcaaataacgaaagttatgagagttgtttgaatgtagtagaagcaccatcagatgaatacataaaagagactgagcctagaattgaagagaaagaatcctttgaagtggtttaaaatttagatacattggatgcttgctcaacaaatgatgatctcaatttggtgaatgaagaaacatccattctcaatgataaaattattgaagatcaaatcacagtcaaggatgtggatggtcatgaggaaactgaacaaccaattgagagtttagttgagaaaagcaagaaagaggtgccattggtggcagaagaatcacttgtagttgttgattttaggttgtcaacaccactatatcatgaaccaccaatggacccttattttccactaatgtcgcattctccatattgtattctcttcgagttaccaaaggcttctccccaagctcatcatccaaggtcttttgttgttagtgcggattttggttcaaactcattacatgccaagcttgagggcatcttcaaaaacaactttcaagttgtcttgcatgatgcttattatggcgtcaaccgcttgttgatgtgac

SEQ ID NO: 274342 - DNA, 326 bp, Cannabis indica
gagaaaataccaaatcaaggggaaggaagagtttgaagtttgcaccagcaggcaactccatatgcttgggccaattcagacgcaacctctcctgctgcgcccgacaaggtctcaatggtcttcttgaagaagcagtagcaggggttgtctcggggcgaggtgcattcgcatcgaaaatgactggaggaggagcttgttcttagattttgttgatagaggcctcgagatcaatgggttcggctagttatttcttcttatgggtggtggttttcctttgcctcttgggaggaacaactttagcagctgtagggaccccagggtttgtt

SEQ ID NO: 274343 - DNA, 549 bp, Cannabis indica
catagagagttgatctctatgctttcacagaaataaagagaggatactcgcatatgtattgacacatgcgagttggacccatcctgtataatgtgagttaaagttatgcgattcgacttaggtcgtactcgcagtatctcgctggttttatcctgggcgaggttggaacatcgaggagtctctcatggacaattcagctttcattggaaggctgaatacacgtgtcctttaaataggagtctagtctcgagtttctaggtgagaggaatctcactataacaattattttgttgtatgtttattgtgttgccaaaactttagtagtttgtctcctatactttattactttgttgtattttttattgtgttgctaaagcttaaatagtttgttgtatgaaatttttattttcttcttaaatttgattaaatgtataattattaaattatttggtgataggtgtaaactaggggtgttcatccgatccaatccgtactttttggttcaaacaacatccaatccgcactaagtgcggatttcatattttggat

SEQ ID NO: 274344 - DNA, 631 bp, Cannabis indica
catacttttatgtatttattttatatcgttttaaaatttcatgtttaggatgttaaaacatacttgttagtaaatttagatcctggtaaaatatattccaacaagtataatatcaaattctgctaattccagctctactaggttagcactcaactccctatcttcaaccctaactggcgtagacctaaaatgccttttggagataaccaatttcccgctaggcaatagggttccaaaccctctttcaataaagtcacaagccctacccaattgattaattacccatgttgccacatatgagtgtgtagccccatagtcaaataacacaataaaataggagttgttaacaaaaagctgacatgtcaccacagaaggactggttgtagcatcagcttgagtgatagcaaacacccgagcaggtacgggttttgcctttggcttctactcttctttctttgcatgtgggcaatctttcttgaaatacccacccatgccacactaaaagcatgtcttccagttgcactctcccgaatgatgtttcttccaacgtgggcacttagggtaagaataaccctaacatccacctctaccttggttcccccagaatagcttgctctgtcccgaaccacca

SEQ ID NO: 274345 - DNA, 695 bp, Cannabis indica
tggccgaggcccaagtctgtgacggaagttcgaagttttctcggtttagcagggtattatcgacgttttgtcgaaggattttctaaaatttctatgcccctaaccgaattgaccaagaaaaatcagagatttgtgtggtcagataagtgtgaaacaagctttcaggagttgaagcaacgtttgataacagctccggtgttagctttgccatcagatcaagagaaatttgtggtttaatgtgatgcgtccagacagggtctgggatgtgttctgatgcaagctgacagagtcatagcctatgccattcgtcaactgaaagattatgagcagcgttatccaactcacgatttagagctcactgctgtgggttttgctttaaagatatggcgacattatctttacagtgaaaagtgtgagatatatactgatcataagagtctcaaatacttcttcacccggaaagatttaaatatgagacagagaaggtgattggagtttgttaaagactacgactgtgaaatactgtatcaccccgggaaagccaatgttgtaaccaatactttaagcagaaaaaggtctcgtgcaagtttataccacagttatgatagcccctcaactagtttctgaactggttagtgtagggattgagttcatagttgggaaatttaaaatttcaatctgatctgttggagaga

SEQ ID NO: 274346 - DNA, 533 bp, Cannabis indica
gagctttcaataagcagacccagaacttaccaagtaaatccactgacttattaattccttgttgcatccactatgttccacgatatagacacactattagttatcaattgttataatcccaataatcaatgatcctctatagatgatctacattgtataggtattaaataaccgttacaccctttaatgtattttatccttaaaacacttagccacctataaacgatattttagtgaacgtaatcactgaaatgagtactcaaccatttatctctatttagccaagctcgaaggaaatcatcatttaacctctatgtctagaaagaagctatagattccatatctatgtttagcgatcccactcaatgttgggattttatgccctaagtaaaacccatttcaatctaatctgtttgattatcaataaaagattagaagtcatttatgtttacatgttgttttcatgtatgtggtttaatatatgtacaaaatctgttaagtccagaacatatagtcatttacaattacagtga

SEQ ID NO: 274347 - DNA, 639 bp, Cannabis indica
tcaatcatagtatgtaagactatggaaaatcagcatcaaagaaggagagaaagagatccagattcagatcttgatatgctctgctacagaaaggaatcaagggctagagatctgaatggaaggagtcattatattccgctgcacccaatgtaaggttttcttaaactcttatgtgtttatttcattgttttagaattcatattaggatgttaatcaaacatacttggtagtaaatctagatcctggtaaaatatttccaacaactggcaccagagccatggtaatgatttactttcatgtaatatgaattaaaacgatgttttatatgttttgtgttgatttggatggtttcatgttggtttatgtgcttatgtgatgaatgtttatgttgtacaaatttttccatgaaaaatattttttctatttttgaaaatattttatttggattccttgtgaaaattaagcaattttgtttttaggaacttaattccaaatgaaaaagatatgaattttggaaaatcgggattacaaggtgtcgagtgggtgctcgtgcactcggactggacgcccatccgcgcgcgtgacacacccagcaccctgcatccgcccaccaaagaccctgcaagcgccgagttttct

SEQ ID NO: 274348 - DNA, 743 bp, Cannabis indica
tcagttgttggttgattgtgtgctgactgttgcccctgagatccagtattctgttgacggtttgggcaccgtcgataatcatggcctgatgagcgacaaatgcgacaatgtcttgagtttcttgggatctgctccccgttcggtccttcccttggatttcccgtaccctttgttctcacaacttcagggtctttaataatgttggggttgttacgatatcttccaggttgtggcgtctgtccttctggattggaactcatctcaaattcttccttgaacattagagttagccgttcaatctcttcctttgcacgcgtgtacgaatcctctgtttttgctgcatagaaagtgaagttataagttaatgagctgagagatccaaacctagccatctcataaatgtgttgttgttcttgtgccggggggttaaaatgtaggtggagatttgtcttcgcggatttgctccatcgcttcatgagaagagtattaggtattcttctgatgtttaatcttttcattgtagcccataaatgtctacaagggtacccctgactttcatatagcatgcagctacagtgtagtgctcgttggccttcacagtaatgaactcggtattggacttccggatgctgaaactttccaatggtgtatatctgccactctccttcttgctcctgacttatgacaaaataattattctctaaatcaagctgctcagcaaccttgtggtacatagttcttgt

SEQ ID NO: 274349 - DNA, 491 bp, Cannabis indica
tgctaccttgtgtaggtaaaggaaaagcgaagctggaggaacagtgaggcggaactcggcatgattgtacatatcgcggcagtgcaacctggagggtttcggtttactagtattttggagtctgtattttgaggatgcttgtccgctaaactttaaaatatatatatatatgtacatattagtaaaatacttttaactcgtattttgatactcgggatcccgatccatatgattagtaatatattaattattaaaattagatttcggatttactattataaaatacgggccacgtggtgtggctgtcggttggagagggaaaatgggcctaatttgggccttgttcttgggttgtttcagcttcaaaaatgccgttttttaatactttggacctcatttctatcatctttttatttcttttccactcttttcacaaatgctattttcttactcaaacacaaacaaattaaatccaaacaaaatattttcaa

SEQ ID NO: 274350 - DNA, 798 bp, Cannabis indica
ccatctatcagcattggtcgtctgcgcagcgtctttgagagttgcactgagaaggatgattgttacaagttgggtttggtgctgttcgtgatgggtgttctgactgggaaagaagagaagaccctggttcccccatttatcattagaatggttgaggacctcccttttttctacaattacccgtgggggaaaatttctttcaacttgttgaaagatacttggagtaaggacttcgtacaaaagaaaaagcatatggatgagaagattgagaagggaacgactcagaaggagtcaaagtattcggcctatggatatgctgtagcattgcagtattgggcttatgagtccatcctcgagcttgctgagaaatttgcaatcagaagatcgcatcgctttccccgaatggtgaactgggagagtaaggatgccccactcgggaaagaggaagtcatcagattatttgcaaaaaaagtgagtttgttaattcattgcatttgcttacgtttatttatttattttattttaatttaagtctaataatcaatttgttataatttgcagttgacagtgtactccgttttatgtccgcggagtaatgaggccgagtttttgagccacgtcactggaggtgaggcgcctctatttgtggatatggaggaattggttattggcaatgatggccagcctactcaggatagtttgcgcagccaagcttcaaagcttgcactcacgctagaacagcgagcggaggaagctggaatcttcagagatgatacaccaccacattctccaccatca

SEQ ID NO: 274351 - DNA, 1002 bp, Cannabis indica
caacgatgtgagttcattaattttgatagaaacaatgcagatttgaaaagatttaataaggagacaaaaatcccaaaatgttagaaaatgaaaaattaatcttaaaaattggggtatgatttacgaataaaaagaagacccaattggatcagaacctgaaatttggggacgattttttttaaggttcaatttattttatatatatatatatttttaatttctagagttatagttgtgattatatatagagttgaaatatgctaaatatcagttcaaatattaataggatttgttttattattattttattatatataaataatattttattattttattaaataaaaataaaaagtcacccatgaatttctcataaaccaagaatttcagttatataggcacactttatataaaccaagaatttcagttatataggcatactttatatagaatagatatattatttttttttttgaaaaaaaagttatattattgtactgcacacattgtataaaagctcatagtgtgagttctgagtttattttttgtaattttttttatctcaagtttacaaatttgtaactaaaatttacaagtttgtaacaatatattacaatttaacaatatttactaagagaaaattattataatctgttacctatagtaatttttatatttgtaatttacttcattaactggtaattatgaattatttcttaaaaattgtgaaatgtttttttttcttttccttattaatttacgtaggctctttcttcaagtggcaatgaaaatgtactactgggctattcaatagggcaacgctaagatatgggccgaacagatcaggcaggctgatatctggcctagtttcagccctagatgagacttctagcccaaactgtccccaaaatttcaatcaatcctttaaagagtttatacaaaaatactgaattttaggcaaaaatttacaattttactgccacacagattttttttacaaaa

SEQ ID NO: 274352 - DNA, 438 bp, Cannabis indica
aaagagcaaaacaaaaagatgcaagaggtgatgctcgacatgcaaaaagccatggaggcagcagggatccacatgcatcccaaagccatccctgcaggacctggagaaacacccgaagagtcctcaccaagcacccagaagcagtagtctagggaacctagccctataagatatccctttgaggcgaaccagcagaaaaaccctacttccactcctgggaaaaagaagaaggtgcaggatccacgaaaggtccgctcagatttcccgaaagggaaaggttcgcagaggggaaaattccaaaaagggagttttggccctcacgatcaagaggaccgaaagagcgtttccgtgcaccaagaacccagagggagaggaagaatgggccaaaaataccctcccgtcgatctaagacattagattaacgggaaacatggtgac

SEQ ID NO: 274353 - DNA, 526 bp, Cannabis indica
acttgtgaaagtcatttttctacaactaatttataattttagctgtagttaataaaaataataagaagattccatatgacgaaaaaaaaagagaagcaaaacttgaaacaattttaagtacatgtgtagatgattcagttcactgagtattaaaaacaattttagtccaaaatagtggcgcgacctgcttagcatatatataggtgaccatcatccatctaatttattttagccatcaatttcggcaatcatctaggtgactaagaaaatcacacgtaatgatttcgatacttaaaagagatttttaaatataatatatatacatatataactgtaatgatcagtactcaactccacattgctacttcgctagaaaaaaatatagtcatcattcattactataaccttatttttcatgaatttaaaaaatgagaaatatgttgagatttttctattattatatatattagtatgtatcatatgattccaataaggacatacatcattattatttatttattattga

SEQ ID NO: 274354 - DNA, 730 bp, Cannabis indica
cagtagttgcgagtcccgcagtcgtagcagccccggctcctgcggctggagggattgaccaaagcatgcttctgcaggctttgaaaatgctcgagcagcaaagaaagcctatatacaagttgcatggtacctcgcccttcactacagaagtgcgacaggctcaacttccaaaggggtttcgtctatccgaatccctcaaatataaaggtacttctaacccgatagattatcttgaaaaatttaatactataatggaagtggatcaggtaccacagctcgaaaagtgccccattcttgcggcaacactcaaggaaaatgcccatgattggtttacccaattacctgaggcgtcgatatcgacgtgggaaactttcgtcgacttattcctcacacatttccaggccacaatgacatataggccaccttatacgactttggccaacatcaaacaagaacctggtgagtctttacaagactattttaaacgctttaatgcagaagtaacaaaggtcgagaaggctcccgagtcttcgcttgtttgcatgctgataacaggtatcttgccgaggaccgacttttggaaggagttacaagctcgaaggcccgaatccttagttgaattcttcgccatggccgaacctcacaaaagaatcgaaaattctctagcggagttagaaaagggaaaggacaagcgccggtcacctataccgcgttcacgatctcccagtcc

SEQ ID NO: 274355 - DNA, 1204 bp, Cannabis indica
ttcatctgttggcgtcctcgacaacatgcccacacgcaaatgtctgaatgtccaacttttcatgcacaccatgttatctaaaagtgcatcccgcaggatgtgactctcgaatcaactatctcacatagcacccctgtcgatttccacatgcatgcactaacttcccactcaaccatccaagtgattcacacttgcatcacgcccttctggctcccacaatgtaccaagttccaatgatgcagccctctggccttcatgcaaactctagcacccttcttgaccttcgcacggcaaacatgaccaagctaagtctcgctggcacggccctctggcctttccacacaaactctagtgtcatctcaatgcttacgctcagtcctctcagtcctgctggattctttgatgcatccattccacaactacgcatctctatcgatatctttgtgtgacttacaccctctggcgatttgtcaagccaacacattccactcaactgcctcggcgcttccatatggatcaaataaaactcacatgcgaacacttccaagtacaatcgtcctctgacgattgcggcatctgcccccttggtctccatgtgcgcccatcttgacacacacatgtagcaactgaagcattccatgtctatttcaattagacccatctcagttatcaactctcggcctctgtcatgactaacaagaatctgacggtccctacactacttccacacccctgccaacaagcttccttttcaacaaaagcacctcctgcggcttacgatgtcactccggcaaacttggccgagtgtaccaagcatacagcatggactatcccctcaaccttgtcctatgccaacgagtttcaaacattttgttgcgcccctctacagttgcatgtggtagttgtctttctagcatccctgaacttgactcgaagcaaccatccatgtctcctctttaggatgtccagtattcccatgaagagaatcaaccaagtcttaactccatctcagcctactgatcctctttaaaagactaactggctcaacgacgtcttgttccaacattcagaccatctcgatccctccagacgcctacatcctctctaggataggccaaccaggttcacctcccactgagatgaacttggctctgataccaactgtcacgggctcaccttttcaggcagcgaaacacccgtgcgg

SEQ ID NO: 274356 - DNA, 633 bp, Cannabis indica
aactcggttattttcttctgagcagtaaaaagcttcttgttggcttcacccagctccatccgaacagctctaagttccaccctggcgtcatcagcgtccttcctggccaagtccacctccgccctcatggtgttggacaaagccgcgttcttggaagcagcagacttagctcgggagtatgtgtaagccaaataaagaggattaaaggaaactgccaagaaagacttacccttgtgaattccttcaagccacctcccatcagcagctccaaagaagagtcgttgtcagcaccggccagttgctcactaacctcaggaaccaatcggttcatgtagtgggtgagcatctccttgcctttcctggcctctggaagcactggcaaaggtggagtaggagcccgcctctgctcggatctacccttgatcagctcggatccaccttttgattgctcaagcctctccgaacttcctcctcgagaatccttggacttagcaacttttggagtggaggggttcgcaacagttagctcctcggaaagatcagtaacctccccggcaggcgccttttccttggtaggggtcacctcaccgcccctggagttcttggcgggggagatgcgcttgagcttcctcc

SEQ ID NO: 274357 - DNA, 617 bp, Cannabis indica
aaccatagtgaagtaggttttacgaatacatgtactgcggttggatgggtggataaattttatattgttaatcttattttgtttgctatgtattgttttacttgttttgtttgttattttaggtatttttaaaattttttggaacgtccaattatagccgttatgctgctgaattttggtagaattaggatatattttactaaaaaatataaatattgaaggaaaagtacataacacaaataactagttaattacttgctagttgttagaaattagatgacataacacaaatacttatttacacatttatataaactttacaattataaatgacaaaccaaacaaatgaatggattcactttaggaaaagaccttccattcttcgatccatttcaatcaattaaacactaccctagttagttaattacaacttatacaacttaataacatgaacgaaacatgaaacaagaattataataatatattaattaatatgaattaattgtgagaaatctagttagttgcattatgtaagttgtaactagttataattagttattaaatactgattttttttttgttaggatttttgttatggataaatcatggatgcatga

SEQ ID NO: 274358 - DNA, 574 bp, Cannabis indica
ggtcaagtcaaaggcatgtgcaagccatgcagatgacctcgaagaatgctttgaagtggttcagagatacgaaatgaagcttaaccaaaagaagtgcacttttggggtcaaatcagggaagtttctaggatttattgtcagccaacgagggattgaggcgaacccggaaaaaatccaagctcttttgaatatgccttatcccaagaaccacaaagatgtacaaagcttaacctaaaaggttgctgccctgagccggtttatcttccgatccatagacaggtgccttccctcttcaacatcctgaagaaatgccaaaaattcgaatggtccaacgaatgcgaggaggcattcaaaaaactaaaagaacacatggctaaatttccaatcctatcaaaagctgtcctcgaagaagacttgtttctatacttggccgtctccgagaatgcggttagcgcggccttagttcgggaagagaaaaaactcagcaccccgtgtactatgttagcaaacgcatgataggggcggagacgcgatacccagtgatcgaaaagctagttttttgcctcctagtagc

SEQ ID NO: 274359 - DNA, 577 bp, Cannabis indica
accaaaatcacaataataaatgcaattaataacgccagaattcgtaataaatgtaaataaaagacaccggaatttaaagaggttcggccccggatgtcggtaatagcctactccccttgagttttattgatctgagttgcaatagtcaagaacaggctcttgattgcaaagaatgagaaatctttaattttctaagtgtttcagattgcggatccccctcccaggtcatgggtgaccccttatataggggaggggggtcggtgcttctcgcttcaggagacgcgaccaacgcggagccatctcaaccgtctccttgattttcggaggcggttggagtctgatatttaggaaaatatcccgctattttcgtgggttgacaactgtctttgagcctttcgcgggatttgaacatttgaaggagtcactgatgacaagggtcccttatgggtgtgacatggtcgtcaaccacctttgaggattaagcccatacttgggggtaacaccctcgagactctcgctgaggggggatgaccactatcatagttaggtgactcccccatgatccaacttgagagag

SEQ ID NO: 274360 - DNA, 931 bp, Cannabis indica
ctgagtgtgttcgtgttgctgtagtggttatgtgcggtgggtgtagaaaatggaggcattgttcttcatattcggtatctacaataataaaagaaaaaaaaatagtccaagacagtacaaaagtaatttttgccgtgtggacaataaaattataaatatttacccaaaatttactctttttgtaaaactccctttattattttctcattttacattttacatttcattgattgtattttgtaattacaacaaaaccataatttagaaaaaaaaaaaatctggttacaacaaacaactccccaatctcaaaaaaatagcaataatagtcccaaactcaaaattcttgttagttcgtaggtacttaatttaacagctctgtttgtagttcttaaaatttccatgtgtcaaaaatttattggtccacatcataaaatattatttgaaaatcatttaaatgacaagaaaaatattaaaaatttaagaactttttttttttcattttcttttattaaatattaaaaaacattgtatatattaaaaaaattataaatttctataactcgccacccacccttctcgagcttttcgccgacaagtaccatcccttcatctccaccttctttctcatctcatcccacgatcccaaaaaaccttttaaaccaattaagcacaacaaaaaaaaaaacaaaaaaagatgtgattaggatcgggatcttggagagagattgaaaacctaatttatatatatatatgacatattaaatactataaaaatattttttaaaaaaaatactatataaatatgtcaaacctaaaaatgccatatttaactaaactactttaaaagggaaacttacaaaaacactggaatttgggttaacttttacaaaaatactgtcacacagaaatcttttcaaaaatactgtgtttt

SEQ ID NO: 274361 - DNA, 131 bp, Cannabis indica
agtttgtgaaggagcattggaagtctctctaatttcgagattttgaacctcatctcccaaacatacaacatcatcatctaaacttttacttgtaggcgggttagtctcatcaaaggcaacatgaatagatt

SEQ ID NO: 274362 - DNA, 654 bp, Cannabis indica
catacatctttgaaatgttgcaggagcattacaaagaccaaaaggcatgcgacgatatgcaaaggttccaaaagggcaagtaaaggtagtcttttcttgatcttcgggggcaatggggatttggttatatcccgaatacccatcaagaaagcaataataagcatggccagctaatcgttcaagcatttggtcaatgaagggtaatgggaagtggtctttcctagtgacactattcaactttctatagtctatacacactctccacccagtttggactctagtagggattaactcattttgttcatttttaacaacagtgatcccagacttttttggaacaacttgaacaggactaacccatggactgtcagaaatagggtaaatgatccctacatctaacattttaattacatcatctcttactacctctttcatgtttggatttaatcttctttgactttctcgggagggcttagcattttcttctaaatgaattctatgcatgcacacagctgggctaattcccttaatgtctcccatggtccaacctatggcctttttatgttttctaaggatatctaacaactttgtttcttgtttttcatctaaatcagatgcaatgataacaggataagtgttagactctcctagaaa

SEQ ID NO: 274363 - DNA, 930 bp, Cannabis indica
ctcaaaccgcaggccatggagcaactggtcgaactacagtcactggacagacaactgctgggcgtaccaccaatgccactgccgcaggaggcggcgctgctgatggcgccaccggaagaggtaatcctagaaattttgtcccacctactgacggggcgggccaagctcagactggccgcggccctggcatctttacgccgcggaatgaaccccatgttgacatcgagggaattgaccccgagatggatcaaatgcgagacgcgataggccagatgcaaggccagtttcaaactgtgcaccaagagcaaaatcaaactcgagaggccctgactgaaagtcttgctaatcaaaggagagaattccaatcttggctcgaagatcatgctcgtgagatgaggaggcgccaagacgaccaagatcgtcgcacccaagaggctgctgacttaatacgtagctacttcaaccaaaacactcaagggatgggtactgatgccaacaatcaacaggtacctcaaacctaccctcgggaggtccctaccccaaggaaccatagggagagggtggtctatggacctgaagagcgcccaaggaatcaagaaaggactagaagtcacccctccaacagggttccccgcaataataaccgaccacccccggttgatgagcaagtcttacccggccatcatatgggacgcgatgactcccacaatgtccgtctaaggcggagtggtggaggaaactcagaaacaataatggtgatcgtagcagaaatagtggaaggacaccccagcgtagggaatggcaaccccgtgatcaacgtggccaaccacgagatggcaatgatcgcccaaaatagtaggtccagagggagaagagaagaccctgaggtcaacagtgactaccatccagactaccctgacggtcatggag

SEQ ID NO: 274364 - DNA, 732 bp, Cannabis indica
tctctaaaacacatgattcaaagacaaaagcattaccttcgttcgaattgtttagaagtctgggacattgctcttcctgatgtcccttctcatcacaatttgaacattgaagagtatgactatcaattgtacttgaagaagtagcattgttagaagcttcattcttaattcttttcctctgacaaaaggttgcaaaaccaggagatggcattgcaatcagattccgttcatgagctcacaattctgcttctagcttatccatgtcggaagagttaaaattgttgatcatataagatacaacaaatccattatactctggaggaagactattaagtatgaattgaacccattgttcttttgataattcaattccaagccttttggaacttcagattcatcgtcaacaggtgcgagttaatgcaactaccagggtgcattttcacactttagagttcatttgcaaaggcattgacaaggagtgggtcggggtgtgggttattcattttggcactacaaatatcaataaacataagtaaatcatatggttcaataaattcatacacaaattctaaaaataacaagtataacaaatatgtttataaaaaataccaaaaatctaaatatttttattttctaaggttttcaacaaactgatagagtgtcccatttaggcgagagtcaaagcttcatccattgaatagagtagataactcatctaaaatgataaacatt

SEQ ID NO: 274365 - DNA, 491 bp, Cannabis indica
aatggcccataaggaactcaagaccatttcacataacccattacatcttgtccctcttgctccgtcaattcatctttagttaggctccgttcgagaggatcatctagcaaatttttctcactcacaattgtatcaatcaaatcaatgaagagacagttatcacttgcctttgggtatgtcattgcctttaacacattaaagaccacttcttctccttggactctcagctttaattcacccttctggacatcgatcaaggcttggccagttgccaagaatggtctcccaagaatgattgggacatttctatcttcttccatatccagaacaataaagtcagctggaaagatgaacttgtcaaccttgactaacacatcctcaatgactcctctaggatgagctactgatcgatccgccaattgtagagttaccgtggttggctttgcttctcccaactgcaatcttttaaacactgacagaggcatcaagtt

SEQ ID NO: 274366 - DNA, 479 bp, Cannabis indica
ttgaaactgttccttagataaataaaatctatgtctaggagtcaaaagacttcctttagagttagccattagaaaaatactccagcatcttactaaaataagttgtttgcacttgattaaataaattaccaagtataccacaaatcataggtttcgataatctcaaacctatgatactaggatcgagaagttttgttaagtccattgaatagacttattatcaaaatttcccttctcgtccttgtaatagaaaaattttggttactctatatgaatagttttaaccatggttctcttggctttgcttcttaggtccttattctgactatacattgcttgtttaaactaataatgaatttttatcacaagtttcttccaagtcataacaaggtgggttccttgaaaccctcccactatgtcgaggtaccgtgactttctgtctaggaatattagttagtggtattgtcctcatcggttgt

SEQ ID NO: 274367 - DNA, 488 bp, Cannabis indica
tgagcaggaagggtcccgggcaggtagctagcatgattcagatctcaccttatttagcagaggacatggtcaggtctagcattgagtttgtggtaggcaagcttcacaacttgacgctgcaatctgatctgctagaaagaattaaagttgctcagatgattgatccagagttagtaaaaattagagaaggggtttcagctggtcaagccaaggatttttcagtttcagacaactggatgctattgtttaagtctagggtttgtgttccagatagtgtggaaagtcagaaatgaaattttcgaagaggcccattctaccccttattccctacatcccggcaccaccaagatgtaccaggaccttaaaccctacttctgttggagcaaaatgaagaagaatttggtagaattcgtatcgaagtgcctaacctatcagcaaattaaagctgaacttcagagaccagtagggttgttgcagcctttaaccct

SEQ ID NO: 274368 - DNA, 583 bp, Cannabis indica
catttttctgctccttttcctccttgtcccaaacatttccaaatacctattcttgcatttttttctgctgaatacacataagaacaacaacataagtctatttaacacttactaacacacacacttccatttattacgaagacacaacaaactaaacacaattacataatatagacattaattgctccacaattcaacttaaaattcaagcttaaagatataaaaataactctaaatcttagagttatcaacaccccaaacttagaatcttgctcgtccccgagcaatgaaaacacaaaataaacaaaataaaacacaacaacaaattttacacaaagactcacacacaagacaaatgagagattccatagaaattcaagttggcctagcgaacattgatgctcttagaaaaaatggaattaaatggaataggaaaatgtttgccgtaactttatatgctgcccctttaaagttttctcattggataacattaatacctccccaaagtcacctaatcaacaatttatacaagtatatcccaccaaaactttgaactttcctacaactatcttaaacttttttt

SEQ ID NO: 274369 - DNA, 411 bp, Cannabis indica
aaaagaacaacactcaaacagaaagaagatcaagattcaaattcaaatatcagaaacacaaactgagaaattctaaaactcttatctgttccttatcaattttattaaaatgagtaacataaaagttgacattgataaatttgatggtacaggggattacagaatctggagaaggaaaattaggtcacttctagctcaacagaaactactaagggtgctagatgaacctattgaatggccagaaggaacttctaaaatacaacaagaagaatacctagaaactgctactggaattctaatcttcaatctatcagatgcaataataagattggtagataaagaagagactccatcaaagatctggaaaaagctagaagagcaatttcaacagaaatctttgacaaacaagat

SEQ ID NO: 274370 - DNA, 668 bp, Cannabis indica
tttcagtcgtccttttgtcctttatctactaagtaaaactcgttagaagtagaacgtacccaccgaatcaatcttggccttgcactccttcttgctcataaggtatttgatcgttgagtgatcagtatagacaataaccttattcccaattagatagggtcggaacttatcacaagcaaacacaattgccagcatctctttctctgtaatggcataatttagttgagcatctttcaggattctgctagcatagtagattgtgtgaaacaccctgtcaaccctttgacccaagaccgctccgattgcataatcacttgcatcgcacatcaactcgaaaggcaactcccaatttggtgaagtgactattggtgctgaaataaatttttcttttagaacctggaatgcctttaaacaatcttctccaaactcaaatggatcgccattaacaagtaaattggacaatggtttggagatctttgagaagtccttaataaatcttcggtagaaaccagcatgtcccaagaaactccttactcctttctcagaaacttgaggtggcaaattctctattgttgaaactttagctttgtccacctcaattcctgcttttgaaattttgtgtcccagaacaattccttctgttaccataaagtggcacttctcccagt

SEQ ID NO: 274371 - DNA, 566 bp, Cannabis indica
ttgatacacacacatatatataaatatattacaatcctttcatcaatactattagtatatgatttttcttttgtattacatcagtacggtaatgaaaagcagagctgtttaacccttattgccacaggaaggtgaacaatatgctaaagaaaatggattggttttcttagaaacttctgccaaaactgcacagaatgttaatgagctcttttacgaaataggtactttttttctttcttacatacccttcttttgtaaattatattaggctaattagtaattttttctcccgaaatttgacatgtactaaatcgtgctctttgaacttttttggtcgttagaaagtccctctaaactattgagattgttaaatttgaggacttttgtctaatttcattcaattttactgtttgagttattgtttatgtactaaactatgctccctagactttgatatctaccaaatcatgtcccttaaactttgatatgtactaaatcatgccccttgaactttcatccatgttaggatttttttattaaaattagacaaaagtccttaaatttaa

SEQ ID NO: 274372 - DNA, 649 bp, Cannabis indica
aattggaaccaaaaccggaagtttaccgggactggaacttgcacttggacttggaatcataacttaaattggacctagatcctgaatcataaccggaccatgacccgaaccccaaatcaaacctaaacccaaattgggagatagagccggatcccaacccaaacctggactcgggactcgaacccgaacctgaactcagaccaaaacatggaaccagactagggacaaagaactagggttaggacctagaaccgcaccccagtgtcgatccctaacccaaactcagaaatcggacttgggacctgaaccagaagcagactgagacccgtgacagtgatcaagatcttgactcgggatttgggtaacgaggcctggaacagaccagtagtcggtgtctagatctgggactcaaactaggaccagaacctagacgaagaaccaaacccgaattcagacctagacctgggacccaaacctagaaccgaacacagacttagcctatgacccaaactgagactggaactcgggcagggacacggtcgtgtacccagaccggaacggagacccggacttggacctaaatctgggacatgatcccaaacacagacttggacctagaaagggatccggatacgaacctggactcaga

SEQ ID NO: 274373 - DNA, 511 bp, Cannabis indica
tatatcccgagtatgcatccatgaaactcaagagttcgtgacctgcagtggcatcaacaagctggtcaatgctaggaaggggaaagctgtctttgggacaggctttgtttagatctgtaaagtcaacacatgtgcgccatgagccattaggctttggcacgagtacggggttcgctaaccagttggggtaaaacgactcccgtataaagccgcaggcaaggaggcggtcgacttcttcttttagcgcttggtacctcgcggggtccattttgcggcgcttttgtcggacacctcgcacctcggggtcaatgttcaagcgatgacacatgacttgcggagatatcccgaccatatctgagtgtttccaagcaaaaacatcaagattttgctttaaaaaggtcgttaattgttctcgcagctgaaaatttaatttagaaccaatttttaaaacttattattatctacaggatctataggtacctcaattgtgtcttccgcggcttgggctgcg

SEQ ID NO: 274374 - DNA, 497 bp, Cannabis indica
tttttttattaagctgcccattttattttatttttttttgccttttttatctttagacactccggctctttcttttgcaaccagctacggctttcactctccctcagagatgtagccgtcctcttttaatcagaaatactaatatagaaggagcatactacttattagtaaatggactaaagaaagctcttcccattgcatctaaaagaggtagcctttttagctgggaaaaataaaggttcaaaagatcctgaaaaattcacctatttagagcttcctcgatagaactggagaacctgtagatgggacatgaagtgcctcatagaaaaaaatgatagcaatcaaggcttagctgaacaaacagagaaagataatgatcatataccacaacgaattaatcagatagaacacataaaaaaaacttcccaagttgcacacattaatatgagaattcaaggctttattaaacaaaaatccaagagagcatcaagaataat

SEQ ID NO: 274375 - DNA, 772 bp, Cannabis indica
caaacaaacataaaataactacataaacaatctttaaacaacaacaacaactaaaacttcaaagcatgcaaaaatgttaccttagcttggattacactaaaaactgctggaaaacacagaattgaaggagcaaaaacaagaaccctagctgctctaagggggccgaaagagagagtgagcttgagagagaaaaagtgtttccttccttactttgatttttcttgaaaatgaattaatattctttgcttaattcaactaatatcaacataaaacatcaattaaactaagtccactaaaggaaaaactactaatggcaaaaagactattttgccctcacttaagccaaaaagtcataaagtcacataagggtattttgggaaattctaaattcctgactaatcttgatattcccaatgtctaacaacactgccccgctatactaaaaactaaaatgtaattctactgagccatacaccgcgttccaatgttatcgggcactgaacatgcaaaaatctgaaatttctatatatgacaaacaaaatgcattctgaattcaaataaagcatcataaataattaatttaaaattaatgagtaattttcataattaaacctcaattatctgctaatttccaaatttaagctaagcggtctttacataaccattccatcattctgaaattttccttttactggggtatatccctaggaggacttaggcaacgactagtaactaatcatcaatatgcaaatcgaatttctggtgaggtaag

SEQ ID NO: 274376 - DNA, 588 bp, Cannabis indica
tcaacattgggatgatgaacgtaccattatctggaactggaatgccacctgtggacgtcattaatggcggagtagggagaagcaatatcagacctctcaacctattcccagaaacaactgaccctcaagtcggggacacatccacaccaccagcaaccatgcattttcccctgtcactccggcagtggtatccgagggaatcatccaactcaccactgatcaatatactgcgattcaggatcaactgcgtgcgctacaggccgaagtagatggacaaaaccgagcccgacgccctcctcgagttcctgctattcgcaccgataaccctcaagtaacgacttctagacgtcatactaaccgtgtacgcagggaacggagaaccaaccttgaaggtttggacctgaaccatccaacgtcgagggatcaatccgcaaggtatccaaaccaaagcacacaaattgatgaagaccctgaatggcgtaatcctcgcagtcgaccatcaagagacaacgacgcagaatcgccctcttcatcatcgcatggtcgcactccaagcaggtatacaaggtccggctctgtacagacgca

SEQ ID NO: 274377 - DNA, 572 bp, Cannabis indica
ccgaggatcctaaaaaattctgtaagtaccacaaggacattggtcacactactctagaatgttgggtcttgcaggatgaaatagaggagctgatccggagagggaaattcgacaagtataaaaggagcgaggaaagtcatccccaagcggatgacaaaggagaaaaccagaatgcgagtggctccagaacacctcgcaatatcctgactataatcggaggaccacacatcgcaggcgactctcgcaaatcacaagaacggtatgccagagaagccaaggagaagccgcttaccaatgtgaataatcttggtgaacggcccgagaagctctttaagaaagaatgcgacgacatcatctttatggagagtgatgcgagatgggtccatcacccgcattctgatgcactggtgatagtcgccaatattggtggggacaatgtccatcgtatactggttgacaatgggagttcagtgaatctgctgaatttccaagccttcaagcaaatggggttgcaagagaaggatttgcgacctatgacatcaagcatttatggcttttcgggagatgtcata

SEQ ID NO: 274378 - DNA, 527 bp, Cannabis indica
gtataaataattatttaaatagttataaataattttccataattaaacataattaactgctaatttccacattaaactaagcggtctttacaaaatgcctaacctgtcagcagatcaaggctgaacatcagaggccgacaggcttgttacaacctttaactctacctgagtggaagtgggaagatatcgcaatggactttgtagttgggttacctagaacaacgcgtttgtttgattctatttgggttgtggtagaccgattcacaaagtctgcacattttctaccagctaaaacaaccttttcagtggatcagtacgcagatttgtacgtcaaagaaatagtaagattgcgtggtgtaccaaaatccatagtttcggatagagattcgaagtttacttctaagttttggcagagtttgcagcgggctatgggtactaaactaaaattcagtacatctttccatcctcagacagatggacagtccgaaaggacaattaagatactggaggatatgttgcgagcctgt

SEQ ID NO: 274379 - DNA, 521 bp, Cannabis indica
tcaacttagcctcacgcttcagtcaaattagctcattctctgaatgagcacgttcaacccgtccagcaccagatttcctcttcctccccttcactggcttaggaatgaaatccttttgatagagcccgtacttcacaaagttatcctcagaagtcaactggatgatattctgatcttcccccagcaactgagcaagcttatgagctctatccctaagagtaagagtgaggggagggcggtgatatgttggaatctgctagaaccaagtacgggtgatgcctgcgccatccaccatgaagtactcatcaacaaaacgcccaattttgctaatggccttatccccggtgcctgtcaaccacttgaagtctggttgagagaaatagaagtaccccgacctgccttgcttaggggtggacttcaaatcaaagaaccagctaacctcgtggggagaaggcatatcccacttctgggaggcataaaggcgaagagggcagacagatacttaatacccttgggagtga

SEQ ID NO: 274380 - DNA, 638 bp, Cannabis indica
gttacgttttttaggtaaaaaactgggtaatctcatgaaaaatgacctgtaaattggaataaccgcatactgtataagaaatacttaaataggcactgtttcatgctttgaatactcgcgggtattcggacgaacactttgaatactcgcacattgacaaaacttatttacttctgattattggctagatcttttaggattttgtatgctgtgaattgagtcgcgagagtattaatcgattttccaaatggtgggtgtgtcacagtattctaatggtcatatacgcggttatatgccccttgagatactgtgatacacccagccatttgcgacatgcgttaatattcaaatgagcgtactccttggctgatagatattctcggaacggtgggagtaactcagtaacttcagggtcatgcttgagaacgcatgccccttgagtaactgagtttctcccagccgtttctggaggtatatcgcttggcccaggatgcgtgacttattcgcatctctactcgcatattgatggggtggtcagcattcgcaaggatgctgaccattctatcaagtgcgactttatagttttaatgcgggtgagatcacttattttgctttcacacattcaccacgctgaaaag

SEQ ID NO: 274381 - DNA, 516 bp, Cannabis indica
acataaacttctagcatgctcaacctagtaatcaagcatcaaaacaaccctaaactaacatgcttaaacacaaaataatcaccagattacagcagcaacaacaacataaaatccaacatgcatttcatccaattttcacaaaaattcaagaaaactaaatagaagagcaaggcaagaattacctccactaaaatcactatgatcaagccaaaacacaagaaatcatcaaccaaaaatcccagctttgaatccccaagctcagccgaaaagagaggaaaagagagagagctttctattttgaaacttttctatttttttctaagtgttggaaaagaaagaaaaaagggttttcaagcacatattaaccttttattaaatccatttcagccaagaaaataattaaaataaacatttaatttccatttaaaatcacataagacaaaatatcattggggcaaaaagaccattttgcccctccatactaaaaccacataataaccactaaaggggtatttt

SEQ ID NO: 274382 - DNA, 569 bp, Cannabis indica
atttacagggccggcatgctttggtctatgatataaatacaacaaatgagacttgggagtgggttgaccttaaggaggtaacaattgtgttttaaaatcttggttcctgaagaatgtttcaagatacaagtatgatgggttttttatattatagacgatttgttccaaaacataatagaactaaccaatttaggttaatgatctggcttctgatacgtccatattaaagatgattgggggtgtgcggttctgtaaatgctatgaaataattttgtagttagtctgtgaatattgcaatgaaagtgttggtttgacctggcaattttgtggttacaacttacaagaattcttgacaaggttgttgaatagtaaaccaatataaaacttgttttactctgttgaataatatgaaagataattcattttttcaccatgtttaaaaataaatacaaatttgatgagcatatattttttttttttttttaattgagagtctcagagtatcaaatcccgggttgttttttttttttttttaaatgtgttgtgattctcgaatatttagcatcaaa

SEQ ID NO: 274383 - DNA, 849 bp, Cannabis indica
cattgtcacgcctctgttgcttttgtgtattttctttgtagaaggccatacgttcttcgtataatggttgcttagggcataggacagattcttttctttctgttttcgttatcgcgtaaagccatcttctatgaatttactgcacccgacacttgtccagggaatccttctagggtttgctgtgtgacacgtgtccggagggggcctctttccagcggttaggggacccccattccctttttcttattttagggtttggtatggggcctaactgctggaatcttactctttttacagaatagagaaatgtctgcttctggctcaaagtcatcaaagaaaagtggtaagcgcatggctgcccttgaggaggtctccctgggacccgttgcccaggaggggtataagtcccgggcgaccggatgggaagcggctgagcttcactccaccttgacctgtccccatcaattggagaacattgtggaggttgctggaatcaagccttccacctcagggacttaccaccggccacctcgcgacgcggagacgcccaaccacaactacggcggcttcggggcctggagccaaacgcatctgatggtcggggccatgcttcctcttcaggattattttgttaattttctagtttttgtcggccttgcgccataccaacttattccccaagcataccgcctgctttcaggcttatttattttttatgccgcccgaggatggggatctccccgcccggcggaaattttgtatttttatgaacttgtttccgtccccaagaagggggacaaacttaaggacgatttttatgggttccgggcccaccctgctaacgaaggg

SEQ ID NO: 274384 - DNA, 563 bp, Cannabis indica
atcagattaatccaggaaaggaacattggaagacaatcaagggaatcttaagattaagaagaggaactatatgttagtcgataagagtgtatttaatactcttagactacaccaaatcagatttctaaacttaccttagtgcttgaaggtctgctgatgagatggtgattactctgggggtggagtggtgattttggagaagtgtaaaatcctatctaaaatctctaagtcaaccagagagaggctggatgttaaagttgcaggaaagatacttattcattctaaggaaagttctatacatttttggcatttttctaacatttcttaactactagtgttgcttcctgactaacacaaaaagtagttgccaaaagtaaagaatccagtatcccaagagagtagacatatagagaggaatttcacattatcaagtatttcgtgattaaggaaatgtaatggtggagaaaaagttgtgttcattcaacctgtcagatcctgttacggagagtatactacatactacacttgatttgtatatcaaggtgttgagattattggaaatg

SEQ ID NO: 274385 - DNA, 639 bp, Cannabis indica
atcaagtcgcatttaatgctgcatgggaggaagcgtgttgggactgtaacacgcaataaagtctgacggcacaacccccaaacagcagcgctacagtaatgatcatttaagtctagcgacggctactctgcgaagagtcacgtcaatcacaaggcaaaaaggacattctccataaaaaccctacagcacctagggatttgaccatgcatcacccatggtatattcatcggaaatgcccaactttatggatacttacagacacatgtgtaagaacaattctagggattaccccaccaaaacactataaataccccctcaaagctcatttaatggggtcgagaatcttggttgcaaaagagcaagaagagaaaaaactcaccaagaacattctctgtatttaagagaaaaacattctctcaagtgtagaatctgtattaaatacatccattaatagcagtggctcgtggactaaggctcattaacgccccaaccacgtaaaaaagtcttcatctcactttcttacagctctttattataattatattttaatagttgccgaaaacctcggtcaacaaacggtatttgatatatcgtatctaacgaaaattaatatatcgtagtaataaaattatatatcac

SEQ ID NO: 274386 - DNA, 473 bp, Cannabis indica
aaaatccttttaaggggggatatttgtaaataccgcttagtttaaatttggaaattagcagataattaggattgaattatgaaaattatttatggatatttaaataattttttatgttgatttatttgaattcagaatgcatttttatgtcatatagtgaaatttcataattttacattttcggtgtccggcaacatggaacgcggtgtatggcccagtagaatcacataatagtatcttagtatagtgggacggtttatttagacattaggaatgtcgggattggtcaggaatttagaatttcccaaaatacccttaagtgctttttaaccctttaagtgtgggaggggcaaaatggtcatttttccccataagcctttgtcctttagtggacttagtattatgtgattattgaatttattttaagtcttgttagctgaaataagtgtgtattatgttcattttatcattta

SEQ ID NO: 274387 - DNA, 726 bp, Cannabis indica
attcttagatattttttgttcaacaagaaaaaatcctaagtatagggggatatatgcccgaatgtactattgattatatgaataaaattacttgctaaattttcaagtgatttaaatttagtttaccaactttgcaaattttcctacttattacaccaagctgtaattaaagtcgcaaatatatataaaattgcgattacaccgagctgtaatcaaagttaaaaatatatataaaatcgcgagtacccgtgtactgcgtaaatattaaaggataagctatccccgcgaggatagaaatttgtccaaaagagaaggtaaattcgtctaagtacagaagtgcgagtacccttgtaccgcatatataaaaaaaagtgaaatcaaaaaacaacataaatcagaagataatcaagcgtctggagcagcaggagtagtcccatcaggagcagtctcgtccgcgactttgctgatgacctcattctcgacttcttcagcttgtacgccctcgacctcgtccagaaggttgcctcccccaccttgagtctgagtaggcgacatggcacgaaaggcctcagccatctcagcagcttcagctccaagaagagagaagtcgaagtcggggactttggaaagagtggtgtagatataatcagacacagcctgatcgtactgcttcttcccattctctttctcagcctccaaatcgcgagccatctcagcgatcgttgt

SEQ ID NO: 274388 - DNA, 523 bp, Cannabis indica
cttaagtgctttttaacccttttagtgtgggaggggcaaaatggtcatttttccccataagcctttgtcctttagtggacttagtattatgtgattattgaatttattttaagtcttgttagctgaaataagtgtgtattatgttcattttatcatttattcaaagattagaaaatttggaaaaataaggaagttctttctctcaagctctccctctctctttcgtttttgcttgggctgctagagctgggaatttctctatgtaactcttgtaattttagctagttggtagtgatctcaagctaaggtatagttctttaaacttttcttgttgtgttcttgaattttaagaatgaaaatggttgcatgcttggtgatttggtgttgtggttgctgttagttgttgttgttgttgttttctatagcttaaatatgtttaatcgagtggattggaataggttttgatgcatgctagttggttttaaccaagtttagaattttaaactcaaaactttggttttta

SEQ ID NO: 274389 - DNA, 522 bp, Cannabis indica
atattttttcgatcctgtacatgtccacagcactaaacaaaaaagaaattaattaatgaattgatttgtaacataatctaaatttaaaaaattataacttacttttggatacatttcataatatcagttcggataaagtcattcgtcgagtcaagatatgcaacactttgagtattggcatgaatcataattgtcaaccagtgatcactacagaacaaaacatgttaattcagtcaactcactaatcgatccattagtttgttacatttattaatataaaaacatacttaccctgaattccacggacatatcaaccattgttcaggttgcatacccatcattcgctgacatagattctctgaacgttgtttgagtttaccagcttcagttgatactgaagcaggattattaaatgcatatgtattcctcaacccaccaagattaagtgtgtgttcttgcaaataactaaattaaaacagattattaataaacagttgtatatataatttttaacttagatat

SEQ ID NO: 274390 - DNA, 224 bp, Cannabis indica
gaaattataagcacatagcaagtaggaatgatatgagaaaatacttaaaaattcaatcctaaatataataataataaagctcattgtttaaaatgtattttcttattattctaataaataaatctcattaaattctatttaagaattaaaattcaaaaataagaatttaatataatatttataaaattatactagatggtgcttgaaataaaattaattatttc

SEQ ID NO: 274391 - DNA, 648 bp, Cannabis indica
agaaatattgatgagattattgggataagttgattttagaaatattgaagtattttaggatactcgaagttagccaaataccctaaaataaaaatttcttagtggctaagaaatgataagataactattaataataaaattttttattattattattattattattattattattatattattaatatattattattattattattattattattattattattatctattaactgataagtttatctgtttacctatgtattatatatatttaagtaacatataatacagtaaacaaagaacgaacgaaaccctcgttctccttccttcgataaaattttttcctcctatatccattttcttcgattttcaatccaaaacttagcgatctaagctccggtagtagcaggatagcaaatccttgaaaagggaaagcttaaggtatggtttaatttcgttttaagtttaaaaacaattagtttcgtataggggttttgtgaattagaatagttatgaaggttctgaccttatagaattgttctcgggtagtcatgggactagtttcgatattttcttgttgaatttgaagtgattttgagttagaaatcgagtttagaactttttaaagcttagtccgaacgttaatgg

SEQ ID NO: 274392 - DNA, 525 bp, Cannabis indica
cttttgcagtatttgccgtagtgtttggtcggtgtacacccgaacaggatgagcttgaaaataaggtcttagctttcttgtttctaagatgaggcagtaggcgagcttttctatcaacggatatcggccttcggcctcgacgagtcttttactgatgtaatagactggatgttgcacgccatcttcttctctgattagtacggcgcttatggcatgctccgttactgccaagtatatccccggttcctcaccgtccagaggtttagagaggataggaggttttgtgagttgtgcctttagatcttgaaaagctctttcacattcttctgtccactcaaactttttgtttcctcgtaggatgttgaagaatgggacacattaatccgttaattttgacacgaacctgctgagtgcggcgattcgaccagttaggctttgtacttctttggtttttgttggcaagttcatatccaggagggcttggattttttccgaattggcatcaattcctcgagcattgacaat

SEQ ID NO: 274393 - DNA, 593 bp, Cannabis indica
cagcaaaggcagaagagtttatacgattgactcagggcagtatgactgtgacagagtatgccactaagtttgatcgactggcaaagtttgcttcagatgaggtggctactgaagctgctaggaaagcaaaattcattcgagggttggatgaacatatcgctcgggatgtgattgttgcttctaaacaaccgggggttgctcgaacttatgctcagatagttgaactggccctagtttctgagggtgcagaagctcagatacgaaagaaaaatattgccagaagagattcatggaagcaaacatcaggtgctggttctggtaggggtactgatcccggtgaccgcaagaaaagacctagtgaattatcagctacaggcccaaacaaaaggttccagggtaaccaaggtttccgtcctggtgggaacgaaaattggcggacttttcctgaatgtccgaggtgtaaaaggcgccaccagggcgagtgtcaggccaggacctatttccactgtggtgtggtgggtcacatgaagaggaattgtccacagctgctacgactagagcaaaagaaggatgttacaaccgctcctgctcga

SEQ ID NO: 274394 - DNA, 802 bp, Cannabis indica
aacaataaaacatctagaaaaaacaaaaacaagaaaaaaaaaaacaaaaaaaaaacagaaattaagactaaacaaacgaaaatgaaaaactcataaaaagaacaaataaattaaactaaaaaatagaagccctaaaaaactaaacaaaactaaaagaaatgttaaaatgaaaaacctaaaatagtaaaatcgataaacacaaaacacactaatgtcaaatacgaaaaaaatttcaaaaaggggggaaacgaaaaagaaaccgaaaacaaacctgagatcgaagaccagctccatcttaatcattttttgagcatcatcttgatgaattttttcctgggcaaccacctttgatttcttctttggaggagctcacccacgtttcgacgatggaggagcaaaatcagagtcatcttcctcaactccattttagaatttttcttttgaacaggggaaggacgagttacagccatatttatatatggattaagagaaaaataaaaagagggaaaacagttatgggattcggtaatgggagttgaaaaaaaattgaagaacaaaaagaagagggaaatcgagttgggatcgtggagggggaagtgtttagctatggaggttaatatttaaaactaaaaaaaaatgaaaaataaaaggaaaaaagaaaaggaaaaaaaagagggaaatgatatatagaaagaatgatgtaatacatcaatcactcacgtgtcaacaaatcatttattgtgtgtgcatgcggtacaaatgtaaaaaattaaaggaaaagggtataaatatttgggtaacc

SEQ ID NO: 274395 - DNA, 509 bp, Cannabis indica
atatgacattgtccccaatgtgttaaaataaaattgtggttgagagatacttacctgcgcgccacatcaacaagcggttgacgcccgtaataagcgtcatgcaagacaacttgaaaattattgttgtactcgccttcaagcttggcaagcgatgagtttgaacaaaagtcagcaccaacaacataagactttggatgatgtgcttggggagaagcctttggtaactcgaagagaatacaatatggagaatgcgacattagtggaaaataagggtccattggtggttcataatatagtggtgttgacaacctcaaatcaacaactacaagtgattcttctaccaccaatggcacctctttcttgcttttctcaaataacctctcaattggttgttcagtttcctcatgaccatccacatccttgactgtgatttgatcttcaataatttcatcattgaggatggatgtttcttcattcaccaaattgagttcatcatttgttgagcaagc

SEQ ID NO: 274396 - DNA, 518 bp, Cannabis indica
acaaaatcttcctgatgtgaagttctcacagcaacattataaaacttttcttcaaaaagtttcttgaacttttcccatgtcataacactgacatctcgggtctgacccactatgtcccaccagacgcgggcataatcttgaaacatgaaggccgcacaattcaccctctcagctcccgtcacccccatattatcgaggatacgggtcacaatgctcatccactggtcagccttaataatatcaatacctcccaggaaagtcggaggttgcagcttcacaaactgctcaaatacagaatccttatgcggcattacaaacccctggttacccatcactagcacaagtgccggtggtaacacttgatcaacaggggaagccggtgccggttgccttaaacgacgcaacttttcttcttcttgacgaagtatgatacctcgcattccttaaaaacatctgctgccagtcagcaggaggattagcatagccaacccccacattatcccccccggattctgcgg

SEQ ID NO: 274397 - DNA, 430 bp, Cannabis indica
cgaagcacttaccacagtgagggagtggctgagatcctggacctggaagatggagttcagggaggcacaagtagcgaaccacttaggcaagcaccgggtaagctgagacgcaaactcgccagtcatctccgcggcgaagggagccaaggtgggcccaaggaagcgacggaaccagtccgatagggggtccaaatttaggtcccacggatcctggtactccgggttgttgtttgtttcttgcacctcaacccgcagaaccctcctaagggcttccacctcagcaaacccccgggagtattcatccatggcgtagttatgcttagctatccggagctcctgcctcgcctcgtctccaggaaccggagtcagcacaatgttgggaggggcagtatgctcttccataagagagaccccaccatcaagaccgtgg

SEQ ID NO: 274398 - DNA, 728 bp, Cannabis indica
  modified_base (94)..(94): a, c, t, g, unknown or other
caaaggcagcacccggacggaggaaaagcgacagaaaagggggtatactccccaatatacccagtacacggagttaacggactcccaagagcgngttactttgctactaggcaaaatatgcactaccggagaccacctcctttgtacaaagacagctcccggagggacctcaacaagagatgtgagtaccataacgacactgggcacagcaccaatgaatgcaaaaatctcaaagacgagatcgagaacttaatccgattgggacacctctacgagtggatcaagaatcagttgcctcatgtcaacccgggtcaggcggctgaagctttgccacagggaacaccagggggtgcaacaggagtattggctccagttgttccccccggatatgcccagcatatccccggcctgccacccagacctaacgggagagtggccatgatctcgggaggataacatatcggaggaactacccgcaaggagctgaagcggtacgcgggggctgtaaaacacgatgaggtttgggaagttactcaagtcccaactcaaaggcctcggctaatggatcagcccatcacattcacggaagaagacgcaaaaacagtgcgttttccccaccatgacccgttggtcatcgagacccccattgccaataaggtggtggccagagtcctaatcgataacgggagctccgtgaatctgctgttcaaagaggccttcactgcaat

SEQ ID NO: 274399 - DNA, 398 bp, Cannabis indica
actaaaacatcatttacaggtaactaagtgttttaaggggcaaaatacattgaggggtgaaaacggtaaaattatcccatctcgatgtaaatcatctatatagaggatcttttaaatcacattaataaaggaattaataagttagggatttacttggtaaatcggttcaacttattggaagctcagcaatatagatccatggtccccattctagttgagactatactgtttgtaagactctataattgattcatgattaatcaattataattctaaaagttagactatgtctactttatgaattctcacagtttaaggatgaaatcgtaaagaaaaggtttctaggtttaattattaattaagagactttgtatgtctaattaataattatcttaaat

SEQ ID NO: 274400 - DNA, 792 bp, Cannabis indica
cagccctatttataggcaaaaaagtgaagaaaaaaaagggtaatcatttcaaatgcattagacgcattgattccccccaaaagaaaatattgggaatcaaatataatcaagtgtaaccgtcaaacgtggagagagaaatttgggttttgaggcattaattgagttacaacattaattagccgaaaattgaagggacgcctggtcagcctcacatcgaattgcgaacagacgcgcctaacacgtatcacccattcaaatgcaaggacagctcggatgaagtctacacgcaacttcgaaagtcccgtacagacttgggggaaaatgttataccaatttttgcactctaacgtggcattacatgatggtgacacgtgaaatttactttatgaacctgctcgcaagagatatgccgaacagagcaccacatatactcgctcagacgaagccttcttaactggacagtgagcaatccaaacagcatgccagcacttagcaatttcaactttcacatcgcgagtcaccgaagaaatccctgaaattttgggatcagatcacagagatatggaaagctgtctgaatcccttgattagtgtattctgtatttaatatgtaatctttccaattatatcaattgtaatcagaaggaaaattcttccctctgaagcttatagccctataaatagtgattcatactcactgggcaaaaggtcgaaaaacttatctaagaattcatattcagagataacattgtaagagctctaagaaaatagattatattccttgttcttaagt

SEQ ID NO: 274401 - DNA, 726 bp, Cannabis indica
tgttataccgaaattaaatacagtaaaattggaacgaattaccgatagaataatctggctgagtcgcggacaatgtcgctctctttaagacgtttcgcggctctgcccgaagtgtgcacggcagtctagcaaccacggcgtccccaggataaaacagcctctgaataagtacgatacgttctgcaccgaactgtatcgctctgtaacaccctactgtttgctctcagaaaaatcgtaaagaaagaaaagattttttttaatattgaaaagagatgtatgcttacgttgttctgatacgacttatatagaagtctatccaagaaaaaacgttcgtgggaggagtggatcgtgggaggaaaaggcggatcattgactgatcgtgttttacctcttctgatcacgtgttaaaattaattaataaataaataaataaaaacaaatctttatttaattaaataatttttcttcaaaaaataaagtgagtccagtgtgtgagtcctcacccatgcgcgcaaaactgggtaccccttggggcccaaacccatatctcaaacttgcactagatatacacttaaaatgtagtgtttctatcccatgtgggactcctactcacacacttcacttttctatttttacatatttcatacaaagttccaacaatcccccacttgaaatttttaaaaatattttctcgagcaacctcaacaactataagacagtgcttca

SEQ ID NO: 274402 - DNA, 475 bp, Cannabis indica
ttaggtaagtatgacgaaaaaatgcaactcgttctagtaccacagtattggaatgggaaacaatttaagaaaatactaacataaagtaccaggtcggatgaccacattaagtactaaatgaacatttacttttaagtgaatggcctgctgggcggactacgctcaaaggtttcgataaaagaaacaaagtaatcaggtcaggtgaccaccatttaaagtatagtttcttatttctgcaatttgttttatctcatgttaagctaaaagatcagattggatcaaatagctctgatgtaagttactacggtaacaaatacacttttcgatcaataaatgaataaagatagttatttcaaaattcaaattgagtcgaaattatcagcatgtttctaatttaccatccagtgcgtaaaaaaggtttggtcaaacccaaaatacagaacagatgtaaaatatacttgtaaaagacaagtga

SEQ ID NO: 274403 - DNA, 632 bp, Cannabis indica
aaaatagattacattgaaatggagttttatttagggcataaaacctaacataaggtatatattatttttatgttttattcattcaaaataaatgatgaacaaagaaacaaagctgtcttatcaaaacatggagttatcctgtataatttgatttaatatactgtattttttgttgttgtggtagatcagtttattttccaattatagttagagtatggtatattaattacacaatatgttacattttttagttaaacatggatgggtatatactattagatgaatattttttttttactattctctttttattaacaagtgttgatatacatcaacgtgtaaaactagttatcataaatatatatgaatatgaatcatatatttcatgctaacatagagagagatacatcaacctataaaactagttatcataaaatatatatgaatatgaatcatatatttcatgctaacatagaaagagagagagaaagagagagagagagaaagaaagttatgatatatcaattgtttggaataaaaaaaaaattgctcgaatattaacttttagtctgtggtatatacattttgcattatggtatatatattttgtgtactacagtataacatttaga

SEQ ID NO: 274404 - DNA, 514 bp, Cannabis indica
aactaagagatgcaaagagtttttaaaaataatattatgaagaaaataattaacatttagatctctttttgctttggcaggaaaaaaaagggagaattactaaaatttggagataaaatttcaggaaaaaaattacaatagttccttctatggtattagagcattcgaaatcttcattacctttttttagtgtgcaaatacaaaatacaaaatgaaataaccaaaacccacaaacaattactaaattcttgattaatttatatttttcaagtaaagaaaaaaattaacaaaagttcaaagaaaaaagtatgtataatttatcattaaaaaaggaaaaattcaaatgataactcctgtaaaaagccttttttgtctttgagagaccatgccaatattggtaggagggagagacctaagaatccaaaaaatattgcagggaatgagaaaaataatcgaaataaaacatagaaataacatgaagttaatgattcatcaatctattaacatgttttga

SEQ ID NO: 274405 - DNA, 485 bp, Cannabis indica
aagtccttagttcttatcctggtctgggttcgagtttgggttcgggtccgggtctagctttgggtctgattcaaggtgtgggtttgagttcgggtccgagtctgtgtccaggtttgtgtccaggtctggaccccgatctgggtctaggttcgggtccaggtccaagttggggtcccgagtgcgggtccaagtttaggtctgggtcaggatctcggtccagatgtaggtccaacatttcgatcgcggtctgggtcttggtccgagtctaggtaagtatctggatccctatctaggtgcaagtctgtgtttgggatcgggtcctagatttaggtgcaggtccgggtctcaattctgatctggttacacgatcgtgtctgggcccgagttcaagtctcagtttgggtctgaggctagtctatgtttggttctaggtctgggtccgggtcctggtcacggtcttagtcttgttctagggtcctggttcg

SEQ ID NO: 274406 - DNA, 526 bp, Cannabis indica
cggaaatccggttctgggtcaccatccggtcgaccggttggtacaggtcccccagaaccggaattccggttctgtgctgggaacccgaaaaatctccccttgaactcaaaattcaaccaaacttaaccaaactttccagggtacctatacaatgcataaacaaccatttctaaccagaatttcacagaacaatccatcaatactcaacttgccattaaagaccaaagctttaaactctaaacttaaaattgcataaaaccatcaacactaaataaaaccagctgcaagaagttaaaatcaactcaacaagaccctaaaattcgaaccctaggcaattcaaaccttaacagcccctacttaacaatttcatatattcaaaccaaagaaaaagcttaaaatcacatctttaaaggttctagggcttaccttagatgaaacctccttgaatcttagcttaatcccagaaaaacaagatgaaaactttgatctttgcccttgcttagccccagccgaaagagagagagag

SEQ ID NO: 274407 - DNA, 529 bp, Cannabis indica
gagataaaggacaagaaggggactgagaatctagttgttgaccatctttcaagactagaaatagaagaaagccagaatgcaaaagaggtgcagataaatgaagagtttcccgaagaacaactctttagtttgagggggagcttgatggtaccttagtttgctgattatgtcaacttcttggctgccaatgttactcctccagagatgtctcgtcaacaactgaaaaagctctttttcagaggtaaagcattactattgggaagagtcgattctctacaagcactgtgctgatcagataataagaagatgtgtgcctgaagaagagatgtattctatcttgaaccactgccatgctttacaatgtggggggcatttcagtggcacaagaactgctgcgaaggttcttcaaagtggattcttttggcctactcttttcaaagatgctaatgactttgtgaaggcatgtgatcgttgtgagagaacggggaacatttctaaaagaaacgaaatgcctttgacaggtatcttg

SEQ ID NO: 274408 - DNA, 694 bp, Cannabis indica
caaatcaaattatctttatttggcagggcaggtttgaagtccaaattcgtgatcttggttcaatttggaaagtttcctttctagtcttgatctgctactgcaaaacccgattgtgatgctgtaaatcaggaatttttttaagaaagtttggtatagctgggaaatcgtttttgtggttgtctctagggttgctatattttataaataggacctagagagcagccaaacgttttgatctcttctattctcatattttcatatttttctttgtgagaagagtgtttcttttgtaaaaacctagagtgctcaactaggttttagttttcttataatgatctcatactattcatagaataggttgaagagaagctttgaacaagtgtgggtctttgggagaagacttttccaagtctcatttcggaaggaagtgagcatatatttccgggagaagatttgtttaagctttacttagggaggaagtaagcatacatcaatagctgaagggagttcactacttggtgtgttttagagatcagattagcaaggtggattacaaagggttgcggtaaatcactagagggagtctaaatttgtttaagttaattgcttttgtaaactttgatactttactaattaatttcattctctgggcgtggccacgtagactagtagtgtttgaaagaacactgatacc

SEQ ID NO: 274409 - DNA, 526 bp, Cannabis indica
ctaagcaagggcttaattgtgaggaaagagtttctagggtcaattttttaattaagagacttagataagtctaattaataaatatattaaatgacaatattattcaataattaatttttagttattaaataattagaatcggcatttaaatggttaaattagaaaattggtatttttgagaaaataagatggaaaaatgagtggggcccaatatgcaacccatggccggccactataatagcaatttaccatttattttttccattattttaatgctaattaaatctaacctaaccctaggtggtttcctataaataggtagtgatgtcttaagggaaaagataatgcatctcattccttcagttaaaatttgagcctctcttcctatacctagccaataccactctctctctctcttcctctcttctaaaccgaaccctatagtgaaagagtgattgcccacacatattaagtgatactcaatcatagtgtgtaaggctgtgaagaatccagtttcaagagaagg

SEQ ID NO: 274410 - DNA, 682 bp, Cannabis indica
acttgagaacacattatacaatacaaaaataacaaacaacaaggagtagggtagaagaacttatgcaaacttctctttaattgttcccattctttcattgaatgttaatttttttttaacttaatttcctccataaagctacaattccgttattatagttacgtagcataattattaagaatgttgccctacacataacgatccaatatatcatcaacaaaccgatgtcattcaaacagaccacatgtcttctataaattacatgaactacatgtaagctaaagatcgttaaaggtcttcttacacatgcgagctagccaatatataggcttagaagcacacaagttaacatactctcaggaatgagctacatgcatatcactataaaagaaacatttactaatccatccaactaatgaaatatgaataaaatttactatcaaaatcactctttctaagaataactcgagaacgaaaatcgcttaatccaattctcatatatatttttcttttactcacttaatcatataccattaatacttaaaaaaaatcaaacttaagaacgtaccaatagttatatatgtctaatttattaaacctgaaacatacactctcgttagaaatactaatataacaactaaattcctttttctttcctaacatactctattccaatctgctt

SEQ ID NO: 274411 - DNA, 530 bp, Cannabis indica
ggggaattttaacaagttttttccttattcttactctcgttagttttctgttaaaatctcatactccacatctccaaaaatcgtgaaatttcacggggaccaagccaagaccgttgtgcatcacttttctcttggacacgttgagagaaaaattagttttcttgcactaacgatcattttaatcgaaatagtgaaaatctcacatttctgatagtggtgaaatgtggcccggaccaatctaagaatattttttgccacgagtcacaacgaattcgtactactaagatgtgaatatgaatatttgttttgggttaaaatttgttgaaatggcctcctaattgaaaatattcttcttttcaggagaaattttaactagttttttcagtactcttacacacgttagttttctgttaaaatctcaccctacacatctccaaaaatcgtgaaatttcacggggaccaagccaagaccgttgtgcatcacttttctcttggacacgttgagagaaaaattagttttcttgcactaa

SEQ ID NO: 274412 - DNA, 475 bp, Cannabis indica
acctaacaaaaagcatcctcaatggctttgtggtcaatggtttttacaccacgaaaacagatttctaccaactgatttgtttcctgtgaaaacaacaacttgttgcaatcaccgaaacaatcaattccagaaatcaaataaaattcctcagcactaaaccgtatgcaacggccagcaaccttagcccaaaactctttaggattgggctggaaaacttccctcagtaataaactatggacaacttgcggatgaaaaacaaactcaggcatatctagaaaatgaccaaactgagtttcacgaaacatagacagcaaattaacagacaaagttttcttaatattatctatgacagaaaaaagactagtgcaaacacacttagatctatagtaatcagaaggactaaatttgtagtcccaaacctgcaacataaccaaaatggccacaataaattattaattgtgaataatacagtatg

SEQ ID NO: 274413 - DNA, 589 bp, Cannabis indica
tggtaaaataatttccaataaggtgagctttagccaagcttgagttttgaactcaaagcttggagctcacatggtgatttgtgtatttttgcatgaagcacagttttgatgctttgaaaatgtttagtgaggtatttagaataggtttggagatttttgcatggtttgggatcgaattgaatgagttatgaatgtttgagtgtctcctgcactgaaccgaaattccagttcagtgaagcctgcagcaaccggtctaccggttggggctttcgggattttccctgaagcggaattccggttgtatatccggtctaccggttgggccattttggggaaccctagttcttcccatttttatgttgttcagggtattgccatgctttttatcgatagggaaacttttagtttctagtttaagtccccgggaagtgatttagcgtatcacttatcagtgttgtgattgttatggtttaggagcctgtaaatcgccgtgcagttcgttccactcaggttgaccggcacacctgaattcggaatcgaggtaagattagtataacagtatgcatatgtatttacatgtttagcgtgc

SEQ ID NO: 274414 - DNA, 601 bp, Cannabis indica
attttttacttataagattcagttttttcctaggcataatttagttgttcgtcaataataattttgagatttggtgaagatgagagaattaccttaaacacaccaaacataacaagaagtatataaatgtagaatttttgaagcaataagtagagtcataaacgttaaaacaacaatggctaaaagtagctagttataagaatgaccatagtaagactcttgtgtggaggaaggcggttccgggaaatacgcgttggagtggtcattgaatgagtcagatgctggttgattgtttggaggttgttgcccctgagatccagtgttatgttgacgatttgggcaccgtcgataatcatggtctgatgagcgacaaatgcgacaatgtcttgagtttcttgggatctgctccccgtttggtccttcccttgtatttcccgtaccctttgttctcacaacttcgggtctttaataatgttggggttgctacgatatcttccaggttgtggcgtctctccttccggattggaattcaagtcaaattcttccttgaacattagagttagccgttcaagctcttcctttgcacggttgtacgagtcct

SEQ ID NO: 274415 - DNA, 600 bp, Cannabis indica
agctgacatggaccacatactctttcggactttcatgaggaattccctttacagcttgaagcttcaccaatcttcggagatctctgtagttcaagtgtcccagcctgtagtgccataagtcaggtttgtccaagaaggtcctgttgcacactatggtattgcacacagcatagcactggtctacagttctgtttcctgttaagacaacacacccatcagatgaaactaaacattgagttttagtgaaacttacagagagattgtcgtcacacaattgaccgatgctgatgagatttgctttgagtcctctcacatataagacatttgtcaggtgagctgctccattcacatttacatcacctctcccagcaatctgtcctttgttgccatccccaaaagtgacagatcctcctttttcatctttgaagttaactagcaatttcttatttccagtcatgtgacgcgaacatccactgtcgaagtaccactgaccttcaacaaaggcagacagagatagctttgcaaccaaaccaacatcagaatttggtttggactttattttccattctcgacgaggtttgcgtccatgtgacttatttg

SEQ ID NO: 274416 - DNA, 525 bp, Cannabis indica
catttgtaatgttcggacaatggttaggatttagttaactggaaattttgtgatgggtgatagaaagatgaggcttgtaaggatcaagatcatatatatatatttatataatatagattatgcatcctgttatgtattttaagactattgttattgtagtattaagatgctggagatatgctgtttttcgggaagatatttagtgaactgaacgttcagaagtgaattgcaattagtttcaaaacatttgaagtcaggcacatgacaaatgtgtcttatacactaaatttcattttcagaatttagtggaggcatgtgttatggatattgagtaagggttgattgagatagtacgttactttttaacaacatatcaatacttacttatcagcacgttaagaagtatgattcttttaaaaatgaaaaaaaataaaataatcatgccttgtttggacatggattttaagaggaaaacaaaaatgaattacattccattttctcatgtttggatttaatcaaaaaatt

SEQ ID NO: 274417 - DNA, 737 bp, Cannabis indica
gtcctagtcctagttcggttctagttccatttgcgattctaacttcgagtttgggtttgagttcgggtcggtgttcgagtcctggtctgagtttgggttcgggtccggatttcagactaagtccagatcaagctccgggtgtgggttcgcatcctgggtcttggtctaggttgggtccgagccccaagttccaatcccgatctgagtttgtattcagttctgggtctaagtcccttgctctgatcctggtctgggttcgagtttttgtccgggtccaggtctagatttgcgtctaattctaggtgtgggtttgagttcgggtcagagtctgtgtccgtgtttgtgtccaggtctggaccctgatctgggtctaggttcgggtccaggtccatgttcgggtcctgagtgcgggtccaagtttgggtcttggttagcatctcggtacagatctaggtccagcatttcgatcccagttttgttcttggtgcgagtccaagttcgtatctggatccctatctatgtccaaatctgtgtttgggatcgggtcccaaatttaggtccaagtccgggtcacaatttttgtctgggtacacgaccttgtctgtgcccaagttccagtctcagtttgggtctgaggctaggtctgggtccggaacctggtcacggtccttgtcttgtactagggtcttggttctgcgatccttattcaggttctaattttgggtcccaggtctagg

SEQ ID NO: 274418 - DNA, 624 bp, Cannabis indica
agccgcgagcattcgcgctctaattttgtcaactgcctcacttgttttctgaacagcttcgggacccaagaactttctttcacccacttcatcccagtgaatgggcgatctacatttccttccatacaaaagttcataaggagccatcccgattgttgcctgatagctgttattataagaaaactcgatcaggggaaggtactttacccatgatccttcaaagtcaagcacgcatgcccgtagcatgtcttctaaaatctgaatagtcctctcggattgtccatccgtctgaggatgaaaagctgtgctaaaccttaactgagttctcatagctccatgcagacttgtaaatctgtccactgtgacccacacagagtcaaactgttccgtggttctaggcatacctaccacgaaatccatagctatatcttcccatttccattctggtattttcagcggttgcaacaaccctgtaggtcgctgatgttcagcttttacttgctgacacgtaaggcactttgcaacatactcagcgatgtcattcttcatgcctggccaccaaaacatggcttttaggtcttggtacatctctgtcgaccctggatgaactgaataaggagtcgt

SEQ ID NO: 274419 - DNA, 612 bp, Cannabis indica
ttaaattccatgtgcagaccaaagtaactgaaagtatagaatgccggtggcaagtggaactttggacgcttgtgtgtgtgaactcgctgagggccatataactgcgggcggtctagggcgctctatttatttatttacgctattaagtttatgtcgtaattattttagttattatttattatgtcttttgtacgaaaactggccagttgtgaatattttcaagtattaaataaaaatgcgacattatgattttctgcgagtaacgcttgtaaataaaattaatatttttataaaagtacgggcgttacagtttggtatcagagccacagttatatcggtccagaacgttctcacgagttacacacatcggctaaaaagtctccgcttgctaccatgtaagtctcatattttatgtttgtattattatttgtacttgtgtaattttaaaattgcatttacttcataaaccttagtacctacaaccaagtttaggtactacccatatgaaataattatttttaatatcttcatataaatatattttaagaaatttcttaggtcaaattttagaagtttattttagttagtaccatatgactcttgaaaaaaaaa

SEQ ID NO: 274420 - DNA, 751 bp, Cannabis indica
acatcatcgtagacgggatcatgtacagaagaggattctcaatgccattactcagatgcgtcacaccaaatgaagctgcacgacttctatatgaagttcacgacggattctgtggaaatcatgcagccggacagagcttatcaaagaaaattctaaggcaaggctacttctggccgacgatgattgaagattcgaaagcttatgtcaagaagtgcgacaaatgccagagattttcaaagataccaagagctccgcccaacgagctgacacaaatgcaaagtccgtggccctttgccatctggggaattgacctaatcggacagttacctaaaggtaaaggcggagtgcagtacgcagtggtagcagtcgactactttactaagtggactgaagccgaaccactcgcaactatcacatcaaagaaggttcaagactttatagtgaagaacatcatatgccggttcggactaccgtacaaaatagtttcggacaacggcaagcagttcgacagtcaatctttcactgatttctgtgcgaaccatggcatcatcaaaagcttctccgcagtggcacatccccaagcaaatggtcaagttgaagcagtcaacaagaccttgaaggacacactaaagaagaaacttgaaagatgccaaaggaaattggccgggaaaaactccctgaaattctatggtcataccatacaatggaaaaaaataagcaaccagtcaaacatcatctcaatggcgtacgg

SEQ ID NO: 274421 - DNA, 634 bp, Cannabis indica
aattagaatcagatatgagagcctagtatccggagttgttcaggttagatttctaggacggaatccttttaatgtgagaccctaacttgggttcgctcggcggaccttgagatcactcgatgcttagcttgtaggatggcggcatgtgagtgaagtgcacctgccttggggcagcaggcagcagcagcataggcgctcagcaacattggggaatgttagctgagcttggctacgtgatgggcttagatggacgtgactttgcatgggcatgcatgcaaacggtgactcagacagtgtgcatggttgacacacgtgaatgacggttatcggaagttacttatgtctatccaaaggcatgcatgtgggctaatgcaaggaatctaggcaagggcttggatggctgacacgcgggtgttagttagtttgcatagagtatgctgatgtgtaatgtgctggtgtgtccagcatggcctaggcggttggggatgtcaaccgcaacctattattgtgtaatatagtaggctttgggcgcttgagtcatcagtgtgtgatgtccagcgtgaacattgtgtaatccttgatattgtgtgaataacaaggttgggaaaagggtttcctgtatactgtgtgttct

SEQ ID NO: 274422 - DNA, 1000 bp, Cannabis indica
tcagatctgtggggtccatctaaggtgacaagtttgggagggtcaagctactttctgagtattgtagatgattactcaagaaaagtttgggtacacttgctcaaaactaaagatgaggctttcaagaccttcaaggaatggaaaacattggttgagaaccaatctggcaagaaaattaagaagctaagaacagacaatggcttggaattttgctcaacacagtttacaaactactgcagagaaactggaattggaaggcacaaatctgcaccaaggacaccacagcagaatggcttggctgagaggatgaatagaactcttattgaaagagttagatgcatgctgaagggtgctggtttggagagaaagttttggggagaagctgtcaaaacagcttgctacttggtaaacagaagcccatctgctgcaattgagtttaaaactccacaagaaatgtggacaggtcaggttcctactctagagaatctgagagtttttggttgtattggatatgtgcatgtcaaacaagacaaattgcagcctagagcaattaaatgcatgttcattgggtaccctgatggagttaaagggtacaaactctggtgtttagaaactggtttcaaaaagtgcatagtgagcagggatgtggtttttaatgaaaaggcaatggccatgaaaccagaagacaaagctgaaactagcactgaggctagacaggttcatgttgaagtcagatcagatgcaagaaccagtgaaattactgatcaggaagttgaagaagaaactgatcagcaacaagatagctcacttgacaactatcaacttgccagagacagaattagaagggaatcaagagcaccagctaggtttggatttgcagattacactgcatatgctttaaccatagctagtgaaataaaaatgctgaacctgcaacctatgatgaagccataactgcaagaacaaagacaaatggctgcaggccattgatgaagaaaaa

SEQ ID NO: 274423 - DNA, 677 bp, Cannabis indica
ccatgagtgtttcaccaccaccggtcgcccctcatgcctgcaaccaccgtcacctctgccagcaaccaccgtctgaaccgcttgaaaaacttcgaaccccaccagccacgtttgacccccaccacccacgttcgacccccaccagtcaccttcgacttcgaccccaccagccaccttcgactcccaacttcgaacaacccttgcctcttcttctcaagtcacggtgtaaaaatgaccctttctcaatttttttttttttttaatttaagagtttatatattatattgtataatttgagacttgagcaggacctccagtacacacatgcatcatcttatggcaacttgagctctcttcaattataacttattgaaatataataatatattggatatgataaatagtgttactaattgaataattttaaacttactgtaacattgcagtataaaattaatgttcgtataaagtataaattcatttttttttatatatatattttaactatacagaatatgtttttaacacttattaaataatacaataaaacttataatattaattttcttatttttattaaataaaaaaatttctaaagttgattattcttttatgtacagactatattatactaacgaaatataataatatattgatgataaatgttgtaactaatt

SEQ ID NO: 274424 - DNA, 670 bp, Cannabis indica
tgtaaagaccgcctatgaatagtactttatattattaattatttaaggtttaagtattaataattatggaatgcatattttagaaatatgttttatatgtcatatatgtttttatgctatttaatatttaattacctaatttctgtgattgtgttcggaagctgtggaagcgacgttgggcctagaaagtcgtattttataatttaaattgttatcggagtattattgttaaatagttgaggcgttagaattttcggggattagtttgaccattttgcccttgagttgtgtaattgtttatttttttatttggggggcaaggaggtctttttgcaagacttttcctttgactttttaatttaattttggctgggaatggtttattattaagtaataataaataaaagaagaagaaggttgataagggattacttaggtttgaaggaaaaaaaattgaaaacaataggaattagtttttctctctctctctctttcgattctcttgggcagcagctgggggattgagaatttgtgttgaattgaggaattcaagtggtaattaaagcttgttcaaggtaatctttccctttaacccttacttgaaggttgttgtagtttaggttaggttttgaagtgaaattgaagaaaattggtggctgtttgatttggg

SEQ ID NO: 274425 - DNA, 572 bp, Cannabis indica
ggagtttcgggctcagatcttggtgatactctgctatagaaaggatacaagggttaaagatgtgagcggaaggagtcattgaatttcactgcacccactttaaggtttctcaaactttatatgtgtttatttatattgttttagaaattcatatttaggatgttaaacaacatacatggtagtaaatctagatcctggtaaactatattccaacatttatatgattagaattggaaaatatggcatttatgaaataatagataaatagttgagaaagatggcaaaaatataattagtgtagggcccacatcatggtcggccactaagtccctatttttgctattattttatcatttttgattccatataattcaatcttaacccaactaatgactctaaacctagtttacatcttgttagacaactagagagtttgagacttcttcttcttcttcttcctaatttcgaaatcctatagatttcttcacataaaaatttgagccttagtgattgagtgcatgcccacccatagcaagttagtcctcaatcatagtgtgtaagactgtgaagaa

SEQ ID NO: 274426 - DNA, 683 bp, Cannabis indica
gcgcatgttttgtttttaatttccaaattaagcggcattagtaagctctcgttgatcatgacttgatgtgccaacttggggtttcgaggttgttcagactagatggatgccagacgaaataacaggagtcagggcaactcagtcgggtcaaatcagggtcagggagctcagttttccccaaatgttaggggccgaggtagaggtcccaggggcagggctcgtggttggggtgatgttaacccgcacaggctgcccaagccaatcaggaagcccagaattgggaagttaggtttgctgaaatgcaagccagaatagaggagaaagataatgagattcagagattgagacagcagggtgctcctgcggtgcctgagccagaagttcctgtggcacccgcccctgctgctcacaccaatatagtagtagcggcaaacagaatggaacccctgtatgaaatgttccgcgagcagacacctccagtttttctgggaggtccggacgtcatagaagccgagcagtggctatcagttattacggggatattgaattttatgagtgtgaccgagtacacaattcagtttgatcggttggcgaggttggcctcaggaatcgtgtcaaccgatttcagtaagaaagaaaaatgtcttgatggacttaatataaagatcaagtatgaccttatg

SEQ ID NO: 274427 - DNA, 588 bp, Cannabis indica
tgataggagcagaaacgaggtaccccatcatcgaaaagttggtcttttgcctcctgatggcctcaagtgggcaatggagttaagtcaattcgacttacactacatttctcgaatctccataaaaggccaagccttggcagatttcattaccgaatgcaacgaagccgaggcaaccgcaaatgtgccagcaccatcggtccccacatggagagtgtttgtggacggagcctccaatgaaaatgggtccggagcaagagtggcaatgatatccccgacaggactacgactccaggcggccctacggttcgacttcccaacttcgaacaatgaggcagaatatgaagccctaatagcagggctgaaattagcgaaagccataggggccaaaagagtggaagtctacagtgattcccagttggtcgtaaatcagatatcaggagaatattaaacgcgcggcgaacaaatggccgcatacgtaacaatagtccgggagctactccacgagttcacggattacaaaatagaaagaatcccccgggaaaagaacgctcatgcggactgtctggctaagttagcttcagatagtga

SEQ ID NO: 274428 - DNA, 891 bp, Cannabis indica
ctgtttataggttaatgggtcgtcatcaataccgtcaccaatgaccctattgatttcaccatccaagccataacgagatggtttagtagaaaccctcccactacggcgaggagcggtgatattctgaacaggaactttagtggtagttctctcaattgtttcgactgtgggagtgggattatcctctacttgagtagaagaggatggaacatcagaaggtgttattcctgaaagcatttcctctaacacaaccttacttttcggtttaaagtctttaatgtagtcatcttcaaggaaagtagcatttaccgctttagttgtaggatcgccattgtcatgcctctgttgttattgtgcattttcattgtagaagaccatacgctcttcgttcaatggttgtttagggcatagaatagggtcttttctttctgttccccttattgtgtaaaaccaccttctgcgattttactgcacccgacacttgttcagggaatctttctagggtttcccgtgtgacacgtgtccggagggggcctctttccagcggttaggggacccccattccctttttcttgacttagggtttggtacggggcctaactgctggaattttctctttcttcttttttttttcacagaatagacaatgtctgcctctggttcgaagtcctcaaagaaaagcgggaaacgcatggctactctagaggaggtctccttgggacccgttgcccaggaggggtataagtcccgggcaaccggatgggaagcggccgagcttcattccaccttaacctgtccccatcaactggagaatattgtggaagttgctgggatcaagccttccacatcaggaacctaccatcggccacctcgcgactcggagacgcccaa

SEQ ID NO: 274429 - DNA, 976 bp, Cannabis indica
tatttttttaaatacattatttttcgaattttacattatatatttatagaaaatttaatttgagttgaaaatttttaattaattttggatcaacttaaattgaataattttcgtaatatttattggaaaattaatactaaggttggaaaataatttatttttatttttctagatcttctttaagtataattttattctaaataggtaattttaattaaataaatatatattaaaataaatagattaaaataagtatcaaagaaaatacaactctttaaaataatgagctttagttattaggatattcgatctccattgttggtcctacatggttaatatgttttcaatataacctcgagacgctagacttcgtccccctaatggatggttattcgttgaagcatttaacaccgtaacgatctcttatgataagtattttgtaagttttcgtctctattagactctcccctacgatgactacttagagataaaattaccaagtatgaaacaatggtagaagctcataaaataagaataaccttgactctcgcctaccgggacaacgttggattctttttttatcgaataaaaggtttctagaatggtatccattttagatgagctgacaactttattcaatgaatgatactttaactctcgcctccgggaatactgtatcagtttgttggaaaccttagaaattatttaagatatgatagttctgtattttcacatgtctttgttatttgctaaatgcttaataatttctgtaattatgtgtgaattttatatttagaccatgttgttttttgttatttattgtagtttaatttcgaattctttattgttggtctaagttggcttgttgtttttaatgggacaaatcctaatgtaatgtcatccattaaacaaacataatagtgtagatctcgataaataaaatatcgtgaagtgcaacatctagctgttcatcaat

SEQ ID NO: 274430 - DNA, 641 bp, Cannabis indica
acgattcctgacatattgcttgtacacagaaattgaccgctcaatgggatacatccacttgtactgcgctggtccacctagtatagcttctttagggagatgcataactacgtgattatgtcgaagaaagccggtggaaaaattgtttctaacttgcacaaaatagttagaatatttgtttgcattttttctaaatccgaaacattaagtgttcttgagcataattgtttgaaatacacacagagctcaatgattgtgtcccggatttcttttttcaagaacttacggatacctgccggtagtaaacgttgtaacaacacatgacaatcatgtgatttgagcccggaaatcttgtccgtatccaaatttacattttcatctaagtttgttgcaaaaccgtccggaaatcgtacagactttatgaagtctgcaaattcaatccgttcttgaacactaagtgtgtaactagctggaggctttttccacttcccattttggtcttcctacaaccacaactctcatcgtatttgcaagtcttgcaaatccattctcgccttgtcggtatcctttgacttcccgtcaatacttagaagagtacctactaagctgtcacacacattttttctcaatgtgcattacat

SEQ ID NO: 274431 - DNA, 295 bp, Cannabis indica
cacccattttcatctcttgcaacacatacaaaagagtacgttccatagctgtcaaaagttgcagcatctacatttattttaatctttgtagcagctggtttcatccatttctcgagtccatcagcatctgttaaataagctggtgtgggaacacagcttcggtcttgagctcgaagtctcataaattattaagtgtcatgtacgtataatgttaccatatggtcatttgaaggtgtcaaataataataatgttctattactaataataaataaataagcaaaaaaaattgtacaa

SEQ ID NO: 274432 - DNA, 539 bp, Cannabis indica
gcataggctagcacttcttcccaagcagtaaaactgaatctctgtgtaggtctaggaacccttctagttctgtctctggttagttggtaatcttgtattgccacagtttcttgtccatcttcaggaataggttccacctgaatgttgtcatcctgtacttggtcatttccttccaagttttcatctccctgagtgttttccacctgttctggttccacctgaacagtattaggttgagtgttccttgtttgcatgtccacagatgtgcctgcagggttagtgtctaaagtaggactagatacagcattattattagtaatacaaggaaataaggcttccttaaaaataacatccctactgtttatagctttaaacccttgtttctctcttacccataatctgtagcctttagtgccttcaggatagcctaagaacacacatttgagagctctaggctccaatttaccaacactctgatgtgcataggccgcacatccaaacactcttagatttgagagatcaggaggcttacctgacca

SEQ ID NO: 274433 - DNA, 756 bp, Cannabis indica
gctcgtacttatgcccagtacattgctaggaaaattgcatcacctaattaggtgagcccgtttctacgctcggtactcatcagatatcactgacgcctgtacttacgcccagtacgtcgctagaaaaatcccatcacctaatcaggcgagcccatctatcacatatcgcattatcgatactcaaccaatcaatctttttattatataacaatatgaactatatctgaattttaatcaattcattgcaatactaattacactacataaacgtactatgcaatacaatatacttttcttacctcaagttctggtttaggtatgttggctgacctacttggataagatcaatgatcccgagccctaagtcataaactaataagtgtttatcctaaaacactggttaacaattgaaaaggagaacctagggtttcctactaaatcctacagttcaaataaactaaaataaaacttatattttggctataaaacatataccatatggtagaacttgttgcaagcttcgaaacggtatatagaacgtccaaaacggacacccgagtaaaaatttatgataaaaacacaatttctgagttccccaactgcccaaaacggtaaatcggttggccagaaccggttgacgagtttcaaaactggttgaccggtttttcaggggtaaaaatatgattttccaagtttacgcactcaccgaaatactatcagaacttgtccaaaccactccaaacttcatagggcaca

SEQ ID NO: 274434 - DNA, 582 bp, Cannabis indica
tttctgggtttttttttattttttgcgattttatgcgactttgtgcgatattgtttgcgatttcatgagcaatccaaggttagggatgaaacgatttattttggcgactttgtacgatttgaatgcgattatgtgtgcgattgtaatatttggcgattgatgtgcgatctgttgtgcatcgttatgcgattttgttgactatgtgatattgtgcgactttatgcgatttctttcctttgttgtgcgattattgtgcgacatcataactggtttatattatgttagcttaaggcgatattgtgcgatattgtgcgatttagtgtgcgatatagtatggtgatttttaaatgtaagtttgtttgtatttctttgggacagattcatctgtatttgtgcctgtactgtatgatggcgtttggactttggagggtttcaactgggtatttgattcctcaaaaagtaagacattgatattggacattgactgtacactgaaaaagttgcgtgaagttttgcatgaggagttggaggtggaccccttggtgtatgaattgaagttagaagttctttacatgtacatga

SEQ ID NO: 274435 - DNA, 453 bp, Cannabis indica
atttttgaaaatcagaaaaaatagaggtggtgagcaccccacccacgcgcgcggaaatcctgcccagggatgcttgcgccgatttttctcggttgtctccctttactacgcgcgcggacagtatgctgtccgtaccacctgccattttttccgttttcttctatttttcatgccatttcatggaattaacttctgattttttgtgtagttttgtattttgatttttgtttttaaattttcaaatctaattatcagaaataaattaattttatttttaaaattaattttagatattagtgtaatttgaatttgaaaataggttaaaatcaagtattgcttatctcttttcttattttctttaaaatttgattattttatcttatttttgaatataaggtcagaaattaattttttataaaaatattttttttaagtattttgaccttatttaga

SEQ ID NO: 274436 - DNA, 847 bp, Cannabis indica
tctccaattggtggggacaggtcaaggtggaataaagctcagtcgcttcccatccggtcgcccgggacttatacccctcctgggcaacaggtcctagggagacctcttcaagggtagccatgcgcttaccacttttctttgaggactttgagccagaagcagacatttttctattttgtaaaaagagtaaaattccagcagttaggccccataccaaaccctaaattaagaaaaagggaatgggggtcccctaaccgctggaaagaggccccctccggacacgtgtcacacaggaaaccctagaaggattccctggacaagtgtcgggtgcagtaaattcacagaagacgactttacgcgataaagaaaacagaaagaaaagagtctgtcctatgccctaagcaaccattatacgaagaacgtatggccctctacaaagcaaatacacaataacagcggagacgtgacaatggcaatcctatcactagagcagtaaattcaaacagactacatgaaggatttaaacacttgcatgcctagaaatttcgaatgcaaacccagaaaagaacaaacagataagtaatagcatgccattcaataataaagcaaaggatgcaaaaaacttacgatgaagtgttgaactgggggtcctgctgcaagtcgagtaaagacaagaaggactggtagcaacgagcgaagaagaactgggaaaatcgcaaagtgtttgaaggccttgttctaggtctgagaattttctctctaggaaatttgagcaaagttggcaagaaatgggaagtaaccgaaatgaagaaaaggtggtggcttttataggcaaaaatgcatgagg

SEQ ID NO: 274437 - DNA, 712 bp, Cannabis indica
caatttgtcttccgcttaaaggtgggggaggcatttcaaattcttgcttaccgtcaaatgcctttttccaggtccgaaatacatgttcgggtggcaaaaactttcggtgtcccatataacaaatttttctcgaatgtgttaaatagcgagagcatgttttctcttcacagataggacatgcattataacctttcacactgtagccagaaagattcccgaaagcaggaaaatcattgattgtccacaataacatggccctaagattgaatgcttcattcctataggcatcatatgcattaacaccgtcataccacaatttacttaaatcatcaataagaggagctaagtatacatcaatatcattgccaggttgtgaagggcctgatatcatcaatgtcaacatagtgaactttctcttcataacaagccacggcggcaaattatatatcacaagcaagattggccaacaactatacttactgctaagggaagtatgtggattgataccgtctgcagagagaccaagacggatattcctaggctcattggcaaaatcaggccatctagcatcaattgttttccaagcgggagagtcagctggatgtctcatcataccatctttcactctatcactggcatgccaagtcaaatttttagcatggtcggcatttcgaaaaaaccgaaccaaacgaggtatgggtggtaagtacca

SEQ ID NO: 274438 - DNA, 385 bp, Cannabis indica
ccccaaactcaatatcctcaaaaaatttgcagttcccgtttcaaatatattctttacttagggatcataaaacttgaaacccctagatcgttcagaatatccaataaagtagctactcacagttttgggttccagcttcttttcatttggcctataaggcctagcctcggcaggacatccccaaacatgaaagtgcttaagactaggctttcgccccgtccaaagctcgtaaggtgttttagcaactgctttagttggtaccctattcaaaatgtagctactgtcttaagtgcctctccccagagtgactctggtaaggttgaatgactgatctgttggaaattattttaccaggatcttagatcgactcacaagtatgttgatt

SEQ ID NO: 274439 - DNA, 920 bp, Cannabis indica
agaggatcttctctcccagtgtacatcttccaggttggcatcttgaacttgtgaggtagtggcaggaggttgatttctggcgagaagggagttccgcgtgcacggtctaactcaagatcattgttacactacccggccatgccatgaaacatgttcttcagttcgtcaagctgggcctgtacggctgggctgacttcattggcattctggtcgggttgggctacttcagcgtctttctgagcggggatttgagtatgggctccaaactgcacattcattgtagtattctgctcgtctgttccccttcttctgtttaggtcgtcctttaggtcacggggtgttcccaatctttcgaacacagaagaacctggctgccttagcgattggttcgcttggttggcaggtggaatggttccattattttgcgtggatccatcgagcatgactccgcctgatgaattcctggacaaggtctgtccgcctacctcttggcccacgagtggaactcgtgaccggggattggacggctgaccgttggttgtctgggaagcattcaccgttgggtcatcctcggtttctccaaggggaatgacgctcggcgcctgctggcctacagtctgataggctctttgtatcagcacagtggcttgccgactacgatcttcgatttctgcatggtgagcccttaatgcctccatctctttgtccctccactcggcgaacatatgcctctgttcgtcaaacgcgaggtttactgcgacacgtaattcttcctgatcgtgatgcagggtattgttgtgaccctgcatgagtccaagcgcagcaaagaggttttgcaattcagttgtgttgaccgaggttttcggcaaccaataaaatatgagtataataatgagctgtacgaaagcgagatgaagact

SEQ ID NO: 274440 - DNA, 641 bp, Cannabis indica
ccccccccagtctttctggatttgacgagcatatcatccacgtacacttccatatttctgccgatctgatctttaaacattttgttgaccaatctttggtatgtagctccggcgtttttaagaccaaatggcatgactttgtagcagtagagacccatatctgtccggaaacttgtatgttcttggtctggcggatgcatcttgatttgattgtagcccgaataagcatccatgaagcttaatatttcgtgcccggctgttgcatcgacgagctgatcgattcttggaagtgggaaacagtctttagggcacgctttgttgaggtctgtgaagtcaatacagactcgacatttcttgttcggcttaggcacgagtacggggttcgcaacccaagccgggtaaaaggcttcaatgatgaagttgttgttgcgcagcttttcaacttcgtctttcagggctactgctcgttctttatccagcaatcttcgtttttgctgaactggccggatgttaggatcgatattcaggacgtgcgaaataatagaaggatcgattccgaccatatccgcatgtgaccaggcgaaaacatctaggtttgctctcagaaattttatcaattccgattttacttcgagcaacaa

SEQ ID NO: 274441 - DNA, 512 bp, Cannabis indica
caccctgtgcatgatgagagaattatggttatgcggtgtgacttaagtcgcacctacagtatctcgctatttttatcctgcgcgaggtctaaacttcgagaaatctctcacggacattcagccttcattggaaatctgaatacacgtgtcctttaaagaggagtctggtctcgagtttctaggtgagagaaatctcactataacacatgcccctagtttcgcgacgtgactagagcggtcactgagggaaactattgctcgagagacaggtgaaaggttgtcacgaggaggtgaccttttggttgtcccatcgagggtttcgaaaaatgacggctgtaataattaatttttattatctctaggatgccacgtcacaaaacccttcggttttcgtgtaggcgtggccataattggccgttagattgggcgaccttaggcattctgactgccacgtgtcatgatcccaattaataagggatatgggtatttaaacgctttgatacgaatcaaat

SEQ ID NO: 274442 - DNA, 510 bp, Cannabis indica
cgctttgatacgaatcaaatttccccattttccctcttttctcttaacttccctctagttcatacacttcagaaaaagttcatctccagatttctgccagttttcacaacatttccaatctcagacgtgatcgagagcagtttgcaggaatcagaactaaaggttagttttctgcatttttcgtttttgtttttagagaaattgcgttttactctctgggtttggatgtttttgaaaactttttaggagtgtatgctagtgggtatttatgtgttttgggtcaatgaaactgggtaatattcatagtatagggcctgtaaattgacataaccgcatacaattcataggcactgattcacgtctcgaatgctcgcggacattcggatgaacaatttgaatgttcgcgggtgttcggatgaacaatttgaataatcgcatgtttccaagacttatttccgcttaactattagctagatcttttaggatctttacatgtcgcgggctgagtgg

SEQ ID NO: 274443 - DNA, 552 bp, Cannabis indica
aaagtgcaaccagagtcaaggatccattcatctttgatggatggtccaacttggtacacttcaccactttcatatccatctgtaacattagcatcatgcatatcagatttatttttagagttagagtatttagaatctccctgtccatgtggtttttgtttgttatttcttttcaagaagtaacaatctctcttaacttgtctaggtttaccacaattgtaacaaccattagtttcatcagggtttctagggttagaattagatctgcctctttgaaaacctccttgtttgtttgaacctctgccttggcttctacctctgttattccaaggttttcttggacctggtctgcctctactcaaattaacttcaccatttgagtgtccacctttctctgtcctcatctctaaatatttagatttgagtgctgaaatcacctcctctagggttatagatgtccttccatacttaatagcagtcttgacttctctgtaggattcaggtagagagtttaagatgattatagcctggttttcatcacttagtgcctca

SEQ ID NO: 274444 - DNA, 509 bp, Cannabis indica
atagacctaatccaccttttggagataactaattctccaccaggcagtagggttccaaaccttaattcataactatcatgcggtctatcccatttactaaaaactctagccgccacataagaatgagtggctccagagtcaaacaacacagagaaataagagttgttgaccgagagctgacttgttaccacagaggggctggcttctacatcagcctgagtaatggcaaacacccttgctggagtgggtttcgctggagcctttggtgcttctgttctgtgttgagggcaatccctcttgtaatgccctggcacgccacactgaaagcacccttgtcctctacactcccccagatggtgccttttacaactggggcactctgggtaagtgtatcaggtataagaactaccctgacgactgcctcaaccctggttcccccggaacctcttgttctaacccgagccattggttgcagtggatgcctttcttttctggtccatggccgaacc

SEQ ID NO: 274445 - DNA, 982 bp, Cannabis indica
tagtgcgtcgaagaatgccgccagaggttcgctggtatgtttcccttggcttgccggtatgctgcttgcacgggacgtggcctagatcctccgagagatgtcgtggtgcgcctaggccacgagtctcaacacgagatgacacgggtagtcattcgtgggctagtttgcatacacgcatgggacggatgcaccatgttggaaagggacaaaggtctaatgtatgcaactagtttggtggcttgtcttgagggccagacaacatgcgtggaggcatggcgcgttgaggaaatgtccatggacgtatgggagtccttgggcaacgagggagactattcggacagtatctaatggggcatgatagaggcgttggcacgttggcttggtactggcatctggccacacatgctaccttggtctcgagtgacaaggtgagcgtcggtgttgggatttgtcttaccatggtgggaacctatggacaatgtgagtatcttggctagagagcctcgatgcatggatgcttgcgagcatgactcagcgagagttgttcgagagacggaagtgtgcacgaggcacacggtcgcgcgaaaaataagcccattgttactcggatggttggaaggctgaccttggcttagagaagtcaaggtgccgcacgagtgttccactgcctgaaaaggtgagcccctgacagttggtattagagcaaagtttatctcagtgggatgtgaacttggttggcctatcctagagaggatgtaggcaggtggacggatcgagagagatgcggagttgtggaatgaatgcatcaaagaagccagcagggctaagaagactgagcgcaagcattgagatgacactagagtttttgtggaagccagagggccgtgccagtgagacttagtagtcatgttggcctgcgaagagggtgctagagtttgcatgaaggccagagggctgcgtcattgggacttagtacaccgtg

SEQ ID NO: 274446 - DNA, 510 bp, Cannabis indica
cttgaccagctgaaacctcttctttgatctttactaactctggatcagttaactgagcagctttaattcattcaaacagatcagattgcagcgtcaagttatgaagttttcctacaacaaactcgatgcttgatttgaccatgtcttctgctaattggcgtgagatctgaaccatgctagttacttgcctaggacctttcctgctcagtgcatcagccactacattggctttcccaggatggtaaaggatctcacaatcataatccttaattaactctaaccaacgcctctatctcatgtttaaatccttttgagtaaagaaatatttgagactattatggtctgtataaatttcacatctctctccgtagagataatgcccccaaatcttcaaagcaaaaactactgcggcaagttctaggtcatgagtcgggtactgttgctcataatctttcaactgacgagaggcataggcaataacccgatcagcctacatcagtacacacccca

SEQ ID NO: 274447 - DNA, 349 bp, Cannabis indica
tcctgaatagaacaactagaatgcatgaataaaacagaatattttagatcttgaacaatagaggtgaccgataaaagattaaactgaaaatcaggtacaaaaagtacattatttaaacaaaaattagcattaatgtgaacaataccagatttagtaacagggatttttatgccattaggtgaagtaatatgcgaggcactaggaatagtatcaaaagaactaaaacaagatttatcaaagcaaacatggtgggtagccccactatcaacaatccaaatattatttgagaaagatacagatttaccagttaggttagatgccaatggagtgtttgttggaaattatttta

SEQ ID NO: 274448 - DNA, 563 bp, Cannabis indica
gagttgagcaaagcagagagacatgcttgatcaccattaacagccatggttttttctcaaacttgattcgaaaagtaaaatgacaggctaaactcttctctagctaatggagtacaaatgactcaatatttttaaatgaataaataactgcaatgtttttttttaaaaaaataaataattacagttattcaaaataaaagtaagggaactgaacacaaaactacttgaaatcaactttttttaaaaaaaaaaaagtaacattatttttatattacaaaacaagtagtaaataacataaaaataagagttaataacgtaaaggactattttttttttttttttaaattttttacctttttatattctaattctttttacatttttagtatcttataaaaataacaaaataaccatctcgaagtaacatgataataatatcaaaacaacaacaaaaaataacatacaaataataaaaaattaacaacaaattaacaagaatacaacataaaaatatatcaaaagaatatattttcaaaaaaaaaaatcacaaaaatcgtaaaaat

SEQ ID NO: 274449 - DNA, 932 bp, Cannabis indica
gccatgagtatttttttaaatgaataaaatcttagttctcgtttcccacagacggcgccaaatgttgtcgagtgaatttcgcaacaccaaattatatgatattattagtgacaagaagcaatttacgtgaaaagacaagtgcgagtattcaacctagaatggcgagtactcaactgggaatgagaaatagttaaccaaaaactggaaaataacaatgagacagagaaattatagtggttcagtcagattatggtctgcttagtccactgtagcaagagattcgtaggtcccatttcacggtggatcacccctttatatacaaagcaggtgtccgatcagttatacaaggattgcattcattgttaatccgtttttacacattgaattacaataattaaactaagcaacgttaacattaataaatgaatgacagttactaagttcatcaacgtatgcgtcttccgaatctgcgagttgactgttcatattccgatgttaagctcgcagggttatcattatgtttaggatgtctgcgtccttaggtagtcgcttcttgtagacatcgtatgtcgagctgatagaacctagacatgcgagtctatattgcattataaaggctgcagggttcttaagaccaactcgtatttacagagaatcgttctcctggtttatacaaggacaaaggggaggatgctcgcatatattcgatatatgcgatctactctcttgtctcggatgcgattagacttcggtcatgctcgccacctctcgctggttatatcttaagcgaggtttaaaacttcgaggagtccctcagggacatctcagctttctgtggaaaatctgagtatacgtgtcctttaagtaggggtctggtctcgagtttctaggtgagagaaatctcactataacactacccttcaatgcatttt

SEQ ID NO: 274450 - DNA, 523 bp, Cannabis indica
atttaataagcgataagtgatttgtagcaatcgatatataataaagcaatataaagacacaggaattttatagaggttcaaccccgagcagttcggtaatagcctaatcctcgttacttgtattgacttaagaacaaggagaaatgttcattttcttatagctcttacaatgtgtataaacagaaagatcgtgtgatcaatgtcgtgtgtatgccatatccctagagtctattccctaagttatagggatttcgttgatgactcacgatgcgaaattgaattcgctaagtgttggttgctctgcgcggattgctgaaaactttgctttgggcatgctagcgaggcatcctcctcggactatgcttcccgagcagatgctccaagtgaattccacgtgtcaccatttatgtgatgtcacgtcagagtgcaaaaattggaataataattttaaattaaatttgaatgttttgatagtttaaccagatgagcattttcattaatttcgaagataaatttaggacga

SEQ ID NO: 274451 - DNA, 422 bp, Cannabis indica
gacataaacattgaccaaagaattaagaagattaacacagtcaataatcacagaaccaaaaacagattgcatttcgacattgctttcaagggcttgaaccaccactagtgaatatgtctctagtattatatgttgccatcctttttcctttatccagctcaacgcctctttcacaccaattgcttccactaaagaaggatgcacacagccggccttgtgaagacaaaaagcttcaataagcctgccatcacttccacgggctataccaccaacgccataggactgtgtagatgcaaaagttgccccatccacatttaccttaacccaattcatctctggtgcaatccaatgctcgctggtgcaaagtgtagtaactaaagcaggcagcggctcaaaacgatttgagcgagcataattccaat

SEQ ID NO: 274452 - DNA, 677 bp, Cannabis indica
ccttttccttgcaacagccaatgctctcattaactgtaggaatggtctcatgaaattatctttcgggaatatgactatggaggtcaacatttttcatgttgcgaaacaaccaccagacgaggaggaagattgctatcatactgatgtgatagacacaattgttgaggaggaagttcttttgcatgatgattctgattctttaaatgatctcctccatgactttgatactgaaaatatgctttatccacctgaggaagctaatgtttcttccattcttgagatgtcccaagatgaagcatcaccgtcgcaatatgagaatttgcgattccagacccgatctatgaaacgcttcttcgggtccatgtgcgatattgacaaattctggtaagagggtaggcttacctgaggagatcacctttgtgactctggcctacccagaatgatcaggttgtttctatttctgtttatgtttatattttattcactatttatttcctttgtttttgttttgttttttcgaggatcaatatcgctgctatccatggttgcttgctctccaggtgttctctttccctattcttttaatttttatatatttagacattgaggacactgtctgattttagttgggggtggtgagcatattcaagcatgtttcttaatttttgtcatattaa

SEQ ID NO: 274453 - DNA, 900 bp, Cannabis indica
tgctctcaggcttatttattttttactccgcccggggatggggctctcccagcccagcggagatattgtatttttatgaacttgtttccgtccccaagaagggggacaaacttaaagatggtttttatggattccgggcccaccctgccaatgatgggtggtcccttataataggcaaactcatgttaaggagtatcgccatcgttttttcttctcctccgggttccgagcggtggaacatctggagctcctcacggagtgggttaggattcccccttatgagcggaccgcgcctactcaggtctttcttcggagagcccaggcctttgccacttatgaccgggcagacctcgacgtcgggggcctggtcacgacggagaattgccggaaggccaagctcatcctgccgcaccaatcagtggaggactctaacctctccagggttatctgtcccaatgtgaaggcgcctgccgcggagaagatcttcagggacgagatcatcgccactgccgagaagaagtaccatctctaccggaaggctcaggagaaagcttactccaaggctcaagcagcttccgggaggccacttcgcgtggggagcccggtcgagaggagaagccaggcgatcgctgggaagccccttcgtattggggactcggctgagagaagggctcctaggccaaagccttcggctcaggagccgaacactggggctcctggcgccagcacttccggctccggtaagtctcctttagcagtacattacgtcccttctgttggcgaatatgccagtcttaggcctgtagggttcgatgagcgtctttataggtttaggatgccctagacccggtggggagaccatatgaaggaatttaatttttctaacttaggagatttcct

SEQ ID NO: 274454 - DNA, 716 bp, Cannabis indica
agcaaaaattacaaaaataacatatttcacatataagctaaataatacccgtagagtttaataaaatctcaggaattgagaaattataactctaatatttatttctaaatattggggtccacaattaaattaatgcacatataataataaaataataaaaattagtgctaattgcccttactaatccaaattactagagcggtcattacagtgatagctaggtacatcccaagttcttctccatccaaaggttttgggagtacaggaggttttgcgagttacgtttttagctctgtccactcaaattgtttatttcctcacatgatgttgaagaacggaacacacttgtctgttgattttgaagcaaatctgttgagtgcggcaatccgactagtcaaactttgaacttccttggttcttgttggtgatttcatatctaggagagcttgaatcttctctggattgacttcaattccttgggcaatgacgataaagcctagaaacttacccgagctgactccaaaggagcactttaagggattgagtttcatgttgtactttttgaagactttgaagcattcgtctaggtcatctatatgccccctagccttcttggattttacaagcatgtcatccacgtacacttccatgattcgtccaatctggtctttaaacatcttatttaccaatctttggtatgtagctccagtgttttt

SEQ ID NO: 274455 - DNA, 717 bp, Cannabis indica
ataccaagagcccctcccaatgagtttaccctgatgactagtccctggccctttgcggtctggggaatagatcttattgggtccctaccaacaagaaagggaggggtaaagtatgccatagtagcagtagactacttcacaaaatggacggaggttgagccaattaagactataacttctaaaaaagcactagactttgttatcaaaaacatagtgtgtcgatatggcttgcctcacaagacagtctcagacaatggaaagcagtttgactgcgaagaattcacttacttctacaaccaacacggagtcatcaaaagcttctccacagtggcaaggccacaaacaaacggacaagtagaagcggtaaataagatcctgaaagtcactctaacgaaaaagctgctggcctgcaaaaataattggcccgaagaattgccaagagtgttatgggcctaccggacaaccccaagaaccacaaccgaccactcgccattttttatggcatacggttgtgaggcagtggtcctggtggaaacattattcccatcccacgggagaacaacttatgatccagcaacaaacaaaggtttattacaagaagcgttggatcagattgacgaactccgggatgagtctcaaatacgaatggcggcttaccaaaagaaggtgactaagtactttaactaactcaaaagttaaaagtagaaaatttgctat

SEQ ID NO: 274456 - DNA, 439 bp, Cannabis indica
cccatggtccccatactagttgagaccaaactgcttgtaagacaattaataaatatattaaatgacaatattatttaataattaatttttagttattaaataattggaattggcatttaagtggttaaattagaaaattaacgtttctgagaaaataggatggaaaaatgacaaaatgaaaaaattacaaagtgggcccaatccacaatccatgaccggccacacttagtgtaatttaccatttattttttctattattttaatgctaattaattctaacctaaacctaggtggttacctataaatagatagtgatggctcacacttaacagattgatgaaattttactttcaaaaattaacctgagccttctttctctttaggccgaaaccacttctcttcttttcttcttcaataatttcaaaccttgagtgataga

SEQ ID NO: 274457 - DNA, 922 bp, Cannabis indica
aacaacagaaaaaaatagacaaccggtcagacaccattttgcaatggcgtacggtttatgaagctatgctgcccgtccaactcgagccaccttcccacagaagattgacgtacgatcaaggttcaatcacatactccttgcagaatcacttgatgaaatcgaagaaaaacgagcacctgcaaactcaaagttgatagctcatcaacaaaaagtagctcagtatttcaacaaacaagtgaaagctcataaattcttcgtgggagatatggtcctaagaagggtattcctaaacaccaaagacagaatgtcaggtgttttaggacctaactgggaaggaccataccaagtggtcgaatttctcgactccggagcatacaaattaggtaagtatgacgaaaaaatgcaactcattctagtaccacggtactggaatggagaacatttaaggaaatactaccaataaagtaccaggtccggttgaccattttaagtacacaggtccacttgaccatttcaaagtactcaggttgggttgaccattttaaagtactaaatgaacattcgcttctaagtgaaggccttctgggcagactacgcgcaaaggtttcacaaacaaaagtactcaggtcgggtagaccactttaaagtacagtttcttatgtctgcaatttgttttatttcatgttaagctaaaagatcagattagatcaaatagctctgatgtaagttactacggtaactaatacaatttcgatcaataaatgaataaatatagtatttcaaattcaattaagtcgaaaaaatcatcatgattataatttacctaaagtgcgtacaaaaggtttagtcaaacccaaaacaccgaacatataagcaatatatttgcgaaagacaagtgaccaagagtcatacgtctgcttgg

SEQ ID NO: 274458 - DNA, 648 bp, Cannabis indica
ctcatttattcaaaaaaaattacaaagttagaaaaattggaaaaaactttctctcttttcctctctctttcggcctccttgtgcagcaaggattcttgcattttcctttgattttcaagctcttttcctttcaatctaagtgtcttcaagtgcttggtaagacctttgtaccttgttcctttaatttcttgaattttgatgaaaaagatgatgttgcatgcttagtttaggttgtggttgctgctgtgattttgttgttattttcagagattaaagcatgtttatttgaggttaattaagctgcttgtgatgcatgatagttaggttgattagagttatggtttttctatgcaaaagcttgagttttcaaagtgaaaattgagaaattggtggctgtaattattgcatgagtttgtgtttgttttctgcagttttagtgagcatgtttaagtaattttgggctgatttgaatgcatgatatgtttcttagtcaagttttgagttttagaactcagtctttgacctttaatggtgaaatgagtttctgtggttgaagctcggttttgttgctttagaaatgtcttatgggatgtttagaacaggtctggaaggttttgtgtgttttggatttgatttggaagagttatg

SEQ ID NO: 274459 - DNA, 681 bp, Cannabis indica
tatacatacctaaaaagttttgattttttagcctctaaaagtgtcatccgaacccaaatagtaaactttgggtgtgaaatccggccacccatttttgttgagaaattgttcaatctcaacctcgtttaaggtataaatattgcttctattcttattgtattatgtatattgttttattttttgtttttgtaaattattatttgagtttttttattttattagtaatattattgtgttttatgtgtatagtgtcgggattttttacggtggtcgtcggattgcggttattaggtaataatttataccacaatgtatagtatatatatgtatttgtatattttattgaatatttgtatataatgtgtgtatatattgtgtgtgtatatagtgtgtgtatattttttatgaaaataaattttgtaattgtattttatatattttttgcaatatatatttattgtgaataaaatgacattggagggatttcattagtttagaaataaaaattttaaaattgaattagtgtgtgatataattttatttttttgagataatagtgtgagatataattgattatatatatgtatgtataatttagtaactaagtaacttgttacaattttttataactagttataagttatgaaataattaattttgtaatttcgttgtatttcttta

SEQ ID NO: 274460 - DNA, 503 bp, Cannabis indica
tttagttattaaataattagagttggcatttaagtggttaaattgggaaaagtgcaattttgagaaaataagatggaaaaatgacaaaatggcaaaaattgcaaagtgtggtccaatccatatcatggtcggccacttatatagcaatttaccatttattttttcattattttaatgccaaataaatctaacctaaccctaagtggtttcctataaataggtagtgatggcttaaggaaaaagatgatgcatctcattccttcagataaaattttgagccttcaactcctataccctagccgaaaacctctactcgctcttcctctcttctaaactgaagccacatagtgaaaagagtgagtgcccacacacatcaaagtagtactcaatcagagtgtgtaaggctatcaagaattccagatttcaagtagaaggagaatttcggaactcagatcttggtgatactctactatagaaaggatacaagggttaaagatctgagt

SEQ ID NO: 274461 - DNA, 674 bp, Cannabis indica
ctctcttttttcccctctcttttcggcctcttggtgcagcaaaggacttgggatttttcttgtgatttcatctctctttggggttcaattcaagctaggttagcttttaagcttttcttctttaagtttggtgaattttgatgaaaatggtgtattgcatgcatgataaattgaagttgttgctgctgtattttgttgttattttcagagttttaagcatgttaaattgaggatatttgagctgttagtaatgcatgatagttaggttgattgagtgatggtttttctatgcaaaagcttgagttttcaaagtaaatttgtgagttctgttgctgtgattttgttgatgtttgtagtagtttttagaggctattctatgcttgcttaagtaggtttgatctgatttgaatgcatgttagttgatattaaccaagtttgagttttggaactcaaagcttgggctttaatggcactttttgtatctgtgcattctaggttgtgttattgctttggatatgttatttgggtcctatagaacaggtctggaaggtttgaggttgtttgggtgtgatttggttgagttatgaaattttgaaaatatgcctgcgaggaaccgaaattccggttgtgcatccggaattccggatgggtttcgaaaattcccagaaccggaa

SEQ ID NO: 274462 - DNA, 570 bp, Cannabis indica
atccgtcctggtcgagagtgcaaggcgcctcatcttggacggaggactcacccaactggcgcccaaggcaccctgcctcctatgaggaaccgcctcagtaagctcctcagtgatgtccccgtcagcatcaactggctgccgagcctcattgtactcccaatagttagggggttcaatctcttcctctccctcagcagcgggagggctgcccggacgcgccccgtccagctcctcaacttcctggacgtcagcgtccccctcatggtcctcctccattgggaccgccaaatcctgttcggcgtcgggcagagtggccagtcgagccagctgggggttagaagcgtcagccagacgcgtagtcttcttagtacgagccatcattctatggctgggtacggaatcagaagaatatccttcttctgaagaaggactagcacgaagacaaggatggacttcgtgcagaagttgaagcagctcctggtcaatttgatgctcgggctcccaagactcacctcggttcatctacaaaagacaacacgcaagatgagtgttggacggagtatcaagcga

SEQ ID NO: 274463 - DNA, 588 bp, Cannabis indica
ttaaggtggaggggcaaaatggtctttttgccccattagtgttttgtcttttagtgactttcttatttgaaaataaatgtttattttatatgttatttggctgaaaagatttctttttaattcatttcactcttcaaagcctcatttcctacacttagaaaatttagagaaaagtttcaaaacaaaacactctctctttctttcctctcactttcggccaccttggagcagcaaggagctggtcttctcccttgaagtttgcttgttaattcatctccttttaaggtccatttcaagctaggttagctcttgttatttccttctttaatttgttgaaaaaatgatgaaaatggtatgatgcatgcatgaatttgaaatattgttgctgctgtgatcttgttgttgttttctgaggtgtaagcatgttgaatagagtttaattaagcttcttctaatgcttgattgttagattatttaaagttatgatttttctatgcaaaactatgatttttgaaagaaattgtataatctgttgctgggttgttgcttgatatttttagttgttttcagaagcttagtcatgcatat

SEQ ID NO: 274464 - DNA, 64 bp, Cannabis indica
tatgaattaaaacgatgatatatgttgatttggatggtttcatattgatctgtgtgttatatga

SEQ ID NO: 274465 - DNA, 595 bp, Cannabis indica
cttcatttgaaagcgtactgataagttctcctttgtttgacaaatttctgcgtcatcatctccagtgataatgagatcatcgacatataccaaaacaattgcgatctttgcttcctttactttgacaaataagcttgaatctgcatgtgccatggaatatccgctttctactaagaactcagcaatctttccataccatgctcgtggagcttgctttaatccatagagcgcctttttcagtttgcaaacatagtcaggatgtgctttatcctcaaatcctcttggttgcaccatgtatatctctcgatccagttctccatgtagaaaggcattcttcacatccatctgccatagcctccagtctttactagctgcaagtgctaacagaactcgcactgttgtaattttagcgactgggctaaatgtctcgtcataatctagcccatattgttgagagaatcctcgagcaactaaccgagccttgtatctctcaattgaaccatcaggacgagtttttaccttgtagacccatttgcacgaaatgggtttcacttccttcggctttggcaccaactcccaagtctgattctttgct

SEQ ID NO: 274466 - DNA, 514 bp, Cannabis indica
tatctttggtgtttaggaatacccttctcaggaccatatctcccacgaataatttcaagccttcacttgtatgttgaaatatcgagctactttttgttaatgggccatcaactttaagtttgcagtggctcgtttttcttcgattttatcaaatgattctgctaggagtatgtgattggtgtcttgattgtacattaatcttctgtaggaaggtggatcgagttctagaggcagcatagcttcatatctgtatgccattgcgaatggtgtctgtcttgttgtcgttttctcagttgtgcaatatgaccatagaacttcaggaaactcttctggccagttttctttggcatcttcaagttttttcttcagtgtatccttcaaggtcttgttgactgcttcaacttgaccattcgctagaggatgcgccactgcagagaaaattttgatgataccatggttcgcacaaaaatcagtgaaagattggttgtcgaactgcttgccattatctgaaact

SEQ ID NO: 274467 - DNA, 560 bp, Cannabis indica
acagggtctgggatgtgttctgatgcaagttgacagagtcatagcctatgcttctcgtcaactgaaagattatgagcagcgctatccaactcatgacctagagcttgctgctgtggtttttgctctgaagatatggcgacattatctttatggtgagaaatgcgagatttatactaatcataagagactcaaatactttttcacccaaaaggatttgaacatgaggcaaaggaggtggctggagttggttaaagattatgattgtgagattttgtatcaccctgggaaggccaatgttataccggatgctttgagtagaaaaggtcccgggcaagtttgtactacggttatgatagcccctcaactagcctctgaaatggttagtgcagggattgagtttgtaattggaaagttgcacaatttgacacttcaatctgatttgctagagagggtcagaagagctcaacttgaggatcttaagctagttaaagtttgagatgagattatggctggtcggcctagagacttttcagtctcgaacagtggaatgttgttatata

SEQ ID NO: 274468 - DNA, 601 bp, Cannabis indica
aatgtttcatcaaagtcaatacccttaacttgactgtatccttgggcaacaaaccttgccttgtttcgaatgatagtcccaaactcatcactcttagttttgaagatccacttggttccaatgatgttcataaatggtggtcttggaatcattttccaaactttgtttcgaacaaagtgatgtagctcatccgacattgtaagaaacaaatcttcatccattagtgcttcttttacagatttaggttctaaagaagaaacaaaacataagaattgacttatattagcatattttcttcttgtaaccatgctctcatccaagtttccaaggatgagatctgaaggatgattctttttaaccctgtaggagggttccctctgaattggatcagtgattgaatttgaaggatgctcagattcttttgttgttgaagtttccgtagcaacataatctttcagtgagcctcgacagctgcttctgtagctctgtcaacttccttttcctcagcagcagacttttccagcaagtcttcaatttgttcttctactgaaaactcaaacaaatcctttagatcatcaacaacaacattagcagattccat

SEQ ID NO: 274469 - DNA, 566 bp, Cannabis indica
gcttaattgttttcaaaaaataattttctatttttaaaaataaaaaatagttttatagttatgataccaaacatacacttaatatttctaaaattataactcttaaaatataagaaataaaattaatcttgaactataagccacctgaattttcttcagctcaattttctatagacaatgcagattaataggagtgtccaaaataattatcccatatatttatatactagatagaagtcacgtatgttaattttattttagtttttagtttttagttttaatatcataattttaaaattaataatattcaatgtagtgataatcattgaaatttgaaagcataatagtgatttaaatgaaaacaaaaattactattatactttgtaatagtaattaaaaaaaaattattattcgtcctaaatttatcttagaattaatgaaaatgctcatctggttaaactatcaaaacattcaaatttcatttaaaataatatttaacatttaactaattctaaatatcaaaatttaaaataattttaataaaaaaataaataatatgaacaaat

SEQ ID NO: 274470 - DNA, 544 bp, Cannabis indica
cttcgtctgggttctggtcctagtctgagtcctagatatagacactgactactggtccgttcaaggccccgttacccgaatcctatgttaagatctggatcactgtcacggttctcggtctagttttggttcatgtcccaagtcccgtttctaagtttgggttcgggatcgagactgcggtgcggttctaggtctcgaccctggttttgtgtccctagtatggttccatgttttggtctgagttcaggttcgggttcggctcctgagtccaggattgggtttggatctgggtccggctcccaattcgggtctaggtcttatttggagtccgagcccatatctagttacggttctggatctagggccaatttcaattatgattccaagtccaaatcctagttccaatcacgatcaacttctcattttggttccaattttgggtcacaaggtacgggtttgggtccacttttggatttgggactgggtttaggtccgggtgtgggttcgggtccttgtcagggttcgggtccagggctgggtccca

SEQ ID NO: 274471 - DNA, 500 bp, Cannabis indica
atgtcgggaccgacggtgttggtatgttcgcggttgcctcggcttcattacactcggtgatgaagtctgctagcgcttgtccctttatggaagtacggggaacgtagtgtaagtcaaattaacttaactccattgcccatttgaggagccttccggacgcctctggcttttgtaggacttgtcggagtgggtgattgttcaacaccttgattgggtgagcttggaagtagggtctcaacttcctcgaggccattaggaggcaaaagacaaatttttcaatgacggggtatcccgtctccgcccctatcatgcgcttgctaacttagtacacgagatgctgagttttctcctcttcccggactaaggctgcgctgaccgcgtgctcggagacggccaagtacagaaacaagtcctctccaagaacgggctttgacaggattggaggcttggccatgtgctcctttagttttttgaatgcctcctcgcactcgtcagaccat

SEQ ID NO: 274472 - DNA, 709 bp, Cannabis indica
gtggaccgggagataaaacggctcagagcagcaaccttttcggttaggctctgcacgtctatgtatttctttggggtggcatgttcaggagggcctgaattttttttggatttacctaaatccctctctggctgacaatgaagcccagaaacttccctaacttaacctcgaaagtgcatttctttgggttgaccttcattccgtatctccggaccacttcaaaacattcttctaagtcgtccgcgtggctattgcacgctttagacttgaccagcatgtcgtctatgtatacctccatgtttcgccccaggaggcctttgaacatccggttaaccattctttgataagttgcgccagcgtttttcagtccgaaaggtatgactaggtagtgcacggtcctgaagctagtgcactcttgatctgctacgtgcatttttatttggttataaccggcgtatgcgtccatgaaggacagtagtttgaatccagaggtagcgtctaccatccggtcgatcctgggcagagggaaacagtcctttgggcaaggtttgtttagatcagtgaagtctacacaaactcgccaggtcccagtaggcttcggtaccaggaccggattggctagccattccgggtagtagaaatctcgaatcatgtcgctcgttaatagtttgtccacctccttctctagggcttcggcctttactgagtc

SEQ ID NO: 274473 - DNA, 606 bp, Cannabis indica
gaccctacgaactcaacagacggaacacgaacggtcaactcgcagatgcgaaggacgcatacgttgatgagttcagtaactgtcatatatttattaatgttaacgttgtctgagtttaatcatgacaattcaatgtgtaaataatggattaacaataaatgtgatcctcatgtaaccgattgggcacctgctttgtatataaaggggtgatccaccatgaaaatgcacctacgaatcccttgctacagtggactaagcagaacaaaatctgactgaaccactatatttcattgtcttctgtattttttccagctttattgtctgttatcgcattgcatattggagtactcgccgttttaggttgaatactcgcatttatcatctctcaaacaattctatcttttaccagctaaattacatttcttggtgttgtgaaattctagtaacaacagagaggtaccagtggaagatgaactctattgcacacgtaacaggcagtattgacagcttcagcccaaaatcgttttgaaatatccttggcctgcatcatgacccgagccatttcctgtagtgttttgttttttcgttcaacaactccattctgct

SEQ ID NO: 274474 - DNA, 512 bp, Cannabis indica
tggagttgagtcagttcgacatcaagtataaaccgagaactgcgatcaaggggcaagccttggcagattttatacttgaattccccagcaccgaggtggcagtcgtagaggacagaagtgacattgctatagcaggcaaagaaacatggacattgtacgtcgatggagcctcaaataacgaaggttctggcagtgggatcttgttaatcagtcccaataatttcaaggtacacgctgctttacgttttgaattttctgcatctaacaatgaagccgagtatgaggctttaatcgcaggattgaaacttgccctcgagatgaaagtcgagtatctacaggcttttagcgactcccaaatcgtggtatgccaggtgaatggagaatacctagcaagaggcggaagattggttaaatacttagccatcgttcgcgaaataatgcagaagttcaaaaatgtagttgtatctcgagtaccgcgtgctcaaaatgcccacgcagacgcattggcccgt

SEQ ID NO: 274475 - DNA, 553 bp, Cannabis indica
agttatttctagtgactaattatattttctactatttaattaggaaaatattttaagttgaaaattaattatttattttaattaattttggaccaacttaaattaagaatatttttcctagtattaaattagaattaataattaagtttcttttatacgtgattatttaattcttgtatttaatacatttaattaaattggaaattaaatatttaagttgatttaagtcttgatacttaaatattattattttaagaatatttaatcaaatagaaaattattttaagttggaaattttaattttagaacaacttaaatttgaataattttcaaaatatattttattttattttcttaatcaatttttatatatataattcgaaattgcattttttatttaaatgtagaaaatttcgaattttttgaaaaatagattaaagttgaaaattaattaattttcgaccaacttaaatcaataattttttcatttaatgattaattaaaataaatgaactaaaatatattataattagaaaatgaattaattagtcaa

SEQ ID NO: 274476 - DNA, 521 bp, Cannabis indica
tttctccttctttgatgtagaatttccatagtcttccatactatgattgagataccacttgatgtgtgtgggcactactcatcactcaagggaattcgaaaaacagagaagaaagaaagagagtggcggtttcatagtgtttgagagaataaactgtaaagtgtgtgtctcaaacctgaagcctttaccttctatttatagaataccacatagggttaaagttgaattatttggcatttaaaaatgaaaaataaaatgagaaatagaagcattaagtggccggccattcattgaggaaaacaaatccttccacttttcaaactttcctatttcatcatttctagtttcccattttctcaaaattgccaattctctctttcaacttcataaatgtcaaatctaattatttaataactataattaattattaaataatatattgtcatttattttatttattaataaaaactaatcaaagtttcccaattaataaatataccctttaaactctctatttactg

SEQ ID NO: 274477 - DNA, 504 bp, Cannabis indica
ttttgaaatacaaagaaaactctttctaataagataaaatataatatgaaatcctagagagatttgcaagcacactagaaaataagaacaagtttggctcaagtgtgtgaggttggtgtgtttatgaaaagatgataattctttagcttagaacacttagaatgatattatatgatgaatagaagctcaatcaaccttaatttttgagtgaaaaataagtttatatagtgtaggaacaaaactagtagtttataaccgttagcacatttttcaaaaagaatcttgggaaaaacagactacctatactgtgaaaaacggactacctattgaaaaagggtagaccaaaaatcaggcaggttcaaaacatgtattttttggctctaaaacacgcataactctttactcgattatccgttttcaaaaattgtaattttattctcttagttaaatgaaatgtgatttagaaagtcaatcaaaaaaatttgaaccatcgggtgagaaaac

SEQ ID NO: 274478 - DNA, 747 bp, Cannabis indica
accatggctctgaggacagttgttggaatttagtttaccatgatcttagatctactcacaagtatgttatttaacatcctaaatatgaacttctaaaacgatagtaaacacatataaagtttaggaaaccttacattggttgcagcggaataatatgtctccttccacttagatctctaacccttgtatcctttctgtcacagagtatcaccaagatctgagtctgaatgtccttctcttcaatttggattcttcacgatcttccagactatgattgaggtaccacttaatgtgtgtgggcactactctatcactcaaggtattcaaaattggaagaggaaaagagagagagaggggatcgactatagaaggatagtgagtggctcaattttctgaaggcaatctcttgaatcactttaaaactctttttttggtgtgagctataactatctatttataggtaaccactaggtttaggttagtaattatttggcattaaaataatgaaaatattaattgaaaaaagcttctccaagtggtcggccatggtgttatgggccccacttgaaattttgcaattttaataattttcatttctattttctcaaaaacgccaattttccaattctaaccatttaaatgccaaaattatttatttaataactaaaatagattattaaataatattgtcatttatagtgatggagccagaaattcgcttcagtgagggcttgaatattttttttt

SEQ ID NO: 274479 - DNA, 901 bp, Cannabis indica
gactatccttgtcatcatgttttctagtatttctactagtatttggtcggggtcgtcctttcttatctctactaaagagtgcttcttcgtcactctttaatgagactccagacgtttgcttagctaacgcttcttggtcagctagcaagttttctaactcaacaagagaaggttggcttggccaaccttgtattgcagcaataaaagttctaaattctggccttaatccatgaataataattcttctaattctagcatctgacatgccagcaccagagtctaatgcagagatttcgcgacaaagagattttaccttggtgaagtattggttgatcgtcatgtcgcgctgcctaattgagagaagctcgttctccagaagctgcaatctcgtatcattcttcttggtgaacaatgatgcgaaagtatcccatgcttccttcggtgtctttgccggcctgatgtgctccaacatctcatcttcgactgtggtccgaatcgcaaacatggctttgcccgctttaatcttccatttcttcaaagcggatgtgtcctccggttgtgtgacttcattgccaccaacgatctcccataagtcttggccttggagatatgcctccatgtgcatcgaccacgtgttgtaattttggttgttaagtttcttaattccgccaaccacttgaaggtcacccatcgtgcaaactctgtagtactaaactacacacaatcactctaagaaactcaacaaaggactcttttggaacgaactcgatccggctctgataccacttgtcggacaccacaacacgtgaaaaacgtaattactttaattattgaaaaaataattacaccaagacttgaacactttaacttgaccacaatacacaccaagcactcactcttt

SEQ ID NO: 274480 - DNA, 520 bp, Cannabis indica
aattgcatgttccaatagcttccacttgtgagcccatcttgtttccagataagatgcttcgctcacttgccactggcttccttagattttgaatatcctgcaaggaatttgttatgtgaattgttgaaccgaaatcaatccaccatgtgttaagattaacattagccatattagattcataacatactaaggaaattggattacctttgtcatccatccatttcttgaactggttgcactcctttttcgcatgtcccttttgtttacaaaagaaacatttgatggaatctttcttatggcagccttgggagccacgggctttttccctttgttcttcttgaatggtttgcgtttcttaggttgagtggtcaggtgaacactttctccttgctcctgcaggagcctggcttcctcttgaacacacatggtcatcaattcattgatagtccatttttctttatgtgtgttgtaggaaattttgaaaggcccatactgtggaggaagattgtgaaggatgtaa

SEQ ID NO: 274481 - DNA, 470 bp, Cannabis indica
aaacgttattcccgtcccacaggagaacgacttacgatccagccacaaaccaagatttacttcaagaagctttggatcaagttgaagagctccgggacgagtcacaaatacggatggcagcttatcaaaagaaggtgaccaaatattttaactccaaagttaaaaacagaaaatttgctattggagatatggtcttaagaagagtcttcccagcctcccaagagcccggagtgggggtacttgggccaaattgggaaggaccatatgaaatcgaggacgaaatcggtgcaggcacttacaagctaaaaaggatggacggaaccattgtgccaagggcctggaacgccgaccacctcagaaaatattaccaatagtccaaaaatgtaacttaggctttgtttaaagagtttgtaccgtctaagtgtatgcagcatccgtatgataaataaaaactgagtgccttaaaaaca

SEQ ID NO: 274482 - DNA, 570 bp, Cannabis indica
tccatgtgcgatattgacaaattctaagagggtaggcttacctgaggagatcacctttgtgactctggcctacccagaatgatcaggttgtttctatttctgtttatgtttatattttattcactatttatttcctttgtttttgttttatgtttttagaggatcaatatcgctgctatccatggttgcttgctctccaggtgttctctttccctattcttttaatttttatatctttagacattgaggacactgtcttattttagttgggggtggtgagcatattcaagcatgtttcttaatttttgtctattaatattttcatggtcaaatttttcaaaaattactcatttattcttgtaaaatgttattttcaagccaatttttgctatctttgttacttagaatttttctagagttacaaaatgcacatgccaaactttgtggtaagatggttgttagcacatatttgcttagaaaagttaccaagtttaagtgtttatatttttgtgagtggcgagatttgagaaaataacttttgaatttttattgattcttagaaatggttat

SEQ ID NO: 274483 - DNA, 605 bp, Cannabis indica
ataacattcatataatatcgacttgtatctaggcgcccatacacctatttacaagacataacaaatgagtaagaacgttctaactaagatacgaccatgtaccaatgtaccacatgcactcagtactaccattgtactagtgtaggtagggtatgaaccgcaccttgagtactgttaagtgttgtaccacatacaccttgtaccttcccgtactagtgcaggtaacaccgtgatgtactcttcagacatcatacactttacgaatgcactctataccgctaccgtataagtgttggtagtgtatgaatcacaacaagcatgcatatatattaacacatacatacatttgcatattcatatcacacattatatacagttcttacctcctttccaaattcaagtgagttggccaacctgaacgaaaagtctcgtgttagatggatgccctaatcacatattaaaattaggtaaatcacatgtccgaaaccttaatccaagaaacccgagtctacaactctaggctctgttataaccactaggaactacactatctcaggaaacagggaaacacccaactaaggtactgaaatggacgagaattgaga

SEQ ID NO: 274484 - DNA, 1024 bp, Cannabis indica
acttagattgcatactacataagcaatccaaatctagattgacttgcgccgaatacaggtgtcaatgaaccacactaataatcattgattaaagattctaaaattttaatgtgttgctgactgttttattcataaataagtgatcttaattctccatacaatataggtcacagtctcatgtatgaataaagaatttttcgatatttatatgtaaattattcaatcactacaacaaaagggattttttatcccactttttacatttgataaaataaacagtgggataaaaatttttgatctcactcttatccaataatggacttgttagttttttaaattttagtttagtttttttattgcttgaggacaatcactaatttaagtttaggggtgtgatgagtgcacatttgtacactcattcacaaataaattagtatttatttcttaaattttatatagatttaatttgctttttgtagttgtgcagttttgagttttgaagacgataataatataaatttagtacacaactataataattaaaatatatgtcaaagtcgaaaagcaaaacatgataaaaaaaaaaagtcaaaataaaaaactagtgttaccggctacatgtcaaaatgtggtatttcaccttttttgtatgaccactctaaacagtgtggatttagatagtttcactgatttagtttggagcatttgtcgcctaattacaagttttttaaaaggtgttttacaatgcaatttgaaaatttattggtccttcctttttgagttcattcatattagggttaactttatctttcgatgtaatcaacttggatatatatacttaaggctaattaggatttttgtccctgaactttgacatgtaccaaatcatgctcttgaacttttaaggtcattgataatgcccctgaactattaagattgttggatttaaggacttttgtctaattttattcaattttactatttcaatgattgtttatgtactaaaccatgttccccagacttt

SEQ ID NO: 274485 - DNA, 470 bp, Cannabis indica
ttaattaagaaactttgtagagtctaattaataaatattataaatgataattttatttgatagttattttaattattaaataaatagttttggcatttatagggttgaaagtgcgaaaaagtagtatttgtgaaaaatagataaaatagttgagaaaaatgacaaagcccaaactattgtggggcctattgaagatagtataaaaggaaggttatggtctcattatccaactaatgcctccaaagcaaaaaacctagttttctctctaggtttgatgagacctcttccttcttctttattcttcaattcgaaacactatagcctctcgtcacaaacaatttcaagccttagtgattgagtacatgcccacacatatctgttgggttttatgccctaaataaaactcatttcaatataatcagatttaattattaatatagatgagaaataacatttaatgttgcatggtt

SEQ ID NO: 274486 - DNA, 528 bp, Cannabis indica
tctcagccatcactctcgctctatcactctgcccagaccaccgcccacaccacaaccacccttcctccgcccagaccaccgcccacatctgcccaccacaaccgtaatgcccacaccaccaaaaccacatctacacaccaaaaccatcaccgaaacctctttttcagatccaaacaaaaccccacatccagatctaaacacatcaaagagacttcagattaaagagaaataaaatcgcaactaacggagaaagaaaatcgcaagggtgagagagagggcttactgaacacgaggctcgtgaggtgtggggttctgtcgatgtggggctcgtgagatcggagatctgtcgatctcctccttggtgtcaggcggggctcgtgagggtggagaactgcggtggccgcccaagggggttttgaaaaccctagattgaaaacgagaaagagagaggagatcgagagagagagtgatagagagagagagagggttcgtttcagacgaaagaaaaagaaaaaaaaagaagaaaga

SEQ ID NO: 274487 - DNA, 660 bp, Cannabis indica
aaacaattaaaaacatcaacaacatcacagcaacagattcaattcatttctctttgaaaaccatatttttgagttaaaaattcccaacttgaagcaaagcaattaacatgcattactaacaacctaaataacttcaatttaacaagcttaaatcacagaatcttacaacaaaacacagcagcaacaacatccaaataatccatgcataactcatattttcaccatttttattcaagaaaataaaggaagaagctaggaatcacataccacaatcaagagatcacaaacttaggttgaagctagctgaaaatcaatgaaaatcccagccctagaatcccatgcaaccagccgaaaaagagagaggaaaaagagagagtttctttgaaaattttctatcttttttctaacttgtgattttttgataaaaatgaaataaaagctattaaacacaacactccatttcagccaacacttagcataaaaacacatttatttttcattaataaactcactagaagacaaaatactaatggggcaaaaagaccattttgcccctccacactaaaaccacataaataacactaaaggggtatttttgggaaattctaaattcccggccattcccgacattcccaatgtctaataaaccgtcccaaacta

SEQ ID NO: 274488 - DNA, 799 bp, Cannabis indica
ccgattggtggtgtgttccaggcaccgttacctgaatcctgagtcaagacctggatcactgtcacgggtctcggtctatttctggttcaggtcctagtcttgttcaggtcacgggtctcggtctatcctaagtttgggtttgggatcgagactggggtacagttctaggtcccgaccctggttctgtgtcccttgcctggttccatgtttaagtttgagttcatgttcgggttcgagtccggagtctaggtttggtttgagatccgggtccggctcccaattcgggtgtacgtctgatttgtagtctaggtcttggtccggttaccgttaaggatctaggtccactttaagttatgattccaagtccaagtcctagttccagtccctgtcaactaccggttttagttccaatttttggtcacacggtacaggttcgggtccacttttgggtttggaactcggttcatgtccaagtgtgggtttggttccttgtcagggttcgggtccaccgactacgagttttgtccaagccctcggtccagatctggatcccaatctcgggtcagagtctggtaccaattctggtgccgggtcactaggtgggtccgaggttcaagttcgggtctgggtccggtacttggtcccagtcctagttctgtttcccagttccctatcatgattctggatccaagtcccggttattgtgtgggtcccggtctaggttcgggtttgagtcctagtctcggtcgggtttaggtctctgtctgggttttgacctgggttcgggtttgggtttagg

SEQ ID NO: 274489 - DNA, 697 bp, Cannabis indica
atcaccaagatttgagtctaaatctccttctcttgaaattggatttttcacagccttacacactatgattgagtaccacttgatgtgtgtgggcacttactctatcactatagggtatgaaaatatgaagagaggaagagagaggagtggttcgaaataggtagaagtgatggctcaaaattttttgactaaaggcttgaatttcatcaacttttgatatgaggcatcactatctatttataggcaacactctaggtttaggttagaattattaggcattaaaatattgaaaaaattaaattgaaattccctctcaagtggccggccataggatgtgggccccactttggaattttgccatttttcaacaattttttcttattttctcaaaaatgctatttttccaatttaaccacttaaatgccaaaactatttatttaataattaaaatataattatcaaataaaattgccatttaatatatttattaattagacttaataaagtctcttaattaataaataagcactagaatctcttttcttcacaactaagcccttcctttgttaaaattcataaactggacatagtctaattttaaaaataaaaatgaataattaaaatcaatcaactgagtcttacaagaactatggtctcaactagtatggggaccatgcacctatacaatcgagcttcc

SEQ ID NO: 274490 - DNA, 525 bp, Cannabis indica
gtgttgctcagaattcaaacaatgagctgctgttcactgggttcattctgagggatggggctgagcaatggagtgctccaagtgttaatagtattaaggtgaatgtcaatgcggctgtgtttaatgattcctctacctatggagttggttttgtggcgagagattccagtggtttctttgttgaatgtggtacaaagttgtttcatggcttgatttctcctgtggtggccgaagcaattggagtccaggaggcattgagttggatcaaggatcattcatggcttcatgtgactttagaaacggattgcctttcagttgttcaagttgtccgttatgatttctttatttggcaaagttgttagtgattgtaggaatttgttaagttctttgcgtaatgtttcttttcattttgtaaaacgatcagcaaatgtagcggctcatgtaacatccccgcttcaagcctccattgggcccttacacccacggaataatggcttttatacacgagtacgtcactctggctgc

SEQ ID NO: 274491 - DNA, 500 bp, Cannabis indica
cttaaatattcatccgtagtgaagtaggttctgtaatatattgtactgcgccggatcgatgggtgaaataatatgcatgttagatgagtttgaatatcttcaatattcatccttagtgaagtaggttctgtgaatacatgtactgcagtcgaatgggtggtaaatttttatattgctaaatgttgttgtgattattttatattgttttgaattgtgttttgttgttattaataggtttgaattttttggaaacgttcaattatagtcgttatgctgccgaaatttcagtaaaattaggataatatttgattttaatttctcttaaacttggttgttaggattttatcggaagtgactttatcggaagacaagtacataatttttggtataaggtatgctttctttaacctacttttataagaatattttttatatatatttagataatctttaaatgcttagagtaattttagaataatattgatgtaatacataggata

SEQ ID NO: 274492 - DNA, 275 bp, Cannabis indica
atattttcattatttttaacgccaaataattcaaacctaaccctatgtggtatgctataaatagatagtgaaggcttcaggaaatttacacttaagactttcacatcttgtttccttcagagaaaaacctgagccttctctctctaacctagccgccaccttttgtaattatgacccgagaaggataaaatgatgaaattaatttaattacgtgcttaatagaactatattattacatagtatgcctgtgttgtcttttcaggtgtgttctaaca

SEQ ID NO: 274493 - DNA, 630 bp, Cannabis indica
tgaccaaccacccactccggcaagtcctccaaaaaccagaagcatccggaaggctcctcaaatgggcaatggagttaagtcagttcgacttacactacgttccccgcatctccataaaaggccaagccttggcagacttcatcaccgaatgcaatgaagccgaggcaaccgcgaatgcgccaacaccatcgatccccacatggagagtgtttgtggacggagcctccaatgaaaatggatccggagcgggggtggcaatgatatccccgaccggacttcgactccaggcagccctacggttcgacttctcagcttcaaacaatgaggccgaatatgaagccttgatagcagggctgagactagcaaaggccgtaggggccaaaagagtagaagtctacagcgactcccagctggtcgtaaatcaaatatcgggagagtaccaaacacgtggcgagcgaatggccgcgtatgtaacaatagtccgggagctgctccacgagttcacggactacaaagtagaaagaatcccccaagaaaagaacgctcacgcggactgtctggctaagttagcttcagatagtgaaatcgaagggcgggggtagtaccagtggaacgcttggcagagccaag

SEQ ID NO: 274494 - DNA, 667 bp, Cannabis indica
agttgtttgttgttgaattcagacacttagtgatgagtttttatgttgatttatgcatgaattggtggttattaggttgtttgagcaagcttttgagttttgaaaagtttggctcattagtggtgaagtgttgtttagcttggtgtgattgttgtagttgattgctgtggttttcagaggattatttatgcttatttgagtagattaaatcaggttttgatgcatgttagtgggatttaaccaagcttgagttttgaactcaaagcttggagctttaatggtagtttgtgtaattatgcatgaagcttggttttgttgctttgggattgttctttgggatctaaatagcaggtctggaggttttggcatgatttggggttgaattgcatgagttatcaatttttaaagtttcctgcactgaatcggaattccggttcagaatggcctgtaggaactggaattccggttggtgtcctgggttcctcccagaatcagaattccggttgtagaaccggtctaccggttgggaaaaatttgggaaccctagttcttcccatttttttgttatttagggtattgccatgctttctatcaatagggaaactttaagtttctagtttaagtccccgggaagtgatttagcatgtcacttatcagtgttgtgatt

SEQ ID NO: 274495 - DNA, 736 bp, Cannabis indica
agagcaggcaaagaagtgttaatcaaagctgtggttcaggcacttccttcgtatgctatgaatgtgttccaattgcctcaggatacttgtaaggatattgagagaagtatgtgtaatttctggtggcattcgaaatcatcccaaaagaatggtattcattggcttagttggaaaaatctgagcaagcacaagggcgtaggcggtatgggattccgagatcttcgggatttcaatattgcattgttgggcaaacaaggatggagactcatgactaatcccgagagccttgttactcgaatattcaaagctagatatttcccagagggctcgttcttatctgctgaagtgggagccaatccaagctacatatggagaagtgttctagcatcaagagatctcattaaggtgggtatgagaaggcttataggatcaggtgattcggttactgtcctaaaggagccgtggcttatgcatgatgatgatccattcatttcatcaattcatcctgtgttgaataacgctacggtaagttctctgatgaaaataggtgtgagggaatgggataaagaagttttggaggatgtgttgaatgaaagggataaaaaactagtgctaagtattcctctaaattctacaagaattaacgatggctggtactggtgtaaagaaaaatctggtatgtataccgtaaagagtggataccattgtcttcaagaattgaaagaaaattggtctc

SEQ ID NO: 274496 - DNA, 699 bp, Cannabis indica
aggacgaaaaaacttaaatcccttcctacaagcatcgagtgaccagaaacagtacttgaaccggttatcctcgctgacaatgtcagtaatagtgcctggattcttctgttccagcatgtagaagtaaccatataatttcgtataagattctgctggagtacccctcttgtacataactgccttctctctacatctccaagctttctcataactcatcttgatgccatattcatcaaatatccctctgtatgtcttttgccttgtagttagatccatctgatgtgtacttgttcttaataatgtgaccaatgacccacggtgctgcttgccggtgatcagaatgtctagaatccaagttacatgtgtgttcgttgtgaaacacagtaacctcaaacatgtcacaaagtgccttcttcttcccccttaatctccatttacaattttcatccttacaagtaacgtaaaacacatcagtgccagacttacttaccatccactcaaaattatttttcagtgcatacctaccaactacattcttcaattcttccttgtttttgtacaacttgccaagatatatctcccctgaaggcgtaccactaagagatgttgtatacacattattttcctctatgtcttcccttgtccacacaagaggtttgaatttagtagaaacttcaaattcagatacaggagcactat

SEQ ID NO: 274497 - DNA, 619 bp, Cannabis indica
ccgaccaacactcatctcgtgtgttgtcttttgtacatgaacttaggtgagtcttgggaactcgaacataagatcgaccaggatttgcttcaacttctgcacgatgatcaccctcgtcttcgctctagtcctccttctagtgaaggacattcttctaaccttgtacccagccataggatgatggctcgtacaaagaaaactacgcatctagttgacgctactgatcctcaagtggctcggcttgccactctgcccagcgccgaacaggattcggctgtcccgatggaggaggatcatgaaggggacgctgaggtccaggaggttgaggagctggacgatgtgcgtcctggcagtccctctgaggcggagggagaggaagaggttgaacccccaaattacgcggggtacaatgaggctgggcagccagtcgatgctgacagagacgtcctggtcgagggcgtggactacgtcagtgaggagcttgctgcgccggttcctcatagaggcagggtgccttgggcgctagatgggtaagtcctccgtccaagattacggaggcgcgccttcgaactcttgactaggatgggtacctgggcgagctggactgctacattctcgc

SEQ ID NO: 274498 - DNA, 786 bp, Cannabis indica
ttcagccttgatctgctgacaagttaggcatctcgatacgaattctaccacattcttcttcatttcgctccactagaagtagagtttaagatcttgatacatcttggtggtgacgggatgcagggaatatggagtggtatgagcctcttcgagaatttcatttctaagtttcgcactacaaggaatgcaaaccctggtcttgaacaacaacatcccactatttgacactgtaaaatctttggcttgaccagctgaaacctcttctctgatcttcactaactttggatcagttagctgagcaactttaattcgctctaacagatcagattgtagcgtcaaattatgaagtttttctacaacaaactcaatgctggatctgaccaggtcttctgctaactgaggtgaaatctgaaccatactagttacctgcccgggacccatcttgcttagggcatcagccattacattggctttcccaagatggtaaaggatctcacaatcgtaatccttaaccaattctaaccaatgactctgtctcatattcaaatctttatcagtaaagaaatatttgagacttttatggtcagtataaatttcacatctctctccatagagataatgtcaccatatcttcaaagcaaacactactgcggcaagttctacgtcatgagtcgggtaccgctgttcataatcttttaactgacaagaggcataggcaataactcggtcgaccagcatcagtacacaccccagaccctctcttgatgcatcacaaaataccacgaa

SEQ ID NO: 274499 - DNA, 569 bp, Cannabis indica
ctatccaatcaacccaagttttaataaaaccaataaaacttaatgtaagcctaaataaaaagtctaacatgacaatcattattaatgtctacaagcctttctagtagtaaaagttaaacagcattagttgattatagtgtgtatggacgaatcaattatgttcaggtcagcatctagttaaactttcttgattagtacttggtttattacgttgacctgtaatgtggaaatgataacatttgatagaaacaaagtgtgacttctataacaattcacattaatttaagatccaaaacaaaatcattgacttgtttcccaaaatattatatcacttcgtttgtaaggaaagttacccatatagctgcaccaaagggaagacagtacaaaagctatttaaagaaattttactgtatgacagcatagaaattttacaagaagttacaaattttgttaagacttattcattatttatagcattgctcacgattacaatcatatatatatatatatactaggtgattgttacgtgccaactcatgtagtgttagttttatttaatattaattttt

SEQ ID NO: 274500 - DNA, 529 bp, Cannabis indica
ttgagcaagatcaagttatcaatcacatatatattttttggacaaattaaatgaatataagaattactttgttttatagtatagaagtatactaataatgtagttcttaatccatgtcgaatttttacacataataaaaaaaacttactaagtcatatatctcaacatctacaaatatgtaaaatgaattaaatttactaaatttcttttaaaatagattaaaatattataggatgtcacctcattttctttcgtacttttctttatatatatatgggtaaatatcattttggatcctgtattttgcaaaaattactaattggactatctgttttgttaaatgacaaaatggaccttgtattttctaaaattgtacaaataagaccctaacctgattttttatcaaaataaaacttaataataatctaatatagtgatattatgacaaaactggttacattttctatatctgttcgtgttcgtgttagaaattgtcttaaagttagttatattgaataataaaattttt

SEQ ID NO: 274501 - DNA, 603 bp, Cannabis indica
ctagttgttataaggtgtatttataattaatatacaccttattgacagctcatacatggtctaagaccacaactcacttgaaaattctaaaacacttcaatcagcctagaaatttcttgttctgtacctacagaatcgtgagcagtaagtgcgactttccttttatggaaaagaaaagtcttgcttcagttttcctcaataaaaaatctgatcaaacattttaagaaactcgcagaaaatcatatacacacagctggatagatagaaattggttgagtcatcaaatttaccatttatgccttactttccataaatagaaaaaatagtcatatttcttactttatataatccaatcaatataaaaacacaactaaggaaacaacctaaaaaactcaaccaaaaatgtctcttctaagatgaatgtctggaatggcaaattattttctaaggatggaaaggaaactctcaataaagctataatccaagcggtgccttcttatgccttgtcttgttttaagcttcctaaagccacctgccacaccatccaacgtatgatctcccaattttggtgggggtctacaactaacagtaaaaaaatccatt

SEQ ID NO: 274502 - DNA, 503 bp, Cannabis indica
ttgtgaaaaattaagcaattttattttttacggaactcgattccgagaaaaattgcaaaagttatgaatttggaagtttcgggttgaaactatgtcgagtgggtgcatcgagtgcaccagtcactcgcacaagccccacatccgcgtgcgtgacaagggaaattcattgtctgaaccaatcatgtcactcgctcagacacctcaggaccctgctgcccgtgcccttgacaccttgcaaatgccgaggttactcggctggcatcccctcgtccgcgcgcgcccaaggctgcgtgcagcctcctgggcagcacactcccaaagttgcaattttcatgggatttttcccaaaaatctgatttttccatttttcaaaccccaaatttcaaaataaaatattatttttaaatatatttgaacttaaatatcatattttaaattaataataattattttttaatagattattattaattttgttattttgaggtttaaatttaaaaaat

SEQ ID NO: 274503 - DNA, 376 bp, Cannabis indica
gtgtgaagaagactccttgtcagagtaatacttcacacttgctcatgatgaacatgaaattccagaaagcagctaagctgggaattgttcaatctgacaatcctactacttcaagctcagttgagaagaatagagaaagtgattccacttcctcagattatccttcccaacagattgaaccagcaataagaacaatccaaaaacgattaagcaataatgctttagtttttgaatcatgtgttttagagaatgataaatccatctggattcttgattctagatctacaaaccatgtctgttgttcaatgcaattgcttgaaaactggaattattattgaaatccatgtttgaaataattttactaggatctagattt

SEQ ID NO: 274504 - DNA, 527 bp, Cannabis indica
atgccgttagtcaaaagtttgtccacctctttctccagagcctcggctttcaccgagtcgagcgggcgtcgcttttgctggacggggggcatgtccggattgacgttgagtacgtgggtgatgacatgagggcttatgccagtcatgtcttcttggcgccatgcaaagatgtcgatggcgcccttcagtgtttttattattttttctttttcctccggatctaggttcttccccagccggagtactttggtggagtcgaggtcgcacactgataattcctcgacatcctccattggttccacaattctttcggaccccacacgggggtctaactcatcttcttccattgggagccttactttttccattaatataagtgtcgtcccgttgaaccctgtgagctgggacccactaggcgagaggtcccggtccgttaagcctatttgcagtgaaggcttccttgaagagtaagttcacggaacttccattgtcaattaagctctggccaccactttatttgcgatggg

SEQ ID NO: 274505 - DNA, 612 bp, Cannabis indica
aagtgcgaaacacatgttcttttggcaaaaaccttcggtgtcccatgtaacacatcttcttcgagtgttttaaatacatagaacatgttctctcctcacaaataggacatgctttgtaccctttcacactgtatccagaaagatttccgaaagctggaaaatcattaatggtccacagtaatatggctttaagattgaactcttctttcctaaaggcatcgtaagcagaaacaccctcatgccacaatcgactcaaatcatcaactagatgggctaagtacacatcaatgtcattaccaggatgtgaagggcctgatatcaacagtgtaagcatagtgaacttcctcttcattaccaaccaaggcggcaagttatacatcacaagaaaaactggccagcaattatacttactgctaaggctggtatgtggattgattccgtcggcaaaaaagccaaagacggatattcctaggttcattgccaaattcaggccacctagcatcaattgatttccaagcgggtgagtcagctggatgtctcatcttaccatctacctttctactcgctggcatgccaaattaaattttttgcatgattggcattttgaaaaaa

SEQ ID NO: 274506 - DNA, 945 bp, Cannabis indica
tgaaatgatatatgtgagtaattgcaaccgggattagggttattaccctaacatgagcggtttaatagcctagggttattaccctagtgatatatgttgtgtaatactatgccatgtcggatatatctatatattgggattatgaattatgcgcttaaggcataattaaactagactcggtaagctagtaccttgagtttaattttaatgcggtctagggttattaccctagaatattgtgagtccaatgaaagcatgagttagggttaacactcttagtaaatgttatctgagtatatagaaatgtattatatgagtgattacatagtgtgcaagttagggttattaccctaagattatatatgttgtagtaaatattgaacacacgcatgtatgttaagagttatgtgtataagacataactgggttagacctggtatatatcaccaggataaaccactgaaagaacgtaatacatggattacgtatattcatgaatagggttatgcgagcaaggcataaccaggttaggctcggtaaccagaaccgaggtaaaccctactgaggccttattgtatatagacgtgtgagtgcaacacgtaggtctacgccacgtagacataaataggcatgtgagcgtaacatgcaggcctatagcaaatagacaaatattgcagtggcaccaataattatgtgttacatattgagattaagggttatgcgtcaaggcataatcaagttggactcggtaaccagaaccgagatgaactattctaaggccttattgtaattagacgtgtgagagcaacacgtaggtctacgccacgtagatataaatagatgtgtgagcgcaacacataggcctacgccacgtagacataaataggcatgtgagtgtgagcaggtctgtgacatacagacatatatgaatggcattactgttta

SEQ ID NO: 274507 - DNA, 625 bp, Cannabis indica
gggcattacagtttggtattagagccaccaggttttccactgaagaccgtcaagatatgtacaatgaaggccagtgtcgagctcaactcactgttccgtaagctttatttcattttgcaaactgttttaagatatgttgcatatatgattaaatggatgttataaaacctttaatgcggtcttgaaaattttggccactgtctaacctacatgccttgtgggttcgcaggctaagtcctaattaatggacgaccagcaaaatgttggaaggcagggtgagttggttgagaccggaggtggtcgattgggaacaaaggtttgctgagatgcaaactagaattgagcaacaagaagacgagatccaacgactcacgcaacgggatgctcctgtcgagcttcccccacaaccgcctgctgcggttcctgcaacccctgcggtgccagttgagcaacatgttgctggtaaccgtatggagcctttatatgagagattcagaaagcaagcaccttcagtatttctgagaggtcctgatgtattgaaagctgagcagtggttgaccgttattgaaagaatattaaatttcatgggagtggtcggaaatgacagagtggcatgtgccacgtt

SEQ ID NO: 274508 - DNA, 345 bp, Cannabis indica
taatttgaattaatcttataatcgaatagggttcatatattgaattattttttattgatgggattaatcaatatatgaacaataatttgaattaatcttataacactacaaaaaactgctactcactacaagaaatgtcacttttaccagcacagttcgctactgcgctggtaaaagtaacttttaccagtgcatttcgcaaactgtgctggcaaagaggtcaaagttttaccagcgtacatttgcagtggctaaaatctaacttttaccagcacatttatgagctgggaaaagtcatctttgccagcgcttttcattttatgctggcaaaagttctaatgccaa

SEQ ID NO: 274509 - DNA, 687 bp, Cannabis indica
aagcaaggcaggtcagggatatttttttctctcagcaaggcttcaagtggttgagcggtacggacgacaaggccatcagcaaaatagggcattttattgatgagtacttcatggtgaaggatccgagcatcacccggactcagtttcagtagatcccgacatatcaccgtcctcccctcactcttgctgttagggatagagctcaaaaacttgcccggttgccggaagaagacaagaatatcatctagttgacctccgatgataatctggtgaagtatgggctttacccagaggacttttctcctaagttcgtggcggggaagaaggggaagtctgatgctacccggcccaaacgaactcattcggagaatgagttgattcaactgaagcgagaggctaagttgaagggaggtgccagggccaagcagtatgctcaggagcctatgaatcctgaagatgaagtcgaggctgaggctgagcaggtgaccccatcgaagaggaagaagaaactcccggccacgcccaggcctgttgaacatgcaattcgtataagggagcccatttcacctgttcggccatcttatccctttgctgaaaaagggaaggttgtcatgtctgagataaactcaatgtcaggtgatgatggacttctgactttctgggcgggcagtcactctgcattttact

SEQ ID NO: 274510 - DNA, 230 bp, Cannabis indica
ctaaaggccacacgggccgcgacatggacttagcatgccgcggcccacctctttgtcaacagaaagaaatatctggaaaagctggcgcgagattttcccagatatttcaaatccgaattgaatttaaacagtgcggttttccactttttgagggacctgaatacctatataaagagcagtagagagtggatttaagcaagcaatctcagagagaaaaagtgagagttcag

SEQ ID NO: 274511 - DNA, 894 bp, Cannabis indica
caaactgtctccggaagttggtctgtagcttgttccaacagcccacggatcctggttccagcttcttgaaccattcctccgcggacccacttagagtaagtgggaagcacagacatttggcgtcattgctgactctcatgaccgtcatgacacggttgaaccgtgataagtggtcgctaggatcggagttcccggtataagctgccatttcgggcatcttgaagttcttagggagttccgcctccaggatgtgcttagcacatggctcccggtcctcgctatctgagtcggagtcgtcccctttctgccttcgggagactcgggcaatgtcttttcgaagtatggcgagttccgccataattccttcatttaacgtacccgtggagaccgcgggtccgtatcttttttggtcaaggtgatcccggaggtcaccttggttcccattgatttgatttctcagatcaacgggaggacacctctgtcctcttcttcctctacccccgggctcttggtgcacggaaacgctttttcggtcctctcgatcctgagggccaaagctccctttttggggcttgcccctctgcggacctttccctttagggaaatctgagcggacctttcgcggatcctgcgcctttttctttcgccctggggtagaggtagggttttttgtttggttcccttcagcagggtaccttatagggctaggctccctagacttctgctgttgggaactaggcgaggacgtctctggttccttgccaagtccagcagtcattgccttgggatgcacgtgaatgccagccgcctccatggctttttgcatggccagcatcacttcttgcattttttggttttgtgctttctgagcttcgatctcggcttcgtgatcga

SEQ ID NO: 274512 - DNA, 997 bp, Cannabis indica
aagacatcaaacaaaatggaagctctgaccggttgattcaggaatatttcaacggtagtgcttcgatcaccttcggccaactgcgcagagtttttgagagctgcacagaagctgatgatgtctacaagttggggatggccttgtttgttatgggcgtcctcactggtaaggaggagaagactgtcgttcctccttttgtgataagaatggttgataaccttccattcttctacgagtacccctggggaaagatttcttacaccaagctgatggaaacttgtaacaaggattacttggatgtgaagaataagatgttgaaaaagattgagaagggagtcactcagaaggaggcaaaatactcagcctacggctatgctgcagcgttgcagtattgggcatacgaggccatattacagctgggcaacgagtatgcagtgaggaggtcgcatcgctttccgagaatggtcaactgggagagtaagccgaacactacactcgggaaggatgaagtgaccagattatttgctaaaaatgtaagtttgttacgctttatgttgaattcatgttaatttccatatattatattaatatatttgttatatttttcagttgacagtgtactccatgttatgtcctcggccgaacgagattgagtttgtgagttacataaccgggggtcagcctccgttatttgttgacttggaggaacttgtgttgggtgaggatgggcaaccaacacaggatgctttgcgaagccaggccgaaaagcttgcctccacattggaagaacgagcggaggcagcccgaatatttaaagactctacaccacctccaccgtctcctccacgtgcaccgcccgcagttccagatgggtctggtgttgacccatctccagcttcagttcctgatgggtctggtgttgacccatctgcagcttcagttcctgatgggtctggtgttgacccacttgcagcgtcacagggtcctcctgttcccc

SEQ ID NO: 274513 - DNA, 44 bp, Cannabis indica
aaaatacgttgaggggtgagaacggtaaaattatcccatctcga

SEQ ID NO: 274514 - DNA, 613 bp, Cannabis indica
gtatttttctagtatattattatcatttttataattttttaagttatgttttatataataattagtatattgaataataaataatgtgtaatattttaatttttatgtaatttaatatttttatacatttaaattttataatatgggtttgtatttttctagtatattagtattatttttataattttttaagttatgttttgtataataattagtttattgaataataaaataatgtgtaatattttaatttttatgtaatttaatatttttatacatttaaattttataatatgggtttgtatttttctagtatattattattatttttataattttttaagttatgttttgtataataattagtatattatcccaatatttttgtattttttttagcttactatatctatcattaacactcaacaatatctatcctatgtattaatattattcgaaaattactctaagtatttaaggattatctaaatatatataaaaaatattcttataaaagtaagttaaagaaaacataccttataccaaaaattatgtacttgacttccgataaagtcacttccgataaaatcctaacaaccaagtttaagagaaa

SEQ ID NO: 274515 - DNA, 535 bp, Cannabis indica
ggatagcgagggcagcagttctgcccaaaccttcaggatgggttccatggcggtccaatgacagacgctggaatcacagtcgtagacattaattttccacagctctatgtcgacttcaactgtgacccagtgccttgccgtgggaaggttcagaacgaagtaaataaactcgttacccctccatctctcaaagacttgggactgtaattacagagaacaacgaaacaattaacaaaccataataatcttcccaaacaattaacatttaaaatcttactaaaacaataccttatgaacccctgtgcagtagtccaggatataatcctcccatttaaagtttttcctcggacccttgtggctcgtccatgcactgctgatcatggcggtcacgaatgtggagagaatgatacccttctgaggaaatgtcagtggatagtcggtgcgtcgcctcctcagcatatgcattgctgcatctatatgctgcatataaagggaaatgtcagttacacaaaaaaatatattaattgcacataaa

SEQ ID NO: 274516 - DNA, 611 bp, Cannabis indica
gaatttgatagaggttcagccccgagcagttcggtaatagcctaatcctcgttatttgattgacttaagatcaaggagaaatgttccttttcttatagctcttacaacagtatctctgaatgtataattcttagatagtatatttagggtatagtctcagctaaaatgttttcgacctattgcccggtgaacatgcatcactatttatagggctagtaagcttggagaggaagagcatcccctctcgtcacaatgcgtataaatagaaagatcgtgggatcaatgctgaataaaaagatcgtgggattgatgctagatacactgatagtgggatcgtgtgtatggcatatccctgtaatctgatccctgagttataaggatttcgttgatgactcacaatatgaaagctgaattcgctaagtgttggttactctgcgcggattgctgattgctttgctttgggcatgccagcgaggcatcctgctcggactatgcttcccgagcaggtgctctgagtggattccatgtgtcaccattcatgcgattccacgtcagagtgcaaaaattgggataacaaatatcttaaatattcatccgtagtgaagtaggtt

SEQ ID NO: 274517 - DNA, 797 bp, Cannabis indica
aaacaaaagaatcaagcgtaaaatagctctaaaactagaaacaaagagtgaaaactaaccgaaaaatatgacccgaaacttagactaattttagcctaacatggtcctcggaaaatgcttggtttggtggtcctcggcgacgacaactgggttgtggtcctagttacctgcttcatcaagagagagaaagagaagatgataactgaaaaaatgaaaaaagaaaaaaacgatagaaaaaagttttttaaatggttttttagtttttttttaataatttggataaaaattataaattgctaacgatattatagtttttagaattttactgtcaaaatttgagttttaaaagttaattacaagcaaagtaaaactattaaagagttttgctgcaattaactcttatatgtttgagttttatcattttttttttagtaaaaaatccctgttgttataaattaaacaaaagaatcatttacaacaacatagtttattggatctttttgtttgtgtagtagattcacccaacgtgtttattttggacaacatttggattgtatctccttcaaatgaaatgtggaacattgttttattttcaataataatgacattttaattataagtagttatttttttaggggttttttttatttttacactttaaaatatttttttttatatttttacagaattctacatcgaaatccctattgcaactagcgctgcaacctaaatcgcaacaaaaaattgtatagaaacctctattgcaactagcgctgcaaccactttagaaacccaaa

SEQ ID NO: 274518 - DNA, 418 bp, Cannabis indica
acttaaaacaatatttgagaatctttcaataactaatttcctaaaatatctcaacttaattatgaagttcaaaaatattcaaattcaagtttatccaaaattagttataaataactaattttcaacttaaatatacattaatgaaatattaaacaattaagtatctagaagaatctaattagttattaattctttatttaattaaatatagaaaaatacatctagtttatcttggatttgaatttcattaaactaagtgtgtttttctaaattaatttaaaaaaaatcaaatgaaaaattaatttcatatatttcgaaattaattatgttgttaatcaattttattaaggtaaactagcttaattaacctagtacagttattcaaatcaagcaaatggaccttcacagttggggttgt

SEQ ID NO: 274519 - DNA, 793 bp, Cannabis indica
attgaagtttccataagccatgtgatatatatgtttcggggtttggtaccctgttaccttcgggagaccttatagtatccactaggtggattcggtctttgtccttctggattgacggttgtgaattgaccgtcaatctaattgaattgcaactgtttaattttgacataatcctgggaatggattttttgtctaagtatggggcaacgatcgactacaaacggaagatggtggtgtttgatcccgatagtgctaacccagtagtgttcgtgggtgaggttaagggggcacgcttaccaagaataacattgttgaaagctacggacctgatgagtagaggttgtctgggattcatagtcactacagtggataccagccaacctgtgacatcagggcctgagaatacaagattggcatgcgagttccttgatgtctttctggaagatttaccgggattgcctcctacacgggagattgagtttgttattgagttggttcctggagcggatccagtatcaaaagcaccgtatcgaatggctctaggggaattgaaagaattaaagatacaaccacaagaattattgaatctgggattcattagaccgagctactcaccttggggtgctccggtgttatttgtgaaaaagaaggatgggtctctgcaaatgtgtattgattaccgagagttgaacaaacttaccatcaagaacaagtatcctttacctcaaattgatgatctgtttgatcaagtgaaggggaagacggtcttctccaagatcgatcttcgctcagg

SEQ ID NO: 274520 - DNA, 544 bp, Cannabis indica
tctctctctctctctctctctctctctctctctctctctctctccaaattaatcttcatcttctctattttaattaggtgtacaaattattacttattttttagtaacccataatcaaagtttttctattttccttgaaaaaggaaaaaagaacaaattttgttgttttaactttcgactttttgctctgtttgttttagagtactcttaagttatgtgttttcactgttgtgtatgtttgtttgtttttaaaggtataattgtttgtttgttctttatcactaattctttaacataatgtcttgtagtccctagttaaatacaaatacaaagcaaaaagaaagaaaaaaatagcaaccgcccataaaactaaaagaaaaaccacttattatctccatccttatccaaaaatggggtctagaatagaaggagtcttgttgaaagaaaaatatgaaaaggaagaaagaataagtaaatgtggctacaaataattggcaatggaagccaaacaaaaaaaatggaatgatgatctctgttttgttct

SEQ ID NO: 274521 - DNA, 646 bp, Cannabis indica
tttttaaaaaaagaaaaatatattgtatgtacatgtcagtaaaatgctttgtaattgtattttgatactcgggatcccgatccatatagttataaagatataatatattaaagttatcttttgagtctagtaaattaaaatgcgggcgttacagtttggtattagagccaccaggttgtccactgaagaccgtcaagatatgtacaatcaaggccagtgtcgagctcaactcacggttctgtaagctttatttctttttgcaaactgtttaagatatgttgtatatatgattaaatagatgttataaaaccctaattgcggtcttgaaaatatttttcaccactgtctgacctacgtgccttgtgggttcgcttcgcaggctaagtcctaataatggacgcccagcgaaacgttcaaaggcagggtgaaatggttgagaccggaggtggttgggggtgtagaaatctccaaaaaccccgtggacgcggtagaggccgcggtcgtgccccgagaggttgccaggagaacccacctcaggctccggttgactaggagcaaaggtttgctgaaatgcaagctagaattgaacaacaagaggatgagattcgaagacttagacagcgggatgatcctgttgagcctcccc

SEQ ID NO: 274522 - DNA, 601 bp, Cannabis indica
gcataagcacacagccgagaccctgtctcgaggcatcacaataaaccacaaacttttccttatctgaaggaggagttagtactggagcggtaatcaagcgctgctttaactctagaaaacttttctcacactgatcagtccaaacaaacttctaaccttagttcttttaggccagttccgttaagggtacgacaacctttgaaaaaccctcaacgaaccgacaatagtacccagctaaacccagaaaaattctaacctcagtagctgattttggtgttggccaatcccgaacaacttcaattttagctggatccaccatgatcccatctttatcccctatgtgccctagaaatgagacacgagataaccgaaattcacacttcttcaatttagcatagagtttatgatcccgtaaccgttgtaaaaccgctctgagatgcaactcatgctcttcctctgactcagagtacaccaaaatgtcatctataaacacaatgacacacctatccaggtagtctttgaacacccgattcattaaatccatgaatgtcgtcggggcattagtgagtccaaaagacatcacaagaaattcatagtgtcc

SEQ ID NO: 274523 - DNA, 446 bp, Cannabis indica
agtagctgatttggtgttggccaatcccgaacaacttcaattttagctggatccaccatgatcccatctttatcccctatgtgccctagaaatgagacacgagataaccgaaattcacacttcttcaatttagcatagagtttatgatcccgtaaccgttgtaaaaccgctctgagatgcaactcatgctcttcctctgactcagagtacaccaaaatgtcatctataaacacaatgacacacctatccaggtagtctttgaacacccgattcattaaatccatgaatgtcgtcggggcattagtgagtccaaaagacatcacaagaaattcatagtgtccataccgagtacgaaacacagttgtcgggatatcttcctctcgaatgctccgctgatgatagcctgagtgaagatcgatcttggagaagaccgtcttccccttcag

SEQ ID NO: 274524 - DNA, 527 bp, Cannabis indica
cagcagcataggcgctcagcaacatcgaggaatgttagctgagcttggctacgtgatgggcttagatggacgtgactttgcatgggcatgcatgcaaacggttactcagacagtgtgcatggttgacacacgtgaatgacggttatcggaagttacttatgtctatctaaaggcatgcatgtgggctgatgcaaggaatctaggcaagggcttggatggctgacacgcgggtgttagttagtttgcatagagtatgctgatgtgtaatgtgctggtgtgtccagcatggcctaggcggttggggatgtcaaccgcaacctattattgtgttatatagtaggcttgggcgcttgagtcatcagtgtgtgatgtccagcgtgaacattgtgtaatccttgatattgtgtgaataacaaggttgggaaaagggtttcctgtatactgtgtgttcttatgcttgtgtatgcatttacttgatagcaattgagtgttgttgagtgacgctgggtaaagagtgaaaccgtgag

SEQ ID NO: 274525 - DNA, 767 bp, Cannabis indica
ggtactttcattgagagctgaagaaagcgtctgtaagtagacactacaacaatggtggagactcgaagcacacgtcaacctcgccctcttcaagatgctcaagatcctaacgatgaggacgtggcctcaagagcaactgtgggttctgaggaagaagaaggaacccctgatgacgactacgaaggaaacttcgatgagtacgcctacgacgaaggtagctactcagagttggtgctcttaaggcaaaaggctgtcgatcatgaagctgaaatcgcagcccaaaaagagcaaaaccaaaagatgcaagaggtgatgctggccatgcaaaaagccatggaggcagcaggaatccacgtgcatcctaaagccatccctgctggacttggaaaggaaccagaggaatcctcgccaagtacccaaaagcagaagtctagggaaccaagccctataaggtatcccgccgaagggaaccaaaagaaaaaccctacttccactcctgggaaaaagaaaaaggtgcaggatccgcgaaaggtccgctcagatttcccgaaagggaaaggtccgcagaggggcaaactccaaaaagggagtcttggccctcaggatcgagaggaccgaaaaagcgtttccgtgcaccaagagcccgaaaggagaggaagaaggggacaggaatgtcctcccattgatctgagaaatcagattaacgggaaccaaggcgacctccagtatcactttgaccaaaagaaatacggacccgcagtctccac

SEQ ID NO: 274526 - DNA, 524 bp, Cannabis indica
aagccaatcctaaacagtcccatctctctacagtcaaaagaattttcaaatatctggctgggacagttaactatggtctttggtatagttgtgacaccaatacatctttggtaggatagagtaattctgattgggcagggtgtctagatgataggaaaagcacttcagggggatgcttttacattgggaataacctagtctcgtggtatagcaaaaaacaacagtccatctcactttctattgcaaaagcagaatatattgcagctggcagctgctgcactcaattaatatggctgaacaaaatgctcactgattatggacacccacaacacacactgaccattttttgtgacagtacaagcaccataaacatctctaaaaaccctgtgcagcactctcggactaaacacatcgacatcaggtaccactttatccgagatctggttgattcaaatatgctgtcaatatctcatgtgcccacaactaatcaattagaagatcttttcactaaagctttagatact

SEQ ID NO: 274527 - DNA, 505 bp, Cannabis indica
aataattaaaatattcaaaaaaaaatattcaacctcaacattattttaaaccagtttcgaacctgaaatagaaaacatgttattacaacgaataagtatactacgcctcaaatgcgggcttttgcatgttgctctgttgtggcctaaactgccacagcggctgcagtttcgtggtacagaaccttttttatcaccagacgggaaacggttctcccgtcttcttccagcgttgctttttcttggacgacctacaggcttcttttccacaggtaccccaactttcatattcttgatgtgttctgggagaacccaatcatcctcgtcaccagcgagattgatggtatcatcgtaaatcttcctccacgtttcttttgaataataaggtgagcaaagcgtgtacacacttgtgttcgttttcaatgccgcggcacatgcatgaaggcaagggagtttcaataacgtgaacacgccgcaggtgcatgttctttcaactagattcacatca

SEQ ID NO: 274528 - DNA, 361 bp, Cannabis indica
gataaaattttccccccaagtctgtgcgggacctccgaggttgcgtatagacttattccgagctggctcttccttgttaaggggacacgtgtcgagcatgaccgtttgagactcgatgtgaagctgactgggcgtcccttcgattttcgactaattaatgctctgacaattaatattttgaaaatctgaatttctctctccacggctgacggttgcactcgattattttgatttcccatatttgttttgaaggcgggaagtcgaggtgtctaaggatcctttacatacagttaccctttttgtaaagcccgcttagttaatttggaaattatcagttaattgtgattaattatgaaattat

SEQ ID NO: 274529 - DNA, 571 bp, Cannabis indica
catagcaattaatggagcaacttaaattgcatttaaaattcacacaacagcttatatagaaaccaccgaagcaatccggtaaatttataagaaaaaattaaaaaatagtatatgagataagtgttttttttttttatttttacacttcaaaataatttttttttatgaaaattatcggagcaatccaataaaacactaaatctacacaataaatgttatcaaaaaaaatccacccaaaaataataatagtaataaataataattggggctaataagagagcatataataatggctacgtagctagaaacaaaatacttaataaaggttaagtatagtttatatatgtaagccatgtactaagttttcaagtggtcatcacctcctttgattaaggtgatctatcaaatcacttctaattactcatttaattaacaacttgcgttcttttaattaattgatctgtcaaaaacatgtacatgttaatattatatcttgtttctctcagtttaattaattcattttgtttaattatgattttaagtttcccaaaatgggttattaatcatggac

SEQ ID NO: 274530 - DNA, 593 bp, Cannabis indica
acacaacattttccaaccaacaaatcacagaacaaaccattaacactcaagttgccattaaagctcaaagctctgaactcaaagctcaaagttgcataaaactcaaaccaatcaacaataccagctgctaggaacttaaattaactcaaatgaaccctaaaattcgaaccctaaacaactctaaccctaacagcccctgaaactcaatttcacatacacaaactaaagaaaaagctttaaaaatacaaaaccaatgatctagggttaccttttgttgattcctccttgaatttctagctaaatcccagagaaaaggaagggaaaaactggtcctttcccttgctttgtcccagccgaaagaaagagagagagagttcaagagataactctattttccaatttttcttcttttcttaatttttcctcaaatgaaaaagggcttttcccaattaactcatgctgaaaaattacttggctaggtgtcaaataataaggcagccacctaactctcaccaaagaatgactaaaatgccctttaacccaatactaaggtttttctaaagctaggggtaaaatggtcaaaatccataacc

SEQ ID NO: 274531 - DNA, 616 bp, Cannabis indica
tatagaatagagaaaattctgcaagaaaataaagatgaaacttcatgctttaatttgactatgttctcatcagattttagaaaaagtgaaaacataaaagttttagatttctttttattctttccaacgcatcttgaattaactcatttggagttcgtatgtgatagttatggacattttactgaaagatgctgaagctgtaaaattttactccagtagtcgcgaccaccactttccatggtcgcgactaggaatcaaacaacaagtttttttatcgtattttgcctatggtcgcgactaggctttatatggtcgaaaccaggggcgaaatacgagatttttggccagttttttactttttcaaacgtagcaaccctaatttctatttaaggtgcccgtgttttagaaggaagggaggcagaaatcgggcccaaaagtgaaagaaggaggcagaggaatcaatggtggcgatccggaatgccatcactgttgggttttatgccctaaagaaaattccatttcaatgtaatccattttattcaacatatataaagaaacagaagtatttttcattcatttgtgtatgttttgcttcatgttatcaattgcttgtcta

SEQ ID NO: 274532 - DNA, 918 bp, Cannabis indica
gttaccatgcaatcttccattcaacataatcgaatatgaagttccccttagacacttcatgatccaatcaacaaacttggaaggaaaatttaagcctacaagtaagtcctcaacaaagccccaatccacagtatcataggctttactgagatctattttaatggcacaccttggcgaaacattcttcctcccatagttcttgatcaaatcctggaatatcaaaatattatgagcaatggatctcttctttataaaagcaccctgattttgatgaaccagccacggtagaacttcagctagtcttttgctcatgagcttagtaatgcatttgtataaagttgagcaacaagctatagggcgatagtctatggctctcataggattctccaccttaggaatgagagaaattaccgtttcattgaactgcttaggaatcttacccgtattaaagaaatctttgatcgctaggcacacttcagccccaatttctttccacatgaccttgaaaaattcagagttataaccgtccggccctggactcttcgaactagggatactgaacaaagcttccttaatctccttattagaaaaagattggactaatctcaactgttgggacaacgacagcctattgccaagctccatggactctttgtcaagctttttagtaaccgaactacagctgcccatatagcttttaaaatgatcaacataatgcctaaccacatcaggatagttatcaacaatatttccttgcatatcaacaaagctagctatcctattctcttctcttcttttcttaatacaagcataaaagtaggcattattaccatctccttggtttagccaagttaccttactcctttggacaagaaaactattcagcattttttctcgaagatgataacagtcagcagc

SEQ ID NO: 274533 - DNA, 740 bp, Cannabis indica
taaacaatcagcagtggccaactgaaaggagtcaaactaagaaggtagctggtgtgctagaggtggatgccattacaaagctgacagctcaggttgaggccctaacaaagctgatcgcagggcaagccaaacaagctcaagtggtttgtgagatatgtggaggtccccatcacttttctgagtgtcaagcagatgtggatgatttgccaatggatgaagcaaaagccattggaaattattctcagaacaacaacaactatgggttcaaccaaggaggtaaccgaagaaacagtgggttctatcagcaacgaaatcagaaccagacacagaaccaacagtatactcagcaacaagcctctggtggaaattctagtttgcaaacagatttattgctacaattcatgactgaaactagatcttccattaaagacttgcagactcaaatgggccaactagcaactcaggtagcaacccgtcctcaaggaaatttgcctagcacaactgaagtcaatcccaaagaaaactgcaaggcaattaccctgaggagcggtaagaaatatgatgggcctgaattgacacaaccagtagatgaggagattaaagttcaaccagtgccaatcccaacatcaacagtagagaaggctactgatagcccagcaccaccacaacagtctccaccaatcagtattgatcatcatgtgaaaataccctatcctcagagactccgaaagaccaatcta

SEQ ID NO: 274534 - DNA, 581 bp, Cannabis indica
cctaaatatgaacttctaaaaaacgaatataagtaaacacatataaagtatgagaaaccttacattggatgcaacgaaataatatgtctccttccactcagatctctaatccttgtatcctttctgttgcagagtattatcaagatctgagcccgaatgtccttctttgttgaatctgaattcttcagagtcttcctcactatgattgaggtactacttgctgtgtgtgggcactactctatcacttagagatttcgaaacaaagaagaaagagagagagaggtggcggctctagaaaatttctgtgaaaggaatgatatgcaattgtgttgtgtgtgttccctgaagcctttactttctatttatagaataccacacatggttagggttgaattacttggcattaaaataataaaaaaaattaaatgaaaaaggcaatgcatgtggccggccatggcaatatggaaataggcctcacttttgcaactttcctattttatcatttatgtttcccattttctcaaaaactgccaattttcacattcaaccatataaatgtcaattctaactatttaataact

SEQ ID NO: 274535 - DNA, 591 bp, Cannabis indica
gtggagagcagaaacactcagtcagcgaggttatactccacgtttttgcagaaggagtcaacctacagacgaagttccttgtagttgactctccatcagcttataatgcaatcttggaccaattgtagatccattccatgaaagctgtgctatccacataccaccaagtgatcaagttcccaaccaagtggggagtgaaagaaatgtggggagcctaaaaaactgctcgtgattgttatcaaaactcgctaaagagaaatcgacaacattatagcaactacaacagtttagtccgacctttgcaccagatgaacccattatggaagacctagatgatgtgtgcattagcaaggagttcccaaaccataaagtccagattggaacaaagcttacacctgagtttcgagctaggctgatcgaattcctaatcaaacgccatcactgctttgcatggtcccatgacgacatgacatgtattgattctaacattattgttcacaagttgcaggttgaccttgattacccgccggtcaggcgaaaaagacgtaaatttgcactcgattgcaaaaaggtgataaatgaagagataca

SEQ ID NO: 274536 - DNA, 774 bp, Cannabis indica
tttacttggtaaattctagttccgcttattggaatctcggttgtataggcccatggtcctcatactagttgagaccatactgcttgtaagactcaaataattgattttaattaataaattataattctaaagtcagactatgtctaatttatgaattttcactaagtaagggcttaaatgtaaagaaaagagattctagggtttatttattaattaagagactttattaagtctaattaataaatattttaaatgaaaattttatttgattattaatttttattattaaataaatagttttggcatttaagtggttagaattggaaaaatggtatttttgagaaaataaggaaaattgttgaaaaatggcaaaattgcaaagtggggcccacttactatggtcgaccacttgcagcggtatttaccatttaatatttcattattttaatgcctaattaattctaacgtaaacctaggtgggttcctataaatagatagtgatgactcacacttaaagatgatgaaaattcaccttcagtcaaaattttcatgagccttctcttctattattttcaaaccaaacattctcttcctctcttcatattttcataccttgagtgatagagtaagttcccacacacatcaagtggtaactcaatcatagtgtgtaaggttgtgaagaatccagaatcaagagaaggacattcaggctcagatcttggtgataccctgctacagaaaggatacaagggttagatgtaaagcccgcttagt

SEQ ID NO: 274537 - DNA, 569 bp, Cannabis indica
tattctattttaagttgatccaaaattaacaaactttcaacttaaaaaaatatccaaataatcttacaataactaattcctagaatccttcaagttcattatgaatttcaaaaatattcaaattcaagttcattcaaaaattagttataaataactaagttacaacttaaaaaatatttaatgaaatattaaataattaagcatcagaagaatctaattagttataattctttatttagttaaatacaagaaaaatacatatagtttatcttgaaaaagtttcattaaactaagtattttttcttaattaatttcaaaatattcaaatgaaaaataaatttcatatatttcgaaattaattatgttgcgagtcaatttttattaggttaaactagtttaaataaccttatacagttattcaaatatggaaaatgggccttcacagttggagttgttcatgtgagagaaggctgggttcagtatgtcgtacccattgctatggccccctaattctcacacaaggcctaaaagagaggaattaaaccttaaaatgaacaactgttattaat

SEQ ID NO: 274538 - DNA, 1104 bp, Cannabis indica
gaggagggttttgcgagaggaggtgcaaaattccctcaacgaggagaactaccagaatccgtgggatctaaacctggaccccctgacggactggttcaaacgtttcctcgggcccaccttggctccttttgccgctgagatgaccggtgagtacgtctcccagctgactcggtgcgcgcctaagcggtacgctgcttgtgcatccttgaactccgtcttccaagttcaggatctcagccacgccttggccgcggtaagtactttgtgatttacttcttttctcattattttatttaaggccttcactcactcttgcttccttttccagattactgcagaggccggccgcctttccaaaaccataattaatcacggcttcgtcttgtccgaatttgggggcatagacgaagtcgtgaagatcctgcaggacctgtctgctgaaaggcgggcgttccaagaggaggctgcgcggcaggaggctcttgctaaggccaagttcgaagaagaggctaagcaaagggaagcccaagcggaggcgatgatccgagaggagctccttcggagggataggctggaggcgaagcaccaggaagcgttgagggcagagggcgaggctactgccaaggccaaacgggagcttcggtaggccaaggaggccttagacgagatggccgccaaggtgaggtccttagaggaattgcaccaggcggacttggagtccagggctaacttggttgtggagctgaaggagctcaaggactttatagaccaagccttgaagaaggctaagaaagatgagctcatttcccctatctcctgcagccgttgcatcaagcgcttcgatgacggcgtctacatggcctggtcaacaaatggccagaatatcaagcttgacttctacccaaaacctgcggagatgattgttaaattccggtagaagaagaagaagcttgacgccatgctcgaggcgcgcattggtcctcgccttcctcctcgcattgattaggccgttccgaatccagcccatttcaaccaatatttttcttatctttttttttatttacagctattttgcttttatttaagacaatctttatttaatag

SEQ ID NO: 274539 - DNA, 522 bp, Cannabis indica
tctaggtaatccaaccacgaaatccatccactacaaaaaaaaggatattcagctacaaaaaatttggtagcaaataatgcctatttggtagctattaaactttttgctactaactttttttggtggctacttcgtagctaatactccgtagctgaaagttttttgctaccaagacaatttgtagcaaatttgctactaatatttttgtagcaaaaaatatctaatctagtagcaaaataattactttgaaagactactaaaacttttttgctactacattttggtagcaaatcaccttaaaattagtaacaaatacaactttagtacttaaaaatataataattttgctactgaaattttgttgcaaaataaatttaaattgaattgtatgtgatttttcaaccaaatttatatttaatatttaattttaattattccagtaatgcagaatttctaattatatatttgtagaataattaaaatagcaaaactcattttaatagaattaataacttatatata

SEQ ID NO: 274540 - DNA, 570 bp, Cannabis indica
tgattcactatgtcccaccagacgcgggcatgatcttgaaacataaaggccgcacaatttaccctctcagttcccgtcacccccatattatcgaggatccgggtaacagtgctcatccactgatcggccttaataatgtcgatacctcccagaaaaaccggaggttgcagcttcacaaaccgctcgaacacagagtcccgatgcggcataacaaacccttggttacccaccactggcacaggagctggtggtaacccttgattagctgggacagcttgttgcctcaaacgttgcaactcttcttcttgacgaagtataacactccgcatttcatgaaacatctgctgccaatcagcaggaggattagcattaacagcctccgcattatcccccggattttgcggaggtggaggcggtgctggtggatcggttcgggtagccccgggctctacttgctcgccctgtggtctggatgattgcggagggtccattactagtacccctgaaatcaacaaccccagcgagttaagcaccgataccacacttacgcacttaatgccttaaacccta

SEQ ID NO: 274541 - DNA, 644 bp, Cannabis indica
atgccaacatttgagtacaaggacagtttcccaataacatacgggcaacactcgaaaaaccagaattgaatagccaaaggaaaacccaataacctgtaatacccaccatcctcgtcactacgaactaccctcttataaccagaatctatcttacccttcaaagaatgcatagtgatatcaaaacaatgcttgccccacccaaattcattatatcgaccactatcgacaacatctatttcctcagacgaaacaactttacccgggggaccacctaacaaataacactgcacaaaatacaatacagccaacttgactgcaagatcgtcgttatccttaagattgtcagcaataaaagcagtctgaatagcacccttggtaatttttttgtaccccttaaaacaatgtttgaccaattcattatcatcttgcttaaactgataaaaatcagaatcaacatgacaatctaaccccgtgaccaacgcaaactcttcgatactaaacctaaggtatttcccttggacacaaacccaaaactccaacccattaggctgctgaacctccctcaacagcaaacaatgaagcaattggtaatgaattatgtactcaggaattcgaagaaaataaccaaacacagattttgaaaa

SEQ ID NO: 274542 - DNA, 658 bp, Cannabis indica
tcagcaaatagggcgttttgttgatgaatacttcatggtgaaggatccgaacatcacccagactcggtttcagcagattccgacatatcaccgtcctcccctcacccttactcatatggatagatcttagaaacttgactggttgccggaggaagacaggaatatcatccagttgacctccgatgagaatctggtgcaatacgggctttacccagaggacttttctcctaagtcattggcggggaagaaggggaagtctgatgctggccgggttgaacgaactcatccggagaatgagttgattcaattgaagcgagaggctaagttgaagagaggtgccagggccaagcagtatgctcaggagcctatgaatcctgaagatgaagtcgaggctgaggctgaggctgagcaggtgaccccattgaagagaaagaagaaactcccggccacacccaggcctgttgaacatgcacttcgcataagggagcccatttcacctgttcgaccatcttatccctttgctggaaaagggaaggctatcatgtttgagataaactcgatgtcaggtgatgatggaaatctgattttctgggcgggcagtcactctgcattttacttctttttcagcttcttcgacttttatgccttgtattttttg

SEQ ID NO: 274543 - DNA, 589 bp, Cannabis indica
aaagtccattgtttcagatagagatccgaagtttacatcaagattctgggaaagtctgcatcgagctatgggtactcagttgaagtttagcacagtttttcatcctcaaacggatggacaatccgagaggatgataaaaattctagaagacatggtgcgggcatgtgttcttgactttgagggatcatgggtaaagtaccttcccctgatcgagttctcttataacaacagctaccaggccacaatcgggatggccccttatgaacttttatatggaagaaagtgtagatcgcccattcactgggatgaagtgggtgaaagaaagttcttgggtcccgaaactgtccagagaacaagtgaggcagttgacaagattagagcgcgaatgctcgcggctcagagtagacagaagagttatgctgatccaaagcatcgggatattgatttccaggtcagggacatggtatttctccgaatatctccgatgaaaggcattaaacgctttgggaagaaaggaaagcttagtcggaggttcattggacctttcgaaatccttgagaggatagggcaagtagcgtacaggttggct

SEQ ID NO: 274544 - DNA, 700 bp, Cannabis indica
gagaactacggggaccccctgttgtatattacaaactagtttattagtgcttttacaacatgaactttgcaatccaaaaatactatcaaaacggagaatcctgttcactgggccaagccactgcaactgatatgtacattgctgctacgacctcgaactaatggctgctcaacctttgctttccccttacctacaccatgaagcacctgtgagtcacagagactcagcaagaaaagtgaataaaataataactagttatattcagcagttcaatctcaaattaacttgcatgcaacatttacttaatattatacacaattctggtactttataaagtgcccctttaccactcgttaatcatgagttgaatatgtcactatcattgcctgataaagcaaacgataagtaagaaacctaaccgcggttttaagagtaattactcgtaacagtattaatcgtttccaaccataagtcataacctaggctcaacaaatgtctaatcaaagtcttgataataatcaaggccataacgattcaaccattaatatttagccacatacggtgcttaccacttttcttaccttagttcagaactcaagcgtacgggccgacctgagtggaaaacaagctaggcgatcccggtcctatgtcacgacaaccaaaactcaataaaaaccttaatcaaatttctgataataga

SEQ ID NO: 274545 - DNA, 684 bp, Cannabis indica
tattttctaagttgaatgaaaaaaatgaataaaaaggaatctttaaacactaatttctttcagccaaataacatacataaaataaacatttatttcatttaataaatcacataagacaaaacactaatggggcaaaaagaccattttgcccctccaccataaaatcatgaaaatcatactaaaggggtatttttgggacattctaaattcccggccattcccgacattcccaatgtctaaaacccgtccccaaactactaacatactaagttgtgatttctactgagccaaacgccgagttccaaaataccggacaccggaaatgcaaaatatgcaagctactgaataacataaataacagtataataaattatttaaatagctataaataatttcataattaatcacaattaactgataatttccaaattaactaagcgggctttacagaaaattaaagaacactaaattttattttcttagaaaattattacttaaaattaccacaaagattattacccaaaaatctattctacccataagatcatcattaaattaattatctctatcaaggaattaaggtacgcttcactattcatgttcttcccctccttgaatcaagggcttttgatttattgttattacatatttaataatatgtaatatttttgtgtatagaattta

SEQ ID NO: 274546 - DNA, 608 bp, Cannabis indica
aagagttagtacaggagcggtaatcaagcattgctttaactccaggaaacttttctcacaccgatctgtccaaacaaacttcaggttctttcgggtcagccccgttaagggtacaacaatctttgaaaaaccctcaacaaacgggcaataatacccagctaatcccagaaagctcctaacttcagtaactgattttggtgttggccagtcccgaacagcttcaattttagccggatccaccatgatcccatctttatctactacgtgccccaagaaagagacacaagataaccagaattcaccaagatgtcatcgacaaacacgatcacacatctgattaggtaatcctagaacatccgattcatataatccatatcaaatataatatgcaaccttggctcgtcattcaccctaatggcaatattgcattttgaatattctagatatgatttgaaagaggatcctttaccttgacagccacctcaatttccctgaagctttctaatactccctgatgctccggaagcctcagccttccatttgtgatcagggttgccactgtcggtccccttactgcattaccactagcaggaggattcgatgccgtg

SEQ ID NO: 274547 - DNA, 698 bp, Cannabis indica
agagggagttatgtaaagaagaggattctcaatgccattgctcaaatgtgtcactcaagaagaagctgcacgactcctatccgaagttcacgacggattctgtggaaatcatgccgccggatagagcttatccaagaaaattctatggcaaggttacttctggccaacgatgattgaagattcaaaagcctatgttaagaagtgtgacaaatgccagagattttcaaagataccaagagctccacccaacgagttaacacagatgcaaagtccgtggccctttgccatttgggggattgacctgatcgaaaaattacccaaaggtaaaggccgagtgcagtatgcagtggtagcggttgattactttactaagtagactgaagccgaaccactcgcaaccattacatcgaagaaagttcaagactttattgtcaagaacataatatgccggttcggaccaccgtacaaaatagtctcaaataatggcaagcagttcgacagccaatcctttactgatttctgtgcgaaccatggtatcatcaaaagtttctccgcagtggtgcatcctcaggcaaatggtcaagttgaagcagtcaacaaaaccttgaaggatacgctgaagaaaaaacttgaagatgccaaaggaagctggccagaagagaacatgatcctgggcttcttggaaataactggacatg

SEQ ID NO: 274548 - DNA, 635 bp, Cannabis indica
tttcagtaccagttttattattccgcatttaattaatcatttaattaaataatcaaactgggaatattaaaatacggaatttcaaattcaatatgtttagttcggtcatgaaatgttagattatttgatatgtttattgtcgagtggttgtcacaatagatgaacgttggaacatcttgtggaatttggaagtcggtaagtaagttctgaaatcaagtaatttcactacttgtggctgcaagtactcgatattcagcttccatggagcttttggaaatgatgtgttatttcttgatgcgtcaggaaataagacaatcactagggatgttcatcaaaccgcctatgtaatacccggaattaagaaatagattagcaaaatcctaactagataattatgtataatggatggattatattattatatagttcaatatatgtgatttatatgaattttaatatattaaagaccccgttggtgagccaggggcattttggtaattatgactcgagaagggtaaaatgatgaaattaatttgattacgtgcttaatggaactatattattatatagtatacctgtgttgtcttttcaggtgtgttttgacaggttagcgcggtatagtcacaaccgggaat

SEQ ID NO: 274549 - DNA, 665 bp, Cannabis indica
gatgacacgtggatggaaaggggttaaatttgaataaacagctaagtctccttaaagtgcaggattaccttagacatgcctcccgaagtaggcatgtaagtctcgtatgctcccggagagcaagattgaacaaaagcatctccgggtggtgtcagattctatctgaacagtcatctcgcatttaatgccgcatgggaggaggtgtctcgaaactgccatacgtaataaagtctgatggcacaaccctcactctgcacctactaggctatgatcaataaagtctagtgacgacatctctatgaggaatcacatcagtcaaaaaggatgaaggactgcactcataaaatccctacagaacctagggattagaccatgcattacctatgatatattcattgggaatgtgtggctttactgatagttacagaaatgcatgcaccttaattctagggatcaccccacaaaaacactataaataccccccaaagctcattaaagaggggtcgagaattctggatttcataagaactagaagagtaaaaatccaccaagaacattctctctaacaaatactatcataaatacaaagactcgcggactaaggctcattaacgccccaacaacgtaaaaatctctctcttaatcccttatagctctctaaatta

SEQ ID NO: 274550 - DNA, 711 bp, Cannabis indica
  modified_base (587)..(587): a, c, t, g, unknown or other
agttctgatcgttaagggaattttgcatttcatctcgcaaaaccctcctcaaggcctccacatcagcatgcccccgggagtacttgtccatggcgtagttatgcttggctttccggagctcctgcctcacctcatctttgggaactggagtcagcactatgttgggaggcactgtatattcctccgcctcgaaagggttcccggaatcagggccaggggccggagtgtccactctccgctgccgtttaggcacttcctcggctatcatcttgcccttgtgcttgcagatcagagcaacctcttgctcttcttcaccttcttcaacttcctcaggaagagcccattgctcttcttaaccttctttagcttcctcgggaagcgcctcctcctcatccactaagtcaatagtgtctggaggggcactggaagaagctttcatgggagtggccacttgggaagaagttagaggaaggggagcgtcaggagtgtgagcttcgtcaagggcggccgaaattgcatccatggaattggctgctacaacaaaagaaaagagtcaagtgttagaatatctgtgaaagcagtaaacncttaaaaaagcaatcaagctagtcctaccctgactctctaattcgaccatagtaaaattctgaatcttaatgctggctgcatcatccccgagatagctgtctgagggccggaaccagctagaag

SEQ ID NO: 274551 - DNA, 676 bp, Cannabis indica
  modified_base (503)..(503): a, c, t, g, unknown or other
ttgacctccgacaaaaatctggtgcagtacgggctttacccagaggacttttcttctaagttcgtgatgggaaagaaggggaagtctgctgctgctcggcctgaatgagctcataaggaggatgaactcattcaacttaagcgagaggctaagttgaagggaggtgctcgggcaaagcagtatgctcaggagtctatgaatcctgaagatgaagctgaggctgaggctgaggctgagcaggtggctcctttgaggaggaagaagaaactcccggccacgcccaggcccattgaacatgccattcgcataagggagcccatttcacctgttcggccatcccatccctatgctggaaaagggaaggccgttatggctgagataaagtcgatgtcaggtgatgatggacttctgactttctaggcgggcagtcactctgcgctttacttctttttcagcttcttgactttcatactttgtattttttttctggtttttgctaaccncggtgttttggtctctgtgcagacatgtctcggcagatgatggacgccttaaggaagaggatgagcggaagctctgcgcctccctccggccaagaagtctaaggcggagaggggtcttcagagaagaggccttctggagaggtcattgacctttttgaggagctgactactgc

SEQ ID NO: 274552 - DNA, 680 bp, Cannabis indica
tttttctgggaggtccggatgtcatgaaagtcgagcagtggctaacagtgataaccaagatactgaactttatgggtgtcaccagaaatgacagggtggtgtgtgccaccttccagttccaagaagacgctctagtctggtgggacatggtgtcacagattcatgatgtcaccaccatgacctgggaaaggttccaggaactcttcaacgcgaagtattataatgaggccgttagaagtgccaagaggaaagagtttacccacctgacccagcggcaaaacatgagcgtgattgagtataccacccagtttgatcggttggcgaggtgggcctcggggattgtgccaaccgatttcagcaagaaggaaaagcatctggacggattaaatgtgaagatcaaacatgaccttatgatcaccaccgacgacaagaccacctatgctgagatggtggagaaggcactgcgagctgagggcgcagttggatgtatgtcggagtcggctaggactccggtgagtggcgggactcctacccctcctgcatcaggctttagcaggggaggtagtggttcggccatggaccagaagaggagaacatccagtgcatccggtggctcggggcagaacaaaaggttccgggggaaccagagtagaggaagccgtcagggtggtgcggagacc

SEQ ID NO: 274553 - DNA, 536 bp, Cannabis indica
gctgagtctctgtgactcacgggtgctttatggtgcaggtaaaggaaaggcaaaagttgagcaaccatgagtttgtggtcgcagcagcaatgtacataccagccgcagtgacacggcccagtaaacaggatgctctattttgattgtattttggaagtataaagtttatgttgtaaaatactttgaaaccagtttgtgaatattttgaaaacaggggaaccccgtagtccatattacttatcttttgttaaacagtttaaaagttgaattttaattatcaaaatttaattacccacacttttagtataattacatattatataaatatcagtattttattaaattgcacacacgtggcgtccctgttggacagggcgttacaataggaatagagctacgtaatgcttgcaccatagtaagacaatcagtttcaatgacaaccttcctccaatctttctgtttaacccaactcagtgcctccttaatgttgggttttatgccctaaataaaactctgtttcaatgtaatccagatta

SEQ ID NO: 274554 - DNA, 566 bp, Cannabis indica
tccgtacactttttttttctttaacattaatctttcttaactgtggacaggttcttttcagatgacccactaccccacaataaaacaagatctggctctacattggttcaaatggcgcctttttacatcttgaacactccggataaggtcaccatctcttatattcactttgaccgctatcatggtcaccatagaacctttcgttctatctcataatttgtggttcatttagtttttgcttcttgatctactagtaagttggcttcatatattccaccacatctagtggtaaaacaggaagtgttggtaatataagaatagacaaaagatgagcctattgttctttcaaatcttagatctgttttcctttattgtctaatcatatcctgcataacagaatttacatgttcccagcattatggcaatgaagaattctcttccttaccgtttgccatgagcccagacagctcgctaatcagactatttaattgcccttactgcttaacttatcacaaatttagtccacatcttctaactatttaaaactcagacgaatattaatatca

SEQ ID NO: 274555 - DNA, 897 bp, Cannabis indica
aatgccctaagtttctagcaaagaaacaaggtatttatgtctatgctataaactcatgtgttttagagaattattatcccatttggttattaattctggatctactaaccatgtttgttttcttcttatttcagctccagctgcttaaacttggattgttatcctagcgagttgagtcagatggttggacagaagggtggagaatgtccaagattgaagatgaagctcgaaatcttcttttaattttttgaattaattgttttattttatgaacaatttaatttaaattattggtttgggatttttattccctatttcatatttatgtagacaattcattttttttagaatattaataaagttttctcttttaattatgaattgcatttatgaattgagctttagtttttctttatcttgtgtatgccaataccaattttatttatatgtttataatgtttgtatgtgtttgtgttttattattgatacaaaatctatggtatattaatctctgcaaagaaatcataccatagatctctataacacttagaatttaaattcaatgtttatgaataattgttaattcttaagcaattattaagattttgtttaataaaagatcttttgatctgataggggtggaaaaagttaagaagtaatatatgcagttcaacgattttttatatctattgaactctagactatattcatgactccacaagatctctataacacttaggggtgaaagaagttattgatatatgtagttcatttttttttaaactctagactatactcaataaaccacagtatctctatggcacacatatttttgattagacatggatgtaatataatgaacaaattagcaaatcattaaaacttattgttgatcct

SEQ ID NO: 274556 - DNA, 739 bp, Cannabis indica
tttttttgctatctggacttccacgactagcgggtcgttgtgcggaaatcttatttggacaacatcttcgtcgttgaatgttatggttggctctcctgatcgtggaactttaggctcctttcttccacggccaggatgacttcttcttgctcgtattgagctgtgcgggcatatcgttctcgagctttgcccgtgtctccagcgatgtgcgggcctccaatgatgacttgcaagtgtccatctattggcggaggcatcagatcctggttattctgaccttggttggccttgacatacttctgtaagtgcgggttgtttttcttgatcagaagttctatttcccgcttcaagttgtagcattcgttggtgtcgtggccgtagtctccatggaactgacaaaactttgtcatgtcccttttgctggtatctttcttcatgggcccgggcttcttgtacggaattagcgactgagtcgctatatacacactttctatatcttcagttaagatagtgaatgcagtgtgtttggcgcgatcacggggagtctgtccgggtttttcggtgaactttcccttcttcccgtttccttgcttgtggttgttgcctgaacgcttgccacttgaattgctagaatattggggaagctgggcggacgttccagtagaaggagccttcgttttgttcggcttttgctcaccatctgctcgctgaatggcttcttcgagcttgatgaaacctt

SEQ ID NO: 274557 - DNA, 606 bp, Cannabis indica
gctatttctatgacggtctcacagccgacaaaagacaattcgtacaaatgatgtgcaatggcgacttcctacagaaagatcccgaagaagctttggaatatcttgaagaaatttctgaaaaatcatacacatggagtgcgccaagtcctacagacaagccacgaacagccggagtctaccaattgaaggaggaggacagtgtgaaagctcaacttgaagctttgaaaaaacaatttgaggctttcaaaactcaagaaggtaaagcactccagatggctgcaaaagtggaaaagcaagaaccatgcttcatttgtggagggactgatcatcaaccacaagagtgccctagtcttagtatgttaaggggaggagatgaggaacagtgtaatgccttaggggattacaagaagccttataatgcctactccaacacatacaatcctggttggcgtaaccatcccaatttcagttggaaggatacaagtcaaaatcaagcatctgggagccaatggaggcctgatcaacaaaagaattctcttgagagttccatgaaaattctcgcagaatcccaactagagttcaggacttatttcactcaggtgatag

SEQ ID NO: 274558 - DNA, 672 bp, Cannabis indica
ttctgacttcaaacttgtgttttgatttctatcaacgtcatcacattttgagaggaaattgtaaatggatagccatgccatttagggtttaagtgggtttttgttgcagactctgccatgtaggacggttcttaggatatgcgtcttgttggtgaggtttttaattcgattagggcaaatcagcttagaattttattctacagtggtggtatgtagatgttggcctataatcagaaattgcttttatgttgcatggttcacatgatttatttcatgattatacttaatgtataaattctattaagtccaaaacatatataaatatatgtatatatttgttcatgattatagtatcgtcagcagagtggaatataatcatgattatatgttcaaaagtttaattcccccgatttgtcagttcactggatttagactggcatgataatcagcgataaggtatacttacaccttggataagtgttatgtcctttccagggcatcagcgataaggaccgatattgatcttggataagatatcataaacttaccgttatatctttctaagtcaatattaatggttgatcttaggtctattgatcttaatcctgatatggttatgttcagcttagttgtattatttatgttctttgagttgttcgtggaagctaactt

SEQ ID NO: 274559 - DNA, 827 bp, Cannabis indica
agtatcccccataggccactatctagggcctcttctaggttgatgtatttttcgactctttctggaagtcttgaaggttggaggctccttcttgctgtaactcgttctagaacggagtccctgtacggatccctgcttgaagaagggcaagttgttgtccatcatcaactttcttggtcttcgaggcttcttccttgaacctctttatgaaattcttcaatgtttccgtaggcagctgcttgatgttagtcaaggcgctgacctccatattaactttccttgcggcgacaaactgtctccggaagctggtttgcagcttattccagcagtccacggatcctggctccagtttcttgaaccattcttccgcggacccgctcaatgttagcgggaagcataaacacttggcgtcattgctgactctcatgactgtcatgactcggttgaaccgtgacaggtgatcgcttgggtccgagttcccggtataagctgccaatttgggcatcttgaagattttggggagcttcgcttccaggatgtgcctggcacatggttcccggtcttcacagtcaaagtcagactcatcacctttttgtctctgggagactcgagcaatgtcctttcggagtatggcaagctcagccatgattccttcgtttaatgttcccgtggagactacgggcacgtgtttcttttggtctaggtgatcccggaggtcaccgtgttttccattaatctgatacctcagatcgacgggagggtatttttggccccttcttcctctccctccgggttcctggtgcacagaaacgctctttcggtcctct

SEQ ID NO: 274560 - DNA, 528 bp, Cannabis indica
gatttaggggctccatggagacgaactatctccttcacatacaattcagcatactgatccactgaataggtaactttcactggtagaaagtgagccgactttgtaaatctatccacaatgacccatacagaatcatacatccctgtagttctaggtaaaccagttacaaagtccattgcgatgtcctaataaccctgccggcctctgatgttcagccttaatctgctgccaacttagccaaccgatcaaacttcgtcgtgtattcagtgactgacattccctcagtctgaactagatcagtgaactctttccgctttgcactgcggaccgcttcgttgtaatacttggagttaaataactccttaaattcttcccaggtcatcagcgtgacgtcccgagtgagggttatcaactcccaccacacgagagcatcttcctgaaactggaaagtggcgcaggtcacccggtcatttccaaccactcccataaaattaaggatgcgttcaatcactgaaagccactgctcgg

SEQ ID NO: 274561 - DNA, 524 bp, Cannabis indica
ataacactcattcctcggtcgccttgtccactcgggaggttaaggttcggtaggatgacatatttgggtggccgttttggaagtagttcccgccaccctagtccacccatcccaaaccttcgtcaacatttcctgaatacacatgtaccacatacataaaatttttaagaaacaatttgtaataatataatattgaaataaatagacataaagagttgagttattaccaaaatttgttatgagatgatttattgaattgctgaaattcccttgatgcacctacaacacacggttgcagtgcataccaatccttctgtttacacatcttcactttggtgcaacaacaatacataatttatttttttaatatattatacacacgtctacatatagggagtgagttctctaggatagaaaacaatacgaaattgtgaaggagtaaggagaggtagaggggtatatatagtacttgtggatgtgattgttgagtgtagtcttgacaaaaatttaaaaataataattaa

SEQ ID NO: 274562 - DNA, 637 bp, Cannabis indica
gtctacttacagacgctttcttcagctctcaatgaaagcaccaaaatgttgaccgaggttttcggcaaccaataaaataataataatttagagagctgtaagaaattaagagagagatttttacgtggttggggcgttaatgagccttagtccacgagtctgtatatttatgatagtatttaatacagagaatgttcttggtgagtttttactcttctagttcttatgaaacccagaattctcgacccctctttaatgagctttgggggtatttatagtgtttttgtggggtgatccctagaattaaggtacatgcatttctgtaactatcagtaaagccacacattcccaatgaatttatcataggtaatgcatggtctaatccctaggttctgtagggattttatgagggtagtccttaatcccttttgactgatgtgattcttcacagagtagccgtcactagactttattgatcatagcctagtaggtacagattgggggttgtgccgtcagactttactgcgtatggcagtttcaatacgcctcctcccatgcggcattaaatgcgagatgactgttcagatgaaacctgacaccacccggagatgctctgttgccatcttgctctccggga

SEQ ID NO: 274563 - DNA, 492 bp, Cannabis indica
tatagtcgcaaggatgataaagtgtttgtttccacaaacgccactttccttgaagatcactatattaagaatttcaaaccacaaagcaaagtagtattggaggaaatgctttcagatataactccttctaatgttccatcatcttctactcaagtagaggataatcccacttcctcggttgaacctttggatgttgatacaacagagaaatctaccactgatgttcatgtttagaagatcactgatcctcgtcgtagtgggagggtttctactaaaccatctcgttatggcttcgatggtgaaatcaatatggtcattggtgacggtattgataatgacccattttttggaaattattttaccaggatcttagatctactcacaagtatgttgattaacaccctaaatatgaactgctaaaacaattatgaaataaacacatataaagtatgagaaaccttacattgggagcagtggaatataatgactcct

SEQ ID NO: 274564 - DNA, 767 bp, Cannabis indica
atgcaaaatgacaaagtagtagcgtatgcctcaagacaacttaaggagtatgaacaaaggtacccaacacacgatctggagttggcagcagtagtttttgcgctaaaaatatggaggcactatctctacggggagaaatgtgaaatttataccgaccacaagagcctgaagtacttctttacgcaaaaggaactcaacatgaggcagaggcgatggctagagcttgttaaggactatgattgtgaaatccactaccatccggggaaggccaacgtagtagcagacgcgctaagtagacgcagttatgccagcttggcaatactggcacaaatggaaatgccactacaacaagaactccaaagaagtggtatagagatcattacacaaaaactagctaacctaaccattgtctcgacgctgctacaagaacttaaagatgcacagattgttgatgagttcttacagaagaaaagagcaggcttgccagagaaggaggcagaggatttctccgaaggtacagacagcatgctaaggtataagggaagagtgtgtgtagccaacgacatagagcttaaaagaaagatcatgatggaagcacacactacaccctactcaatgcatccagggtcaaccaaaatgtacaatgacttaaaaaccttgtattggtggccagggatgaagaaggatgtagctgaattcgtagctagatgcctcacttgtcaacaagttaaggctgaacatcagagaccagcagggatgttgcaacc

SEQ ID NO: 274565 - DNA, 787 bp, Cannabis indica
gcagatcacaatctgactgaaccactataattctttgtcttattgatattttccagctttgttgattgttcttgcattcctagtcgagtactcgccattgtaggtcgaatactcgcacttgtcacttctctgaaatttctctttttatattaattaaataatatattttggtgttgcaaaattcactcgacaacagtaaatataatcagaaactgcctgatcatattgtttcttcccattctctttctcggcctccaagtcgcgagtcatctcctcgatcttcgcccgcgagttcttggcctcgagctcagcctgctccttagccttgcaaagttcttcaagctctttatcctttctagccgcctcttgcttcagcctcttcatgttctcctgaagctgggcattgtgcctcttcagcgagtcagcttccttcgaaccagcggcagcagcttttaggaacagggtcatcgactgcgaagccaactccacagagcgcggaacaagctcctcagaagggatcttctccgccttggacatgaactcctcgcccacgaacttctcctgcatggccaggaagtcgcgagctcggacagttggctcgatcaggactttcttccccttgtcctgcgtggtcttggccagcttcttggaagaatctgcggcaagagtagccaccacatcgctcttcctcttctgggcgacaacgggcgaggtcgtcgctgctccacccttcggcttgatcttaaggacgggcgcggacttcaaaaaagtcatctctgcgaggata

SEQ ID NO: 274566 - DNA, 620 bp, Cannabis indica
caaaaattaaaattacaaaaatagaaactagtttaaatatctaggtttatttagaatttattttatacaaattaaattaaataatctaataagataaatgatttagaaaataattaaaaagatattttcaatatcatcttctaatcttataatttaataaaattaaaataataaaataaaccaattttaaaatagatatggtaagacaattattattttaagaataaaataataaacaaataataattatcctaattatatggcaaaatatctcaaattaagcatttttcaaatttctacaaaaatatctaggttatttaaatatttaaaatactatctataaacttctaataagtaaaatgatgtaaaatatcatttttctaacttataatttataaacaattaaatatttaacaaaataacttatttttgaatttgaaaatattatggttagaatatctataaaaatatctaggttcattttaaatttaatattatttaatttatcatataagataattttaatataatattccaaattaaaaggataaagatatcttttaatttaaaatatggctaatattaaaatatctgttcttataattaaataatatataaat

SEQ ID NO: 274567 - DNA, 1062 bp, Cannabis indica
gcaaaaaatgtctaagtcaaaaaatacgcgacatactgggtctgcgattaaagtcggtcctaatcccaggaaccttaaagacgtaaaaccacttcgatttccaatcacccatgttcgacaccattccctcaactccgttgatttcagaagtcgcccatttgctaaagcagtagaagccgttatggagacctacgctctttatgtcgtagaagtaactgaactcttctactgagggagccctatggacgtactccatgtacatcgcatagaaagccaggacagtgcgataactgttgggagttaactgaaagggcgatacgtcatatcgcctgagaatggctgcgacgaaggggtgaaaggggaccgatacaccacaccgaaggatgggtattgagactaccacatcctctgtgggaatgatcgcagggttagtgaatggaaggtgcgctctctgagatggtttaggacgttgaaacgcgagtcgcagcaaattcaacctcacaaaggtggtgaagtctgatttggcaaccctcgagattaaatcctcgcacgcgaagggctcgttcagttgggagtcgtcgaccgaatctgtcccactcccttccgcctcctcctcttccccacctgactcgcgggctggagtcgtccattcctcgtccatctcctcgacctcgatgtcgggagcatgcctcgtatgtataagatagtcgcgtgccgacactgtggactcgctgtcccggatatcgatggtcccaggttctgcgagttcctgcaccatcctctcgatgtctacagaagacatcggacctaattctatttgagcggcctccacttcggaaatgtccgtggggagaaaactgtccctctcctggtcagactcaccgtcaaatgcatggcctcctgagccgagctgctggctatccgataaatcgctcatctgaaagatagaagatcttttcagcgtgatggatgtgtgaaaaataaagtaagtgatctcacccgcagtagattataaagtcgcactcgacagaatggtcagcctccttgcgaatactgaccatc

SEQ ID NO: 274568 - DNA, 426 bp, Cannabis indica
ataattagaattggcattttaatggttaaattggaaaattggcatttttgagaaaatgggattgaaaaatgacaaaatggaaaaattgcaaagtgaggcccattatccatttcatggccgaccactatgcaagtattttaccatttagattttcattattttaatgccatacaattctaacataaacctagatggctttctataaatagaaagtgatggcttcaggaaactatggacatgcatcttatttctttcagagaaaaacctgagcctcctagccgccactcttcttctcttttcttctcttcaattttgaaataccctagtgatagagtagtgcccacacacatcaagtggtatctcaatcatagtgtggaagattgtgtagaattcaatcaagaaagagaatcaacatcaaaggaagga

SEQ ID NO: 274569 - DNA, 160 bp, Cannabis indica
tcaggaaacaaacattgcatctcattcctttcagagaaaaacccgagccatcactataaacctagccgccacctctctttcttcttcttctttgattgtttcaaaaccccttagtgatagagtagtgcccacacacagcaagtggtacctcaatcatagt

SEQ ID NO: 274570 - DNA, 1016 bp, Cannabis indica
atatcacctagttgatcctagaacaaatgatcttaatcctgacacggttaggttccaatctcaagagtattatacatgttctttgatttgttaggtaagcctactttttggtcagggtgatacgtacattttggaaacatggtagtgcaattgagtgggagcgctaaacatagatatgtattcctatgatttatcagtacacagggtttaactgatatgataatctacagtgtagtttacttgcaccttggataagtgttatttcctttccagggcattggttaaagtaagattgggttggatgcatggagtatgcattggataggacagatattgaacttgaactagatatgataaacttacctttatatctattcaattcaatatcacctagttgatcctagatcaaatgatatcaatcctgagatggttaggttctaatttagttgcattatttgtgttcttaaatttgttcgttcaagttgaccaaatggttcttctcgtgacatataggttaaggacatggcagttcaattgagtgggagcactaatcatggatacagaatctatagcttctatcccagtatagaagtcaaacaatgatttccttctagcttggcttaacagagataaatggttgagtacccatttcactgattatattagttcacttgggtatcgtttataggtagctaagtgttttgaggataaaatacattgaaaggtgtagcggtaaattaatccatattcaatgtaaatcatctatagaggatcattgattattgggataatatcaaatggataatatcatagcatatctatatcgtggaacatatagagcattctatataattgagagtgcaattcaaaatctatagtggtgcaaggaggaattaataagttagagaatttacttggtaaattttagatctgcttattggaagctcggtttataggcccatggtccccatactagttgagacaaactgcttctaagattcagttaattgatttta

SEQ ID NO: 274571 - DNA, 573 bp, Cannabis indica
tcaaacaacgcttctaactcaataaaatactgaagttccacctgaaaaaaaacatcaaaaaacagcataaaactttaactgaagagaatcaaccaaccaccaaaactaagtagctagatctccttattatgtctataaatatcatcatttattacaaatatacgttgtaactaactaaaatatatatatatatatatacagtagaacctctatttaagaatactctattcaagaataacctctaatttgttataaaataatcaagtcccgatttgggccagttataaataagaataacctctaaattgtaattagttatacattttctaagtcccgtattaacaaagtatacctctatataagaataattacatcttaataaaatatatacatgtattttgtaaatttatctatgtaaaattaataattttattttaaattataatacatgtatgaaattatatttactttaaaatatttctattatgatatagtattaatgtttatttattgttattattgttacattgatattttttggttttttaatttttttttcttagtgtaactcta

SEQ ID NO: 274572 - DNA, 590 bp, Cannabis indica
tgacgtcgccagtaaaaccgtatatgctcgtcgtcacatgtcgcaggaccttctcctgcaaccccatttgtttgaaggcttggaagttcaatagattcactaaacttccattgtccacaagtatgcggtggacattatctccgccaatattggcgatgataactagtgcatcggaatgtgggtgatggacccatctcgcatcactctccataaaggtgatgtcgtcgcattccttcttaaacagtttctctggccgctcactaagattgtttacattggtgagcggcttctccttggcttctctggcatatcgctcttgcgacttgcgggagtctcctgcgatatggggccctccaatgatagttaaaatattgcgaggcgttctcgaaccactcgcattttggttttcttccttgtcatccgctcggggatgaccttcctcgttcttcttatacttatcgaattttcctctccgaatcaactcctcgatttcgtcctgcaagacccaacattctaaagtggtatgaccgatatctttatggtacttacagaactttttggggtctcttctatcgcggtttcccctgatg

SEQ ID NO: 274573 - DNA, 957 bp, Cannabis indica
cttgcttttatttgataagtggctaattgcttaattttgtgttaaaagttttgatttaccgaaattagtataaatttccaattcacccccctcttggaaacatatcttgggctaacaattggtatcagagcaagggctcaaataatttgattagatttcacaatctagagcatggcgtttccaagcaattcacacaataacatgctagaaggtttaagcacaagtagagcaccattctttgatggggtagactttccttattggaaaattagaatggaaacgtatcttcaatccattgattatgatttgtggcatattgtatgttatggtccttacattcctatgcatgttgtagatggtgtagaaactataaagaaatatgatgcatataatgaaaatgataagaagatgatgtctaagaatgctaaggctaagtatgctttaatatgtggactagatagagatatatttaaaaatattgagcatgcctcctcggctcatgacatgtggaaaatgttagaagtaactcatcaaggaactagtgccatgaaagaaactaaaattcaacttttagttactcaatatgaaaatttcaagatgttacaacatgataccattgctaacatgtatactcgtttcacaactattactaatggtttgaactctcttggcaaggtacttacacaaaaggatatggtgaccaaaattttgagaagtctcaccaaagcctaccaaggcaaagtagttgccatccaagaagccaaggacctctcaactctaccattggaagagctcattggttctctcatgaatcatgagattttcatgaatgctcaagaagaagaggaagttgataaaaagaagaagaacacaattgcattcaaatccacttcacatgatgatagtgaagctagtgaggatggtgatagtgatatggaggatataaccctactcaca

SEQ ID NO: 274574 - DNA, 644 bp, Cannabis indica
ctttttaagtctattttattatttttctttacaaaaaaataaaaagaaaaaaattcatttttctattttgattattgttgtctaaaaaatttaactaattatttaagccaacacataactaagggctagagagtaccatgaccctccatttgttaaataacgtgaagaaaataattaaaaaataaaaaaaattattcttcattattttatatgtattgatacttcataaatttctcgattagctagtttctcaaatagctctatgtcattggcaatttatagactattagaaaccaaactatgtttcaagcaaataggttatgttccttagaccatgaacaactcttaccttttcgatgaacaatactctttctttctcttttttttccgagtaaatgagtattcttttaaatcctgatttgcattattttgctgcattattatgtgaaaaattagtataatactattgtgttttaatttttttttttacctttttgaacaataaaatatatttaagtgtatctcactaatttaaagaattttaattttcacagcaattttcactaatttcaattttcaatttttacctttttatcttcttactttttttaatagctaatgtttaatatggaaagtttttagta

SEQ ID NO: 274575 - DNA, 315 bp, Cannabis indica
aaagttcaggaggcaaaaatcctaattagtcttttctatttataggcataaagcattgaggccattacacacaaaagcatgagaggctcaattactaacttaatagagaaggtaaagtagataaaaaaagttcaatactgtaatgaccggtctagtaatttggattagtaagggcaattaacactattattttattattatttgtgaaattatttaaatatggaccccaatatttagaaataaatattagagttataatttctcaattcttgaaaattttattaaactctaggggtattatttagcttatatgtg

SEQ ID NO: 274576 - DNA, 580 bp, Cannabis indica
aagctttttacccggcttgggtcgcgaaccccgtactcgtgcctaagccgaacaagaaatggcgagtctgtattgatttcacagacctcaacaaagcatgccctaaagactgttttccacttccaaggatcgatcagctcgtcgatgcaacagccgggcacgaaatattaagcttcatggatgcttattcgggctacaatcagatcaaaatgcatccgccagaccaagaacatacaagtttccgaacagacatgggtctctactgctacaaagtcatgccgtttggtctaaaaaacgccggagctacataccaaagattggtcaacaagatgtttaaagaccagatcggcaggaatatggaagtgtacgtggatgacatgctcgtcaaatccagaaaggctggggggcacatagacgacctggacgaatgtttcaaagtcctcaggaaatacaacatgaaactaaatcccttaaaatgctcctttggagtcagctcgggaaagtttctaggcttcatcgtcaatgctcgaggaattgaagccaatccagaaaaaatccaagccctcctggatatgaactc

SEQ ID NO: 274577 - DNA, 569 bp, Cannabis indica
cgaggatgtcgtcgataaacacaatcacacaaatatctagaaaatccttgaatactctattcatcaaatccatgaatgccgcatgagcattggttagtccaaacgacataaccagaaattcatagtttccatacctagtacggaaagccgtcttcggaatgtcctcctcacggattttcaactgatgataacccgagcggagatcaatcttagaaagaccgtcttcccctgaagttgatcaaacagatcatcgatcctaggtaatggatatttattcttcactgtcagcttgttcaattctctgtaatcgatgcacatcctcatagttccatctttcttcttgacgaataaaaccggggctcccgagggtgacacacaaggccgaacgaacccgatgtcaagcaacccctggagctgaatcttcaattccttaagttcagctggagccatcctatacggggctttgataaccggttccacccctggtgccaagtctatcacaaagtcaatctcccgctgaggtggtaaccctggaaattcttcgggaaaaacatctaaaaattcccgaa

SEQ ID NO: 274578 - DNA, 553 bp, Cannabis indica
ttgtgtttcatttctcctctgatgtcttgtggcgtttgagttgtttttatgttggtaaaccgtggcttgatgtagtttccaatcaatttcgttgtagcttgtcttttgtcggcaaatcttatgtttagatcacaagtgtgtatcacctttctgtcgtactttcgaatgatgaatgactttgttggcccgtttctggatgctgttagtgcccacttgcattttggatccaaacaacaaatcttgtatgttcttgcacatgattttttcactctgaattggaagttgttcctaattgcatagaaaccaagcacactctgcagtgtttctttgtctttgtatatttgtgcttcttctatttcaggatgttgcggatctgtgattagtagttcgtcataatctgtgatttctggttccttttttttgttgttttccagttgctcaaccatctcctctgccacaagttttgcatagtccatgaagtcaaaactttctcccccaaattccggtactgtagcttcaattgtatgttgttgatttgttgagtcttctgttg

SEQ ID NO: 274579 - DNA, 715 bp, Cannabis indica
tgccatgcagggaatcagtgaatcccactttttcaaaaaagttcaggaagaagggtgtacatctgaacactctttagaagacactccccttattgaacacagtgagggggtgtctgctgatctcattactcagttcgaagcactaaccattggcaatgataaaaatatgccggtgttagtaactgggacaatcagtaatgaagagaagattcaggaactgcaaaggttattggctgagagggacgaagaagtagcccgactctcaacagaattatctcatcaagttaatatgagacaaaaggagagtgagattgggcaacaatcctcgtcctcagtgccgcctgtaggcaacacacaaccgccaccacaaggtgtgcaaccaccactagctggtgtccaacctcagcaggacctaaaggctcttatcatggagggtattcgggaatatcaggctgcaacaatgcctattcttgggtatcataagccatacccggcttactatgatcaaattccatttccaccaaactacatcagacaaaagtttgaaaagtttgatggaattaatggttctcctcatgagcatttggcctatttcacctctgcatgtggtgaatctgcccaatcagatgcactattgatccggcaatttgtgcaatctctaaaagaggcagcattcacctggtatactcagttacccccaggatcgataaatact

SEQ ID NO: 274580 - DNA, 650 bp, Cannabis indica
catcacaaagggagggttaaaattcaaacggggtcctaaagatccaaatgggtgctaccacttgtggaaagttagggcatttcaagagagaatgctacttttacaagaaaagcaatgggaaacaaaattcagtatcatcaagaggaatacaaacaaatcaaacaagactaaaaatgactatacaaaatgcaaacctaagtgatggttatgatagtggagatgtctatgtggctcgcatcatcttttaaagatgattggattattgactcgggttgtacttttcacatgactaacataagtcttatttgttacgattacgagggaatctagagggggcaaagtcattcttgggaatgtattaatgtacttgatgatcttggtgttgttagcaaaattgaggcaggtgtaatcaaattggccaagggatctatgactatcatcaaaggacacaaaaattgtggtctatactacttggaaggaagccccgtagcttgctgccacaacactaaggagcatgttacagaagacactaaggctgtcctatgccatagaaggttgggacacattagtgaaagagggctacaactcatgagtaaacaaaagctacttggtaaggacaagataaccaaggtagatttttgtgaattttg

SEQ ID NO: 274581 - DNA, 484 bp, Cannabis indica
gtcttggcggtagaggaatattgactgtctttctttcaacttcttgtgtctcccagttgtatgcagcatcttcgtcaaattttacgtctcgactgattattagcttgtttgtttctaagctatagactcgataaccttttgattgagtactatagcctaagaagattcctttctcagtcttctcatcaagcttgcctcttttctcttttggaatgtgactgtagcatatgcagccgaagactttgagatgctttgctgatggcttacgtccgctccaagcttcgatcggcgtcttattctgcacggctttggttggacatcggttgagcaagtagactgcagtgcttactgcctctgcccaaaatcgttttgggagacctttctctagcagcatggctcttgctgcctccataacagtcctgtttttcctttcagatacaccattctgttctggtgcgtatccaacagtgagttggtgctccat

SEQ ID NO: 274582 - DNA, 468 bp, Cannabis indica
attgtgaagaaagagtttctagagtttatttgttaattaagagactttagttagtctaattaataaatatattaagtgaaaatattatttaataattaagttttagttattaaataattggaattggtatttaaatggttaaattggaaaattggcgtttttgagaaaatgagatgtagaaatgataaaacatcaaaattgcaaaagtggagcccattatcctatagatggccggccacacatgtaggttatttatcatttattttttcattattttaatgccaaataaacctaacctaatcctaggtggtagactataaataggtagtcatggcttcaggaaaaaagatgatgcatctcattccttcagagaaatctcaaagccttcttcctaaacctagccgccaccttctctccctcttcttcacttctgaaaaccgaagcccatagtgagtgagtgagtgccca

SEQ ID NO: 274583 - DNA, 758 bp, Cannabis indica
atatcgacaacatgtcgatgtttctttcagctctaccttgttgctgatgagtatggggacaaggggtgtctaaaattgatgcctaaaggttcaaagatagattgcaatggcctctattcaccccccccccccaattagattgcacaaccttaattttagattaaattgcagttcaacataagacttaaactgtttaaaaattatagggacttcagacttgttttcataggatatatccaagtaaatttggagaaatcattaataaaactgacatagtatttgaaactttccattgaactataaaatgatggcccccatatatctgtatgcactaactgaaaatagaaagtagttttgggaacataactactgaaatacatactatgtagtttgccatattggcatgcttgacaaaaaggaagtgaattacatttagttatagaatgtagattgctaagaacatttttaactatccttggagaagcatggcccaacctatgatgccaaacttgagcttcagagagtgttgcaccagtattatctttaatgcaactgtaagcagcaggggtagagagtggcctcttattgaattgagtggggttgacatttgtttaagggagatccaagtgatatatgccatgcttaagatgaccctgcagaagtacttggcccgaagtcttgtccttgaccatacatgcatgagaatcaaaatttaaggtaatattattatctattgtaagtttagaaatgcttaacag

SEQ ID NO: 274584 - DNA, 504 bp, Cannabis indica
ttgaaatttgtctgagaccgtagcttttgaatttttcgagcagatcatgtattttgctctggtatgctatcatcttttctccccgagcctcgtattctccagatacatgatttaccaccatctgtgaatcactgcagacttcaatgtgttcggctttcatctcccgggctagttttagaccagcaatcagagcttcatactcagcttcgttattagatgctttgaacccaaactttactgcagcgtgtaggtgttgccccccaggcgtgacaagggcaattcgtgcaccagatagctggtctgtagctgacccgtctacacgtggtttccaggtcggcttatcttcactattacttggctgaggtgtttgtaccggctcggggttgctttttggtacgctttcttccttgcctgtgcattctaccacaaagtctgctaaggcttgacctttgattgctgtttggggttggaaagtaatttcgtactggcccaactccaccgccc

SEQ ID NO: 274585 - DNA, 910 bp, Cannabis indica
taataggggtgcggggtttcttttctacccccttgaactcgaatgtctctccatcttctggtgtgaaaacaactttcttttgcttgcagtcaattgatgctccatatttggtagaaaatccatcgccaagattacatcaaaatcaaataaatctaatacaatcaggtctacaaataattccctaccatctatcctgacaggtatacccctaagccaacttctagagattacaacctccccagatggtaacatggtcccaaaccccacagtaaataattcactcggtgcatttatatgatttacaattgtgctagcaataaaggaatgagttgcaccagaatcaaacaaaactttacaagtggtgttggccataggaatctgacctgatacaaccgaaggactggcctcagcttctgcttgagtgatggcaaaaactctggctggaacatacttgtcatctttcttgggttctgctctgttcccagtctgtccccacagtgggcaattgcgtttgatgtgtccttcttttccacatttgtagcatgcttttgcgcgacactcgccgagatgacgtttggtacatttagggcattctggaatgtttcgcccactgctgccattaaatcgttggtcgttatcacttttgtacctcttgtcttgacttggctgcccggactggtcctgtccccgtttcttgtggtcattagaattggctccacctttcttagattctctcctggcagcattttccttccaaattttgttttcactccgctcagccgtaagagccatttcgacaacttgagcataactgaattgaccccttgacacaatttccacatctcgagcaaccattggtttcaggccttccacaaatcgatgtgctcgcactctatcagtaggtaccaga

SEQ ID NO: 274586 - DNA, 652 bp, Cannabis indica
ccccaaataacataaaaacgagaaaatctaaggttcctgaaaatcatccaaccggcagaccggttgcccaaccgcaattctggttctgggaatttcagaaccccattcggaattccggatgcacaaccagaattccggttcctcgcagactaaaatcaaaaattcataactccatcaattcgaacccaaagcatatcaaatcttccagacctgttctagatacccctaggaacaaatccaaagcataaaaaccgagcttcaaccacagaaactcatttcaccattggaggttcaagattgagttctaaaactcaaaacttgactaatcctccaaacagccactaaatcaagcataactcaacatatttcaacatcataaaactccagaaaacacatttaaacagcagcaacaactacatcatttttctttgaaaactaaagcttttgaaccaaaacttctcaaactagaacaagggccactaacatgcatttccgcctatctaatccaatcaattcaagcattttaatcatagaaacaacaacaacaactaacaatagcaacaacatcaaaaaccatacatgcattacttattttttcatcattttcaacaaacttaaagaagaaatgattagaagctaacctagcttgatt

SEQ ID NO: 274587 - DNA, 648 bp, Cannabis indica
gtaaaataaatttccaacacctcctccatctggacggccgaatcctgttcgccgctgggcaaagtggcgagccacgccacttgaggatcagttgcgtcagccaaacgcgtggttttctttgtacgagccatcattctatggttgggtacagggctagaagaatgtccttcactagaggaaggaggactagaatgaagacgaggatgatccttgtgcagaagttgaagcaaatcctggtcgatccgatgtccgagtttccaagactcacctgagttcatctacaaaagacaacacacaagatgagtgtttggtcggaatatcgaacaataaacaagcaaatatgccggccaggagtactcaacagattaaagaacgactatgttcaaagaaaagtcataactcaagaagtcgaaaattttcttgagttagggcaaaaaagttcatgaagcttagaataagcaagatgaaagaaggacgttatgcagttcagaaacaagcattatggctgtaaacctgcatgaagacatgataaagaagaatcacagaggtttctaagcctagggtttcctagacatttgtctacaacacagtagaaagagcattcaaagtgtaaacatgcaaagataaacataaaggaaatcagaaact

SEQ ID NO: 274588 - DNA, 592 bp, Cannabis indica
gattgcaccatcaacattaacttaatcataggaaattgaggggcggtccaatgctctagaacttcaacatccgaaccattaacatcatgagtaggaacggtgttcttatgagcattataccaatcaataaagttcaatttagctaatgtcacaacctcactaacctcgggtcttttggaattccaaactaactcatttcgatgcttccaaatggcccatactatcatagaagcctcaagcttctcggacgccgtccacacccgaaggccctcttcaaaccaggctgcaaatgtcatggcagcagtagccacggtaggaacatgagacaaactccaacaaccttgcgcaaaggagcatcgaacaaggacatggagagaggtttctggagccgagttacaaaaaggacactgggtatcgatgggcacatgtttggttgaaagctgaaatctcgttggaagacaattagagtttactcgccatagaaaatctagcacctttggaggaagtttcagctgccataattctttccaaaagcccgaattaggctccatagtgttgcttcctttgagtacttgttgcaaagcgtaagcac

SEQ ID NO: 274589 - DNA, 873 bp, Cannabis indica
ttcttttgcagccagtatggcagcaatgtagttacttcctgttgaacacatcaacaaagtccaaccaggtcatagttgttatgttgcgactctgtcttactacttcccaccagatccgtgcatcctttttaagtaggctggcagcacaggatactctttccctatcattgaggtccatatattccaatatggactccactgagcgcaaccattcctcagcttcaagtgagtccgagctcccattgaatattggtggttgttgtttcctgaatcgctcgtacacaggttcaaaacgttgtattggttctggattcaatgcagctggttgaagagctaggtttctaacgggtggattttgattccggcgtaactcctcattctgagctcgtagccttgcaatttcttgagttagctcctcacgtatacgagcgttttctcggagtatctcagcttgagcattgggaggtgcttgttgttgttcgagtgctacttcatctaccggtgctaccgatgctccttgtctacctcccctaccgctttggcctccacgtcggcctccgcgtcgaccatcacctcggcctccgccccttgcgggtgctggagctgcatccacgtggatgtttctattgccgttgattcgaactgatcttcttggagacattatttcctaatgttccttgtttgtttctaagaatctctaaaagaagataaacttaaataagatatcactattttcaaaaaaaatgcccatacttacataactagttcacaaataatttctatttattcaaagataaaataaataatcacataaaataataaaacacacattttttttttttggttacttaaagaaaatttctatgattttct

SEQ ID NO: 274590 - DNA, 517 bp, Cannabis indica
atagatgaaagttcaggaggcattatttataacatatcaaagtttgaggggcacgatttggtagatatcaaagtctgggaagcatagtttgttagaaataattggggtcacaattgtatatataaaatgtgtgttgggtcatcaaataaataagtcaaatttatgtggtctattttggaataaagtttatgacttaagggcatgattgtcatgattttaatatgtggataccaattagacaatttctatattgatgaggggccaaatagaaatagtcaataaatattaccaacaggtttgtctgttggtaatataacgggtaatggtccccatttgcatcgtatcttttcactcttgtatccccatcaccaagagcaaaagtttacagagaaaggttttgatgcaaattggaagatcataccaataaagatcatttaaaggtcgattctatggactccggtacgcttccgctattctttaatctcattgtttgattctcttgaattaattagggcta

SEQ ID NO: 274591 - DNA, 573 bp, Cannabis indica
aagcccaacgactaatggaagaagtccatgaaggtttttgtggtaatcacgctggggggccaagcttatccaagaaggtactgaggcaaggattcttctggccaatcatgatagaagactccatggagtatgttcgaaggtgtgaaaaatgtcaaaagtttgcaaaaataccaagggctccacccaacgagctaacgcaaatgcagagtccatggcccttcgctatttggggtatagacttgatcggtcagttgcctaagggcaaaggaggagtacaatatgcggtagtagcagtcgattacttcacaaagtggacagaagccgaaccactagcaactataacatccaagaaggtgcttgactttgtggtcaagaacattatatgtaggtttggattaccccataaattggtatctgacaacggtacccagtttgacagtgtcctgttcacaaatttctgcattaagcatggcatagtaaagagcttctcggcagtctcgcacccccagtcaaacgggcaggtagaggcggtgaataagacttaaaaagacaccttgaagaaaagactcgaag

SEQ ID NO: 274592 - DNA, 681 bp, Cannabis indica
ggtattgagattaccacatcctctgtgggaataatcgcaggattggtaaaaggaaggtgcgccctctgggtcggtttaggtcgcaaaaacgcaagtcgcagcaggtttagcctcgtaaaggtagtgaagtctgatttggtaactctcgaaatcagatcctcgcacgcgaaaggctcgttcagctgggtgtcatcgaccgagtctgtcccgctcccttccgcctcttcttcatcctcgcctgattcgcgagctggggccgtccagtcgtcgtccatctcctcgacctcgacgtcaggagcatgcctcgaatgaataaggtagtcgcgggccgacaccgtagactcgctgtctcgaatatcgatggtcccaggttcagcgagttcctgcaccattctctcgatgtctgcagaagacatcgggcctagctctataggtgcgacctcctcttctgaaatcgaagctgggagaaaactatcttcctcctggtcatcgtcgccatcgaatgcatggcctcccgagccgagcagttggctatccgacaggtcgctcatctgaaagatagaagatcttttcagcgtgatgaatgtgtgaaaacaaaataagtgatctcacccgcattaaaactataaagtcgcacttgatagaatggtcagcatccttacgaatgctgaccaccccatc

SEQ ID NO: 274593 - DNA, 623 bp, Cannabis indica
aatgctggacctagatctggaccgatatcctggccccgaccaaaactaggacccgcacccaggaccccaacttagacctggacgcgaacctagaaccaaatcggggtccacacctggacacaaacccggacaaagactcggacccgaactcaaacccacacctagaatcagacccaaacaagaccaggatcagaacaaaggactcagacccagaactgaatccagactcagatcgggattggaaattgggaattgggcccaacctagaccaagaccaaaaacgtgaacccacacctggagcctgatctggacctagactgaaatccatacagaatccaaagtcagaccagaactcgaactccgatctgaactcaaacttaaactcgaactaagaatcgcaaatggaaccaaacaaggaacaagactagggacacagaactagggtcaggacctagaaccgcaccccagtctcgatcccgaacccaaactcagaaatgcgacctgggacctgaaccagaaccagaccgagacaagtgacagtgatccagatcttgacttaggattcgggtaacgggagctggaacagaccagtagtcgatgtctagatcgtggaagtcagaact

SEQ ID NO: 274594 - DNA, 559 bp, Cannabis indica
agttcaacatagaagagatcttcatcaaatggctcaatcaagctcacttgaagtgttgatgatggagttcatggctaaaaatgatgccttaattcaaagccaagcttcatccttgaggaaattggagaaccaatttgagcttttggtgaatgagttgcatgataaatcccatgaaactttgggtattgatatggaaaattcaagggagaaagaagaaagtgaaaatgtcattttgaggaatggtaatgagttggagatacttggggaaaattttgagcaattacaagagctcacttcaatccaaagtagtgaaaaaaaagataaggaagcaagcattccaagttggtcaacatttattgctgctcataatgctgtagcattatcacagcaaaactgcccagtttttgaaaaaattcagcaagagcatttttgcattcctcaagtcaaagagcccatggtaatggaatactatgtttatgaggatcctttttggccattacctcctcctccaccattggcatggtaccttggcatccatcatgtgcattcatcgaattca

SEQ ID NO: 274595 - DNA, 646 bp, Cannabis indica
actaaaaatattttcagtaaaaaacaaaaaatattttacaacatacattgcaatttctatacaatcatcaaataagcacataaaccatcatgaaaccatccaaatcaacataaacatcgttttaaatccatattttatgaaagtaaatcattaccatggctctgaggccagttgttagattatattttaccaggatctagatttactaccatgtatgttatttaacatcctaaatatgaatttctaaaacaatataatttaaacacatataaagtttgaaaaaccttacagtggttgcagcgcaatttaatgactccttccgctcagatctttaacccttgtatcctttctgtagcagagtatcaccaaaatctgagaccgattctccttctcttgaatttggattcttcagagtcttacacattatgattgagtaccacttgatgtgtgtgggcacttactttatcactatagggttcgaaattgaaaagagaaagagagatagaaggattctaaattggtagagaagatggttcaagtttttgactgaatgaaagtgtttgcatcatcttttcctttgaggccatcactacctatttataggaattcacctagggttaggttagaattatttgacattaaaata

SEQ ID NO: 274596 - DNA, 582 bp, Cannabis indica
ccattgtctgaaatgagtttatgcggaatgccaaaacgacaaatgatggaggtatagacaaactcgcgcaatttcgttgctgtgatggttgcgagtgctttggcttcggcccacttcgtgaagtaatcaactgcgactacagcatatttgactccgccttttcctttgggtaactcgccgattaaatcaattccccatattgcaaagggccatggacttgtgatagaatggaggttactcggaggctggtgggtgtaagtggctattcgctgacatctgtcacacctctttgcaaacgcgagagcatcttgtcgcaatgttggccagtaatacccttgccgcataatttttaaagcaagggaattacctccggtatgattgccacaaatcccctcgtgtacttcacgaagtatgtaaccacagtcctctccactgatacatttgagaagcggttgactaaaacttctgcgatacaacctttggtcatatattacataacgggctgctcgctgtcgcaattttctcgcctctactttatcatcgggtaagagccccttctcaagatatgcgaggataggagtc

SEQ ID NO: 274597 - DNA, 494 bp, Cannabis indica
aatctaaggtaagccctagtggttctttctcttctttttcaagttttgaagtagttaaaatagtgaaatggtgttttaggagctgttagagtttgttgatgatttggtttgaattctagggttaggttgagtagaatttaggccatagcagctggttttgattggtgttaatgattttatgcaattttaagttttgaatgcaaagctttaagctttaatggcaagttgatatttattgtgtttttctgtgaaatactggctgggttttattgagtatgccttgattaggagctctggagagtttggtatcatttggtggaaaattgagcaaagaaggaagtgttttgggaatactggtgcaaaccggcaaaccggtttgccatgccccaaaaaccggtttgccggttttggcaggattcccgaacacttcgttttctcaatttttgtccatttcagtacctcggttgggtgtttccccatttccagagttagaa

SEQ ID NO: 274598 - DNA, 740 bp, Cannabis indica
attcctccttgaatcctaccattttatgcttgcagtgaaccatttgcttatcttctagtaaaaccttcacttccaccattttgtccttccaaaataagaagattctaaacgagatctcctgactagaatagaaattccaattcggattattcctaaccaaaatctcaactttgtcatggtgaatttcggtctcaaagagagctccagaacccactttattcatcttgcaacattcaaataactcacgctgtttctccactttattcaaccctctcacgttccaaccaataatattattgttatccattagatgggattgatatcatttccccctcaatctccttcaacacctcatagccattactaactttagcctcctgttgactcgtattcaccatttttgagccctttctcctgggtgtaacccaattttcaacttgagtttgtgaaccattcttctgcttattcattttcagccgagattgaacctctagctcttcaagcaaaagtcaaactcaatctcaagcagcttgtactttttctcaatacattggtattatggctgagatatttcagagattgcgtgaatgctttccaccgggacaggacacttctgatctgtatgacccacgatttgacagattcctccaacaatatttacctacccaaccttagggtagtgcaacatgtccaaggccgcaacaacaacctttacagcagactcagcaatctcctaatgt

SEQ ID NO: 274599 - DNA, 1627 bp, Cannabis indica
aggtttgaagaaacacttctggggagaagctttatatactgcatgttatctaattaatagaagtccaaacagaaagattgatttaaaaacccctgaagaactgtggtctggtaaaccaccttctctgtcacacttaaaatatttgggtgtacagcttatgctcacaatgtacaagataaactagagaaaagatcaatcaaatgtatctttctaggctatcctaatggagtcaaaggttatagactctattcccttgaaaccaataaaattgtaactagtagagatgtaatttttaatgaaattgattttccatttaaaagaaatgaggaaggtgtgctctctgatgtttcaggtaaacaaggaagtgatcaaatcagcactcaaattgagctggaaagagcagtccctgaccaagaaacaacagcagaaaattcagaggaatctgaagtagatccagatgatggtgctgagactttagatgattaccaattggctcgagatcgaactaggagagaaatcagacctcctgctaagtatgctgaagcagacattattgcctatgctctttccatgacaatggagtctcaagacaaagtgccaaagacatatcttgaagctataaacagcaagcaagccaagaaatggaatgctgctatgaattctgaaatgcagtcattaaagaaaaacaaaacctggattgttgttcttaaaccagaagggcagaaagtaattggttgtaaatggattttcagacataaagaaggattgacaaatgatgagcctatactgtacaaagcaaggttggtggcacaaggtttcactcaagttgaaggtgttgattactctgagattttttccccagtagttaaaatgaagacaatcaggatgatgttagcacttgcagttcagtttgattggaatatagaacaaatggatgtgaaaactgcattcctaaatggaaggcttgaagaaactatctacatgaagcaacctgatggattcaaggtggaatccaaagatggtgaacttgtatgtttactgaagagatctctatatggtttaaagcagtctcctcgacaatggtacaagaaattcgattcagttttgactaaagttggttactcaaggtctaaatatgacacatgcctctatttcacaaatttaaacactcaagctgcaacattcttgttagtgtatgttgatgatatgttaatcatgggaaaggatcaaaatcaaattgaaaagtttaagtatgttcttaaaagtgaatttgaaatgaaggacttaggggtggctaagagaattttgggagtcgagatacccagagataggaagaatcaaaagatgctattaactcaaggcaagtacattgaaactgttttatggaaattcaaaatgaatgactcaaaagaaaccaaagttccccttgttggacactttgtgttctctaccaatcaatctcccaaagatgacaaagaaagaaaacaaatgatggaaataccatatggtaaagcaattgggagtgtcatgtatgctatgattagcactaggcctgacattgcatatgttgttagcactctcagcagatacatgtcaaatcctggggaagatattggaaaggagtcaa

SEQ ID NO: 274600 - DNA, 653 bp, Cannabis indica
ctctttatcagaaggtagggttaacactggagctgtgattaatctctatttcagctcctgaaaacttgcttcacacttatccatccacacaaaacactgattctttttagtgagctcggttaagggtgttgaaattttagagaacccttctacaaaccgacaacaataaacagccagacccaagaaacttctaacttctgtaactgttttcggtctcgaccaatccctgacggattctatctttctcaaatccaccttgacctcgtctttgctaacaatgtgcccaagaaaggacacctgagatagccaaaattcgcaactcttgaatttggcgtacaacttatgttatcaaagtcattgtacaactatcacaagatgttgctcatgctcctcttctaattgagagtaaacaaagatgtcatcgataaatacaataatacaaatatcgaggaaatccttgaataccctaattcatcaggtccataaaagctacaggagcattggttagtccaaaagacataaccagaaattcataactgcccattacctagtacagtatgccgtctctagaatgtccttctctcagattctcaactgatgatagcccgatcggagataatctttgagaagactgtctttccttgaagttgatc

SEQ ID NO: 274601 - DNA, 618 bp, Cannabis indica
aatcaatactggctgaatacttgtacaagaaatccattcacagtataatatcaaaatctgctaaactcatttctattaagtcagcactgaactccctatcctcgattctgatcggcatatacctaatccaccttttggagataactaactctctgccacgtaatagggttccaaaccctagttcataactatcgtgcggtctatccaacttactaaaaattctggctgccacatacgaatgagtggccccagagtcaaacaacaaagagaaataagagttgttgactgagagctgacctattactactgaggggctggcttctgcatcagcctgagttatcgtgaacacccttgctggagtaggtttcactgcagtctttggtgcttcaatcttgagttagggacaatcccttttacaatgccctgacaaaccgtaatgaaaacacccctgtcctctacactcccgtagatggttccttttacaattggggcactctcggtaagtgtatcgagtttcggtgccactctgacgattaccttgaccctggttcccccgaaacctcttgttttgaccagagccactggttgcagtaaatgcctttcttttttgatctgtgg

SEQ ID NO: 274602 - DNA, 556 bp, Cannabis indica
ctagcctcgagtcactctccacgataatatacttaagctggagctccatcgcaacggacatcgccaagcagcaggccgcagcttctccacaaagagcatttgagaagtccaaccgagacgtgtgaacactcaccacccttcccaaatgattccttgcaacaacagctgtacacatactctctaagcccacacgaacatcacagttaagtttgatccactccagaggtggtgggatccaactatccctcgccaatggcgaaggactaggcacaaaggtagtatgaatctctgcaaaagaagagcaaataatgtcaatagatttcaaaatatccggagggttattgttgtgaaccgcatcattacgcatccgccagatattgtcaacaacaatagacgcatagagaaaaacatcctcagccctaacgcctctattattaaggctccatatgaacttcacccagtcccaaactcgaataccagaatcactcactggaaaaataccccaaggtgacgaacgccacaagtgcatcgccacatcacaagttagaaagaggtg

SEQ ID NO: 274603 - DNA, 816 bp, Cannabis indica
tatccatatcaagtgtagtatgttagaattctccctgtaatatgatctgacaagttgtattcaatacaaactttcctccaccattacatttccttaatcacaaaatccttgatattgtgaaattcctctctatatgcctactcctctagggatactggattctttactttttttgcaactacttttgtgttagttagaaagtaacactagtagttaataaattattggtacaatgccaaaaactgtatagaacttttcataggctgaataagtatctttcctacaactttaacattcagtctcactggtagagttagagacttcagatatgcatacgtgtttacatgtttagtgtgatagtcagtagtcccatgatccgtaaggagaaataccgggtaagctgtgcaatcccacatcacctagggaaggtcaagtgtgatgattctgaggctgtgtaggtatgggactatatagttgaagaaggcttaaatggattgattggtactacctatatcaataaggtgcatcttattttctagtagtctatcacgaaagaactctacggttaagcgtgcttgacttgtggtaattttaagatgggtgacatcttgagaaacttcccaagaagtgtgcaagtgaggacaaaagtgcgctggaaacactcgtggtggtttgtaaggtcaatcatcagcccatgtaacagccagactgacctaatcgtgtataagagctattattccgtgagtgtaagggcccaatggaggcttgaagcagagatgttacaaatggtatcaaagccttgacccaactggaagt

SEQ ID NO: 274604 - DNA, 729 bp, Cannabis indica
tcaggtttataaaatttcctgatcatttcaattttttcctgttttcctcaatttataacacattctcaattatgtagaataaaaaaataggaagaggttcatgaagaaattgtattaccttcaattctttctttgattcgattatgggtgagtttcaatgatttctcaatgtccttctcttcgattcctctcctttgaactcgttgggtttttgattgtaggttgtttttgcattttttgtacagcaatggaggttgaataccttttttttttttcctatatggatttttcggattttgattggtttttcgttgagatctacatcttgttcagatctgatttccttggtttttgaaaaaaaatggtggagatttggttgtttggggtttctcggctgggtcacgaagaaggaggtctctcctccgttttttgtggctggctggtatttttgtaaatagaaagttttgttttctatttatgtttatttttcctttttaggttataaatgtaaattgcttccctttttagtttattatagaaaaaatccctaaaaaatatggtattattagaaagaatatttctatatctatatgttattaattatacttggcgaaagagtagtaacttgcttgtggtgcaccataaaagacaactctaagtaattaataataaaaccaagaaaaagagaaaaaaaatggtaaagtaacatacctataaagcttgaataaa

SEQ ID NO: 274605 - DNA, 628 bp, Cannabis indica
tcccaccagactaacgcgtcctcttgaaactggaaggtggcacacaccaccctgtcatttccggtgacacccataaagttcagtatcctggtgatcaccgttagccactgttcggctttcatgacatctggacctcctagaaaaaccggaggtgcttgcttccagaacctttcatacaggggttccattctgttcgccgctaccactatctcggcctgagcaacaggggcaggtgccactggaacttctggcaccggcactgcaggagcaccctgctgcctcaatctctgaatctcttgatcttgctcctctattctggcttgcatttcagcaaacctagtttcccaattctgggcttcctgattggcttgagcagcctgggcggcctgtggcggattatcatcaccccgaccacgagccctgcccctgggacctttaccacgacccttagcatgcgggggaaactgagctccctgaccctgatttgacctgactgagttgccctgactcctggtctttcgcctggcgtccatctagtctgaacagcttacgaaaccaatagttggcacatcaggtcatgatcaacgagagcttactaatgccgcttaatttggaaattaaaaacatg

SEQ ID NO: 274606 - DNA, 525 bp, Cannabis indica
ttttagcgcttggtacctcgcggggtccattttgcggcgcttttgtcggacacctcgcacctcggggtcaatgttcaagcgatgacacatgacttgcggagatatcccgaccatatctgaatgtttccaagcaaaagcatcaagattttgtttgagaaaagtcgttagttattctcgctgctgaaaagtcaatttagaaccaattttaaaaactttactattatctacggggtctataggtacctcgatagtgtcatgatcgaggatccttgggtctagatccggtccatctgtatgtggaacctcttcgatcctaaggacttcatggcgaggaggcggcgcttctaataaatagatgacattaattgacttcttttccgcgagtttaactgctgcattgtagcattcttgcgagtctgactggactcctcgcacagagcctactccagcgggagtagggtacttcattgtgagatgatagatggatgttacgatcttcatctccttcaagattggtcgaccaat

SEQ ID NO: 274607 - DNA, 684 bp, Cannabis indica
cgggaagaagaaaaaactcagcatcccgtgtactatgtcagcaagcgcatgataggggccgaaacaagatacccggtcattgaaaaactggtgttttgcctcctgatggcgtcaaggaagttgaggccatacttccaagcccatccgatcaaaattctgaccaatcacccgctccggcaggtcctccaaaaacctgaagcatccggaaggctcctcaagtgggcaatggagctaagtcaattcgacttgcactacataccccgaatttctataaaaggccaagccttggcggacttcattactgaatgcaacgaagccgaggcaaccgcgaatacgccggtaccgccaatccccacatggagggtatttgtagacggagcctccaatgagaacggttccggagccggagtggctatgatatcaccaactggactacgactccaggcggccctacggtttgacttcgcagcttcaaacaatgaggccgaatatgaagccttgatagcagggctgaaattagcaaaagctgtgggagccaaaagagtggaagtctacagtgactcccaactggtcgtaaaccaggtatccggagaataccaaacccgcggcgagcggatggccgcatacgtaacaatagtccgagagttgctccacgagttcacggactacaaaatagaaagaatc

SEQ ID NO: 274608 - DNA, 560 bp, Cannabis indica
aggtagcagtatacccccttatcggtcctgaagctagtgcactcttggtccgccgtgtgcatctttatttggttatacccggcgtaggcgtccatgaaggatagtaatttgaatccggaagtggcatctaccatctggtcgatcctgggcagcgggaagcagtccttcggacaagctttgtttagatcggtgaaatctatacaaactcgccaagttccgttcggcttgggcaccaggaccggattggctagccattccggatagtatacgtcgcggatcatgctgtttgtcagaagcttgtccacctctttctctagggcctcggcctttaccgagtcgagggggcgtcgcttttgttggactggtggcatgtccgggttgacgttgaggacgtgggtgatgacatggggacttatgccggtcatgtcctcttggcgccatgcaaaaatgtcgatggcgcccttcagtgtttttattattttttctttttcctccggatctaggctctttcccagccggagtactttggtggagtcgaggtcgcacactgatatttcctc

SEQ ID NO: 274609 - DNA, 576 bp, Cannabis indica
gtgatattaccctagaaagtatgaattggtgctatcatagcgacacaaacattgtatcgattcagcaatataggcattgtactggttaagaatgatatcatggccaattatatttttggatgctactgatgctatcatagtggcacgaacatagtgccggtcctgcagtacgatcatagtactggtaggtgggtgatatcatggtcaatagcacaaccagttagtaacgttcttactcatctgttaagccttgtaaataggtgtatgggcacctagatacaagtcggtattatatgatatattatatgcttttcttattgagtttgtcgactcacagttctacttttatgtgtaggtaaaggaaaggcgaaaactgaacaggagtgagcctgagctgggatgaagttgtacatgtcgtggtggcgcgacatggagggttcggtctcgggaaatctggggttatattttgtagtcgctgtgcgacctgaaaattgtattttgatatattttgtataaagttagaaacgagatcccggtatttgtaaataattatgtacattataagtttaatattta

SEQ ID NO: 274610 - DNA, 601 bp, Cannabis indica
tgcccgtagctcaccaacggggtcttaacatataattaatcaaataaattcgcatatattgaactatacaataatataattcctcaattattcataattatctaattagggatttgctaatccatttcttatttctagggtattacacctatcaccaatatcatgcacttctagccaagaggtgatatcacatcactccatttcaaattggtgcatcctcaaccgataatagccaatttctcaatattttcagggatattgcctagaaataaggagattttaatagataattattttcttgtaatattttattctttaaaaagagtggtatacgaaattcgttagtgagatacaccgacatgtgggggatctctaacaaaccctacaacctatatatagatcaagtaggaggctaagaaggagacttttttggaccttcttttagactcttcttcttttttttttttgtaactcactcttcaaaacattctccttcaaacttacttgacggcagccaagaacaccacacttattccttcatctttttacttgagtccaccatacgaagttgacaccatgacctcaaaacactattgataca

SEQ ID NO: 274611 - DNA, 641 bp, Cannabis indica
tgaccaatgtcctttgtacttaagaattttttaggatccctccggtcgcgattccccctgatggggggcggcttcttgaagactccgtttctttcttcaatcgcgtagatatggtctcgagggactgcgagttcagtataattgacgaagcgaggtccacccttcctttttggcgaggactccttctttggaggagacttagccagcttcggacttcgctgtcttcgcgggctgcgtcttctcgggcttcggcccctggagttcttccctcgcggactgcgagatcgtgaccgcggtatgggtgaccggcgcttgtccttccccttctgctagagaattctcaattcttttgtgaggttcggccatggcgaagaactctactaaggactcgggccttcgagcttgtagttccttccaaaagtcggtcctcgacaagatacctgttattaacatgcaaacaagcgaagactcgggggccttctcgacctttgttacttctgcgttaaaacgtttgaaatagtcttgtaaagactcaccaggttcttgtttgatgttggccaaagtcgtatagggtggcctatacgtcattgtggcctggaaatgcgtgaggaataggtcgacgaaggtttcccacgtcgata

SEQ ID NO: 274612 - DNA, 658 bp, Cannabis indica
gtgttcttagagaaagctactgctgcagaattatcgcaatataatttcagcggcctcgtgataaaggctacaacatctagtgctgaaatgaaattccgcagccatattgcttgacaagtagcctcataacacgccatatactctgcctctatcgtggatgaagctgtgagtgtctgcttgacacttttccacgatacagctcctccagccatcatattaatgtagcctgaagtggaccttattatcgtccacgcatcccacacaatcggcgtcactgaacccaactatatccagagtgtcagctcgctgataggtcaacatatgatccttagtaccctgaagatactgcatgacctttttagccgatttccaatggctaagtccgggatcactcaagtacctacgcaacacgccaacaacaacagcaatatcagggcgtgtgcatacttgagcatacataaggctaccaaccagtgacgcataaggaacaactttcatttcatctctctctctttatcattttgtggacattgggcctttgagaacttgtcacccttcactatcggtgccttcccagaagaacatgaatgcatgttgaatcttttcaagatccgatcaatgtgatcaatgtaagttttctgagacaaacgaagaatac

SEQ ID NO: 274613 - DNA, 538 bp, Cannabis indica
ggaggaaattacattctatacctactttactttatttgttttaatttttacctttatttctatattctttaagatatacccacttttatagatgatgttcccattagattattggagaacattgtcccacatggattaaatgtaaaagtattgaaccatatataaaaaacatgggctactccactcatagccaattggttttgagatggaaccacatgattctcaacatggtatcagagccatatccctagcgggctttcggatccacacttagtccagatgattagctagccgtcacgagatccaagccaccgatcttgaggggggatattggagaacattgtcccacatggactactccactcatagccaattggttttgagatggaaccccatgattctcaacatagattaatgtgaaatatgtgttagacttaagtggaaggtaaggatatattggggaatctactcacaaaagtgagtactttttaatgaaatataatatgagggtattttttattaatgaatacaaaaaaga

SEQ ID NO: 274614 - DNA, 898 bp, Cannabis indica
agtctcgggtcctggtctggttccagtttcgggtccaggttcccaatgcacggtcctaggtccaagtctcggtctagggtcgagtcttaaggcccaatcccagttccagggctcgagtcttggtcccggttttggggctcaatgtctcgggtctgggtaccccatctaggtttgggtcctacgtcctagtcctggtctacgttcacactctacttcggatcccaggtcttgttctgactcttggtcccagtttgggttagtgtttgggtcgagttatggtccatggtcttggtcctgatcctggtcctggtcctggtccaattcttgtttcgggtctaggttcgggtccaagttagggttggggttcgagtcctggtctgagtttgggtcagggtctgggtccgggtctgggtccgggtctgggtccaagtctaggtctaggtccgggtctgagtccaagtccgagtccgagtttgggttcgagtcctgagttctaatctcggtctaggtcttagtcttgatccaggtccaagtctcaggctccaatcttggtttggctttgggtctgggtataggtctggattcaggtctgtgttcttggtctggatcccagtctgggtccgggtcagagtctgggtctcagtgtaggtcccgagtttgggtgtcattttgtgttcgagtttgggtataggttttgtcccagtctgggtccaggtttcgattcttttactcgatcatgttttaggtctgggtctaggtcccagtctggatcccaagtctttggtcccgatctgggtctgagtccaggtcatggtctaggttcagttcctaggtcccatgtctcgaatcgggtacagcacctgatcagggtttttttatggttctagtcccaagtcct

SEQ ID NO: 274615 - DNA, 557 bp, Cannabis indica
ttataacaatggataattaatagcgtatctatatcgtggaacatatagagcgttttatatgactaagagtgtaattccaagttctaagtgtggattcaataaggaattaattagactatgtctactttatgatttttcactaagcaatagcgaaattgtaaagaaaagagattctaggttttatttattaaataagagactttatatgaaaatattatttaataattaattttagttattaaataataggaattggtatttaagtggttaaattggaaaattggcatttttgagaaattgggatggaaaaatgacaaaatggcaaaattgcaaagtgggcccaatccaacatcctatggccggccacactaagcatttaccatttatttttctattattttaatgtcaaataaatctaacctaaacctagctggttacctataaataggtagtgatggcttcaggaaaaagatgatgcatctcattccttcagagaaaatcttctagccgccaccttctctcttcttttcttcttcaattttgaaatccttgagtga

SEQ ID NO: 274616 - DNA, 786 bp, Cannabis indica
attgccaaacccgattacacacctcaagtgaaaaagaccaaagccaaagttccaacacaaatgacttgtcaaaagataatgatcaaattcttccttccattccaaaagctccttttccacaaagattacttccactcaaaaaaggcaaccaatatagtgacatcttagaagtgttcaaacaagtaagtatcaacatcccattcttagatgccattaaacaaattcctgcctactccaaattcttgaaagacctttgcactgttaaaagaaacactaatgttccaaaaaaggcatttttaactgaacaagttagctccataattcaatataaaagccttgtgaaatataaagatcctggttgtccaacaatttcatgcatcattggtgatcattttattaacaaagctttacttgatttaggagctagtgtgaatttattgccttattctgtttataagcaacttggtctaggagaattaaaaccaacttctataacacttcaattagctgatcgttctgtgaaaattcctagaggtattatagaagatgttttaattaaagtggataagttctattttcctgttgatttcattgttcttgatactcaacctgttgaaaatgctcatgctcaaatacccatcattttaggtagaccatttttagctacatctaatgcaattatcaactgtcgtaatggtgtattgaaattatcttttggaaacatgactgttgaattgaatgtttttaatgttgctaaatctgttgagtgtgaggaaatacatgaag

SEQ ID NO: 274617 - DNA, 612 bp, Cannabis indica
aaatatgtcgaccaggagtactcaacagattaaagaacggctatgtctgaagaaaagtcagaactcaaggagtcaaaaagttttcttaagttagggcaaaagggttcgtgaagcttagaataagcaagatgaaagacagacgcaatgttgttcagagagaagctctatggctgtaaacccacatgaagacatgataaagaagtgttgcagaagtttctaaaccctagggtttcctaagcgttctttctacagcatagttgcattcagcgtgtaaacatgcaaagaaaagcataaaggaaataagaaacttactcaaagattcgaatatctgggttcgagcaacgtcaagcaagccagcagttgtatgaaggcactacgacaactctgaagccagaaaactctcttttcgctctgaagtttacttagcaacgaagggtgataaaatgggttatgtgccagtactatgggtatttataggcaaggaggtaactacatcaaaaggaacctcagacgcctcagcttcccgcctcaaaagcgaatatgggaaatcaaaagtaatcaagagcaaccgtcagccgtggagagagaaaataggatttcgaaatattaatt

SEQ ID NO: 274618 - DNA, 568 bp, Cannabis indica
ttgagattttgagttcgagtttgcgtttgagtttgggtcggtgttcgagtcttggcctgagtttgggtacgagtccggatttcagtcaaggtctagatcaggctccgggtgtgggttcgcgtcctgggtcttggtctaggttgggtccgagtcccaagctccaatctcaatcttagtctggattcagttcttggtctaagtcctttgttctgatcctggtctgggttcgagtttgggtccaggtccgagtctagctttgggtctgattctaggtgtgggtgtttgagttcaggtctgagtttgtgtttgagtttgtgcccaggtctggaccccgatttgggtctaggttcgggttcaggtccaacttcgagtcccgagtgcgggtccaagtttgggtgtgggttaggatcacggtccagatttagttccagcatttcgataccagtctgggtcttgtttagagtccaggattgtatccggaggcctatctaggtcctagtttgtgtttgggatcgtgtcccagatttaggtccaggtccgggactcagttccggtctgggtacacgac

SEQ ID NO: 274619 - DNA, 564 bp, Cannabis indica
cacattcatcacgctgaaaagatcctctatctttcagatgagcgacttctcggatagccaacagctcggctcgggaggccatgcattcgatggcgacgatgaccgggaggaagacaactttctcccaacctcgatttcagaagaggaggccgcaccaatagagctaggcccgatgtcttctgcagatatcgaaagaatggtgcaggaacttgctgaacctgggaccatcgacattcgagatagtgagtccacggtgtcggcccgcgactacctcattcactcgaggcatgctcctgacgtcgaagtcgaggagatggacgatgactggacggccccagctcgcgaatcaagcgaggatgaagaagaggcggaagggagtgggacagattcggtcgacgatacccagctgaacgagccctttgcgtgcgaagatctgatttcgagggttaccaaatcagacttcactacctttacgaggttaaatctgctgcgacttgcgtttcagcgatctaaactgacctaaagggcgcatctcccttttaccaaccctgcgattattcccac

SEQ ID NO: 274620 - DNA, 672 bp, Cannabis indica
aaatcgtgattaattaaaatcttgctatttaattaaaacttataatattacatacaaaaaatatttcgggatcccgtttacaaaatactttacaaaagttcactagttctttacaaaatatttgtcgcccaacgactaactacaaaagcactgttgtcccgaggatcgtacgctccaagcctaaccgccctgacatgtacaatcttcatctgctcgtcctcgcggttcctcagttttggccttacccttacctacatataaacatagcactgtgagtcgacagactcagtaagaaaagcataacataataaacatactaaatcccgggttataaccaagcgcccatacacctgaccataaccctaactgaatcagggacgtccatgacaacgtatgattaaccgcgaatccagcctatactcggtactctagtcgtaccgatgtcgtagcagttaatccatactaattgatagcctagcatatatctgttggcatctcggtgcaactctatgtacacctcactgttgccttgatatgctaatctgacggctatataaaatttgcctaacatatatctaatatgttaatctgatggcaactgacatgtacgctaaacatgtataagcatatgcatgacattatactaatcttacctcgattccgaattcaggt

SEQ ID NO: 274621 - DNA, 602 bp, Cannabis indica
aaagaccgttgtttacacattgtgaaaatatagcataattttacggcaacatgaaaacaacgttgttttccctctaaaaaattacaaatccgtaaatatataaaaaaaaatcgtaaaattttttgttgcttttttgtagttgttttattgttgttttacagttattttcatgttgttgtcttggtgttgaataattgttttgtagttgctttagttgttcttttttttgttttactgaacatagtatttattatagttgtcatgaggttatttttttagttaatttttgttgttttatagtttatttagttgatttatagttgtcgtgaggttgttttcccattatttttagttgttttcttattttctgttgagaaaagtgtaatttttaactttaaaagtgtatttttgtaaataaaaattttaggtcataaaattgttaataaaatataaaaaaaatatatatttgaaaatttctcataaaaaattaaaaaaaaccatacaaataaaaaaaatatgtatatatattcatttcaattgaataaacaactaaataccaacaaatgaacaactgtataacaactccactacaatatgcaaat

SEQ ID NO: 274622 - DNA, 513 bp, Cannabis indica
atcgaatcgtacaattgttccgacataccccctaattagggtaattgtgtaagaattactccacagtgtgccgctaagtcttgatctacaacgatcgagtaagtttgacaacaaatcgtcatagacatatacagttatttaagcgatccaccgagtagctagtttctcctacctgatcgtaccgtacgatcaatctgaaatacctccttattagggtaggcatgtaagatatactccatagtgtgctgttaagtcttgatctacaacgatcgagtaagtttgacagcatattgtcatagacgattacagttatttgagcgatccaccaagtagctagtttcttctactcgatcggacatacgatcgttctaaaatatccccttattagtgtacgcgtgtaagattttctccacagtgtgccgctaggtcatgatccacaacgatagagtaagtttgagagcatatcgtcatatacacttacagttatttgagcgatccaccgagtagctagtt

SEQ ID NO: 274623 - DNA, 549 bp, Cannabis indica
gtattagattagttagtttaaaatttaaaatttaaattatatcagcataattttatctgattagttagatttttattttttttttaaatttaaacctattatacgatatgttatatacgtatatactctagaaccctatagtatcgtattcctttattctcaccatctctcaatttttttatcctctctattgcaccaaatcaattgttttaatcttaagagcttcggggtcaccaatcaaccactcttatctgatcatcgttccgtgtcttcgaaatcttcaggtaaaattcctagttgtgtttattttcgttttcagagaaataggctttaataaaactaccatatctctctccccataggtccattttcagtgatctaggtaccattttaaagataatttaatgatctatatttttttatgaagaaactatttcctaattctgattattttgatgtcgaaaattcatgttttatactgactgtcgaattacagtttttttttaaatttctttctgatattgggttagtaaaagtgtgatatctctc

SEQ ID NO: 274624 - DNA, 541 bp, Cannabis indica
atttgattatattgaaatgaattttatttagggcataaaacccaacacatgggtggagttggtgtctgcacccgctcagggatcctgctgaccaattcggacccagatgttggtggcccagactccttagacttggcagatttgggagtggaaggatttgcagtagtcagctcctcagaaaggtcaataacctctccagaaggcctcttctctgaagacccctctccgcccttagacttcttggccggaggggaagcgctagagcttccgctcatcctcttccttaaagcatcgatcatctgccgagacatgtctgcacagaacaaaaacagcgtggttagcaaaaaccagcaaaaaatacaaagcatgaaagtcaagaagctgaaaaagaagtaaagcgcagagtgactgcccgcccagaaagtcagaagtccatcatcacctgatatctcagccataacagccttcccttttccagcatacgggatgagaacggccgaacaggtgaaaatgggctccctatgcgaatggcatgttcaac

SEQ ID NO: 274625 - DNA, 490 bp, Cannabis indica
tgaaactaaattgttcataaactgaaacaaataaatcaaaaataaagaagattttgagcttcatcttcacttggacaatctccacccttctgtccaaccatccgactcaacttgctaggataacaatccaagtttaagcagctggagctaaaataagacgaaaataaacatggttaaaagatctagaattaataacccaagggggttaataattctctaaaacacatgagtttatagcatatatagaaataccttatttctttgctagaaacttaggacactgggatttctagtgacccttttcgttgcaatagaaacactttcctttttgctttgcattgggattagcagcctttttcttattagatgtgttaacaactttaagaggcttcttgctatccttccacttcttctttttgctgggtttcgaagcagaggcaatgtttacctcagccttaaccgtattagcagtgccagaactaggagcttt

SEQ ID NO: 274626 - DNA, 843 bp, Cannabis indica
tatatccattgtaacaagaggggaaacacttcctctccaagttcatagccctataaatagtgatgcatattcactgggctaaaggtcacaaacaatttagtcgagactattccctaaagatattatctaagaatacatattcagagatactgttgtaagagctataagaaaaggaacctttctccttgttcttaagtcaatacaagtaacgaggattaggctattaccgaactgctcgaggctgaacctctataaaattcttgtgtctttatattgctttattatatatcgattgctataaatcacttatcccttactaaatcagactcgttgtcgttggctaaaagcaaggtcaacattttgatgcttttgtagaggcgtgactgatccagcaaattcacaaacggtggatcgtgcattgcagaacccaggacacaagggttccgccaactgttaatcctggacagtcggcaaacgtggggaatggtgtaacaactcctatagatgaaatcgcacctggtgtgcaagagactgggaataacagttccgcacccaaccaggtcattcataacacaactgtttcgcctggaaccaacacccagacaaccattcgagatgctactgagttacaaaacctccgcgacgctcttggactcatgtagggtcataacaataccctacatcatgatcaggaagaactccgcactgcggttaatctcgcgttcgaagaacaaagcgcatattttatcgagtggagagatagagagatggaggctttaagggctcgtgggcctagcggtaggcgggcagagcttgtctagtaattcatctggagaagtcata

SEQ ID NO: 274627 - DNA, 942 bp, Cannabis indica
aactaggttattcccaatgtaagcaaccccctgaagtgcttttcctatcatctatacaccctgcccaatcagagtcactatatcctaccaaagaggtattcgtgtcacaactataccaaagaccatagttaactgtcccagctagatatttgaaaattcttttgactgcagagagatgagactgtttaggattggcttgatacctggcacataaacctacactaaaggatatatcaggacgactcgctgtgagatacagtaagccacctatcatacttctgtatagagtggggtctacagggtcaccagactcatctcgtgacaatttggatgtggtgcctattggtgtatgtgcatgcttgacctgagagaatccaaacttatctaacatagacttgacatatttggactgtgatatgaatgtgccatgatctagttgttttatttggagtcctagaaagaaagtaaggtcacctattaaactcatttcaaactcattagtcattaaggtgacaaatgtatggacttcactatcacaagttgagccaaaaatgatgtcatcaacatatatttgggcaacaaagattcctttgtcaatatgtttaatgaatagagtgctatctgcagtacctcgagtgaagccatgagagatgagaaatgaggtgagtctatcataccacgcacgtggggcctgtttcagtccatataaggctttattgagcttgtacacatggtgtggatgatgtggatcttcaaacccctgtggttgtttgacatagacttcctcttgaattaccccattgagaaaggcactcttgacgtccatttgaaagagtttgatcttcagaaagcatgcaatgatgagaagtaggcgtatggattctaatcgtgccactggtgcaaaggtttcatcaaagtcgatgccttctacctgactatatc

SEQ ID NO: 274628 - DNA, 714 bp, Cannabis indica
tttagtctgttatatctgcactagcgttctgttacgtgagtttcagttaagtattagttagtgccaggtggacttattttgtggatatataaatagtcggtttctgttagtaaagtggttatccattaaatcgttcagacagttatttcggttgtgtgtggagagagagtcgtatcttgtttcttgttgttgtgattacaggtcagatcttggagcttgaggatgttcatcaatggcggaatgatctgaatctggaattgctgagttcaaactgaagggagttcagtgtcatcttcatcatcagatctgaagggatttcaggttgaagacatgttgaagaagagctcagttgctgcacaagggattgtgcattaacaatcagtgttcttgattgttgttggtaattcattactaattgctgttaaggttgtatttgattcctttagagagaattggaaattgtaatatgaacctttgagaattagtggatgaatttaccctggttcggggaacccaagcactagtcggctgagatgtgttctcagtgcagatgaagcttgtaaattgttgtgtgatttactgcttgactattaattcatgttcataattcatatcttgaaatcaatcaatctaaagataatcaacttggtaatttggatcattaaaatctacaagttgcactttcagattacatctcagatagctcccactcaa

SEQ ID NO: 274629 - DNA, 319 bp, Cannabis indica
agcacagctacagctgctttttcccacctagcacagctgtgccaaactgaccctaagattatttagaggtaacgtttgtaaatagttaatgatatctattaagttattaattaaattatatagaactcaatacttaattgcatcaatatataacgagaagataatgttctcctttcatcaaataataataataataataataataataataataataataataataataataataataataatagggttgttatatttatatacatacatatattttttttgaaaacttaaaaaaaaaaattaagaatttaggtaattt

SEQ ID NO: 274630 - DNA, 682 bp, Cannabis indica
atcactgcagatgtcaatgtgtccggccttcgttgcctggaatagctttagcctagcaattagagccttggactcggcttcattgttagatgctttgaatccgaacttgattgtagtgtgcaggtgttgccccataggcgtgacaggggcaattcctgcaccagatagctgatctgtagctgactcatctacatgtagtttccaggtcggcttatcttcattattacttagctgaggtgtttgtaccggctcggggttgctctttggtatgcttactttttgcctgtgcattctaccacaaagtctgctaaggctttgcctttgattgctgttcggggttggaaagtgatttcatactggcccaactctactgcccacttgagtagccgtccagaagcatctggcttttgtagtatttggcgtagtggctagtcagtgtatacccgaacaggatgagcttgaaaataaggcctcaacttccttgttgctagaataaggcagtaagcgagtttctctatcaatgggtatcggccctcggcctcaatgagtcttttactgatgtaatagactgggtgttgtacgctgttctcttctccgattagcacgacactcacgacatgttctgtgacagctaagtatattcccagttcttctccgtccagggggtttgagagtacgggag

SEQ ID NO: 274631 - DNA, 221 bp, Cannabis indica
aaccatgtcaggattaagatccatagacctaagatcagccattgatattgacttagaaagatataacagtaagtttaggatatcttatctaagaaaagtacttttcaaataatctcaacaccttgatatccagatcaagtgtagtatgtagtattctctccgtaataggatctgacaggttgcatgcaatacaacctttcctccaccattacatttcctta

SEQ ID NO: 274632 - DNA, 572 bp, Cannabis indica
tatgcctgagtttgtttttcatccgcaagttgtccatagtttattactgagggaagttttccagcccaatcctaaagagttttgggctaaggttgctggccgttgcatacggtttagtgctgaggaattttatttgatttctggaattgattgtttcggtgattgcaacaagttgttgttttcacaggaaacaaatcagttggtagaaatctgtttccgtggtgtaaaaactattgaccacaaagccattgaggatgcttttttgggtagtcggtggggtttggatgagtctcttggtttgaatggctgttttgtattttattcagtgttttcttcttagcaatactcctgataaagaagtatctaggtttgatctagatgttgtggatagcggtcggtgggacgagtattgttggggtagggaatcctttgaattgacaattgattcattcaaaggtagaattcagcatgggattattatgaaaaataggaaggcagagaagggaggccagtatgatggctggtatagggctttgggatgtccttgggtttttacggtttggttttatgaa

SEQ ID NO: 274633 - DNA, 945 bp, Cannabis indica
aattattttttacaataaaaaagtctccatcttcattcctcacctcgatttcgtcaattgctaaaagaggtgctatctgaagcattttctctaccatccatccctcgatgcaaacattgcaaagcaaagcgtttcattcatgaaacaacaggcttttgttgtgccgatggaaaaatttatctcgcaacaaacgatgtgccgaacgaactttatgaattgtttacttccagtagcaaagaatctacacatttttgaacatacattcgaacttacaaagttgtagcttcaaaccagtatgtttgacgatgtgggggcataaagttcacgatgaatgcttacaaatagcagaagtaatcgaagacagacccataatattgggatcaaaactaattgttcaaaccaagagaggttattgcattaattaaactactgatatttaaaagcgaaaattcaaaaattcaattaacacatacattttgatttagggctgtctctatcgtcacgcgacacgagtaccttcaaaatcaatcctcaactccccgaggcagaagcactgaaggaatggtaatactcataaaatcaaatacacatactattatagctacacattttacaaaaaaaattaaatttttgtatactatatttataataatacttactctattttaagggcggagagtaacgaaacagaaattaaaaacgcaatagcaaactgcttgacatatgaatcttctccaaaatcttttgttggattacacgaaatagtgactaacatccaaatttcagagttgacgaaaaatctgcaactgaatgaggtaaaaactactataatatttactttataaaactttcgtttcaatatcttactattattaacaccatttgatttggatgtagaaaaaatatttttggattgaggcggcaataaaaataactgatactctc

SEQ ID NO: 274634 - DNA, 857 bp, Cannabis indica
tttgtttttcacacatgcatcacgctgaaaagatcttctatctttcagatgagcgacttgtcggatagccaacagctcggctctggaggccgtgcattcgatggcgaagttgaccaggaggaagacagctttctcccaacctcgatttcagaagaggaggccgcaccaatagagctaggcccgatgtcttctgcagacatcgaaaggatggtgcgggaacttgccgagcctgggtccatcgacattcgagatagcgagtccacggtgtcggcccgcgactaccttattcactcgaggcatgctcctgacgtcgaggtcgaggagatggacgatgattggacggccccagctcgcgagttaggcgaggatgaagaggaagcggaagggagtgggacggactcggttgacgacactcagctgaatgagcccttcgcgtgtgaagatttgatttcgagggtttccaaatcagatttcaccacctttgtgaggttaaatttgctgcgacttgcgtttcagcgacctaaaccgtcccagagggcgcatcttccgtttaccaaccctgcgattattcctacagaggatgtggtagtctcaatacccattctccgatgtggggtatcgatccccttccatcctttcattgcggctattctcaggcgatacgacgtatcaccttttcaactaactccaaatagttatcgcactgccctagccttctatgcgatgtacatggaatatgttcatagggctccttcagtagaagagttcagctatttctacgacataaaaagcgtaggtcttcataacgacttctactgttttagcaaatgggcaacttctgagatcaatggagtaga

SEQ ID NO: 274635 - DNA, 551 bp, Cannabis indica
gattgcccatccgtctgaggatgaaatgccgtgctaaactttaactgagtacccatagcttgatgcaaactctcccagaatcttgatgtaaacttcggatccctatccaaaacaatggactttgggacaccatgaagacgaacaatttatctgacatataactcagcacactggtcaatggagaaattcgttcgaacaggtaaaaagtgagctgactttgtaaacctgtccactctggtatgttcaatggctacagcaaccctgtaggcctccaatgttcagtcttaacctgttgacaggtaagacatttagcaacatactcagcaatatcattcttcatgtctggccaccagaacatggcttttaggtcttgatacatcttcgttgaccttggatgaattgagtaaggagtcgtatgagacttatccatgatctctcttttgatactctcatccatatgcacacaaacacgattttcgaatcgcaatattcgcgtttcatctactgagaaatcactaaccttctcagccgaaaccctagctcgttttttt

SEQ ID NO: 274636 - DNA, 142 bp, Cannabis indica
gcttccaataagcagatcaagaatttattacctaaattcacagacttattaattcttcgttgaatccacgcgtagaacttagaattgcactagaacataggatttctccaaatgcaagtaaactctgctgtagattatcata

SEQ ID NO: 274637 - DNA, 81 bp, Cannabis indica
agccgtgtaaaaaatttcaaaatggtaggatgtgttagagagatatagtgggtaaaatattttttttttaatttaaaaaaa

SEQ ID NO: 274638 - DNA, 817 bp, Cannabis indica
caaagtgagacagcccccagaagcaagcactatcagccctacaactgaaaaggggcctgaagaagaagaggccaacatttgtcatcgctcccaccgtgtacgacgaaaaagtggaagagtccactccacctgtaatcaagaaggtgttagatgaattcaaggatgtgatgccagacgagcttccaaagagactgcctcccaggaggggagttgatcaccaaattgagctggtgccaggtgcaaaggccccagctaaagcagcatatcgaatgtctcctccggaacttaaggagttgaagagtcagctaacggagatgctggaggcagaattcatcaaaccctcaaaggcaccttttggtgcccccgtgttgttccaaaagaagaaggacgggaccttgagactatgcatagactaccgcgccctcaacaaggtgactgtgcgcaacagataccccattcccttgatcgcggatctgtttgaccagctaagtggagcgaaatacttcacgaagttggacttgagatcaggatactatcaagttcgtatcgcagaaggggatgaaccaaagacgacttgtgttactcggtatggggcgtttgagtttcgcgtcatgccgtttgggttgacaaatgcgccagccacattctgtacactgatgaatgaagtcttccatgacgtcttagacaagttcgtggtggtgtacttggatgatatcgtggtctacagcgccactttagaagagcatcaggaacacttgacaacggtgtttcagaagttgaggaaggaacagttatatgtaaagcgcgagaagtgttc

SEQ ID NO: 274639 - DNA, 1253 bp, Cannabis indica
tttaagtaaaaaataccccaaacttttctagaatggtcatcaacaatagacataaaatacacatttccaccatgtgttggagttttctctggtccccaaagatcagagtgaacatactccaatatgtgcttagttttgtgaataccagttttaaactttaacctatgatgtttacctaggacacaggattcacagaaatccactttacttactctgtccttacccagtagcctttgatcactcatgatctgtaggcctttctcactgatatgccccagccttctgtgccatagaacagcttttaggtcttctggattgctagtgactgcattgttgcagtgagtcactggttctccatctaagtagtataacccttcatgtttgtggcctttgattattgtcatagcacccttacttagcttcattgaacctgcttcaattttgctaacaatacccatgtcatctagaacacttatagaaattaaatttctagcaagattagggacataccttacaccagttagggttctgacaatcccatcaaacattttaaaacttacattacctgaaccttctatattgcatgtgttgttatttcccagaattactttgccaccattagaatttctgtaatcagttaggatttccctagaatttgtcatgtgaaaagtacacccagaatccaaaatccagtcatctttgaaagatgtagatgcaacatagacttcaccactatcatagccatctgagtagtttgcttcttgttgcttgtcattttgctgtctgttttgatctgatctttctggaaaccttccacctttcttgttcttgtatttgttgttgtagaaatagcagtctttcttgtagtgtccaggttttccacaatagaaacaccctgtagaatcaccagaatctcttgatggtgatctactcttccctttgtttgagtttctatgatgatgtgcactattacttctacccctgttctggtaggatttcttgtgagatggccttcccctacttaggttcatttcaccatgtccagaattggatttttcactcttcatctctaagtctttagattttagggctgagatgacttcatcaagtgtgattgaagtccttccatacttgattgctgtctttacctctctgtatgaatcaggcaatgaattcaaaatgattattgcctgattttcatcacttagagcttcattctctcctgaatttgccaattcaatgtgcattctgag

SEQ ID NO: 274640 - DNA, 669 bp, Cannabis indica
ctactttattttagttacttagtaaatttctaaaaaaaagtaaaaaaaaaaaaaaaaaaaaaaaaaaaaaaaaaaaaaacctaacctttacaaagtgacaaaaatgaaaaaaaactgaaaaaaaaaaaattaaatcattttccaaccccttatttgcattatcatttattcttataaagtcttactcaatgaagtttttttttaaaaaaaaaaaaagacttaatcaaatagataatttgaacaataaaatctatatataaaaagaagtatgaggcggtgacgtggcggtctaaaatcacttcaaatagcactatctcttatctccttaattctcttattttttaattcttattaaatttataattatttttttaattttataaatattgattcattttttaattaataaattaaaaaatacacttaaaagttctccacgtaagtttataaatattttttattaattttataaatattaattattttttattatgtatattaattaatattaattttgaagtatctatcttaaaaaaatttatatctatataatgcctttatttagaattctcaacttaaaaattttaaaccctcagcattagcctctgtgacagtcagtagtcccgtgatccgtaaggaaaaataccgggtaagctgtacaatcccaca

SEQ ID NO: 274641 - DNA, 493 bp, Cannabis indica
cctcagcgggagattgattttgtaatagatttggcacccggagtggaaccggtttccaaggctccgtatagaatggctccagctgagcttaaagaattaaagattcagcttcaagggttacttgacatagggtttatccggcctagtgtgtcaccctggggagctccggttttattcgtcaagaaaaagatggaactatgagaatgtgcatcgattatcgagaattaaacaagctaacagtgaagaataaatatccattacctaggatcgatgatctttttgatcaacttcaggggaagacggtcttttccaagattgatctctgatcgggttatcatcagttgaagatccgagaggaggacattccaaagatggctttccgtactaggtatggacattacgaattcttggttatgtcgtttggactaaccaatgctcatgccgcatttatggatctgattaatagagtattcaaggatttcctcgatatctg

SEQ ID NO: 274642 - DNA, 642 bp, Cannabis indica
aacattaaatgttatttctgatctatattaataagtagatctgattatattgaaatgagttttatttagggcataaaacccaacaacgagctgggtcctaggttaaagttcaggtctgggtcgagtactaggtccatgtcctaggggtgttcgcggttcgggtggtgcgatttttaaacattttttcaaaccaagccgcacatgcggtttttccaattttccaaaccccacccgcaccgcgatactaaaaaaccgtaaaaatgcaccgcaaaaaatgatgcggtgcggtttcttgcggtttgaactatcacaatttttttttgaagtcatcataaaataattaaactattattaatataattattccaaaatacttaagaaaatacaacaaacttgagactaataaaagttataacaacaacaataagtcagtaatgtttttaaagtttcaacaacacacctaaatcaaaataacaaacttgaaactaattaaattccaacaacaatataaatgtacaactaacatactttcagcaatagattaaaaataaaacaaacacaaagttcttactccaaatttcaatacacatgtatgggcttgggtttgttgctaagaagagagggtttgtgaagagttatgga

SEQ ID NO: 274643 - DNA, 543 bp, Cannabis indica
agtcgagaacctttgaaattttaaaaaaaaattgaaatgacgggtttgcattgtacaatgtatttctagacgaattccagttaatcatacataaataccccttaagtaatttttaaagaactaaaactttgtaatttcttaatataaatgagtctctttattcatagctgaagtttaaagtttacatcagtaatgtgagttacatcatttatttattggtagtagggtcgcaaatgttctacgttccagtagttctttattagcgagccatcaagtcgagctaatttatagattccgtctccaattactgcttcaatgacatatggaccctcccagttcgggttgaacactcctgctgatgcgtctctcgtatttgcaaagactcgtcttagcaccaagtctccaacattgaatagtcttttcttgacttttttgttgaagtatcttgtaactcagtgttggtatgcggcgttggtgatttgcgactcagttcgttttcccttaagtagatccaaggacaattttaaaagttcctagttttct

SEQ ID NO: 274644 - DNA, 572 bp, Cannabis indica
agatcctggtaaaataaattccaacagatttaccatacaatgccttaacttggattttttgagccccattttctttagagtctccttataaaggatatttaccgagctcccattgtctattaacactatcttgatccttttattagcgagttgaatggttatcaccagtggatcgacgtgaggttacctcatgtttttctcatcttcctccgtgaatacaatgggaggttcctcagtttttaccttcttggaaggttctggggcaaaggctgattgctcgttctttatttctttcacatatcttttctgggcgttattgctttctcctgcgatatgtggccctcccgaaataaccaggatgtctttcaataggaataggttgtaacccctggttatttgggttattgggcatactgggatggttgtatccctagccctgtcttttcacgtactggttaaaatggcctcgagcgatgagactttctatctcgtctttcaattgatgacattcgtcggtcgtatgcccaatatccttatggaattgacaataattgttaggatctcttttgctc

SEQ ID NO: 274645 - DNA, 511 bp, Cannabis indica
gagcaacgagcgaagaagaactgggaaaatcgcaaagtgtttaaaggccttgttctaggtctgagaattttctctctaggaaatttgagcaaagttggcaagaaatgggaagtaaccgaaatgaagaaaaggtggtggcttttataggcaaaaatgcatgaggaacaggcgtcatcacctaccaatcgaacggtgagggagcgcacgattcaaatgctcaaagatcaacggaccagattgatttacaataaaggcggtggaaacgcttgagtatccgtctgacaccattaatgcgccgtatcaatcaatgggcgtgaaacgaatcgacctctgcaaaaagtgaatcgctgcattaaatgccatcattaaatacaccctcacgcgctcaaagctcgtgccaggaaaccgaggagtcaaccggaggcacttgaacaagccttgtttcatttttcaaataaacaaggcttggggggtaaatgttgcccctaattttgcccaatatacgtggacc

SEQ ID NO: 274646 - DNA, 634 bp, Cannabis indica
agaaaaaaaaaaggggaaaggagttgcaagagagtgggcggtttccttttgtagtcgtgggctggtggttactcaaattttttgaaattggtttcctttttgctcaattctcccatgtttatttaaaccaacttttgtcatttattctcaccacctacccgaatctatttctttgtctctcttgtttgtttgctgttcattgtctctttcagatcaaaatggtgagaacaaagaacctagggcatcccaaaaagatggtggaaaccgatgcaaccccttcaaatgcacctcctgctgcttctaccgtgcctcctgctgctgcaaaaacaggagattcatcgcttcctcagcgtgaatctcagcccgagaagccaaaacgacttcctaagcaagtagctcaaaaatctgtgcgtccgtacaaaaactggacttcatcgtcttcatcttcgaaggaatctcctccacctgctgcatcagttcctgcctctaccccaactggtccttctactcgcactcgtgcccagcaagcttctgtcgagaaggaacttcgatcatctcgaagtcgtgacaagccagcgcctccagccaagaagaagcttaagacgaatccaccttcggtttcttcgagctcaga

SEQ ID NO: 274647 - DNA, 616 bp, Cannabis indica
attgaaacttttgtcaagctttaatggtgatttttttttttgtagattccaccgatatttttgcagagctttaatggaggtttgaatagtcgaaggtttctttttaatttttttggttctcaaatagttatatatggttcggcactaggaggttacgcaccgttttgaggggacggtggttgattgaaatttgtgagatctcatttttttcggttcagtaggaatattttcaataaatttcggtacaaatatacatatataagatatatttattttaattcggtaactataatattaatttgttaatttggtatataattaaaaaatacccttatttttactaatgattttaaaaaatatcacatttttttctaaataagaaccaaaaaataaattttttcttataactcactaaatttaaagaccaaccctacaaatggattagccgtgtcaacctaaaaataatccaaacccattaataacaaacccaaactcatttatttcgtactaatttcaaatcatgttatcgtgtttgactcaaattcccactccttgtcccatcacatattcacatcccatataatttgacacgtaagtaagaagcacgcgcgagaaa

SEQ ID NO: 274648 - DNA, 680 bp, Cannabis indica
agggcataaaacccaacatcatgggatatataaatgcaatacttttgtataatattagcatgtaacatgttgtcttcattagtatttttcaaattttaaaataaaattaaaattataaaatatagcttaagaaattataactaaagttataaactggtaaaggttgtgttggaggctagggtttttgctcaagagagagaaatttgttagattaaattttggtaggattatttagctaaaattaatcaattataattaacgttttctaatcagaatattctattaacattttgacagaaaaataaataataacattaaatcaagaattctgttacatagccacattttatataaaaaaagaaaatattttaaaaaaaaagtcacctcataatttctcatacaccaagaattcgccacattttatatattcagatgtggaggcaaacaattataacatgatcgagccaaaaaaacaaataaaaaaattctttagcaatatatatataaatagtagtaaattcttatttagaataaaatccaactaaataacataagtatatttagaaaagtcaatcgtagatgtacaacaacaaaaaatattttattatatataaataaaaagtgaccccatgaatttctcataaaccattttatttttaatataaataaaaagtcaccca

SEQ ID NO: 274649 - DNA, 494 bp, Cannabis indica
aattataggaaattgatttccctcatttagtcaaatgtgatagagatgttgaggccttggactacggataaatgaagaagctgataacctttccttccctttcgttcacacaagagataaaacaaaatcaattatcattatgttgatgaagagtatctcgagctggctgccaactttgatgcatgaaattgattatgcatatcctcttgtggtgtacggattcagaccaagaagtggccttacccactttgtcaagttcacttattttgtagtaatttattgctttctttttttatctcttctttggcaattccaaaaatcattttatttcctgcaaaatgaacataaactaaatttaaaataatattttcaattatataatatatcacattaattttatgaaaatattaatcaaaacttaatttaattcaaactttaacatcaataaaatgatatttttgaccactaatcaggcttgaacaagtcttctcccg

SEQ ID NO: 274650 - DNA, 658 bp, Cannabis indica
aactaggaactaaaagtttccctatcgataaaaagcatggaaataccccaaataacataaaatcgaggaaaactagagttttagaaatttttccaaccggtagaccggttgtccaaccggaattccggttctgggaatttttgaaacccatccggaattccggatgcacaacaggaattccggttcctcgcaggcagaacttcaataattcacacattgcacaaaactaatccaaacaacctcaaacattccagacctgttctatgggacccaaataacatttctaaggcaacaaactcacccagattgcacagaaacaaaaagtgccattaaagcccaagctttgagttccaaactcaaactttgttaaaaccaactaacatgcatccaaattagatcaaacctacttaaacatgcataaactagcctctgaaaactactacagacatcaacaaaatcacagcaacagattttaaccatttctctttgaaaaccatagttttgagctaaaaacttcaaagcttgaaatcaaagcaattaacatgcattacactaactctaatctacctaaaacagtaggattaaatctctgaaacatcacaataaatcacagcaacaagaatcactaaaacaagcatgcaacaacacttctttttca

SEQ ID NO: 274651 - DNA, 534 bp, Cannabis indica
gaccatgtttgcaagcttgacaagtctctatatggattgaagcaatccccgagacaatggaacaaacggtttgacacttttatgaccaaacaggggttcaatagaagttattatgaccactatttgtactttaaaggttcggaaattgctaaagtcatttacttgctactttatgtggatgatatgctaataattagcaaggagaggtcaaatgtcaacaaggtcaaggatttgctcaagtcggaatttgaaatgaaggacataggtgtggctactaagattttggggatcaacattctaagggacagacgcaaagggaaactcatgctacatcaagaagactatatcaacaagatcatagaaaagttttctatgaaagattcaaaggctgtttcacagccgattaccaaccaataccttatgtctaaatctatgtgcccgaagaccaagttagagcaagaagagatggctaatgttccctactctaatgcagtagggtccataatgtacttgatggttagtactagacctgac

SEQ ID NO: 274652 - DNA, 578 bp, Cannabis indica
tataagaacattatttaatcctagacacaaataaagagtaacatgaaccttttaacacaacatcacaaagtatgatcagactgagatcctaactaattataatccaaaagcataaacatgatttgtcaaaatacaatgatagaagattaagagctagagaagaatcacataacactattgtacaagaattatgaacagataaaattaaacaatgcaaactcccaaagactttctgagggagtcaaagcgacttgcatctagggcctttgtgaaaatatcagctaattgtttttcagtatcaacatattctaattgcaatgatttattttcaacaagttccctgataaagtggtgtcttatatcaatgtgctttgttctagaatgttgaacaggatttttggaaatatttatggcactagtattgtcacaaaaaatagtcaaaacacccaattcaaacccataatcaatcaacatttgtttcaaccacaatagttgagtacaacaactgccagcagctatgtactcagcttcggcagtggataaggagatggaattctgtttcttgctatgccaagata

SEQ ID NO: 274653 - DNA, 658 bp, Cannabis indica
ggagacgatactcgatttatcactttattacttgttacgattgcgtatacttgcgtatacaattttccacaacaagtttttggcgccgttgccgggattgatttagtgaaattttatttttggaacttaattactatcaatttggttttttttttttttttttgttcattctattttccttgttctattttacgctttgtttgtcttgttttggtttcttttgcaaggtcttgagatgtctcatctacaagtccttatgaattttgttcaacatgacttggagcccttgtatgaagcatggtggagatacaaggcatttctagtgaggtttccatatcatgggttgtccaaagagtgtcaattagaaatcttcctaaatgggttgaatccaagcacacgaaaatgggtagaaagaggaaatggtaccaccaatttctaccaactatcaatcgatgaagcctattggatgttggaagacatggcggagtacaatgagtggtgttgtaattgtccaaacaaagatcatgtttgggaggacaactacaataatttggagccaaattttgacacttacactcaagtaccaaatgatgagaaattgaaggattttcaaagagttcaacataaaagaagagcctcatcaaatggttcaaccaag

SEQ ID NO: 274654 - DNA, 820 bp, Cannabis indica
caatgagcagaaagtgagcaaaagtcgggcaaaacaaaggccccttccactcgaacatccgcccaacttcccaactattccaataattcaagtgccaagcgctcaagcaacaaccacaagcaaggaaacgggaagaaaggaaagttcactgacatatccggatagactccccgtgatcatgccaaacacactacattcactattctaactgaagatatagagagtgtgtatatggcaactcagtcgttaattccgtacaagaagcccggacccatgaagaaagataccaacaaaagggacatgacaaaattttgtgggttccacgaagactacgaccatgacaccaacgaatgttataatttgaagcgggaaatagaatatctgatcaagaaaaacaacccgcacctgcagaagtatgtcaaggccaaccaaggtcaaaacaaccaggatctgctacctccaccgatagatggacacttgcaagtcattattggaggcccgcacatcgctggagattcggccaaagctgaagagaggtatgcccgaacagaacagtacaagcaagaagaagtcatcctggccgtggaagaaaggaatccaaaagttccacgagcaggagagccaaccataactttcaacgatgaagatgatgtcgtggaagtccagatagcaaacaagatggtggctagaaccatgatcgataacggagcttcttcgaacattttgttcaagactgcttatgagaagatggggctccaactcaaggacctaactccatgcctccagcctgtctatggtttctccggtcaaggagttgcac

SEQ ID NO: 274655 - DNA, 546 bp, Cannabis indica
catcctgctcctcccaacattgtgctgactccagttcctggggacgaggtgaggcaggagctccggatagccaaccataactatgccatggacgagtactcccgggggtatgccgaggtggaagcccttaggagggttttgcgggttgaggtacaggagagtatcaacaacccagagtaccaggattcgtgggaccttaacttggaccccctgtcggactggttccgtctcttccttgggcccaccttggctcccttcgccgcggagatgaccggcgaatttgcttctcagcttacccggtgcgcgcctaagcggttcgcaacttgcgcctccctgaactctatcttccaggtccaagaccttagccactctctcactgttgtaagtgttttacaagtttgcttttccctttatttttcttttttggggattctttcttacacttgtattattgttcagcttgctgctgaagctggccgcctctccaagaacatcattaatcatggcttcgttctgtctgattttggggacatgaacgacgtcagg

SEQ ID NO: 274656 - DNA, 832 bp, Cannabis indica
gcaaaaactgctaggcaaacttttctttattggtgttggaacccctgggatacgttggatcattgcttccatcccttcgaacgtccgagcgattgctcattcaatcaaatcctcctaagctagagtatgaatggtggtatgacatgcatcaacagaagatggaatcagattggagtttagcataacctgtgtggcagttacctgtgatggtgggattccttcaagaggagacgttgttgaaggatcagatgttgtagtgctaacccccaagttgctagtcgttgggaggctgactgtaggcaggccagttgtaggaaggctgaccataggcagaccagttgtaggaaggctgactgtaggcaagccagttgtaggaaggctgaccgtaggtaggccagttgtagggagactgatcgtaggcaggtcggaggccacgttgctggtcgttagacctccagtgtttgtcccatctgtttgcatatcagtatgttcagattgctgaggttgagaacctcctacgacagaatgacttcctaacattagagtcgatgtccctctgagtgtttactgatcagagacttgggtctctgttcttataggagttaagtctagtgatgccattggtgtaattggaactcggtaacgactttgagcaacaccaggagtcgtcatggtagccttcagtgactccatttgtgattttattgcggcattttcactcttaaatgttgcgttctcctccttaaaggttgcattttctcgctcaagaattccagttgtgttgggttttatgccctaaataaaactctatttgaatgtaatccattttatt

SEQ ID NO: 274657 - DNA, 942 bp, Cannabis indica
agtaatagaataaaatataattgtttaagcaatattttgagctattaggccagataagtgagacccaattcctaaaagcaatttgccgtacgaaagtgtggtaatgttaaaagtgataggcgaggacgtgcacctacgttggaaaagaaatgtcaaaatggaggtgcacgccaccaaaaggcaatctcctttctgcatcatgtgccttttcgaagattcgtagagggggcagttcctcagattttttagaatcatgtcaaaggcgtgtcataagcaatttttaggattgtagacggtctcagacaccctttcagcttccactttcggattacccttgagggaagttatgtacactttaaagtttcttataagtttaagtaatcattcatggtattactggtatttgaaggatcatatggaatgtgcatatacgcagtccaaatttatctttattaatgagaaaaactatctcgttggtcttcttgggcctactgatggactgaaatttattgagcctctgataaagaccatgtgtctttattcgaaaatacgaataagtttcaaaattcttactaacaattcaaacctaactatatatatattagatgagagttacgtggcgagccacgtaaatattagttttatataacttctagtggtttttgtttaagaattcagtaactaagcaacgacaacaacaatggtagatagatctatttaagtttttcatatttgtaaagattataaatctaaactttaaatattcttgatttgagattttgaattgttctgatttatttgtttatgaatttattgaaatacttgaatatttatttgttctgattttgaattgttctgtgttgaccgaggttttcggcaactaataaaatacgaatataatagtgagctataagaaagcgagatgaagactttttacgtggt

SEQ ID NO: 274658 - DNA, 929 bp, Cannabis indica
aaatgggattgcaggagaaggacctgcggcctgtgacgtcgagcatctatggctttactggcgacgtcatagcattaaaaggaatgatcaaactcccaatcaccttgggaactgccccggtaacagccaagtcaatggctgacttcgcagtaatcgaccagtattctgcatataatgccgtgattggtcgaccgatcctgaaggagatgaagatcataacctcgatctatcatctcacaatgaagttccctactcccgctggagtaggttctgtacgaggagtccaagcagattcgcgagaatgctataacacagcagtcaagctcgcagagaaaaggacagtaaatgttatctacctgttggaggcaccacctcctcgccaggaggtcctcagaatcgaggaggtgccgcacatagacgaaccagatttggatccaagaatcctcgatcatgccgccgcagcccaagccgcggaagacaccattgaggtacctatagatcctgtagataatagcaaagttttaaaaattggttctaagttaaattttcagcagcgagaacaattaacgacctttttgaaacaaaatcttgatgtttttgcttggaaacattcagatatggtcgggatatctccgcaggtcatgtgtcatcgcttgaacattgaccccgaggtgcgaggtgtccgacaaaagcgccgcaaaatggaccctgcgaggtaccaagcgctaaaagaagaagtcgaccgcctcctagcctgcggctttatacgggagtcgttttaccccaactggttagcgaaccccgtactcgtgcctaagcctaatggctcatggcgcacatgcgttgactttacagatctaaataaagcctgtcccaaagacagctttccccttcctagcattgaccaacttgttgatgccactgcaggt

SEQ ID NO: 274659 - DNA, 434 bp, Cannabis indica
gcataaaacccaacacaaggatcatgtaaaatactaaccgctgttccattagcaatagctcttctagctccttgctttacaagatcttgagccgcccaaatactccgccaaataaaacttgagttttatcctagttcggcattaaggaaagaaccatgagggaaataccgtgctttataaatcctcgcgacaagtgtgtcctccatagtaagcaaacgccaaccttgtttgcccaaaaaagagaggttgtagtcacgaagatcacgaaagccaagaccaccaacatctttatgttgacaaagcttcttccaactaatccaactcactcccctactagaagagttcgattgggatttccaccaaaactttgccatcattccttcaaggctcgaacaaatttcttgggtcaagagaaagacactcattgcataact

SEQ ID NO: 274660 - DNA, 405 bp, Cannabis indica
aattataattctaaaagttagactatgtctactttatgaattttcactaagcaagggacgaaattaataaagaaaagagattctaggtttaatggcacacaattctaacctaaacctagagggaactctataaatagaaagtgttggcttcaggaaacacacaactttgcactttgtttccttcagaaaagaccacacgccaccttctctcttttcttctctctaaatttcgaaattccttgagtgatgagtagtgcccacacacatcaagtggtagctcaatcatagtatgtaagactatggaaattcagcatcagagaaggacagaaaagaagatctagattcagatcttgattatgctctgctacagaaaggaatcaagggctagagatctgaatagaagga

SEQ ID NO: 274661 - DNA, 458 bp, Cannabis indica
agtccgcccaagaggccattcacttagaagcgaatgttcaatagtactttaatgtggtctacccgacctgagtactttgaagtggtctatccgacctgagtactttgaagtggtctacccgacctgagtactttattggtagtatttccttaaatgttctccattccagtaccgtggtactagaatgagttgcattttttcgtcatacttacccagtttgtatgctccggagtcgagaacttcgaccacctggtatggtccttcccagttaggtcctagtacacctgacgtgctgtctttggtgtttaggaatacccttcttaggaccatatctcccacgaagaatttccgagctttcacttgtttgttgaaataccgagctactttttgttgatgagctaccaactttaagtttgcagttgcttgttttcttcgatttcatcaagtgattctgcaag

SEQ ID NO: 274662 - DNA, 872 bp, Cannabis indica
cactaaatagttataattttaattttttttgttcatgtgtcggtataattgaattatttaagaataaaatacataatttttttaataaattataaaaaatgtacacacaatattcttggtttaacgattctttttttatttacccttacacgattaacttaacagattaaacgttaacaaataaataaacccaataattaaacccaaaaaattaaacaattttttttttaaattaaaaaaatatcttgcccacatatctctctaacaaatcctaccattttttgaaatttttttacacggctaaattcaaatttcaaaaaataaacccaataattaaacccaaaaaattaaataatatttaaagaattttcttttatgtttttacgattttctatagaaacaacacgaaagcatcaagaaaactacgtaaaagtaacatgtaactaacatcaaaacaacaacaaaatataacatacagataataaaaaatcaacaataaattaacaagattacaacataaaaaaaccgtatcttctgtaaataaaataaaaaaaaatcgtaaaaatgtttaaaattccatgaaaccatatttttgtaatctttttgttgtttttgtatatctgtgaaataattcctaaaaacaaaggaatgttttgcaatgggtaaaaatcatagaggaaattacactctataacctttttatgttgttctcttttatttttaccttcttttttaaagtctattatttttacctcttttttttaaacattgtaccaattttgctcctgtaatttcaagatactctccatgtgactctcttatgtctgggtattttgggtacaatacacataaaaagaggtatgtttcaaata

SEQ ID NO: 274663 - DNA, 522 bp, Cannabis indica
gtccgtcagctccgtgtactgggtgtactggggagtgtacccccttttctaacgcttctcccccgtccgggtgctgcctttggaggatcttttactcctcgagccctgggaagggcctgccaggctagcggttggagcggagtgcgagggagcttgcctatttatccctgagggatttccaaaatgggatgatgcgggcgtcaaagcctagccctgactatatccgggagtggcagagaactgtataccgctcaatggaggagccgcggtcgggacagtacccgagggcggtgctccgggcatgtaccctgctatcccggtgcgatagtatcctccataggccactatttgggcctcttcaaggttgatatatttttggactctcttctggaagtcctgaaggctagcagccccctcttgttgtagttcgttccagaagggagtccctgtacggatgcctgcttggagaagtgcaagttgttgcccgtcatcaaccttcttggtcttcgaggcttcctctcg

SEQ ID NO: 274664 - DNA, 591 bp, Cannabis indica
tggatgtaatgtaagctgaaggacctaagggaacgggctccggaggaccagaacccatccgggaccgacctaggaaatctcctaagtttgaaaaataaaattccttcaaacgatccccccaccgggtcgagggcatcctaaacctatacagacgctcgtcgaaccctacgggcctacgactggcatattcgccaacagaaggaacataatgaattatcaaaggagacttaccgccggcgccggaagtgctggcaccaggagccccagtgtttggctctggaaccgaaggctgtggcctgggagcccttctctccgatgaatccccaatgtgaaggggcttcccagcaatcacctgacttcttctctccaccgggctccccacacggagcgccctcccggaagccgcctaggccttagagtacgccttctcctgggcctttcggtagagatactcctggtatttcttctctgccgtggcgctgatctcgtcccggaaggtcttctccgcgaccggagccctcacattggcacagatgacccgggaaaggttagagtcctccacggattgatgcggaaggataagtttggcct

SEQ ID NO: 274665 - DNA, 577 bp, Cannabis indica
aagcattcgtctaggtcatctatgtgcccccccagccttcctggatttgacgagcatgtcataccaatctttggtatgttgctccaacattttttagtaccaaacgacattactttgtaacaatatagacccatatctgttcggaaacttgtatgttcttggtctggtggatgcattttgatctgattgtaccccgaataagcatccatgaagcttaatatttcatgccctgctgttgcatccacgagctgatcgattcttggaagtggaaaacagtctttggggcatgctttgttgaggtctgtgaaatcaatacacactcgccatttcttgttcggcttgggcaccaatacgggatttgcgacccaagctgggtagaaagcttcaattatgaaattgttgttgcgtagcttttctacttcttcttttagggctagtgctcgctctttgtccaatagccttcgcttttgttgaactggccgaaaattgggatcaatattcagaacgtggaaatgatagaaggatcaattccgaccatatccgcatgtgaccaggcaaaaacgtctaggtttgctct

SEQ ID NO: 274666 - DNA, 514 bp, Cannabis indica
agtcagaaaccgcctggtcatactgtttcttcccattctccttctcgacctccaagtcgcgagacatctcctcgatcttcatctgggagttcttggcctcgagctcgacctcctccttagacttgcgaaggtcttcaagctccctgaccttatcaaccgcgtcttgttttagtttctttattctctcctggagctgggcattttgcctcttcagcagttcagcttccttagaactagcagcaacgactttcatgaacagagtcatcgactgcgaagccaactccacagagcgtggaacaagctcttcaaaagggatcctctccgccttggatatgaaatcctcgcccacgaacttctcctgcatagtcagaaaatcgtgggctcggatagttggctcgatcatgactttcttccccttgtcttgcgcgatcttagccagcttctttgaggaatccacgacaggagtagtgataacatcactcttcctcttctgagtagtgacgggcgatgtcgt

SEQ ID NO: 274667 - DNA, 594 bp, Cannabis indica
gaaaaggcaaaaattgagaaaatgaaaggcccggggaaccctgccaaaaccggcttaccagttttagcggccctgcaaaccggctagccggtttgcaccaggtttcccaaagccattcattccttgctcaattcttcaccaattgccatgaaaccttctagagctcctattcaatacataaacaataaaacccagccagtatttcacagaacaaaccattcaaaatcaaattgccattaaagctcaaagctttgaactcaatgttcaaagttgcacaaaacataacccaatcaaccaaaccagcagctaggaactaaaatcaactcaaataatctctaaaattcgaaccctaaacctaactaaatctaacagcccctattactcaaaaacacaagctcaaaccaaagaaaaagcttaaaaacacatcttcaagagttctagggctttaccttgctcaaaattcccaacacccttgcttaaaatccagcaaattccagcttgaggatgagcttcccctggttctagccccagccgaaagagaagaaagagagaaggagttctattttttttgacttttctttgaattttctcttt

SEQ ID NO: 274668 - DNA, 720 bp, Cannabis indica
ggactcagtatcgtgtgggacacggcagttagggttgtggtcaggggtatgggcgtctgatcataacccgggatttatgtatgattatgatttatgcttttcttactgagtctgtcgactcacagtgctatgtttatgtgtaggtaagggcaaggccaaggctgaggaaccgtgaggacgagccgatgaagattgtacatgtcggggcggttaggcctggagcgtacgatcctcgggacaacagcgcttttgtagttagtcgctgggcgacaagtattttgtaatagacagtaaactttttgtaaagtattttgtaaatgggatcccaaagtattttgtatgaaatattatataagtttaattaaaagcaaaaattttaattaatcacgatttccataaacctcgttgattagcaacgagctgcacagtacgtttaaaaatcacgtaatacgcctatgctagttagggtgttacataagttgttacaaaattaatttaaattaatttacaactcaaatttaattttctataaatatatattgcatttcgaaaaattaaagtatttaagaatacaattttcgaaaatgcatattaaaataaaaaataaatcttgaaaaattattctaatttatgttggcccaaaattaattaagcataaatataaatttcctatttaattaaatatttaagaaaatttcaaatatttaagtatcatgatga

SEQ ID NO: 274669 - DNA, 828 bp, Cannabis indica
tgctatctgcagtacctctgaagccatgagagatgagaaatgaagtgagtctatcataccacgcacgtggggcctgcttcagtccatataaggctttattgagcttgtacacatggtgtggatgatgtggatcttcaaacccctgtggttgtttgacatagacttcctcttgaattaccccattgagaaaggcactcttgacgtccatttgaaagagtttgatcttcaaaaaacatgcaatgataagaagtagccgaatggattctaatcgagccacgggtgcaaatgtttcatcaaagtcgatgccttcgacctgactatatccttgagccacaagtcgtgctttatttcgagtcactgtcccaaattcatcagacttgtttttaaacaaccatttcgtccctataacatttgcaccatctggtcgagggaccattatccagacacccagtctcttgaaatttcccatttcatcctgcatggcagccaaccagaactcatctaataatgcatctcgaacacttttgggctcaatctgtgacagatagcaggcaaaggctaacaaattctgcagtttacgtctagtgaccactgtatcattcggatttcctatgacagtggcttgaggatgagctttctcaacccaggatgggggccgtttttatgaactttgacctgttggagttcattggtcatggcactatcaacttcattttctcttcctgtaccactggcactggcttgattgtcacctgatatgcctgatgctgtatttagagactctgtagaagtatcagggtacacctgagactgtctagtgaggactgg

SEQ ID NO: 274670 - DNA, 778 bp, Cannabis indica
gaagtattttaggcttttgtgatctgtgtatatttcacacttctctccatagaggtagtgcctccagattttcaatgcaaagaccactgctgccaactctaagtcatgagttgggtaccttgtctcatactcctttagctgcctagaggcataggctaccaccttctcattctgcatcaacacacagccgagcccttgctttgatgcgtcgcaatatactacaaatttgtctttgttagttggaacacacaggacaggtgctgttatgagtttatctttcaatgtctgaaagctttcctcacatttatctgtccatgcaaatttttgttgctttcgagtcaaattcgtcaatggtgtggctatttttgagaacccttcaacgaatctcctataatatccagctagtccgaggaaactccgaacctcacttgcggtttttggttttggccagctcttcactgcttcaattttcgcagggtccacctctaccccatctttggacactatatggcctagaaacgccactttctccaaccagaactcacactttttgaatttggcgtacaattggtgctctttgagtctacttagagttagccttaagtgctcctcatgctcttccattgtccttgaataaatgagtatgtcatcaatgaataccaccacaaacttgtcaagatattccttgaatactctattcattaaatccatgaaggctgctggggcattggttaacccaaatgacatcactagaaattcataatgcccataccgtgtt

SEQ ID NO: 274671 - DNA, 704 bp, Cannabis indica
agtagatgtatggtggacgacggagcctcctccaacattcttttcaaatcaatatattgcaaacatggggctccaactcaccatcctgggcctttgctaccaagtgttagtatggcttttttcgccaaggcatcgtacctatcaggtatatcagattacccctcacaattggagaaaatccaaccacaaggacactgatggcgcagttcatcatgataaatgttccttcgacattcattgccatgattggccgactgcccctcaacgacttgaaagcggtgacgtctatcaaccacttgtgccttaaattcccaacaagtcatagagtggcatgtgtgaggggtagaccaacagtctgcccgtcactagttataacttgggcttatctaaggccaaaaaggagaatatgcctgccagaagtctagaaggtgtgccctacaaggggaaatgaagtctaggccaaggcggggaacacaaacatagatcctacgctttggggacccaacaaaaagcttcaaaacctgtagaagagttagaagaggtggaagttgatcccactcatccaataagaagactgaagattgggaaaggtttggctcaagaaatcaagcgagtcttgatgaatttttaagggcaaacctgtacctgcttgcatggtcacatggagatatgttcggaattaacatctctgtgataacccatgc

SEQ ID NO: 274672 - DNA, 378 bp, Cannabis indica
tttttctaatttttgaataaattataaaatgacttgatttaccaacataattcagccaatactctataaacattcagcttaacatattccacaaaagacaaaacacaaatgggcaaaatgaccattttgccctcacacactaaaatggcataaaaggggtacaaagggtattttgggaaattctaattcccgaccaatcccgacaattcccaatgtctaaataaactgtcccacagtactaaaatactaaattgtgattctaatgagccatacaccgcgttccatgttgccgagcaccgaaaatgcaaaattatgaagttccactatatgacataaaaatgcattctgagtttaaataaatcaacataaataattatt

SEQ ID NO: 274673 - DNA, 346 bp, Cannabis indica
ttattaaataatattgacattgaatatatttattaattagactaaccgaagtctcttaattaacaaataaaccttagaaactctttcttcacaatttatcccttgcttagtgaaaattcacaaactaggcagtctaattttagaattataattgattaatcaaaatcaattaactcaatcttacaagtagtattgtcttaactagtatggggaccatgggcctatatatccgagcttccaataagccgaccaagaacttactaggtaaattcactgatttattaatttcttgttgcatccacgcatagaacttggaattgcagtctcagctatatagaacgctcta

SEQ ID NO: 274674 - DNA, 697 bp, Cannabis indica
ctactcataagtatgttgtttaacatcctaaatatgaacttataaaacgattataaataaacacatataaagtatgagaaaccttacattgggtgcagcagaataatatatctccttccactaaaatctctaacccttgtatcctttctgtcgcagagtattatcaagatctgagccccaatgtccttcttgttgaatttggattcttcacgatcttccacactatgattgaggtaccacttgctgtgtgtgggcactactctatcactaaggggttcgaaacaaacaaagaggaagaaggaaagagaggtggcggctaggttagatagaaggctcaggattttctctgaaaggaataagatgcatcatctttttctgaagccatcactatctatttatagtatgccacatagggttaggtttgaattatttagcattaaaataatgaaaatattaaatgataaatcctacataagtggccggccatggcttgtggatatgggccccacttttgcaatttgctgttttatcatttctgtatctcatttcctcaaaaacaccaattttcaaattcaatcatttaaatgcaaatttaaactatttaataactataattaattattaaataatattgtcatttattttatttattaattagactaaccaaagtctcttaattaacaaatataccctagaa

SEQ ID NO: 274675 - DNA, 622 bp, Cannabis indica
ccatagctttgaagaccaaggacgtaggtggcttagttctaccgaaccttgtaaaaatcaagagtttgcaatttctatccctaaagtctttacatttcaagtctgttatttgtttatacttgtgattatctttgttattgcattaaacttgaatatttgcatgaattgtctttggagtttttaaatttctgaaattagtttaaatttccaattcacccccctcttggaaacatatcttaggctaacaattggtatcagagcaagggctcttgctagaaggtttaagcacaagtagagcaccatcctttgatgaagtagactttccttattggaaaattagaatggaaacttatcttcaatccattgattatgatttgtggcatattgtatgttatggtccttacattcctatgcatgttgtagatggtgtagaaactataaagaaatatgatgcatatgatgaaaatgataaaaagatgatgtctaagaatgctaaggctaagtatgctttaatatgtggattagatagagatatatttaaaaatattgagcaagcctcctcggctcatgatatgtggaaaatgttagaagtaacacatcaaggaactagtgccatgaaaga

SEQ ID NO: 274676 - DNA, 902 bp, Cannabis indica
aactgattttttgtcaaaataaaacctaataataatctgatctagagatgttatgacaaaattagttatattttctgtatctgtccgtattataaattatcttaaagtttgttgtattaaaaaaataaaattattaaaaattgagctcaggatcatatttttactaatttgaaaaatataaggtctattttgtcatttaacaaaacagagggtccaattgataatttttacaaaacacagggtccaacatggtatttaccctattaaatatgtacaaaaaataattatattatatacagtgtataatatatatgttcagtcggttctcagtttaatcggtcagtttgtcattgacactaaaaccgaccgtgttaaggcagttttaaccgaaggcggttttttcagtttttaattttttcggtgttcaaacggttgattcactcggtttggtcggtttcttgaattttttgctcacccttacactgcatgcaaatcgcggtttattttctagtttacattaatttaaggggtattgttatactcgaaatttggctagcaatcagaggaggacacgtgtgaaactgggaagaatacaaatcaacacacgtaatgatgattatatttgaaatagaataactcgttaaatgcgaaattgacagagtatatttataactcgactgattgaaaaatcttaggcgagataaagatatgcaaactgttgcctcgtgcattagtgagaaatcatacaatttcagatgtacaaggcgaggcgtcaacctcgctacgcattagaagacgagatacaatggccgataagacacttagcgtataatataccgtatacaaactaagtataataatcaggtaaacccatacaactaatagcgaggcgtccatctcgc

SEQ ID NO: 274677 - DNA, 531 bp, Cannabis indica
tgaaagtaaccaaatgaagtaagaaggttggcttttataggccagagcatgtgtgagacagctgtgatcagccaccatcgaacggctgggaaggcaatcgattcgaattccctggatccaacggttggattaaattgtcatcaaggcggtggaaacgcttgagtacccgtctgacacccattaatgcgtcgtatcaataaatggataagaaacggatcgacgcctgcaaaaagcgaataactgcagtaatgatggtcattaatacaccatcacgcgcccaaagcacgtgccaggaacccgcttgttgcccttgattttgctcaaaatacatggaccaaccgtatgatgacacgtggatggaaaagatttagcatttgaataaaacagctaagtctcctttagcgcaggattaccttagacatgcctcccggagaaggcatgtaaatcccctatgctcctgaagagcaagattgcaacaaagcatctccgggtggtgtcagatcctctctgaacagtcatctcgcatttaat

SEQ ID NO: 274678 - DNA, 579 bp, Cannabis indica
agatcgaaaccaggaaaataaaggttttcacaaatccaatcacaggaacaaacagtacaggggttcaagtcaatcacacaagtcaaaacctaactcaaaggcagggaaacaatgctactactgtaagaaagagggccatttcagggatgaatgcagggctctcaaagctaaacttcaaagagacaagagtaaagatagaggagatgctggtgtggcaactgatggatatgagtcagctgatgtcttggttgtatctagccaagaatcaggtgattcatggatacttgactcagggtgttcattccacatgacaccaagaagagatctgttcaccactttcaagaaattagatggtggatcagtcttgttaggtgacaacaaagcatgcaaggttgctggaattggaacagtgagattgaaactacatgatgatcaagtgagaagcatacaagaagtcaggtatgtaccagatttaaaaagaaatttactttccattggtgaattgattgagaagggtcataccataaagattgatagttctttcaaagtcatgaaagggtctttagttgtcatgaaagg

SEQ ID NO: 274679 - DNA, 524 bp, Cannabis indica
tgagttactaattcatccgatgactttccctgtatcaaccaacataaatgaaacttaaataaaacagtaaagaaactttaaaaaaaatataaaaaaacctaaacaataaaataagaataaatacctcatcagaaggacgacgatgaatggcattaaccttctcttggatatccttaattacagtcattacggatttgaaattaaaatcaacaaaacacctcaacgaaatgaagtcctcggccaatgatgattgattcgaaatgagcatctccagcttagatttcatccaatcaatatctgctgaatcagacttctttgaagatgacccaccctcgaaggattgcttcgctacaccacgttcatcaatagattcatcgagaaatagaccgtcaagttgaagctgctgcctctcttcatcagtaggacgcatgttttttatcttcaactgaacagcataatcaaacataatatgaaaaaaattaaaacaattggaaaaaccaaaaaacaacaacataaataaaact

SEQ ID NO: 274680 - DNA, 335 bp, Cannabis indica
ttggttaaatgtttatgtgaaaaagttatgaatttttgaatgaaatggttcattttgtttctgtgaagttgctggatgttcttgtgtgttttcagaagcttattcatgcttagttaagtagaattaaccaggttttattgcatgattagtggattttaaccaagttgagttttggaactcaaagcttggtctttaatggtgttttgtgtatctgtgaattctgggttagtttgttgccttggatttgttctatggggtatttagagcaggtctggaaggtttggaatcatttgggtttgatttgatcaagttaggaatttttgaaaaattcctgc

SEQ ID NO: 274681 - DNA, 945 bp, Cannabis indica
gtttggcagttttaattcctacggagttcatcgacctgacttgggcaagcaacccattggagacaactctatatgatctcaaaaattgtacctcacttgatgaagccaactcgtgattgtgcattgtgctgaactctttgcatttccaagtgttagacggttgtgtgagtaaaatacgcaatgctgcctgacatccggttctagtgacatcatgaggtcttttttttcttggtgtgtccggtgatgcgatttttttcgaaccctctgaacaacaaacccacctccgcattacaatgaccccatgagaacgtcgtacatcgtctttccttgtgccgaaacccatccgtttcgcatacatttcgtagaatgcttcccatttttccagtttgtcgagactcttgcctagcacgtcctgtatctcaatctcattcactggttttatgatgtttagctctgctgtgatggtttcccattcataagtgtgttcgtcattcatgttggcttgttattgatttgtaagaattgtagatgaggagtaaggtgtagagggtggtgaggggattgaaattagattttgtgagtatagaaggctgagataatagggttgtgtggagttggtgatcacatttaaagctgttgggctgatattaatgggcctcttcaatattacaatctgaactcaactcctctcgtacgtcataacagtataatagtacaaattgttttaatttcattccacatgtaattgtgaaataaggttatttgacgaaaaatttgaagggttgatgttattgagttgaaaggtttggtggtgggatttaaatagattggggttatgttaatgggccttcacctaagtttttcaatgagttgaaccatattcgtacgtccgaaataaaacattgtacttttattgtttttgaaaaaaatatgttaagaaagaag

SEQ ID NO: 274682 - DNA, 657 bp, Cannabis indica
tgcaaaagaaactaccacccaagctaaaagatccgggtagtttcaacatcccatgctcaatagggggttcgatacaaacaaaagctttatgtgatctgggagccagtatcaacttaatgcccctatctatgttcaaaagattgaaattaggataagccaagcccacaatagtgactttacaaatagcagatcgttctttgactcatcctcggggtataattgaagatgtcttggtaaaggttgataagttcatcttccctgctgatttcttaatacttgacatgaaggaagatgagaatattcctatcatctttggaagaccattcctagcaacgggaagagcattaattgatgtacagaagggggagttaaagttgtgtgttcaaaaagaagaagagactttcaaggtatttgccgcaactgaaattcctacttgttgtcaagtggaagttgtaaaggatgatcgagaagtaactgccaacaagaagaaagggaagtctaaagaacgctttcgaacttttcgacgacgtatgataagactgttgtgtgggaattatgaaggtgactctcaatctaaggaaaactttaaaaattgcaacattggaggtcagttttcttcgtttggcacaaaggccctcatggatgcgagaggtggat

SEQ ID NO: 274683 - DNA, 634 bp, Cannabis indica
gtgaaacattattattgggaagatccaatcctctacaaacactgcgccgaccagataattaggagatgtgtacctgaagaggagatgtattctatcctaaatcattgtcatgctttaccatgtggaggacatttcagtggaaccagaacagctgctaaggtgttgcaaagtggattctcttggccaatgctattcaaggatgctactacctttttgaaggcatgtgatcggtgtcaacggacaggtaatatcccaagaagaaacgagatgcctttaacaggaattttagaagtggaattgtttgatgtgtggggaatagacttcatgggtccttttccttcatcctttagcaatcagtacattctattggctgtcaattatgtgtctaaatgggtcgaagctgcagctacacctcagaatgatggtaagacagttctccgctttctacaaaagaacatctttactcggtttggtactcctcgggctatagtgagcgatgaaggaagtcacttctgcaacaagcagtttgaagcactcctttcaagatatggtgtccgacatcaaaactactttaccataccatccccaaacgtaatggccaattgaaatttctaatcgggagatcaagatgatt

SEQ ID NO: 274684 - DNA, 633 bp, Cannabis indica
ttgtcttgttagtgacagatatggacaaatgatctatagctaccaaattatccttatcacgacgaagaagatccatgataagagattcatcaagactaagggcattctcaacaacttgagcagaagcaagagacttttcttgggccttgagcaaatcattgacagagtcagtgaaccatgcaacctctgctaaaccacatttataatgcccgcaaagggtactcaacacgtcgagttgcatactcacgtcagcacgatgttttgaaatgtctgatgtggtcaaaagagaagatgacaaatgaagaatgtctttcatgcattcaatcacaaactttttggtatgctcattcaagtctgagttggtgattgctgaagctgacactgtcaacaccgggttcggtcgaggaataagcaaatctgaaggaacaagtgatgatggagtacccgtctttgctgagacaatcggttctggtggaatggttggctctgcaggcaatgcctcactgtcaaatcctttgttaacataatcatcagacccatcaaagtcgataagttgttcatccctagagctagaagctccgaagcaagtatcagatggtggcatttctgaactctgagttagtgggaagaaga

SEQ ID NO: 274685 - DNA, 681 bp, Cannabis indica
cgaacccacaccaggagcctaatttggacttatactgaaatccggacccgaacccaaactcagaccatgactcgaactccgacccgaactcaaaatcgcaaatggaactagaccaaactaggactaggaccaagaccaagagctaaacccaaacccgaagctagatcttaacttgaacctaggacccagctcgtgacctggcaacagaaatggaaacagactgggacccgagattgggatcaggatcaggacccagggcttggacaaaacccaaagctggtgtcataatttgggacccagccctggacccgaacccatacctggttctaaacccagtcccgaacccaaaagtgggcccgaacccgtaccatgtgacccaaaatttgaaccaaaatcagaagatgattgggactagtactaggatttggacttggaatcataattgaaattggaccaggacccggactccaaataagacctagacccgaattggtagccggaccaagatcccaacccaatcctgggacccaaaattagaaccttaacaagaatcgcggaaccaggaccatgaactagaatcctaaacacagacttggacttagatagggatccggatacgaaactggactcggaccatgacccagactggcatcgaaatgctggacctagatctggaccgag

SEQ ID NO: 274686 - DNA, 585 bp, Cannabis indica
acagctgttttacgttcgatctggtttcattatggttgcgtggccgactgcatcgatggagcttcattcatcctctccgtttgtgacgtgcggctgaaggtaagggcaagtggtatttttgtaatattttccttttgggctgtacaaatgttcattgggccggcccacaatattgttgtaatatttttccctttttagaatattcctgtttttttcccttaaaataattaaaagctaattttattttttatgaataatataaaattatataatatatttatgtaaaatttcttttatttgtgattagcacaaaatttaatcataatacaataaaataaaagcacatttcgaataaagttatttataataattaaaagctattaaaaatataatatttttttttaaatgaatcaaatatatattataatggtataaatttttctataattaaaaaaattattattttttatttattcatttatagcaaaacttaatttttttgttcatatatatttaaattaaatatttttatagtttttttatttatataaaattattaatttaagtattaataatttaaacatt

SEQ ID NO: 274687 - DNA, 558 bp, Cannabis indica
acgtgaacccacacccggagcctgatctggacctaaaatgaaatctgcacccgaacccaaactaagaccaggactcgaactcaatcccgaactcaaaagtggacccgaagtcgtaccccgtgacccaaatttggaaccgaaaccgaaagttgacggggattggaactaggacttggacttggaatcataactgaaattggtcatagatccaaaatcgtaactggaccaggatctgaactccaaataagacctagacccgaatggggagctggacccggatcccaactcaaacctggagtcgggacccaaacttgaacctgaactcagacccaaacatggaactagactagggacacagaaccagagtcgggacctagaaccgcacaccagtctcgctcccgaacccaaactcaaaaatgggacttgggaggtgaaccagaaccagaccgagacccgtgacagtgatccagatcttgacttgggattcgagtaacgaggcctagacaagttcggtagtcggtgtctagatcttgggctcagactaggaccagaacccag

SEQ ID NO: 274688 - DNA, 858 bp, Cannabis indica
tttccatgttagcaaaaagtgaccctctatttttatctctttacaccaattattttcccaccatggagagtaaaaaaaaaaaaagagaatttaaagagttgctttcaatatataatataatatgttattatagctaaaaaatcttttacactaagtttgttataccaccttttcgtgtgtatgtatgattttcagttacacagctaccaaatttaattatttcaatcaagaattggtaattatgatgtatgtggtggtacattttcactatctcccttataaaattccttcacttggactagaaagaaaaaagtgtaccaattctagaaactatgacttattgacttgactagttagagctctagtgttataaatctggtttgtatgtatttttctttttttctttttatctcattttaataaaattgaacttcaatggaattgtatggggtgggtcaaatttggtatatgacatatatgttaaagttatttaaatttgacacatactatagcatgtgctagctttataacataataaatattatattttttatttcatgatttttttctatttacgttggtttttttagagaataatcgtaaaatttaagtcaaacatacattactattggtcttataatgaaagtcactgtattttagtaaatcttatacaaatagatgttagaagcacaaagcatatattattttttttttggagggaaagaagcacaaagcatttgatacattaattaaaaagtaaaaaaaataatcataatacaagaaaagaaatgaagagattaatcttgccactcactcaatgatctcttggaaaactacaaagtatattctagtgtggat

SEQ ID NO: 274689 - DNA, 953 bp, Cannabis indica
aagtcagtgaatttacttggtaagttcttgatctgcttattggaagctcggatatataggcccatggtcccacactagttgagacaatactacttgtaagactcacttaattgattttgattaatcaattataattccaaaattagactatgtctagtttgtgaatttttcactaagcaagggcaaatttgtaaagaaagactttctagggtatatttgttaattaagagactttggctagtctaattaataaatatattaaatgacaatattatttaataattacttttagttattaaatagttgaaattggcatttaaatggttgaatttgaaaattggcatttttgacaaaatgagatgtagaaatgataaaacagcaaattgcaaaagtagggcccatatccataagccttggccggccacttatgtaggctttatcatttaatatttttattattttaatgccaaataattcaagcctaaccctaggtggcatactataaatagttgattcgaaccccttgagtgaaagaatagtgccgagacacatcaagtggtacctcaatcatagtgtggaagatcgtgaagaatccagattcaacagaaggacattcggactcagatcttggtgatactctgcgatagaaaggatacaagggttagagatctgagtggaatgaggcatttaattccgctacaaccactgtaaggtttctcgtactttatatgtgtttatttataatctttttagaagttcatatttaggatgttaaacaacatacttgtgagtagatctaagatcctggtagaataatttcaacaactggcctcaaaggcatggtaattgatttgcttgcaagaaatttggacttaaaacgatttgtgtgtgatttggattgtttcatgttgatttgtgtgttatatgatgattgattgatgtttgtgagattt

SEQ ID NO: 274690 - DNA, 620 bp, Cannabis indica
attttagcgatttagggatcaagtccatcttctttttcgagaacaattcatcttcccgtgcaccaccgccttgtggagaaagcatcggagctttccccttcgacgcatcacgtcttgaaggcggttgagcgagtggaccctaaacaaaacagaacataatatatcaaattttatccaaattctaccgaaatttcagcagcataacggctgtaattgaatgcccccaaaaattttaaacatgcctgtataacgacaaataacacagatataacagtagtttgttcatccatcccaccgcagcacatatattcgcagaacctacttcactatggttgaatattgaagatattcaaactccactaatcattaataattaatttataagagaagttacctcggatgttagaattaagtgtttaggccaaggaaggaacatctgtggtacgtccctaacatatctgcacccttcaattgagattgggatttcagcatcctcttgcagcatttccgaaaccagaatccgggcatgtgaatcatcgtagtccgtgcagtgaacagtgattttaccaacatgctcgtacaaatacactcgagccacaatattgtcgatgttgtcagag

SEQ ID NO: 274691 - DNA, 788 bp, Cannabis indica
tatatttatattttttacatttctttttatgtctttattttatatgtaattgactttttttttgtgtttgttgttttttgtgttggtcagtgtgaagaagtactccgatgcggacaacatcttatctccaccgatggatttttctttcattgaaatttccgagaagatgtggttctaccagcttcatgcttgtggtgaatttttgtgtgacagtgtaagaaactagttttttttattaatttttatgtgtttgatgtttgtgtagtttataattctgttatcggttctttcaaaaactggtttctcatacatgtgtttttttgctgttttgtagcatttagatgtggtattctattaccttaggaagaagattaagcaagacgatactttgaaccaaaggattaccactactgattgtttgtttgatcaagtcatatggatttcatacaatcagttcttgaaatcgggttctaatccttctaagattgactttgataatgtcattcctagatacattgttggtgagtatttgttttgcaatactccttgggtgcttactgaccatgttcttatatatgtcaatattcaaaagcaaaaatattggatattggtccattttgatatcaaggagaggatgttgaacgtatataactccatgtctggtgctctcaacaagaaacgcgccttggatcatgtcaaagcttattctactatgctgccgtattatttggagtatcttgatgtttattcttctaggtcggatcttaatttggttcaaggtccatatt

SEQ ID NO: 274692 - DNA, 468 bp, Cannabis indica
ttcagatctctagcccctgattcctttctgtagtagagcattatcaagatctgaatctggatctctttctctccttcctttgatgttgattctccttcttgttgtttggattctcctacagtcttacacactatgattgagataccacttgatgtgtgtgggcactactctatcactcaaggatttcgaaattgaagagaggaaaagagaagagagggtggcgcatggctttttctgaaaggaacaatatgcaaagtcatgagtttccttagccaacactttttatttatagaatgacaactaggtttaggttagaagtgtatggcattaaaataatgaaaaaataaatggtaaaggctttgcatagtgggcggcaatataaggaaattgggcctcactttgcaactttcccattttgttatttttcattcgcattttctcaaaaatgccaatttaaccatttaaatg

SEQ ID NO: 274693 - DNA, 368 bp, Cannabis indica
aatcacgtaatacgcctatgctagttagggtgttacagtcccggtgcttacttacaaccttgcattgggatagtaacttgtggacctcgccctccaagtattcaagctgctcgaagaggagtcgattagaagaaaaagaagcaaaagaagcctagagaattgcaaacagatgaatattaaagaggtataaaaacaataatataattgtaataacaaagccaacataccatgtgttggaaattattttaccaggatcttagatctactcacaattatgttgattaacaccctaaaactgtttctttacaattggggaccatgggtttatataaccgagcttctaataagtagatcaagaatttataacc

SEQ ID NO: 274694 - DNA, 541 bp, Cannabis indica
tttaattgaatgaaatagaatagattttgatgcatgattagttgattttaagcaagtgtagaattttaactcaaaactatggtttttatggtaaattgatgaaatagcttgttgtgcttgttgcatttgattgctgttattttcaaaggctatattatgcttgtttgagtagattaaattaggttttgttgcatgttagggtgatttaaccaagcttgacttttgaactcaaagcttggagctttaatggtgttttttgattttgtgcatgaagcttggttttcttgctttggttatgttccttagggtctaaatagcaggtctggaagttttggtatgaattggggttgaattgcatgagtagtgaatttttgaaaatttcctgcactgaaccggaattccggttcagggaagccattagcaaccgatcaaccggttggggcttccaggaattttccagaaccggaattccggttgtagaaccggtctaccggtcgggacatttttgggaaccctagttcttcccatttttgtgttgttt

SEQ ID NO: 274695 - DNA, 1508 bp, Cannabis indica
tgttgaatcaaatgtgtgtagttcaattttccgatgacgttggttgttttactttgtcgcagatggtggtacccctactggataccgagagtgctccgcactggtttgcggcgaatgtgagcatggttaatacaacagtggaaattagggactcgttgtcttctgcaatgcataagaggtcacgtcggagcacctgcgtagagatggtatgcacgtgtgtacacggtttgccgttttattagtgtaattgcactaatctcaactgtgattgttttaatttttttgcagctccagactttggaccaattgtttgcccctgtcaagccaggagacctgaatttcagcgagtttgtaattatttcttcaagcaaggactacccacaacaacaaaatggccacgattgtggaatgtttgtaatgaagtacatggaatcactgttcgaggaaaatgaaatattggaagaggtaatgtaatgttgatttctttagtttaagttttcatccagttaactaactgtttatgtgaaaattgagttgtcaatctattttttgatggatttgtttctatggatttggttgtcatgtgtattactgaattggtttcctaatgtacactgcagtttgatcctattgaagccagactggattgtgttgggaaaattgtcacccacgagagtaacaaggctaaacatgctgtgatggagggagttaagaagcaatttggattgagcaaaaccaaagttcttccatcaacatctacaactataccattacgtagtccatcaaggtctcctcgagacccccgattcagcacagcgaaggccaggtccgaaaacatgtggactggcaagagcaagtccccgaaaacacgtcattctaaaaggctggccataagtaacaagtagtatattcagtacaaaagttactttatttatatatttactatgttcagtacaatggttacaaaagttaggttttaggtcgtaaattatatttagtgagtcatgttatatacttgcatcatactactgttaggtgatttggaattgcactaatgttggtgattttataatttactatagggtaagacttgtggtagtttttagaatttggtggaacagattattattactgtatggtcattattattgtgaatattatttcggttgttatattttgccattactattaggttttggaattttttttaccataacaatatgtgaagtacattattctgaaaatgaaattaaccaattttacattctttttcgcactatctgttttagtccaatgatgtccatagccaaaataataaaaatacttatacttatgtactttcccattattattgtgaatattattactgttgttatattttgccagtactgttaggttttggatatttttttaccataacaataagtgaagtacattattttgaaaatgaaattgaccaattttaccttctctttcacactatccgttttagtccaattatgtccata

SEQ ID NO: 274696 - DNA, 745 bp, Cannabis indica
cgcggaccatcgaacacgggtagtgggcagcaacgttatagcactgcctagcctccccttgatttcccctcacagtccctatcccagcctcctgggttgggaatttcaggcacaaaagccgtattgacgtgactgcaccaaagtccaccaaggccggtcggccgaggattgcgttataagctgttgggcagtccaccaccacaaacgtgcagtacttgaaggtgctctggggtgtgtccgggcacaaggtgactggaagcctcacttttcccattgggataagtgttgttccattgaaccctgtgagttgggaaccacttggtgaaaggtctcggtccgttaggcctattgcagtgaaggcctctttgaacagcagattcacggaactcccattgtcgatcaggactctggccacgatcttattggcaatgggggtctctatgaccaacgggtcatggtgaggaaaacgcactgttttagcgtcttcttccgtgaatgtaatgggttgatccattagtcggggcctttgagctgggagttgagtaacttcccaaacctcatcgtgtttcacggcccctgcgtaccgcttcagctccttgcgggtagttcctccgatgtggggtcctcctgagatcatagccactctcccgttgagtctaggtggcaggccgggaatatgctgggcctctccgagggaaacaactggagccaatactcctgctgcaccccctggtgctccttgtgg

SEQ ID NO: 274697 - DNA, 521 bp, Cannabis indica
agaactctctctccttccttctttctctcttcgaaaccagcaaggccaaggggatttgctgctgaattttggagttttcagctaaggattcaagctaggtttaagtggaggtaaaccctagaccattatttacatgtttttgaagtttttctttagtttgaacttgtgaaattgagtttcaggggctgttagggttagagttgtttagggttcaaactttagggttcatttgagttgatttaagttcctagcagctggttttgttgatttgtttgagttttatgcaattttgagctttgagttcaaagctttgaggtttagtggcaacttgagatttattggtttgctctgtgaaatactggctggaatttattgtttatgccgtaattaggtactctggaaggtttcatggcaattggtggagaattgagcaaaaaatgaaaggttttgggaaacctggtgcaaactggctagccggtttgcagggccacaaaaaccggctagtcggttttggcagggtt

SEQ ID NO: 274698 - DNA, 498 bp, Cannabis indica
gagtattaatgaggataaagcccctctttgctttgagatggatgtggaacaaacggtggacgttgatggtacagaggagtctgtgtttgaaactcaagccaagaccatcaacgaggccgtgacaaaggcaaatttagttccaccaccaccagaacctgaagtacacgagccatctacttcagccgctccttctgctccaaccagtacaaccgtggacaatgaccttgcaaagaggttggatagcattcaggcccggctggagaagcttgaggcccagcaggaagccgtcatgttggcacagacggggttagtaaatagccatctcagtatgaggcggtccttcacggagagtcagaaagatctgaaggagactctactggctaagatggacgagttgatggcaatgctaaaaggagagcccacacctgcaccgcaaaatgaggaacgaatggagagtgataacgaagatgtcttcccagagattgggaagcagatgat

SEQ ID NO: 274699 - DNA, 765 bp, Cannabis indica
atgaagcttaacccgaagaagtgaatttgggttaagtcggggaagtttctgggtttcattgtcagtcagcgggcaattgaggcgaatccagagaaaatccaagctctcttgagcatgccttcccccaagaaacacaaagatgtccagagtttaaccggaaaggttgctgccctgagccgttttatctcccgatccacagacaaatgcattcccttcttcaacatcttgaagaaatgtcagaaatttgaatggtccgacgagtgcgagaaggcattcaaaaaactaaaagagcacatggctaagccaccaatcctatcgaagcctgttctcggagaggacttgttcctatacttggctgtctccgagaatgcggttagcgcgaccctagtacgggaagaggaaaaaactcagcatcccgtgtactatgtcagcaagcgcatgataggagcggagacgtgatacccggtgattgaaaaactagttttttgcctcctaatggcctcaagaaagttgagaccttacttccaagctcacccaatcaaagtattaaccaaccacccgctctggcaagtcctacaaaagccagaggcatccggaagactcctcaaatgggcaatggagctaagccaatttgacctacactacattccatgcatttccataaaagggcaggcattagcagacttcatcacggagtgtcatgaagctgaagctacggcaaacatacccacaccacaagtctcggcgtggaaggtatttgtggat

SEQ ID NO: 274700 - DNA, 495 bp, Cannabis indica
atgacgaggaggtgctgtcgggagaaagtcaagaaaagcaatggggcttttctggggaagttaaagaaggtggaggagagctccgggctcttcctgaggaagttgaagaaggtgaagaagagcaagaaattgctctgattcgcaagcgcaagggcaaaatgattgcccaggaagagcccaagcggcctcggagagctgacactccggcctacggccttgatggtggggtctctcccatggaagagcatcctgctcctcccaacattgtgctgactccggttcctggagacgaggcgaggcaagagctccggatagccaagcataactatgccatggacgaatactcccgggggtttgccgaggtggaagcccttaggagggttctgcgggttgaggtgcaagaaaccatcaacaacccggagtaccaggatccgtgggacctaaacttggaccccctgtcggactggttccgtcgcttccttgggcccaccttgg

SEQ ID NO: 274701 - DNA, 562 bp, Cannabis indica
acagttctatgtttatgtgtaggtaagggcaaggctaaggtcgaggaaccgtgaggatgagcagatgaagattgtacatgtcgggcggttaggcctggagcgtacgatcctcaggacatcagggcttttgttgttagtcactgggcgacaaatattttgtaaatgactagcaaacttttgtaaagtattttgtaagcgggatcacgaaatattttgtatgtaatattataagttttaattaaatagcaaaattttaattaatcacgattttcattaatctcgttgattagcaacgagctgcacagtatgtttaaaatcactttaatacgcctatgctaattagggtgttacagatgatcaatcgacacaacagataaagttataccgaaaacttatttaccaaaacaaattagaataaaaaaataataactataattctatactaatatatgtatatatacatatatatatatatacatatacggaacacttcttaatgggtaatacccatcaatgggtattaaaaaaaaagaatgatgtggtaatatgttgacttcctata

SEQ ID NO: 274702 - DNA, 475 bp, Cannabis indica
ctcatcaaacaaaagtagctcggtatttcaacaaacaagtgaaagctcggaaattctttgtgggagatatggtcctaagaagggtattcctaaacaccaaagatagcacgtcaggcgtactaggacctaactgggaaggaccatatcaggtggtcgaagttctcgactccggagcatccaaactgggtaagtatgacgaaaaaatgcaacttattctagtaccacgatactagaacatttaaggaaatactaccaatgagtactcaggtcgggtagaccacttcaaagtactcaggtcaaatagaccatttcaaagtactcaggtcgggtagaccacattaaagtactattgaacattcgcttataagtgaatggcctcttgggcggactacgcgcaaaggcttcagaaacaaaagtactcaggtcgggtagaccactttaaagtacagtttcttatttgttttatgtcatgtta

SEQ ID NO: 274703 - DNA, 684 bp, Cannabis indica
agatataccttgtttctttgctagaaacttaggtcattgggatttccagtggcccttttcattgcaatagaagcattttccttttggctttccatcaggattagcagcctttttctttttaactgttttcacagcttgatcaggcttcttgctattcttccacttcttcttattgttgggttttgaagtagaggcaatgtttgccctagccttagccataccattagcaatcccagaattaggagctttagctcctcctttctgtggtcctccaatcaaattttcaaatgtctgaaggttgttgattaactcgtggaagtcaagctccaacttgttcatgacataagttgaagtgaagggcagaaaggctggagttaaactgttcaagatcaaactcacttgagttgtctgatctataacagctccatgattctcagcttcctgaaagtaactagtcatctggagaaggtgatcatgcacgctttgatgaggtctcaattatgcattgatgaaattcttagtcgcatcaaagcgagcttgaattgatgccatcccgaacagttcagttaactggctcatgatttctgcagccgtgagagtgtttgcaaaccttgttttcaaggtgtcaaccatgctagatagcataaagtattgagctttgttgttagcattatgccaacgctc

SEQ ID NO: 274704 - DNA, 703 bp, Cannabis indica
tggttttttgtaatgttgtttaaaatgcttgtgtctgagtgtctttcgctcactataccgctccgccatcaccgaatataaagtccccataagtaggtctcggtggggattcccatcgatatcaaaatagtactgtgtaataaaataatttaaaattatgttaatttataaatgaggacataaaattattacaacctttaataattaaaaatcactcactcttattcgattgagcacttgatccttgtattgttggggtacatcagaaaaatttagatgaccacccgggcacaacatgcttacttgttggccaagaaatcgaacataattgcttgcttcagtgccaacaactttgccagtttcaagatctacctccaccggtaagggcttaccagcttctctcctttttttttcgaggttagcgtttgcggcaaccccacgaccctttctgaccggaggtggaactatatatattcgagagaaaaataattttattagtaaatcatacattcactatttatattcagaacaatgttagatttgaaaaaatatgaaacctgattcgcaagacgacggtaccctagaaggatcagggggatccctgccatcaccatccccaccgtggtatgtcgctaacgtagctgacattttactttactttgaagacggaaaaaaatgtaagaattcacaaatgtgaaacaca

SEQ ID NO: 274705 - DNA, 515 bp, Cannabis indica
agaatggaacctttgtatgaaaggtttcagaaacaagcaccttcgatctttctgggaggttcagatgtgatgaaggccgaacagtggctaacggtgatcaccaaaattctgaattttatgggtgtcaccgggaatgacagagtggtgtgtgccaccttccagttccaggaagacgctcttgtctggtgggacatggtgtctcagattcacgacgtcaccaccatgacctgggaaaggttccaggaactcttcaacgccaagtattataacgaggcggtcagaagcgccaagaggaaagagttcagccacctgacccagcggcaaaatatgattgtgacagagtatactactcagtttgaccggttggcgaggttagcctcgggaatagtgccaaccgatttcagcaagaaggagaagtacctggacgggttaaatgcgaagatcaaacacgacttgatgatcaccactgatgatgtaaagcccgcttagttaatttggaaattagcagttgttta

SEQ ID NO: 274706 - DNA, 568 bp, Cannabis indica
tgaattagcaacataattagttttaaaatatatgaaatttattttcattagattattttaaaattaattttagaaaaatgcttagtttaatgagatatattctagttagttaattctagtaactatttatattttttaatatttaattaagtaaaaaatatatttaagttgaaaattaattatttaattaattctagaccaacttaaattagaatatttttcttagatattaaattagaactaataattgaattgattttattcaagatacttaattatttgtttcttttatttaatacattttgttgaccgagattttcggcaaccaatcaaataatataatgagaagagctgtagaaagtttaatgcatcggatttttacgtggttggggcattaatgagccttagtccacgagtcttttgtatttatgagagtgtttattatagagaatgttcttggtggatctctctcctcttttctctcttcgattccttaacttaaaatcgatcgacccctttttagtctgtttgtggggtatttataatgtttttctagggggatccctag

SEQ ID NO: 274707 - DNA, 465 bp, Cannabis indica
aaatcataggaatacatttaatcacataatcttgattactttccactgtgttgacgatacaataaacaagaatatcaatgtgataaggatttggatgaatttataaatcaaaaaaacatataaatgatcacatgaaccaaataacatactaaataagcaatgaaaataaatttgtttctttattgataattgaatagaaaagatttcattgaaatagagttttatatagggcacaaagcccaacggacatgccacattaggtggaaaaaatttgggataacatttccaatatgagttaaagattaaaagcaagttgaatatgcgatagatttcaagtgacactttgttccaggaaggaggttgaaaacttattaaaattcagacgacattttcatttaaagccacaaaaaatataaaaaatttaaatgtaaacaaaattaaaaactattggatttgtgccctaaa

SEQ ID NO: 274708 - DNA, 520 bp, Cannabis indica
atatttagactatcataaaaaaaataatgcctgaatatttttggttattacaaccaagtagcccttgcaagactgaccctgaagctaccacatcctctgattgcagctcactcgccaatcgtccaatgcatactccttttgacacggactaagtatggtgcacccctcgggatgaggttcgcaaaccaaccgttcccaacggcacctacaaaacacgcttccactgaagccaagtccctctggacaagtccctccggaaacttcacacgccaactctatggcgcaccatcctcctgatggaaatttagcaagacactctcatcgcatgataaagttttggtgcgtcccacctggacgaggctcgcaagccaactgcacccaatgcagcaccaagtgcactcttgcacccaatttcttcgcgaagttcacacattggccctccggcccaccgcatacccacggcttcatgcaaaagccccactaaacccacctgcacactcgctcctcctgagctcctcgc

SEQ ID NO: 274709 - DNA, 752 bp, Cannabis indica
ccaaatataaatctagttcagaacttcatattttctcttactcgataggaagctctaacatatctgtcaaagttagaaagagcatccattcgccgtgtcgaagaagatgatacattatctacctgaacccttctctctctcaaatcaggaaacttagacccatactcctccagtaactcgcaacaaagctcacgaatatttgcaatttgagttacatattgctcatctccatagattacagggaaatagtattcgagcaacataaacttgtatctcgggtctaaaacaaccgccacacacataagcccatgaatctctttccaatatttttgaaacttagacatcatttgagttgccatgtccttaataaaaggcacatctgatgacatccatgagtcaatatttgtcttaatttcacaaattttagggaaaaaaatattggcggtagggtactttgttccagagaatagctctgtcacttcatgaaacacctctaatttatcacataattgttgagcattttgccaatcaatttccgaaggggcacacctcaatctcaactcacgtaaccttgcacgttcaaatactgtcttgtacgataaagctgtgctaagcattagaaaagtggaattccaccttgttacacaatcaagtgatatttttttggtgtatggtactccaagttgacgagcagtgtcctcaaatttttcatgtctttttggtgtgcccgaccaataagcaacactgtctcg

SEQ ID NO: 274710 - DNA, 535 bp, Cannabis indica
tcccaagttccaatcccgatctgagtctggattcagttcttggtctaagtcctttgttctgatcttgctatgggttcgagttttggtcagggtctagcattgggtctgattccaggtgtgggtttgagttcgtgtccgagtctgtgtctgggtttgtgtccaggcttagaccccgatctgggtctaagttcgggtcaatgtccaagttcgggtcccgagagcgggtccaagtttgggtctcggtcaagatctcggtccagatcgaggtctagcatttcgatcccagtctggatctttgtctaagtccaggtttttgtttgggataggtaccagatttaggtccaggttcgggtctctattgcggtctgggttcacgaccgtgtccaggcctgagttccagtctcaattttggtctgaggctaggtctgtgttcggttctaggtctgggtccgagtccagatcacggtcgtagtcttattctagggtcctggctcggcgattcttgttcaggttctaattttgggtcccaggtcta

SEQ ID NO: 274711 - DNA, 952 bp, Cannabis indica
tttttgttgtttcattactttttcttctgtttgtgcttcattttaaagtaatgtagttagtttaggttcaatttgtttgatttcgtttgaatttcattgttttggtatattttctggtttttgtgcaaaatttgcgacgtagggcgactatgttcacgacataacgcgacatcgtctagaaaaagttagggattttctgttaaacgtcttttcacgacgtgttgtcgacatactagcgacataattagcgatattgattttagtacctaggtttcatgatttttatcgacttgtatgtgtgtttggcgacatgttttgcgatatattagcgatatataacagttatacataggactagttttgcagcctctttttttgtgtttagcgattcattagcgatatattagcgacgtatttggcgatttgatcaggattatgtttagcgatgtatagcgacatacagcgacatgtttcgcgacatacttctaacaaattttttgacaattttgcagatggctcctgaacttaaacttccaattacctctcatttcacgggacgtcttacctatcggggtacagataggttcagatatatcaaggccaagtttactgagatggatttggttgagacagtgaaggctagtcctttcggacacttttgggaagctggagagttaactttctctggcgcgttggtccacagcctcctcttacgaaaaatgaaagtggacacagaaaaggaggatgaggtttggtttcatgtagggagaaatgacatgagattcggacggatagagtttggactcattactggcttacctatgggtagtgcccctacagacgaggaaatacacgccaagtccaacgaccatctagttcggacttattttgaagggaagagttctgttcagttggactcccttatgatccaacttgagaggtgcgaagataa

SEQ ID NO: 274712 - DNA, 535 bp, Cannabis indica
ttcgtttatccgaatccctcaaatataaaggtacttctaacccgttagattacctagaaaagtttaatactataatggaagtggaccaggtaccgcaacttgcgaagtgtcgcattcttgcggcaacactcgaggagaatgcccatgattggttcacccaattaccagaggcatcgatatcgacgtgggaaaacttcgtcgacttattcctcacacatttccaggccacaatgacgtataggccaccctatacgactttggccaacatcaaacaagagcctggtgagtctttacaagattatttcaagcgttttaacgccgaagtaacaaaggtcgagaaggcccccgagtcttcgcttgtttgcatgttaattacaggtatcttgccaagaaccgacttctggaaggagctacaggcccgaaggccggaatccttggtagagttcttcgccatggccgaacctcacaagagaatcgagaattctctggcagagttagagaagggcaagaacaaacgacaatcacccataccgcg
